United States Patent Application Publication US 2005/0153317 A1 - sequence listing, part 7

SEQ ID NO: 27830 - DNA, 599 bp, Chicken  19866894245220_1
  misc_feature (1)..(32): n is any nucleotide
nnnnnnnnnnnnnnnnnnnnnnnnnnnnnnnngcttgatttcctcctgtatgaggtgacagaacctgaatcctactcagttctgtgagtaagaggaagctgttggttcacatgtagcagcttgtcactctgcaaggcaggagtacccagaatttgcatgcctcttgctctgactgttgtttgactgcctttgctctacaaactttcattgctagcaaaagcagtctggttttacttatcatagaatcatagagtcaccaagattggaaatgaccttcaagatcatccagtccagacattmatctaccaccaatatttgtgtctgccaacacaacatctaaatgttccttgaacacttccagggacgatgactccaccacctccctggacagccctttccagagcctgatcactctttcagagaataaatttttcctaacacccaacctaaatctcccctggcacaacttgaggccattccctctagtcctgttggtagcagaaaaatttatgttgagaaacactkccaaagatcttctagtccaaccccagttctaagtgctcacccagttctaagtggagcagttttctcagggccgt

SEQ ID NO: 27831 - DNA, 600 bp, Chicken  19866894245220_2
tggttttacttatcatagaatcatagagtcaccaagattggaaatgaccttcaagatcatccagtccagacattmatctaccaccaatatttgtgtctgccaacacaacatctaaatgttccttgaacacttccagggacgatgactccaccacctccctggacagccctttccagagcctgatcactctttcagagaataaatttttcctaacacccaacctaaatctcccctggcacaacttgaggccattccctctagtcctgttggtagcagaaaaatttatgttgagaaacactkccaaagatcttctagtccaaccccagttctaagtgctcacccagttctaagtggagcagttttctcagggccgtgatttagagaatcttgaacacttccaaaagtggtacccttcatatcytgtctagtcatttcattacagcatttgaacaccttcgtagtaaacatagttttccttctgtctaatcaagaaagaatttgtctctktctttctgtcctctgatcaggtgtctgcaggcagcactaaggtgtcaactgtattttgttcaggataaatatacaggacttttagtctctccc

SEQ ID NO: 27832 - DNA, 589 bp, Chicken  19866894245220_3
cttgaacacttccagggacgatgactccaccacctccctggacagccctttccagagcctgatcactctttcagagaataaatttttcctaacacccaacctaaatctcccctggcacaacttgaggccattccctctagtcctgttggtagcagaaaaatttatgttgagaaacactkccaaagatcttctagtccaaccccagttctaagtgctcacccagttctaagtggagcagttttctcagggccgtgatttagagaatcttgaacacttccaaaagtggtacccttcatatcytgtctagtcatttcattacagcatttgaacaccttcgtagtaaacatagttttccttctgtctaatcaagaaagaatttgtctctktctttctgtcctctgatcaggtgtctgcaggcagcactaaggtgtcaactgtattttgttcaggataaatatacaggacttttagtctctccccctatggtggtgtgctccttccagctccccagttagcttggtggcccctgtgagattccagaatatcagtattattcttgtactggagctcataccttgatacagtagaa

SEQ ID NO: 27833 - DNA, 503 bp, Chicken  19866894245220_4
tcctaacacccaacctaaatctcccctggcacaacttgaggccattccctctagtcctgttggtagcagaaaaatttatgttgagaaacactkccaaagatcttctagtccaaccccagttctaagtgctcacccagttctaagtggagcagttttctcagggccgtgatttagagaatcttgaacacttccaaaagtggtacccttcatatcytgtctagtcatttcattacagcatttgaacaccttcgtagtaaacatagttttccttctgtctaatcaagaaagaatttgtctctktctttctgtcctctgatcaggtgtctgcaggcagcactaaggtgtcaactgtattttgttcaggataaatatacaggacttttagtctctccccctatggtggtgtgctccttccagctccccagttagcttggtggcccctgtgagattccagaatatcagtattattcttgtactggagctcataccttgatacagtagaa

SEQ ID NO: 27834 - DNA, 600 bp, Chicken  19866894245225_1
tatctcccagaggcttctgtgtgcaattagccattggattcaccaagtaattacttcatttttcatgtaaaatgtgcttgatttattatatactggggaggggatggcagaggtaggtcaacaacagtttgaggagattagcagggagattctctgctgctgtgtgctgccagtccttggggacactgtctgagtgggagcagtgccattcatgccttggcagtggtgcaccgtttgactttgccactcctttgtggtgtgaatatgagtgcctgtgggacagattgtaatccccacccwggtacaggtgccagcaggctgttgaaatgataaagttgtgtaaaaaatatatgtttggaggaaaaagaaaaggacttttttcacagtagaagttgtgaatggtattagaagctgtcagccagrcagaggagttacagtgtattgggggaaaaatgttgactgtcatcttttcagacaggtattatttactctcagtgctctgggttaatggctttttaaatagtggttttaaaatagttatgctggaaggatgatagggagtaatgagactttttttcccctcaaaatcaaaaaccataa

SEQ ID NO: 27835 - DNA, 600 bp, Chicken  19866894245225_2
acagtttgaggagattagcagggagattctctgctgctgtgtgctgccagtccttggggacactgtctgagtgggagcagtgccattcatgccttggcagtggtgcaccgtttgactttgccactcctttgtggtgtgaatatgagtgcctgtgggacagattgtaatccccacccwggtacaggtgccagcaggctgttgaaatgataaagttgtgtaaaaaatatatgtttggaggaaaaagaaaaggacttttttcacagtagaagttgtgaatggtattagaagctgtcagccagrcagaggagttacagtgtattgggggaaaaatgttgactgtcatcttttcagacaggtattatttactctcagtgctctgggttaatggctttttaaatagtggttttaaaatagttatgctggaaggatgatagggagtaatgagactttttttcccctcaaaatcaaaaaccataaaggaacttcttcacaaaaagcactagctgctaaagatatgcatctgttagattaaattctgacaaaagtatcttcataattatagattgaattctctagaaacaaacaaacaaacaacaacaa

SEQ ID NO: 27836 - DNA, 590 bp, Chicken  19866894245229_1
aatcagtctaccttagaaatagcaatgccactgacacttttatctgcttggttttcattctattattggctgaatctttttctactggacagatgcaaatgtatatcttaatgctacaaaactattgttatctattttgcataacatttgcaaaattggaaaaatattgacttgtgttgcttagcataatttgcttttttttttaatttatcccatcagattggagttctcaaaaaccaggtccatgttgttgccctgtcattactggctgttagattgctgtgctcagtaaccccaacmtgagatagttcgctcttttttgccccagtgttattcaactcatcaagtccccctgtgttctgacagacagatcagtaatgctatgccagatgccatgtgaacattgaggctttcttaatgttgtttagttgttgaaaacctggtgacatatttctctcccccaaatagcatctctatttatttttagagacaacctaagatgaatgtgtgtgtacacacataatcagatattgatttctgtgcaaaatgtttgtaatttacttatggcagaaataatttaaagcagtttt

SEQ ID NO: 27837 - DNA, 600 bp, Chicken  19866894245240_1
gagcttgattacttgaaaggcaatgatttaatacaggtgcacctggagcagtaggtgaacacaaagcctgagcgcactgcaggtaactggagtgggccaaatccttccctgtggtgcaggtacccatgtggcaaagggatgtgctcagcagtgcagggtgcatcacagcacccctagcagcaaacaggtagcgagtggggaaccgtcctgggtagtctgggtgtcctgctatccctcgttgccttccctgcagaagccagggtaatacttggtccgttttccccacatttaaccccacamgttggagctggtatcccagcaagcactttttgttcgtcaaaggtataaaaagatctcttttcactcttattctcttagagccatctgttcaaaacactttcaaaacgatggcaattagagataagagctaataatgctccaacctgcacgctgagaaatgccatttaatcactgttggctgggctggcaaataaggagcagcatccaactggacaagggtgataaagctcccatgccggctcggatgaagagcccagctgcagwgtttgccaccgtgaattgtagctgcaagacctggaa

SEQ ID NO: 27838 - DNA, 554 bp, Chicken  19866894245240_2
atacttggtccgttttccccacatttaaccccacamgttggagctggtatcccagcaagcactttttgttcgtcaaaggtataaaaagatctcttttcactcttattctcttagagccatctgttcaaaacactttcaaaacgatggcaattagagataagagctaataatgctccaacctgcacgctgagaaatgccatttaatcactgttggctgggctggcaaataaggagcagcatccaactggacaagggtgataaagctcccatgccggctcggatgaagagcccagctgcagwgtttgccaccgtgaattgtagctgcaagacctggaatctggcctaaagagctgatataaatccagcaaaataaatctttcactgctgcctgtggtttcacgctgccttagctcaactcttttacctaatctctgaccttcctttgtaatttttcatatttcccaggtaaaatgcagggtgctcattagcaggaggctgagctgagagcaccagggagttcatcctttctcctgagggacaaaaactgggctggg

SEQ ID NO: 27839 - DNA, 599 bp, Chicken  19866894245243_1
  misc_feature (1)..(88): n is any nucleotide
nnnnnnnnnnnnnnnnnnnnnnnnnnnnnnnnnnnnnnnnnnnnnnnnnnnnnnnnnnnnnnnnnnnnnnnnnnnnnnnnnnnnnnnnttttgaaagagtatttaaataaatcccccatgatgtgcttatgaaattttgcaaagtccttcttctagccaaacatgttatttttcttctttgttttacattttcagaacagctccctctgctctgcactggagctggagcgaattgttgagcacctgcccctgtaaggaggggcatttaggtctgagagataggaacagtgtctatccagrgtggcckcatcccacctgaccccattgctttcccttcaccactgcccaccagctatcaaattagtgctggaagtgctgaatagtgctgcccaccagccccagtcatttcctgggcactgccatctgctgtcactgttgttcttcccaggagcagtctgaacaggtttggtaggcttcttactcaccccattacccattcctttctggctctggttctggtagtgcttcttgatctctctttagaccaaagcacaaaattgagcttgttcccacggggagaagcatggagcttcaggtcc

SEQ ID NO: 27840 - DNA, 599 bp, Chicken  19866894245243_2
  misc_feature (1)..(81): n is any nucleotide
nnnnnnnnnnnnnnnnnnnnnnnnnnnnnnnnnnnnnnnnnnnnnnnnnnnnnnnnnnnnnnnnnnnnnnnnnnnnnnnnnttttgaaagagtatttaaataaatcccccatgatgtgcttatgaaattttgcaaagtccttcttctagccaaacatgttatttttcttctttgttttacattttcagaacagctccctctgctctgcactggagctggagcgaattgttgagcacctgcccctgtaaggaggggcatttaggtctgagagataggaacagtgtctatccagrgtggcckcatcccacctgaccccattgctttcccttcaccactgcccaccagctatcaaattagtgctggaagtgctgaatagtgctgcccaccagccccagtcatttcctgggcactgccatctgctgtcactgttgttcttcccaggagcagtctgaacaggtttggtaggcttcttactcaccccattacccattcctttctggctctggttctggtagtgcttcttgatctctctttagaccaaagcacaaaattgagcttgttcccacggggagaagcatggagcttcaggtccatttgaa

SEQ ID NO: 27841 - DNA, 599 bp, Chicken  19866894245244_1
  misc_feature (1)..(114): n is any nucleotide
nnnnnnnnnnnnnnnnnnnnnnnnnnnnnnnnnnnnnnnnnnnnnnnnnnnnnnnnnnnnnnnnnnnnnnnnnnnnnnnnnnnnnnnnnnnnnnnnnnnnnnnnnnnnnnnnnntacacccataaataattatttaaacgagctctccttggaacagctgctgggtaaactgtcctaacgcgagcctgaggtgcggtgtgaaatatggtgatagcctgctgtgtgttgatagttgttgtgcagtaatcctaaacaggacgtctggagaaacacccttgtaatcgtgttgccatatgcagycgtgcgcttgagatcttcccaatccatgcggttagctttcagagctgcgttactgactgatctaactcggtatgcttgatcgctgtgtgctcagaacatatggtttggaatgaattatcccaatccagtctttccccgaaggcattcccaagaccttcttcctgctctgagcactactctataagaggtggaggtgctttagggctgaaactgctttctgtgcagctgacccacttgctttgcctggtgatgtttccatttttctctctgctctgctgaggttttgctgtgttttaatt

SEQ ID NO: 27842 - DNA, 600 bp, Chicken  19866894245244_2
ctgctctgctgaggttttgctgtgttttaatttaatctctgattctgctaaaaaccagagctcaggacctcatctgttgcctgagcatgtcaagctttcttgctgtcatccgagggcacgctctgcttccccactatttctggtcattttgcaagaatccagatgctgctgcttttactaggtaatgaaagcccagaacattttgcttccttgtgagtaataatgcattttaattgtcctgaattcagtatgcctaaagtcattttctcccctcccaaagcactataatcctgtgggacratttagaaacccatcccctgttctctctgatctgttcccatgtccttcgtgtccttgtctttctcacgactggattcccagaacagagttgtgccttcgtgaagcactttttggccaaaacttctcagatgtagaaaatttacacgctggaaaatgcctatgtcttgtcagctactcactctccgggccaggagaggaaaaagcaaactttgcagaatgcagtcacaaagacttctgaatgtgttatgtgatggttgctgcttgccttggtctcttgttgcagaagttgtatcccatgtt

SEQ ID NO: 27843 - DNA, 599 bp, Chicken  19866894245255_1
  misc_feature (1)..(84): n is any nucleotide
nnnnnnnnnnnnnnnnnnnnnnnnnnnnnnnnnnnnnnnnnnnnnnnnnnnnnnnnnnnnnnnnnnnnnnnnnnnnnnnnnnnnttcttgagatttatttaagattcatccagaattaaaatataaattattaaaaaaaaatatacggatatctcacggtacctcaagactactacaagcaaatgaattatcaggggatcttaatgtgcttctatattatttgaaaaacatatgtttataattttaaagattttcttttaaatacagtaatgttgttctttatcagttgtgagtaattgmtttgaaattcaaagaaaagttatgaaatccaatagcaaataattatgtgagcatttttccataatgagcaagcataaactgagtttattaatatgacaggtgcatattttcaagctgagataaggtattgttataataaataaatgcataacaggtgtacttatttatacatgtttatacacataagtgtatgcataactatttgttttataaaaatgtatattaataaacatatatacttatcagatctgaaaacacagctacaaaatgtacatccttattaagtaaaagttcaggct

SEQ ID NO: 27844 - DNA, 600 bp, Chicken  19866894245258_1
agagtcgaagttagtcctgataacaaaatgttgttctttggattcagagataacatcctaatcaaattaggataggaagaagcagcttgctcttcaagaaacgttgcttttatgttgtctgccaacttaggcaagtactattgcattagctattgattagtcagtggaggaaaaatttgaacctctttgagaaaacgaatagaggaaattgttcagagaagctatcctggaagaggagtttggaatgctcaagtgtagggaaacatagaaaccatcagtgaacaaagaaggaaagatttrtatcttctgagtgttctccttggttacccaaaaagaggaaaggaagattttgaaagaaattataaattcagtttgtgatcctttgtttctttgtttgttttttaaataacatcttttagaagtgaagttcaactgtaatcttagtatagctggggagaaatggaacccttagagatgagtgcaatgtaaaaaatcttgacctgaattttaatagagaatacccagatgtagggacaacattttgttaagttcactgtgtttcagttaccattaatagtccacccagtcctgcaaagttct

SEQ ID NO: 27845 - DNA, 600 bp, Chicken  19866894245266_1
gtgggaggggaaatggctggatcataactggaagacttttattccccaaaacgacctcatgtttagtgaaaattgtaaggcttgttgtgatatttgtgaagttagcactgctcagccaactgtgttctttattccattttgactgaaaactcactaatccgttataaattcagggctgcgctcgtatactctcattttaaatcaggttcagccaacaaaccaggatgaaaccttcctagatttttctgcattgtgttctgaaggtgataacaaaagagaatggtcttttctgtggaagakctgacagattttttccacgtgaaggactttcattgtcagttttattctgagatcacaaacacttgagtcatgaagcgcatcccttccttcaagtacttccaagtcatcatctgcctgtgtatgttactgtgtttaaatcagactttatgagttctacagatgagcaggaacagggccatggacacccggagccagaacagaaatagaagaaagtgatcagctcagagcccaagcagacgtggatacgtgtttccctctggaaaccaccagtatgcatcaaagaacagatttaaccacata

SEQ ID NO: 27846 - DNA, 600 bp, Chicken  19866894245274_1
cactgagacagctcaaactgtacagtgctcagatagaggaaggattataaatctgcagctataaattctctgtataccaaaagaaagttcttgttcttattgctgttttcattgagctgctcaaattaacagtactaagggccccatgtgctctttctgtctgtatagcagggccctgaagacaccaataggccttaatggccctgaccagcttcagctggggtctccacccatagccctggcttgccctcaactctgccttttccccagagaagtgcctgatgcactggattggggttsctcctggctccctggcatcaggggacaagctgctgatgaagtcaggtattcctctggtgtacagttgtgtgtgtatgcagctgtaagatcctgttcctctgaacctgggaggtacctagtcttggctcccagttctaggctttctctgtcttatagcccaaatcaggctggttttggcactgctttgtttatcctgagggtcaggctttgcgtatttctggctgtgcttaggccttcctacttgtttttgcggttcctccttatttacttctctttttccttccaacactgctccctgga

SEQ ID NO: 27847 - DNA, 600 bp, Chicken  19866894245280_1
agcaatccaatcgctttacttctttgcagttctaaccaatgcagactgataataattttgaatttatttcctgctgtcaaattactctaatttgtacttgatgaggagcttgttaatgcagaaccagcaacaactactgtgatacataggaagttcttcttgaaaataggaagttccatactcataacatatggagtgacttctttataataagggtgacagagcactggaacaggctgcccagaggggctgcagagtctccttctacggagatattgaagacccctctggacttcagtrggccaataccgccaataccgccaatacctgtgtgacctactgtagggaacctgctttagcaggggggttggacttggtgatctctcgaggttccttccaacccctgcaattctgtgattctgtgaaacaagtggagccctttgtgaagaagagcctggaaagagagggtcaaactattgcatcctggagagcttcctcgtcaggcagctttaggaacacagtcccacagaagaactcattttgcaacaatcccaaaatctggaacttctcagctacacaccacaaactcatcaggccaaa

SEQ ID NO: 27848 - DNA, 600 bp, Chicken  19866894245286_1
ccacattcaaaatttaatcactcacctgtgtttgcaatgaagcttgttatcaagccttgctaggtgctccaggcacgaaaagcgcactgctgccaagccaaactcctcacacacgtctattagcaacttctagctgaaccagcagaaacagcaagctggctgcctgcctctctcacccagatgttaataattaaagcaccagaggctgctcagcacctatccaaaagcagccccgtgcctcctgccccgcacgcagtgcagggatgcttgccgacctatagcttgcagcttggggagaaygccacgtggcagatgtcatgctgggcttcttttttttccaagccgtaatacacggcttggacttgttttrtagcaagcatgaggacaggtgattcttaactttgtcttctctccatctaaacrcagtctggaatggcaccraggctctgaacagctccttgacaggtggggcaattgcctactggcgcatgtaattaaaaactcattaaagcagagctcattttcctcattattttaagcacttaagtcatctttactgtttaagatgacaagagtgagcaggctgggagagagctgtcc

SEQ ID NO: 27849 - DNA, 600 bp, Chicken  19866894245286_2
aggcacgaaaagcgcactgctgccaagccaaactcctcacacacgtctattagcaacttctagctgaaccagcagaaacagcaagctggctgcctgcctctctcacccagatgttaataattaaagcaccagaggctgctcagcacctatccaaaagcagccccgtgcctcctgccccgcacgcagtgcagggatgcttgccgacctatagcttgcagcttggggagaaygccacgtggcagatgtcatgctgggcttcttttttttccaagccgtaatacacggcttggacttgttttrtagcaagcatgaggacaggtgattcttaactttgtcttctctccatctaaacrcagtctggaatggcaccraggctctgaacagctccttgacaggtggggcaattgcctactggcgcatgtaattaaaaactcattaaagcagagctcattttcctcattattttaagcacttaagtcatctttactgtttaagatgacaagagtgagcaggctgggagagagctgtccctctggtccttcctcccaggcatttactgggtcacttgaatttcacagcaaagcctcagatgccaagagc

SEQ ID NO: 27850 - DNA, 600 bp, Chicken  19866894245286_3
caacttctagctgaaccagcagaaacagcaagctggctgcctgcctctctcacccagatgttaataattaaagcaccagaggctgctcagcacctatccaaaagcagccccgtgcctcctgccccgcacgcagtgcagggatgcttgccgacctatagcttgcagcttggggagaaygccacgtggcagatgtcatgctgggcttcttttttttccaagccgtaatacacggcttggacttgttttrtagcaagcatgaggacaggtgattcttaactttgtcttctctccatctaaacrcagtctggaatggcaccraggctctgaacagctccttgacaggtggggcaattgcctactggcgcatgtaattaaaaactcattaaagcagagctcattttcctcattattttaagcacttaagtcatctttactgtttaagatgacaagagtgagcaggctgggagagagctgtccctctggtccttcctcccaggcatttactgggtcacttgaatttcacagcaaagcctcagatgccaagagctggagctgcagcccagagcctccatgtccttagccctgcaggacacgagcaca

SEQ ID NO: 27851 - DNA, 600 bp, Chicken  19866894245286_4
gcagaaacagcaagctggctgcctgcctctctcacccagatgttaataattaaagcaccagaggctgctcagcacctatccaaaagcagccccgtgcctcctgccccgcacgcagtgcagggatgcttgccgacctatagcttgcagcttggggagaaygccacgtggcagatgtcatgctgggcttcttttttttccaagccgtaatacacggcttggacttgttttrtagcaagcatgaggacaggtgattcttaactttgtcttctctccatctaaacrcagtctggaatggcaccraggctctgaacagctccttgacaggtggggcaattgcctactggcgcatgtaattaaaaactcattaaagcagagctcattttcctcattattttaagcacttaagtcatctttactgtttaagatgacaagagtgagcaggctgggagagagctgtccctctggtccttcctcccaggcatttactgggtcacttgaatttcacagcaaagcctcagatgccaagagctggagctgcagcccagagcctccatgtccttagccctgcaggacacgagcacagccacaggcaccagggac

SEQ ID NO: 27852 - DNA, 600 bp, Chicken  19866894245288_1
agaaatgaggcttgcgttcacatatgagtattacaatgtactttatctggctgactgttgtatttaaaggcaataaagagagagatgatcagctggtctctaaagaggggcaatgctgaaactgccagtagggaaattatatcaaatgataatcagtgcaaaaagatgcatttatttgagctgtagtaatactaggtatgacatcaacaatgacacgatttttgttgtagctctttttaatgagtagtgttttggtatttgaattcatgctgtctctaaatcaactatgtctatctgcaygtgtactgcttgaattcgcatcctagtagtgagaatgcaggtgcactgatctttgtttgagctcttgaaggggaagaatactttgggcaacttcagacctttgggattttggtgacttcctctaagtacttatttctccttaggttaacttcagaatatgctttccttactattagcaatactgtaactatcagatatatggtacaactattgcagtgtcacacagataaaacagaataatttgagtcaagaaagcagtaattgctcacacagaggagttgccagcaaagaaaaaattcc

SEQ ID NO: 27853 - DNA, 599 bp, Chicken  19866894245296_1
  misc_feature (1)..(145): n is any nucleotide
nnnnnnnnnnnnnnnnnnnnnnnnnnnnnnnnnnnnnnnnnnnnnnnnnnnnnnnnnnnnnnnnnnnnnnnnnnnnnnnnnnnnnnnnnnnnnnnnnnnnnnnnnnnnnnnnnnnnnnnnnnnnnnnnnnnnnnnnnnnnnnnnnttctgctaaagcaagttccctcacatttgtatggtacttcccgtgttccactttgtgcctattgccccttgtccaggttctgcacaacactgaaaaaaagccccatccatttgactcccacgtttcagatatttacaaatagtgatgagatcccytcttagtcttctcttctctgggctgaatagttcctggtctttcagcctttcctcatatgggagatgctccaggctcctcctcatcttctctctctagaagttccttgtcattcttgarctgaggagcccagaactggacacagtactccagatgtggcctcaccagggcagagagggaggatcacctccctcgacctgctggccacgctctttttaatgcaccccagaatcccactggtgttcacttttgtcctcacgaagcgtgagcatttcttccacgcagccaaagacagcctggg

SEQ ID NO: 27854 - DNA, 599 bp, Chicken  19866894245296_2
  misc_feature (1)..(27): n is any nucleotide
nnnnnnnnnnnnnnnnnnnnnnnnnnnttctgctaaagcaagttccctcacatttgtatggtacttcccgtgttccactttgtgcctattgccccttgtccaggttctgcacaacactgaaaaaaagccccatccatttgactcccacgtttcagatatttacaaatagtgatgagatcccytcttagtcttctcttctctgggctgaatagttcctggtctttcagcctttcctcatatgggagatgctccaggctcctcctcatcttctctctctagaagttccttgtcattcttgarctgaggagcccagaactggacacagtactccagatgtggcctcaccagggcagagagggaggatcacctccctcgacctgctggccacgctctttttaatgcaccccagaatcccactggtgttcacttttgtcctcacgaagcgtgagcatttcttccacgcagccaaagacagcctgggcacacagcagctgagctcagtgtctttgagctttgaatgccttcagcctccatctstgctggataccgacacgtggggtgaagcagggcgagagagctctgctgccaacaggcactgc

SEQ ID NO: 27855 - DNA, 600 bp, Chicken  19866894245296_3
tatgggagatgctccaggctcctcctcatcttctctctctagaagttccttgtcattcttgarctgaggagcccagaactggacacagtactccagatgtggcctcaccagggcagagagggaggatcacctccctcgacctgctggccacgctctttttaatgcaccccagaatcccactggtgttcacttttgtcctcacgaagcgtgagcatttcttccacgcagccaaagacagcctgggcacacagcagctgagctcagtgtctttgagctttgaatgccttcagcctccatctstgctggataccgacacgtggggtgaagcagggcgagagagctctgctgccaacaggcactgcctgtacgcagtgtttcttcccagcagcttcccctgggagctcacagttcccactgccgcttgcagtgttttacctccagctgcacggcagtgcgatggctgacacccactcctccgcgccccccccgggtgactgtgcaaagagagggaattgcttctgcacagcaagaacgcatcattaacccccaacgtaagcgtgtggtaatgcaattgataatttgcatggtgaaccacaaaga

SEQ ID NO: 27856 - DNA, 556 bp, Chicken  19866894245296_4
gttacaaattaaaccacgcttgactcaaaactggacaggagctcagctcccgaggtgccgcaccacacgaagccgggctgccccgagtctccactgtgctgtccaacttcacttaacgttaatggcgtttgctgagggctcctatcagagacctcctttctcccccaagtgaatgctccgtggccccgctcgtgctttacagacccggggctgagagctttgcagccagcgaggggcccggtcggctgcccccgcggcctcaggagcaccgcatcccactgtgtcccttcctcattcctsgctccttcctcttcctcctgtcgcactccccgccccgccgcagccgccgggccggccgggcaggtattgagggcagggctgggcggctctccccgacagctggcggggcgaggaggggcgggagcggaaggcggcggcggcccgcacggcgcatggtcgcagcggcggcgcgctctctccctctctctctcacgggctcccctctggctgccgcgcgctgtggtctcgcccgcccccgctgccatgttggattgtg

SEQ ID NO: 27857 - DNA, 600 bp, Chicken  19866894245301_1
gaaaaaagtatcgttagaggcatggaaatcagctcaactaaaatgcaaacagtttttggtcaaaatgattacattttgcatcctttacaaaaacaaataaaaacaaacaacaacaacaaacaacaacaacaacaacaaaaatacccttgggtttcgttaagttattcttaggctgcacatgctgtacatgctgctgtaagagattattcttttatatcattgtttgtttgctgaggaacaagtccaggcaagtcctgggcaaaggtagagaaaccttctgtctggaggacactgatggasaggtcctgggtaaagggttgtgaaatcctctaatgagcacagatggacaaggccaggggcaatgagagagggataagctgctgataatggccgggaaatggtcttttgtgtggacttatctcgaggaagatggccatctcaggaggtacgcacgtggctcttgctcaagcacccagggatgtcacgtaggcaggaaaaaaggaggataaaagagggttcaacaaccatgaggataggtgtctgccatcagatcactcaccacgatggacgcaaggtttctgctatcagatccctcactac

SEQ ID NO: 27858 - DNA, 599 bp, Chicken  19866894245307_1
  misc_feature (1)..(200): n is any nucleotide
nnnnnnnnnnnnnnnnnnnnnnnnnnnnnnnnnnnnnnnnnnnnnnnnnnnnnnnnnnnnnnnnnnnnnnnnnnnnnnnnnnnnnnnnnnnnnnnnnnnnnnnnnnnnnnnnnnnnnnnnnnnnnnnnnnnnnnnnnnnnnnnnnnnnnnnnnnnnnnnnnnnnnnnnnnnnnnnnnnnnnnnnnnnnnnnnnnnnnnnnctcgcatcgccttgccctgccttgcttcgccttgccttacctttgcctgacctcgcctcgactcgtctcgcctcgcctcgcctctccacgcctcttctcrccccgccttgcctcgccttgccttacctttgcctcacctcgcctcgactcgtctcgcctcgcctcgcctctccacgcctcttctcgccccgccttgcctcgtgtcacctcgcctcgcctcgccttgccctgccttcttcgcctcgcctcgccttttcttcacctaatctcgcctcgccccgccttgccttccctcgctacgccccgcttctcctcgcctcgcttcgcctttgcctcgcctcgcatcggcatgcctcgctttgcctttgccttgcatcgccagccctcaccttgtcttgt

SEQ ID NO: 27859 - DNA, 600 bp, Chicken  19866894245311_1
gccatgccttctcccttcttccgttctccagtttctttggatgtgttctggttcccagcatcaccgcacttcctgctgcccggactgctgtccaatctttactcactgggatcttgccttcgtttcaagcataggctgacgttacttgccgtgtaatgcattgcttgaaatccttttgctgctggtaataatgttggctcccccttcctttgcctgttagaaggtctcactactgaagcagggagcagtgatttcagatgccctttctgttcttcaggcttcctttcgcatgctgacttktaggagttgacagaatttttcttcttgtttctagtagtaaaaatggctctaattctttctcacctgctttcccacccgcctgtaataagacctggtagcaattagtgtggaagctttaagcttagtgctgatggcatgtaatattttggttatgttcagcatttttttcagctgctacactgatccagaagtccttaaatccttcttagaggaagcttttatgccaaaagcctggagtcaaagtctagctcagggctagagaaacgtactcagttgttgcagtgcttgagcctacagtgt

SEQ ID NO: 27860 - DNA, 600 bp, Chicken  19866894245314_1
aagttaatataaaaatagtagctaggcagaactccccatcacttgtaaaagaccattcttctccattgcctttcaaatccctatataagaaaaactacccacacacttttcttattgattcctgtctcacagtacagtttcacggtcaaagtacccaagtgaaaataattaactgatccttcctggtaactacgacacatttccagtaaaacaaagtttgagccccagtgactccatcataacttattcaacgtcatgggacacagtaagtaatgcacactttgcactagttcaggcacrgaagactatagctatttctgtcttttaaaaatgatcataacttactgtaatagcatatgttctttctcacctcctataagctcacttttctgtttgtctaaattcacttacagctggcattgatttacttctggcctatacaatcttacagcaacactccacattattgcattcaaccttggatgtgcatatttcaaaagcaagaatagtgcttttctgtgcataagactgtattttccctaaaagactctggcctagcctayagactttgcacaggacaaatctcacttgctacttgct

SEQ ID NO: 27861 - DNA, 600 bp, Chicken  19866894245314_2
cagtaagtaatgcacactttgcactagttcaggcacrgaagactatagctatttctgtcttttaaaaatgatcataacttactgtaatagcatatgttctttctcacctcctataagctcacttttctgtttgtctaaattcacttacagctggcattgatttacttctggcctatacaatcttacagcaacactccacattattgcattcaaccttggatgtgcatatttcaaaagcaagaatagtgcttttctgtgcataagactgtattttccctaaaagactctggcctagcctayagactttgcacaggacaaatctcacttgctacttgctttgctcatttgcacctttcagcatactcagataaatggaaacatgaagatatgacctcaggttctgcacaggcacagaaaagaattacagtccctaactgtatactttgtaggcagctttgacattcagatggcagagttaaatttttatattatatcatttgtgcccattagcctattaactgtctcattagcagcaatgaataattgcaggcacaatataggtctgaagaaactaaaattttattcaggtgctatttatgt

SEQ ID NO: 27862 - DNA, 568 bp, Chicken  19866894245317_1
tagattcatccactcccactgagtatttgacatggcttcttagcctgtgtctgacaaacagcagctgggtctctggtgagcttgtgttccagctgggaagtagcaaccccaagctcactgggaagcagaagctcccagcctcagctatctctcagcagagcttattccctgcagccagatggtttagcttaacaaacagtgcagtcagatatcagttgcaggttggaggcaatggttgtattgactgtcctgctgagactggagtctgcttatacgagttttcctttcagtatagattgkttctaagtagctggcagtggaatgagttagaatggaaaatgtgcctaactgtactagtactttttttcctatgcttgatccctccaggaaaaaagctccaagtggaaaacggtcttctaagttgctagcttgcagctagaatgtatatgagctctgcaaatacttattctctttgctcagtctctaattcctagctaaaactggtgcattgctgtactggtgctattcctctccttgtttcaaagagttgtcctttgctctgttttag

SEQ ID NO: 27863 - DNA, 600 bp, Chicken  19866894245319_1
agtgttggatgttaggaagcatgtatgctctgaaagagtggtgatctttggcacaggctgcccacggaggtggtggggtccccagagacattcaaacaacactggagatgcagcactgagggacgtgatcagtgggcatgctgggggtgggttggggatcctagaggtcttttccagccctccagggccagcactgtgcccgcagcactgaccttgggcagagaggcacgggagccggcgctctgagtggtcatggtgagcacggtggtgatgcccaagcccacccgcgccggcgctgcrtccatgttgatccagaaggagacccaggagaggatgacgatgagcaggctggggatgtacatctggatcaggtaatagcccatctgccgctccaartggaacttcacctcaatgcaggtgaacttgcctgcaaggaaatccagtcctgcrtgggtgaggtgccacgctggggggcagtcaggggtttccggggggtctcacctgtgttgtagtacttggtgcagtagcccaggtccttctcatccctgaggatgaactgcggcagtgtcaagccctctgccacctgcacggcctcctgct

SEQ ID NO: 27864 - DNA, 600 bp, Chicken  19866894245319_2
caacactggagatgcagcactgagggacgtgatcagtgggcatgctgggggtgggttggggatcctagaggtcttttccagccctccagggccagcactgtgcccgcagcactgaccttgggcagagaggcacgggagccggcgctctgagtggtcatggtgagcacggtggtgatgcccaagcccacccgcgccggcgctgcrtccatgttgatccagaaggagacccaggagaggatgacgatgagcaggctggggatgtacatctggatcaggtaatagcccatctgccgctccaartggaacttcacctcaatgcaggtgaacttgcctgcaaggaaatccagtcctgcrtgggtgaggtgccacgctggggggcagtcaggggtttccggggggtctcacctgtgttgtagtacttggtgcagtagcccaggtccttctcatccctgaggatgaactgcggcagtgtcaagccctctgccacctgcacggcctcctgctcctccagccactcaaagatgaggtcgttcatggtgtagccaactgaagagaagatggagggagccacgggtcaggggggatacgagcccattcagc

SEQ ID NO: 27865 - DNA, 600 bp, Chicken  19866894245319_3
gttggggatcctagaggtcttttccagccctccagggccagcactgtgcccgcagcactgaccttgggcagagaggcacgggagccggcgctctgagtggtcatggtgagcacggtggtgatgcccaagcccacccgcgccggcgctgcrtccatgttgatccagaaggagacccaggagaggatgacgatgagcaggctggggatgtacatctggatcaggtaatagcccatctgccgctccaartggaacttcacctcaatgcaggtgaacttgcctgcaaggaaatccagtcctgcrtgggtgaggtgccacgctggggggcagtcaggggtttccggggggtctcacctgtgttgtagtacttggtgcagtagcccaggtccttctcatccctgaggatgaactgcggcagtgtcaagccctctgccacctgcacggcctcctgctcctccagccactcaaagatgaggtcgttcatggtgtagccaactgaagagaagatggagggagccacgggtcaggggggatacgagcccattcagccccaccccaaatgacctcccctttcctgctcagctgccccagaaacacagagat

SEQ ID NO: 27866 - DNA, 599 bp, Chicken  19866894245324_1
  misc_feature (1)..(6): n is any nucleotide
nnnnnntggacttctctgccggttatgaacctcatttgctgatgtctaccttgaatacgtgcggtgcgctgcagaatgaccctgtgcacattgtagagtcgctccctcgccgggtgcctgtttgcagtctgtgcttctgtctgtcaaacccaggtaatctgacagccataggtaacctgacagcctctctgctggcttctcactgaaattctcagggctgtgttccattggttgtgccgaatgacgtttaggaaggagcgtggtccaggtaccgtgtgtgagctgagtgctgatgggagyggrgcgtcaaacccatcttggaaagattcctgcgtggaaaaaaacacaccacgccaacccacgttgtgagcgtttttgatagatggccaagaattcttttattgtattccgcatctacatgytggctttgttttgagtgatgaacttaaaacagtgaacttaaaatatttactttagacgacttccgtgagcctactgttttttcgtaggcatgtggactggaacacagccctcaatagcactgacatcttcagttttgcaagacttgtctgaggtaaggaacggttacgttggtttgt

SEQ ID NO: 27867 - DNA, 599 bp, Chicken  19866894245324_2
  misc_feature (1)..(3): n is any nucleotide
nnntggacttctctgccggttatgaacctcatttgctgatgtctaccttgaatacgtgcggtgcgctgcagaatgaccctgtgcacattgtagagtcgctccctcgccgggtgcctgtttgcagtctgtgcttctgtctgtcaaacccaggtaatctgacagccataggtaacctgacagcctctctgctggcttctcactgaaattctcagggctgtgttccattggttgtgccgaatgacgtttaggaaggagcgtggtccaggtaccgtgtgtgagctgagtgctgatgggagyggrgcgtcaaacccatcttggaaagattcctgcgtggaaaaaaacacaccacgccaacccacgttgtgagcgtttttgatagatggccaagaattcttttattgtattccgcatctacatgytggctttgttttgagtgatgaacttaaaacagtgaacttaaaatatttactttagacgacttccgtgagcctactgttttttcgtaggcatgtggactggaacacagccctcaatagcactgacatcttcagttttgcaagacttgtctgaggtaaggaacggttacgttggtttgtgct

SEQ ID NO: 27868 - DNA, 600 bp, Chicken  19866894245324_3
tgcagtctgtgcttctgtctgtcaaacccaggtaatctgacagccataggtaacctgacagcctctctgctggcttctcactgaaattctcagggctgtgttccattggttgtgccgaatgacgtttaggaaggagcgtggtccaggtaccgtgtgtgagctgagtgctgatgggagyggrgcgtcaaacccatcttggaaagattcctgcgtggaaaaaaacacaccacgccaacccacgttgtgagcgtttttgatagatggccaagaattcttttattgtattccgcatctacatgytggctttgttttgagtgatgaacttaaaacagtgaacttaaaatatttactttagacgacttccgtgagcctactgttttttcgtaggcatgtggactggaacacagccctcaatagcactgacatcttcagttttgcaagacttgtctgaggtaaggaacggttacgttggtttgtgcttgttgggtgtgtaggacaacagcctcccctggaaggaattactaaatgatttaattgtagtggaatgctgtcccattaggtgcaaaaaaaaataacaacccgaacccaagcatcgaatgc

SEQ ID NO: 27869 - DNA, 600 bp, Chicken  19866894245328_1
actaacagcctccaaaatcaaacaaaattcaagtgatgaaaaagcatcaattgtaagtggaattaaatatttaaaggaaaatgctttgtttgtgaagggatgaaaatacctttctttttttgagacagaatacaagaaaatgagaaggcgttcatctttctgctttttattatgggaaacaataacttttcctggctatacaagaaatataagtagaaagaaccaatgcttccaatagatacaaatatcaaagaaatcaaattatttttcttgtttaaattaaaaagatttgttttcttygtatttaaggctgaacagattttttttacttaaaataaatgtatcaatgctgtgcaattgatgttaaaggctctgttctacagtaattcacaccaattcttggccatgagaggttacatctttcagcctctttcttcatgaactaatcatctcatatttcaacaccatcaaatactgtgttttgcatctgggttaatataacctgacatttcatggtccttataactcctttctagttaaagatgcatggcaaacattgggaaagcaaggtgatgttcctctggaatggagggagccaaa

SEQ ID NO: 27870 - DNA, 600 bp, Chicken  19866894245328_2
ctgaacagattttttttacttaaaataaatgtatcaatgctgtgcaattgatgttaaaggctctgttctacagtaattcacaccaattcttggccatgagaggttacatctttcagcctctttcttcatgaactaatcatctcatatttcaacaccatcaaatactgtgttttgcatctgggttaatataacctgacatttcatggtccttataactcctttctagttaaagatgcatggcaaacattgggaaagcaaggtgatgttcctctggaatggagggagccaaaaagattacamgtcaatatgaccacagaaaagctataagcctgcaatcttgctgttctctctctattacgagatcatttatgaagatattgagctgcacatgctccagcagagacctcyccaatatcactgactgttcccacttccacctcttgtttcctgcatccaatccattaaatcaagcctttcagttttcaccacaatacactgagagacattcgtcttccattctcactgaggtatgaaagagccacaaagatgtgaggagataaaagaggtaatttataacgatgtgcaaagatactatccata

SEQ ID NO: 27871 - DNA, 544 bp, Chicken  19866894245328_3
tctttcagcctctttcttcatgaactaatcatctcatatttcaacaccatcaaatactgtgttttgcatctgggttaatataacctgacatttcatggtccttataactcctttctagttaaagatgcatggcaaacattgggaaagcaaggtgatgttcctctggaatggagggagccaaaaagattacamgtcaatatgaccacagaaaagctataagcctgcaatcttgctgttctctctctattacgagatcatttatgaagatattgagctgcacatgctccagcagagacctcyccaatatcactgactgttcccacttccacctcttgtttcctgcatccaatccattaaatcaagcctttcagttttcaccacaatacactgagagacattcgtcttccattctcactgaggtatgaaagagccacaaagatgtgaggagataaaagaggtaatttataacgatgtgcaaagatactatccatacaaaaaaatccatgttaagatgccactatccatttggaatatacagaaaaga

SEQ ID NO: 27872 - DNA, 600 bp, Chicken  19866894245329_1
tgcctggtgtcttaatagaaagcaattgttccttgcagagcctctgctctcttagcctccttattcttttgcgggaatgtcagcctactctgaagcaggcttggctgcttggacaaaagagcttattattacattattggccttcagaaatgagcttgggttgttagataaaaccttgttttacaactcggtccgatgctatctcttagttgcatccccacatagcctaatggcatttgatgagcttcaaggagaggtgagcatacagtgacgtatttgcagcgtttcagaaaaccagtrtatattcaaccagtcttaggtaacttcagagaatttctcacacctgggcaagctgyagtgcctttgatcaggcgtgtacctctcttgcaatctctgttacaggagtcagcattgctccctgttgcctccagcattttccaatagttttgctgctgtgatttgrtcattgtgattcagacagtctaatacaagccaagtgaattcactagattgggccccagtcattttgtaacagatgggcacaaattgggtatcacatggttgaggaccatgtaagtattcagctaaatgtttaatgat

SEQ ID NO: 27873 - DNA, 600 bp, Chicken  19866894245329_2
ctccttattcttttgcgggaatgtcagcctactctgaagcaggcttggctgcttggacaaaagagcttattattacattattggccttcagaaatgagcttgggttgttagataaaaccttgttttacaactcggtccgatgctatctcttagttgcatccccacatagcctaatggcatttgatgagcttcaaggagaggtgagcatacagtgacgtatttgcagcgtttcagaaaaccagtrtatattcaaccagtcttaggtaacttcagagaatttctcacacctgggcaagctgyagtgcctttgatcaggcgtgtacctctcttgcaatctctgttacaggagtcagcattgctccctgttgcctccagcattttccaatagttttgctgctgtgatttgrtcattgtgattcagacagtctaatacaagccaagtgaattcactagattgggccccagtcattttgtaacagatgggcacaaattgggtatcacatggttgaggaccatgtaagtattcagctaaatgtttaatgataccaaatattgaaaactaactctcccttaggcagtaaaataggaggatgagaaagc

SEQ ID NO: 27874 - DNA, 600 bp, Chicken  19866894245329_3
ttagataaaaccttgttttacaactcggtccgatgctatctcttagttgcatccccacatagcctaatggcatttgatgagcttcaaggagaggtgagcatacagtgacgtatttgcagcgtttcagaaaaccagtrtatattcaaccagtcttaggtaacttcagagaatttctcacacctgggcaagctgyagtgcctttgatcaggcgtgtacctctcttgcaatctctgttacaggagtcagcattgctccctgttgcctccagcattttccaatagttttgctgctgtgatttgrtcattgtgattcagacagtctaatacaagccaagtgaattcactagattgggccccagtcattttgtaacagatgggcacaaattgggtatcacatggttgaggaccatgtaagtattcagctaaatgtttaatgataccaaatattgaaaactaactctcccttaggcagtaaaataggaggatgagaaagcttcctagtgacatttaattgtacyaagagtggctttgggatgtaaagagcgaatgctttggggtttatgtagtataatgaaagctccgtaacaagtgcaggacttta

SEQ ID NO: 27875 - DNA, 600 bp, Chicken  19866894245329_4
tctcttgcaatctctgttacaggagtcagcattgctccctgttgcctccagcattttccaatagttttgctgctgtgatttgrtcattgtgattcagacagtctaatacaagccaagtgaattcactagattgggccccagtcattttgtaacagatgggcacaaattgggtatcacatggttgaggaccatgtaagtattcagctaaatgtttaatgataccaaatattgaaaactaactctcccttaggcagtaaaataggaggatgagaaagcttcctagtgacatttaattgtacyaagagtggctttgggatgtaaagagcgaatgctttggggtttatgtagtataatgaaagctccgtaacaagtgcaggactttattcccaggctgggaaagaatcctgacatagctttccasaagggtggagatcttctttactctgagaagataaaatcctctgcctgcgatgcagaaatgcaaacagttcccaaggagctgctaggaatttgaaataaatgatcacaggaccacgtctttctcttttatatgattccctagttgtatcagtttaggctttccctacttaacaagtacta

SEQ ID NO: 27876 - DNA, 600 bp, Chicken  19866894245329_5
ttcactagattgggccccagtcattttgtaacagatgggcacaaattgggtatcacatggttgaggaccatgtaagtattcagctaaatgtttaatgataccaaatattgaaaactaactctcccttaggcagtaaaataggaggatgagaaagcttcctagtgacatttaattgtacyaagagtggctttgggatgtaaagagcgaatgctttggggtttatgtagtataatgaaagctccgtaacaagtgcaggactttattcccaggctgggaaagaatcctgacatagctttccasaagggtggagatcttctttactctgagaagataaaatcctctgcctgcgatgcagaaatgcaaacagttcccaaggagctgctaggaatttgaaataaatgatcacaggaccacgtctttctcttttatatgattccctagttgtatcagtttaggctttccctacttaacaagtactacrctgtgagaagaaagcacttcatgtttaacttctcggctcttaaagcaaaaaccatgtaattataattggatagctttggaaagacatcagcatggattaatgaggtggcctctgtcttt

SEQ ID NO: 27877 - DNA, 600 bp, Chicken  19866894245329_6
gagtggctttgggatgtaaagagcgaatgctttggggtttatgtagtataatgaaagctccgtaacaagtgcaggactttattcccaggctgggaaagaatcctgacatagctttccasaagggtggagatcttctttactctgagaagataaaatcctctgcctgcgatgcagaaatgcaaacagttcccaaggagctgctaggaatttgaaataaatgatcacaggaccacgtctttctcttttatatgattccctagttgtatcagtttaggctttccctacttaacaagtactacrctgtgagaagaaagcacttcatgtttaacttctcggctcttaaagcaaaaaccatgtaattataattggatagctttggaaagacatcagcatggattaatgaggtggcctctgtctttgctgctcttattgatagtaaaaatcaacatttcctcctgaaatgcttcttcctgctgaaatggtacttagttgatatataaatttagaaacagatttcttttggagcttttaaatatatatatatataaggaattaactgtccagaagtaaaactttcccttcaaattaccaatcctttct

SEQ ID NO: 27878 - DNA, 600 bp, Chicken  19866894245330_1
gagtcaatattgagtcaacaatattcttgccactgtcatatatgagggggaattagttttaccttccttgccaacaaaacagagaaaaaaattaaaaccatggagagcaacagcacagacagactgtgttgtgaaaaaggggcacgagaaagcactgcccattagaacaggccaccatgatgctgaaggttgtgtagaagcaggccagcaccaaatgataccaagcagccgagacttctgatccctgccgctgtgcaccagctttgaagctacgacctgctcagttgctgctccctaccmtgagccagcctgctgggatgcactgtagatgggtggctcttttcaatgtcttcactctgtttttcttggccatggctttgacaggaatgcagactgcagacgaattcttgtgccagctcaacttcaaagtaagaaatgctctgtgagtgcaatacaacacactgtgcaggttcttctgaccaggttgagtaatgcagtgtgtaaattcagcctaacaccatctactctgctgtcttacatggccaggaacaccaatggggccactaagaccgacatccacccccaagtactcacacagcc

SEQ ID NO: 27879 - DNA, 600 bp, Chicken  19866894245334_1
gaacttttcctgtggtaatggaagcaatatttgtagagctagccataggactctattaaatagagagaagccacaaaactaaagcaatatgaagtacattaaagtagagatgctatctgctatgttggaagaatccaattttcggcatccaggggggtgttttatatgaatatacaagtgggtactttatacatatatctccatgcaggcattcctgaatcataaatgagtgcatatctacagcaaggcatgagtttttctaagtgtgagaacaccttcagctgttgcacatttggtgcrtggycacctttaccatgtgagggtgaaagtcaaccagtagagaagatttccttcacagggacatgatttagcggagggtttttagagtcagggtagtatggttaggttgtggttggacttgattatctttaaggtmttttccaacctgaacaattctatgaatctatgattctatgattctttaagttcagaaggaacctgttttcttccagtgtttgcctctcatcctgtcattaggtaccattaaaaaaagcctggctctgtctttgttacatgctcctttcagatattagtacacat

SEQ ID NO: 27880 - DNA, 600 bp, Chicken  19866894245334_2
ttttcctgtggtaatggaagcaatatttgtagagctagccataggactctattaaatagagagaagccacaaaactaaagcaatatgaagtacattaaagtagagatgctatctgctatgttggaagaatccaattttcggcatccaggggggtgttttatatgaatatacaagtgggtactttatacatatatctccatgcaggcattcctgaatcataaatgagtgcatatctacagcaaggcatgagtttttctaagtgtgagaacaccttcagctgttgcacatttggtgcrtggycacctttaccatgtgagggtgaaagtcaaccagtagagaagatttccttcacagggacatgatttagcggagggtttttagagtcagggtagtatggttaggttgtggttggacttgattatctttaaggtmttttccaacctgaacaattctatgaatctatgattctatgattctttaagttcagaaggaacctgttttcttccagtgtttgcctctcatcctgtcattaggtaccattaaaaaaagcctggctctgtctttgttacatgctcctttcagatattagtacacattgat

SEQ ID NO: 27881 - DNA, 600 bp, Chicken  19866894245334_3
aattttcggcatccaggggggtgttttatatgaatatacaagtgggtactttatacatatatctccatgcaggcattcctgaatcataaatgagtgcatatctacagcaaggcatgagtttttctaagtgtgagaacaccttcagctgttgcacatttggtgcrtggycacctttaccatgtgagggtgaaagtcaaccagtagagaagatttccttcacagggacatgatttagcggagggtttttagagtcagggtagtatggttaggttgtggttggacttgattatctttaaggtmttttccaacctgaacaattctatgaatctatgattctatgattctttaagttcagaaggaacctgttttcttccagtgtttgcctctcatcctgtcattaggtaccattaaaaaaagcctggctctgtctttgttacatgctcctttcagatattagtacacattgatgagatctccccctgagcattcacttttccaagccaaacagcatttctctcagcctttccctcagactttcctcaacagggagatccttctgtcccttagccagataaccaggggtgaacacagggttcagac

SEQ ID NO: 27882 - DNA, 600 bp, Chicken  19866894245334_4
agtctcactttgcccatcacattatttgagctccaaaaattttgtaaagccagttttgctgactagtaaatatattagtttgctgtgagtcatcatgctctcactgttgttaagtagctatttcatacatacagtttcatagagtgttattaaaatcctcagtgatatactttcattaacgttccctataaattaggcttaaaatgagaaaatgctgtcattctaggctttaaaaatgtaagtagccttactaagtgtattgtatgttgaattcatagcaatttattccaattaaccatkttgcatagtcataacaaatttaaagtcagcatgcagaaaaggaaaaacgcatctgggttcaagatgtcatttcactgcaagcttcatctgaagtttccttttgtgatttcttagcttttactttgtactactcttgtgcatttataagtgccgagtagagagcatcaagaatgttaaatggggaaaaatcagtaatgccaaaatgacaattcattaaaaacaacaaattggagctgtgcatgtagtgaaagtgacagagagatgcaggcagctctgaaacatgcacatcaaggttatgct

SEQ ID NO: 27883 - DNA, 600 bp, Chicken  19866894245336_1
aaaggctaaaacttctatgtattgatctttcatgtcattcatgcagagccttaatgactttaaagggtttttttctaagtcatttaagtgtgtccttttgcataaataaggctagggatggcagattaacaacttttaagtgataggttgtcagatagaaattcttagtgtggtgagacacgtaccatgtcttgaagcttcttatccttttttttgccaagctttcgtcgggtctcatcatcttgatcaaagctgaagtatcaacagaaagagcaatttctagaatatgcaattaatccrtaacaaaatcatctttctgtttcgttttgtttttaatatactcactgtacaaatcgttttatctccttacaagcagaatcatcagtcagctctggaacggtgttgataccgttgttgggccacacatacactgaactgttgcaaattcttaatacaagaacatctgaggacagcttatttgcaagatcactgaaaacrtactttaatacactttttgctgatgcttctgaaacacagtaagtagaaaattaacttaaaaaattctctcatttctgcgatggctgaaggataaacattttt

SEQ ID NO: 27884 - DNA, 600 bp, Chicken  19866894245336_2
ttcttatccttttttttgccaagctttcgtcgggtctcatcatcttgatcaaagctgaagtatcaacagaaagagcaatttctagaatatgcaattaatccrtaacaaaatcatctttctgtttcgttttgtttttaatatactcactgtacaaatcgttttatctccttacaagcagaatcatcagtcagctctggaacggtgttgataccgttgttgggccacacatacactgaactgttgcaaattcttaatacaagaacatctgaggacagcttatttgcaagatcactgaaaacrtactttaatacactttttgctgatgcttctgaaacacagtaagtagaaaattaacttaaaaaattctctcatttctgcgatggctgaaggataaacatttttttaattgatgttttgataatgaacataaatgaaaatgctgttataattagaaaaatgactgagagcaaaaagtaagataagatttcattcggcaggtctgcctcaacaaaagcatgctgttttccttggcttccaaataacaacctacactgtcattgattttcccatcagtaattcttaaccaagcctacagctgca

SEQ ID NO: 27885 - DNA, 600 bp, Chicken  19866894245336_3
tgcgatggctgaaggataaacatttttttaattgatgttttgataatgaacataaatgaaaatgctgttataattagaaaaatgactgagagcaaaaagtaagataagatttcattcggcaggtctgcctcaacaaaagcatgctgttttccttggcttccaaataacaacctacactgtcattgattttcccatcagtaattcttaaccaagcctacagctgcaagcttctgtggataggaaagctgctatatatgcatatatctgaccttttcagtaaatgctgcaaagattaaatcrgagctgcatattactgaaaaaaatctcatagaatcatttaggctggaaaaaaccactgcagatagcagtgcctagtagtgcctagcagaggatggctttgatccactgacttctgggttatgggcccagcaagcttttactgcgtgtaatacccaattgtattccttcaactcattaactcagacttggccactatcaccttctatgctcaaaatccttaaaaactaaattattaggaatcaaacaaacaaaacttgtccctggagacagcccagctcaggcaggaggggctctgagcac

SEQ ID NO: 27886 - DNA, 600 bp, Chicken  19866894245340_1
ctttttttagagtgttccagatgaaaaggaaaagcaagaaatgtttcccaaattatagtgtcactatttttaggtgttgcagggagtgtgacccacagggccttctgttatgttgcacagctgctggtaatcacatctgacgcgctacagataaaatcatttgacatatgaaaaattgtaaattatgcctggagtattcttggtctaaaaatgaatagaaacatttgtatattgcatgttaaatgtaaattttgagtggttggtgttcaaaactttgatttttttaaatggaaaaatcartactagctagaagcaaggtgttggctcactaaataaggtctagagaggttcttggtcctcagatttgagagggactttgtaggtatggtatcatctgttcttgagagatttcaggcttgtactgggccgctaaccacctctaagaaaagatgggtccaagaagaaggcattaactacaccactggatctccttcacccccagatgtgaccctggcttttcagggcctgcatgcgagacggcgtcgcagaccttcccaatgttcatctcagagagctttgccagctcccgcctctcttcct

SEQ ID NO: 27887 - DNA, 600 bp, Chicken  19866894245342_1
cttcaacacaggtctcagccatttctggagtactatttttctcatatccaaatgattgaatgatttctaaattctcttccttctgacctcttgttttcttcctgtttgattctagactcaatgtttaagagtggatatggcccaagtgttgcaattcttcattccacagattgctaccactatcacaattgctgttctctctggatctggagaaacccacacaaaaggatgccatgaaatgcacatttgaattgtacatgcaaggaatataaaatagagactttgaaacatctttacaaraatacccctgaggaattaagaggaaagggcttttttttttgttaatacaatrkggggattgtaaaggatgccttctctcagcaatgcctccaatgttcattttgcagatctaggtaattattaggaactatgattgcattacccctgtggaattgttctcaggctaaattcacttctccagacaacccagtatcactcagcaattctgcctctgcttctgaacaaggctgacttgacctgctttgatcaaatgtgctgagagacragaggtagaagctcaactgaaagggattctggaga

SEQ ID NO: 27888 - DNA, 600 bp, Chicken  19866894245342_2
tgattgaatgatttctaaattctcttccttctgacctcttgttttcttcctgtttgattctagactcaatgtttaagagtggatatggcccaagtgttgcaattcttcattccacagattgctaccactatcacaattgctgttctctctggatctggagaaacccacacaaaaggatgccatgaaatgcacatttgaattgtacatgcaaggaatataaaatagagactttgaaacatctttacaaraatacccctgaggaattaagaggaaagggcttttttttttgttaatacaatrkggggattgtaaaggatgccttctctcagcaatgcctccaatgttcattttgcagatctaggtaattattaggaactatgattgcattacccctgtggaattgttctcaggctaaattcacttctccagacaacccagtatcactcagcaattctgcctctgcttctgaacaaggctgacttgacctgctttgatcaaatgtgctgagagacragaggtagaagctcaactgaaagggattctggagaacaacggaaatcacacagccagtgctgtcagccagctgaaacagatgctgca

SEQ ID NO: 27889 - DNA, 600 bp, Chicken  19866894245342_3
gattgaatgatttctaaattctcttccttctgacctcttgttttcttcctgtttgattctagactcaatgtttaagagtggatatggcccaagtgttgcaattcttcattccacagattgctaccactatcacaattgctgttctctctggatctggagaaacccacacaaaaggatgccatgaaatgcacatttgaattgtacatgcaaggaatataaaatagagactttgaaacatctttacaaraatacccctgaggaattaagaggaaagggcttttttttttgttaatacaatrkggggattgtaaaggatgccttctctcagcaatgcctccaatgttcattttgcagatctaggtaattattaggaactatgattgcattacccctgtggaattgttctcaggctaaattcacttctccagacaacccagtatcactcagcaattctgcctctgcttctgaacaaggctgacttgacctgctttgatcaaatgtgctgagagacragaggtagaagctcaactgaaagggattctggagaacaacggaaatcacacagccagtgctgtcagccagctgaaacagatgctgcaa

SEQ ID NO: 27890 - DNA, 600 bp, Chicken  19866894245342_4
aatataaaatagagactttgaaacatctttacaaraatacccctgaggaattaagaggaaagggcttttttttttgttaatacaatrkggggattgtaaaggatgccttctctcagcaatgcctccaatgttcattttgcagatctaggtaattattaggaactatgattgcattacccctgtggaattgttctcaggctaaattcacttctccagacaacccagtatcactcagcaattctgcctctgcttctgaacaaggctgacttgacctgctttgatcaaatgtgctgagagacragaggtagaagctcaactgaaagggattctggagaacaacggaaatcacacagccagtgctgtcagccagctgaaacagatgctgcaatttcgggtacaactgcagctttactgctgagaagctgcagagcgagcttgtcaccagggctccctgctgcagccacatccagaaggagaactctgctcacaaagctgcagaatggtaagaaaagctccaggctcctcgctcaaccccagtaacaccagtttgctgtgatggtccaacacccctagcagaacacaggtgctctgtactgccay

SEQ ID NO: 27891 - DNA, 479 bp, Chicken  19866894245342_5
agaggtagaagctcaactgaaagggattctggagaacaacggaaatcacacagccagtgctgtcagccagctgaaacagatgctgcaatttcgggtacaactgcagctttactgctgagaagctgcagagcgagcttgtcaccagggctccctgctgcagccacatccagaaggagaactctgctcacaaagctgcagaatggtaagaaaagctccaggctcctcgctcaaccccagtaacaccagtttgctgtgatggtccaacacccctagcagaacacaggtgctctgtactgccaygagttacattcagtcttacaccactacaaacagcatattagtttagaagttcgctaccttacagctgtggttatgccagtacccagtgagtgaacaccacatctaaacccagcaaaatcctttgttatggcaacgagtcgggccagagaggactcctctgcatcacatgcacaacctga

SEQ ID NO: 27892 - DNA, 600 bp, Chicken  19866894245345_1
attcgacacgccgtctgcccttctggccaatgagaactcgcgcttctatgctatgtttgctgctgcagagaacaaggtcgctgtcaagggctaaaattcagggcaaagtcactttaatttttggagagctgcactccctgcctgtggcaggtcagctctccctcctcctccaagcagattattgccttttcatcctttattttttagcacagtacgtcaagccagagagtttttaaaaccatgtcagaagaattcttcttgtttttattattgtatttattccataatcatattactaayttttttttgttattaaatgcactctacgaatggctcagggagccatagttataaatgtatcagaggcctataatgaagctttatacatgtagctatatctatacataattctgtatatagcctatatttacagtggaaatgtaagctgtttattttatattaaaataagcactgtattaataacagtgcatattcttttctatcatttttgtacagtttatggtaccggagatctggctttgttatcgggctgtatcagacaccattttgtctcttacagttgtcttttcctagtgccag

SEQ ID NO: 27893 - DNA, 600 bp, Chicken  19866894245354_1
ctgcttatgacactttctttagtaggcactgtgcctaattttcaacggaataataggctgaaatgtagaaggaaatgatgaaaatggtgcatttattccagtgcagtcttgcttcagtttcacgtatagaaaatgtaacatctaattctaatattgtattttctgaattcatcaaggagaagctcaaatatgaaaatatttacacattggttcttcagcatcaggaattaattgcaaatatagttgttcttcttgcagaaacatccaaaaaagagtcttgccttgcttttctcactcttyacctgtgagtttccactamggctacaggatttatcttaaaaatctctagaaccagacctggcatcctttaaaaaatattttaaacaggtaactacttttaattgcaaatccagatgctagaattttaagagattgtctacttttcctattgttcttgttcttagggaagcttttctaactcagtgctttatctgaggaatatctgagtgcagaagtgactgcctagcaaagacctacataaacattcataaatgggaaactaggactcctaatacttgacaccacataacaatacgaagg

SEQ ID NO: 27894 - DNA, 600 bp, Chicken  19866894245354_2
tagtaggcactgtgcctaattttcaacggaataataggctgaaatgtagaaggaaatgatgaaaatggtgcatttattccagtgcagtcttgcttcagtttcacgtatagaaaatgtaacatctaattctaatattgtattttctgaattcatcaaggagaagctcaaatatgaaaatatttacacattggttcttcagcatcaggaattaattgcaaatatagttgttcttcttgcagaaacatccaaaaaagagtcttgccttgcttttctcactcttyacctgtgagtttccactamggctacaggatttatcttaaaaatctctagaaccagacctggcatcctttaaaaaatattttaaacaggtaactacttttaattgcaaatccagatgctagaattttaagagattgtctacttttcctattgttcttgttcttagggaagcttttctaactcagtgctttatctgaggaatatctgagtgcagaagtgactgcctagcaaagacctacataaacattcataaatgggaaactaggactcctaatacttgacaccacataacaatacgaaggtgtttctcctatagcaaag

SEQ ID NO: 27895 - DNA, 600 bp, Chicken  19866894245369_1
agcaaacattcaaattacaccataaaccacatggcatggaaccacacagcatggcatggagtcagatgggactaagagttctccactgcctaaccattttattctttcacctcatttttctcattgagctgaaaccattgcttccaagtgcattaaatatatatattgaaattgactggagatgctagcaatcatttttggtttgatgatatccctgaataagataatttacttgtgctttacatccttcagaaaaagtgttgcttttctcagagataaccctaaagctggaagctcagrccaagaccagatctcattgctgtggtgaatactgctgtataccaaggttcattattacatgttttcacagtctttatagtagttgaatttgtggagcaacttttactctacaaagggttttgaatagttttaattaaatgttgataaaacagaaaaggaattttgggatgtgaaaacaaattaattctggtcattagtcacctgacaagcatattacagtacagattttttatagctccatggatgcctgtgaaactggaaagatggtatgctaaatggattccttgttagctgctttga

SEQ ID NO: 27896 - DNA, 600 bp, Chicken  19866894245372_1
tgcatggcaggtggggtcctgctggattcagagggcttcggaggcgtgcacctacaggagtacatttgcggatttggatctgtggtggtttgcgatgaaagttgcttctttctatgaaacatctggcataccgcgttggctgagataaaatctcaagctgcacggacccctcgctcggtttactgttatctctaataatgcagtcattttgactctaaattgctgtgtaaataatttagaaagttgaattattttgtgtggcattagtggtcccgttggcttcatcatactgagtgtttyacagagcaatcatcagataaccttcctatgagctgttgtgaggtgtgtcttttttcttacaactcctttttctttttgactgttgtggaattgtgctggttgtttttgggaatgtatgttagacttcattcacaatgtaagctgttcaaacttctgacataattctgataaatgataattgaaaatatgatagaccatcccatcgaccccttcttttcccttgcaccgccctctcttttctctcactagaaaaagttatttgtaactgcgaaagtctgaaccattcgaactttgtgcctg

SEQ ID NO: 27897 - DNA, 600 bp, Chicken  19866894245387_1
gtgctttccagcctgccatagtattaacgtggtgttggctacttgcagcgttcacactagaaccagagctcaagttgtatggacattttttttcccttcagcttcaataagtaagtatttctgttgcttgcacttctgtgaggaattcacattcagcactatcagttccaattcctcagagtactgagtactgttgatgctctatttcataccagacagcagagcataaggtgattttgtcttttatctaccagcttgtaaatccccctggaggccttaaggaggtaacagtatcaattyatgtaagaaaggagcagtaaaattcacattaaatttgcttacatccttattcttgtagcggcagtggaggtcaattagcattaaagatgacgcgtacttatctgtatttcaccttatatgccaattgtgcaccgtatttcattgtaaggtttggaaaaaaatacctttctgtcacaatacgttgaactttcatcttaatcgtgtgacttcactcggaaacttttcccaggaaagaaaggttaatatttataaagtgctttaaagatgaaagaactgtatacttacacatttcattgcatt

SEQ ID NO: 27898 - DNA, 600 bp, Chicken  19866894245389_1
acatgcatgttctgtgaaatgcataaagagaaaaacacggcaattaaatgagcatttgtcccagtagcagatgcttttcaaactattttccctgtactaattttgtaacatgatcctgtgatgcaactaccactaaaattggtagttaatacacaacaatcttaaacaacttctacattcacctcatccatatctagaaaatatcctctagagtcagatcccctgcaagtgttgagaaaattcatcaggcttattgaactggaatagtgccacatactgggcatgaagggcaacgtcaartatgagggaagacctatgtgagacaaggccattaattgctgtgtaacaagcacagtccgttaggtctgcctctgaaactgctgggarcaaagcattcctctccaaaacttcaaccaaagcagcccacagcactgagatatttttaagatagactggcagtcaatggagaaggagaaatgaaggagacaagtggaagatgatggaaacatgctaggaagaaggccagaggagatgcacaaaattgcgacacacttaagcacaatagtactggacattcttcttaaaactattaaaatttta

SEQ ID NO: 27899 - DNA, 600 bp, Chicken  19866894245389_2
ttccctgtactaattttgtaacatgatcctgtgatgcaactaccactaaaattggtagttaatacacaacaatcttaaacaacttctacattcacctcatccatatctagaaaatatcctctagagtcagatcccctgcaagtgttgagaaaattcatcaggcttattgaactggaatagtgccacatactgggcatgaagggcaacgtcaartatgagggaagacctatgtgagacaaggccattaattgctgtgtaacaagcacagtccgttaggtctgcctctgaaactgctgggarcaaagcattcctctccaaaacttcaaccaaagcagcccacagcactgagatatttttaagatagactggcagtcaatggagaaggagaaatgaaggagacaagtggaagatgatggaaacatgctaggaagaaggccagaggagatgcacaaaattgcgacacacttaagcacaatagtactggacattcttcttaaaactattaaaattttaattgcaaactgaaaagaacacacatgtcatgcctaaaaagcagcagtattcgtgctcatctttttgttgatatgttctcgacatggt

SEQ ID NO: 27900 - DNA, 600 bp, Chicken  19866894245393_1
gctgggagaagaaaaagcccatacctctgtgagcactgttgagcaaaagccaatgcattagagtattagcaacagtgtttaacccacgaagtccagcaccattaaagctattgtaaagaatattaactctatcccagtcaaatacaaatgggtaaatggtctgtctgtttttattttgcacatgacatgcatttcaattcttttcaagagaacttaaaagattctggggatagaccagacataaaagcaactgaggaaacgaagcacacaggctgcacatctcaaagaacaccacttacygccaggcaatcattcgttctttattcaagtcaacgtgtataaatctcacagcaattaagaactacctgtcatcttgaccaaaaggccagtagtagtaccaaagatgcaaggtgattgaacactaggtggccacagtgtttagatccaaaaatagtaaatatgcacagagttactggaggatctacaccttcttgcaagttccaaaaattgattcggtcatcaacaggaaagccctttaatttttccacactgaaaagaaaccgcgtagaacttctgtaagacctgagtctcatgaaggaa

SEQ ID NO: 27901 - DNA, 599 bp, Chicken  19866894245395_1
  misc_feature (1)..(84): n is any nucleotide
nnnnnnnnnnnnnnnnnnnnnnnnnnnnnnnnnnnnnnnnnnnnnnnnnnnnnnnnnnnnnnnnnnnnnnnnnnnnnnnnnnnntccttggagttgctgagggtgagtttttatccatgatgctgagattcagaaatagcccttcagatcatcatcaattgcgtgtgtggccccgataatcggatctccagtattggcaaatttatctctggaactcctcggcgaaagcttcctcaggcccctaagagcagtgagcacacgctggctaagatgtggaatgtggtgcagtccaacaacggyatcaaagtgctgctgtcactgctgtctataaagatgccaatcacagatgcagatcaaatccgagcgttagcctgcaaagccttggtagggctttcacgcagcagtactgtccggcagattatcagcaagctcccactcttcagcagctgtcaaattcagcagctgatgaaagagccagtgcttcaggacaagcgcagcgagcacgtgaagttctgtaaatacgctgctgaactgatagagcgtgtctctgggaagccactgctgattggcacagatgtctccctggctcgattgcagaa

SEQ ID NO: 27902 - DNA, 600 bp, Chicken  19866894245395_2
cacagagtaccttagggagcagcatgcccgctgcaaaaaccctgttgccacctgtccccctttctctctctttactccccaccagtgtcctgagccaaaacagaggcgccaagcgccaactaactttacctcacggctgacccgcagggcagcctttccgaagtatggaggggtggatggtggctgcttcgatagacatcttatatttagcaggtaaggaagaaaaacgtttcttgctccctctccgagtgtgccctgtgctgaaaagccttgcctgaaatcaggctgtggaatcccacrgagaagcctccttgggcaggcaagcattttaagttcaacagtggcagatggcagagctttgcaaggcaattttagaacctctgtttctcttatactaagggtcagcactgaggatacaaatacacactaatttcggggtgatattaattaattggcaacgtcagttgaggaagctcatatttctttgttctcctttggaaggtatgtgatgtcagttttacaggagagagtagcatagccttgaggttgttttgctgacagacccggacgtgctgacagctggaggatagaagaatgcgt

SEQ ID NO: 27903 - DNA, 600 bp, Chicken  19866894245400_1
ccatgcataggcctttgctagaagaagagccatgcttgtggctttcttaactatgtacttacgtaagagtgagcttttattttgtggctttattttttcctacatacatgattaaaaacctgctgctggtttttttcactgtgcatcatgtcaatgtgggttcatgccttttttttttaattttgatttgacatttttggtttgatcagggcatgcttaatgtttttattacctggatttggaataaaaagcagcaattaaaaaatgtaaatgaatatttctggcgaatgaccccagggrgcacatttgatgtatgtttcctatgcttcgtgcaatggaagaatattacacaatttaatgttcagtgatactttgccccctctattctaaaaagttgggtgttaggggaatatggttgacagaataatagggattagtttagtgcaaggaaatcctcccagtgtggggtcatatgaaacaatgcaccaactctgaaacccrcactgccttcctgcccttccatgctctctttgagtaacctcttctgctctcactgtgcaccttgtgaatgagccactggaacttcttcctttgcgtgga

SEQ ID NO: 27904 - DNA, 600 bp, Chicken  19866894245400_2
ttgatcagggcatgcttaatgtttttattacctggatttggaataaaaagcagcaattaaaaaatgtaaatgaatatttctggcgaatgaccccagggrgcacatttgatgtatgtttcctatgcttcgtgcaatggaagaatattacacaatttaatgttcagtgatactttgccccctctattctaaaaagttgggtgttaggggaatatggttgacagaataatagggattagtttagtgcaaggaaatcctcccagtgtggggtcatatgaaacaatgcaccaactctgaaacccrcactgccttcctgcccttccatgctctctttgagtaacctcttctgctctcactgtgcaccttgtgaatgagccactggaacttcttcctttgcgtggagataacttgggaaatgtccgtgcataacccttggaattatgcggcagccaaagctgcttcatttgtttaatggtagtcacctgttacaaatatggaagaataaaaataagatgatgatagtctaaccattcaggtacggaacagatttatttcagatctgtaaacacaactgacagcttttgctggtaatctttgtataaa

SEQ ID NO: 27905 - DNA, 600 bp, Chicken  19866894245408_1
catttcattcattatgcgccgtttggtgctcactgaataaaacatattaaagcgagtgcacgacagactgggaatgtgaatccctttctcgttccatttgcatttttcagagacgtcagcctacataaaatcaatggggtcaccccagagttatgtcagcactaagagggacaagattggtgccttagagaagtcaggacagactgtctgagtaacagtagacaaaaaacctctgtcacagtaagattacagatgagagcagttaaagcccacctgcaaattctttatccatatttttcratatccaatggacatggctacccatacttctagtagccgaactgacttgcacacttctgcaggaatacttccatccacaggaaattctcagcgtrtgcatttgggcatatgcccctcagcccccagagctgcagactgggcccccaaaacaagggggctgtcacacaaggcagaaaagctatagcaaagtacttaacactggcatctccaaatcgtaccaccaagcgctgctgtagccctgcaaatcaagattatcagtaccattatttttttatattaagcgtgcccttaaatgaaacc

SEQ ID NO: 27906 - DNA, 600 bp, Chicken  19866894245408_2
atttgcatttttcagagacgtcagcctacataaaatcaatggggtcaccccagagttatgtcagcactaagagggacaagattggtgccttagagaagtcaggacagactgtctgagtaacagtagacaaaaaacctctgtcacagtaagattacagatgagagcagttaaagcccacctgcaaattctttatccatatttttcratatccaatggacatggctacccatacttctagtagccgaactgacttgcacacttctgcaggaatacttccatccacaggaaattctcagcgtrtgcatttgggcatatgcccctcagcccccagagctgcagactgggcccccaaaacaagggggctgtcacacaaggcagaaaagctatagcaaagtacttaacactggcatctccaaatcgtaccaccaagcgctgctgtagccctgcaaatcaagattatcagtaccattatttttttatattaagcgtgcccttaaatgaaacctggcatacttttttgggtgatgatttatgttttcagctgccctaatcagagacgtgtgtcagcaagcaagaaaatcaggttgccacttagagcaa

SEQ ID NO: 27907 - DNA, 600 bp, Chicken  19866894245408_3
ccgctgcttatttacttcatactacattcatgtatccctccaaaacagcaccatctcctaagtgacggcgctcagcctgcagcctggtccagtatcagtacagtcggcctggggagatgttttgttattctggctgttccttctcgcagtgaagggagtcagctctgcactgatgtacatgtgtgcatgtgctgctgtgggcagaaggctgcatcagtgcacaacccctgatgcccaaaacccacagccccaacaatagcctggtgaggtcaagcagcacagcgcagcccagcggttctycctcggtcaggcttagcaagtatttacccagagagatatgagtttaactagcataggtataaccccagtgtaaatactgtaatcctagatagcagaagagggccgttatcatcctactttcaatcctataggcaagggcttaacctcttcattgaaaaatgatgcttttctgcagaaggtataaatagagacactcttggctcccagtgagtcacagcttgccagctgtgtcttttttattacaagctgtgcaatatttacaaggttctaaggcctctcctgagtccagccttgaaataa

SEQ ID NO: 27908 - DNA, 600 bp, Chicken  19866894245410_1
ctcagagctaccttggttttaaactatggaaaaaatattaatgtaattacaaatattacctccatagagcaaaacttgccattgaattacttttttaacttaggatagtgtatttaaattcttctctgttctccaattgtgatacactttttcctgtgcatgaaaactttacattaatatggaaatataaaatgaactatagagactcaaaatgtcactaatatttgtttgaactatatttgttcatctggaagttaaagaaaatgagaaaactaacagctattttgtatcaaacatatyttaatggcttttaaaagaagcaaggggttaaaatgtgaccctagctaaatctattaaacataaaatggctagaatggttttgacaagctcattaaaattaatacgaacatttcaatagtacagactggctgccataaattattcaagaaaagaaattatgccattcaacaaagcatgtattttttattaaaatggcaggaaaactttaactagcagctaatttccatttcaatctgaattactagttttattttcttggagtttcataatgaaatcagctacaataaacacaycctgtat

SEQ ID NO: 27909 - DNA, 514 bp, Chicken  19866894245410_2
acatatyttaatggcttttaaaagaagcaaggggttaaaatgtgaccctagctaaatctattaaacataaaatggctagaatggttttgacaagctcattaaaattaatacgaacatttcaatagtacagactggctgccataaattattcaagaaaagaaattatgccattcaacaaagcatgtattttttattaaaatggcaggaaaactttaactagcagctaatttccatttcaatctgaattactagttttattttcttggagtttcataatgaaatcagctacaataaacacaycctgtattacagcattgtgtatcacttagctttattacatggtgtaggccatggttacgaatcagtgaaagaaaagagacaaagacatgacagcagtttgttgtcagccatgaaaccataaatcaaatctatttcatatctttttagacatgggccagagctyctaagtgtttgtcaggcttcagtgcatgtgtgtttgtgcatgtaagcagtg

SEQ ID NO: 27910 - DNA, 351 bp, Chicken  19866894245410_3
tatgccattcaacaaagcatgtattttttattaaaatggcaggaaaactttaactagcagctaatttccatttcaatctgaattactagttttattttcttggagtttcataatgaaatcagctacaataaacacaycctgtattacagcattgtgtatcacttagctttattacatggtgtaggccatggttacgaatcagtgaaagaaaagagacaaagacatgacagcagtttgttgtcagccatgaaaccataaatcaaatctatttcatatctttttagacatgggccagagctyctaagtgtttgtcaggcttcagtgcatgtgtgtttgtgcatgtaagcagtg

SEQ ID NO: 27911 - DNA, 600 bp, Chicken  19866894245416_1
ggagtgttggtgaagtcttaggctggaaatacagcgtatatttttgtttggattttttgttgccatgtgcttttgtatttgtggagttacagatctcttaacgtacctcgaagatgtatttaaaaataaggccattgcttggatgtagaaggaattttcctctgctgcactttttaaaattttattcgattctgcattgatttggaattttcaattttgtaatttctagcatcaccggtttaaaagtaaatttccagtgtttttacagtttgagctacattagatttttattactctaarcactttagttttgagcggttgatttcgtcagcttctttatgcatatccttatgcaaaatgaatgcatgagtttatttttcatgcattttgttcttctgagggattgtgaaattgtgtccctttaaatagtcatgctttgacgtgttacaatcaatagttgttactataaaaatgagattttaagtaacagatactaccaaaagcaacattcagcagtatttttaaactaaagcaaataggtttcagcatgtgaaaaacaacaaccctgtaatgttgtttgttactaaattattgagtctt

SEQ ID NO: 27912 - DNA, 600 bp, Chicken  19866894245416_2
cttctttatgcatatccttatgcaaaatgaatgcatgagtttatttttcatgcattttgttcttctgagggattgtgaaattgtgtccctttaaatagtcatgctttgacgtgttacaatcaatagttgttactataaaaatgagattttaagtaacagatactaccaaaagcaacattcagcagtatttttaaactaaagcaaataggtttcagcatgtgaaaaacaacaaccctgtaatgttgtttgttactaaattattgagtctttttaatataaatagtctataaaactacttgraactctgagacaagtcattttttattcaaatcatggaaaatattcttttttggttctacttttaaagatctcatggaagaatgtttggaagcatcttctgctttttcttaacttttgagctttgtttcatttagcttagcatgctttgccaggagcaattttaattgccggatctgtgaaatttgagccagaatttacagaaagtttgactacctctagaagttttctgtcctctttgcaaacaaggatctgttgatcactcatgtgagtctgcttagtgtttttacacaatcttgtctt

SEQ ID NO: 27913 - DNA, 600 bp, Chicken  19866894245421_1
cccatcatacttactgtgtccatccgttggttggcaccgcgtggccataaatacagcttctggataccattaagagatttccttaactgaaagactgtggaatctgtctgtttcagtgcatgttgagaacaggagggaccccctggccgacagctttgtaagcacgatgtgtgactccggcatgctggagagacccgaggagaagtttcacgaggatcccagccccgcactgacgtgggacagtcagtggggttcagaaatgatggaaacaaccaccagcaggaatggctttggaggtgrtgctcagtacgaccgagcctttggtgaacacctggatctctttaatgctcagcaaaatgatgtcagaaagagactctgcgtgtccagcggatgtgagaggaattatatccagcaggagcatctttcagctctgcagggagcccaggaagagctgctgccagtccccaagtgtgaaaacagtcccatcgaagtggccttycagcacccagtggatgctgcaggggagaagtttgaagggctgccagccaagctcgcgccaagcagtgcgggtagaaccaggcttcgtgagcacaacggcct

SEQ ID NO: 27914 - DNA, 600 bp, Chicken  19866894245421_2
gagaagtttcacgaggatcccagccccgcactgacgtgggacagtcagtggggttcagaaatgatggaaacaaccaccagcaggaatggctttggaggtgrtgctcagtacgaccgagcctttggtgaacacctggatctctttaatgctcagcaaaatgatgtcagaaagagactctgcgtgtccagcggatgtgagaggaattatatccagcaggagcatctttcagctctgcagggagcccaggaagagctgctgccagtccccaagtgtgaaaacagtcccatcgaagtggccttycagcacccagtggatgctgcaggggagaagtttgaagggctgccagccaagctcgcgccaagcagtgcgggtagaaccaggcttcgtgagcacaacggcctttgcagagaggaccggccgtcggtggggagcagagggaagctccctgcagagaacgtgctatccagcccctgcgaggccaacacacgggatgcgtcagaggcgcccaggggcggcttagcgagccaacagcagagccagggcaaggggaagtcctacatatgcaatgactgtgggaaaagctttgtttgccactcctgg

SEQ ID NO: 27915 - DNA, 599 bp, Chicken  19866894245427_1
  misc_feature (1)..(13): n is any nucleotide
nnnnnnnnnnnnntagtctgggaggtgttggtcatgagaccccaaaaatcacaaatatcacgaagaagggagtggggaacattgggtgaaatgagtgttagggagctgcaaagtggaagagcagtggttcctgggcagctcttggactgtgatactgtgatgggagaccatgggaactggctgtcagtgtgggtcccaaacctaagggacgggtttgcaggcagttcaacagatgccacttctgactagagaagctgcagggtcatcagaggctgggaaagaatattcttttaaatgttyattcaagatattgctgtgtcttttcctacttttcactctccatcttttataatctgatgttgactgcttttggaaatagattttgactctttatggtttttatggtctttaccttaccaataaggtgtctcttggattccttcacagcttttttgagcttttttgagttttcagcctcttggcaaccctgtcagaaaatcttgtgctgtgtcagatttgcaaaatctagttttacatattgattttataaacatactgcatgcaatgaatgtcttccatatctccatgttctgtggagc

SEQ ID NO: 27916 - DNA, 600 bp, Chicken  19866894245427_2
ttgaggccatgttgcagactgaagaaccattctaactattagacaattctgtaatggaatatcctttttaagtgacaacatgtaggtaagaagatattaagctacctttttgacattaaatgccaaaacgagaatatgcgtttatatcttcttttttagccttgctttacctaaatgcactttataaggaacctatgaactgcttattttttttttcctgtacaaccttcctgcccagctttgtacatatggtgggtttgctgtgaagattatagaataattagattccagtagaaaaaractatgttggatctcaaatttgtttgctgcaattatttgcagttacataatgaaaaatacaaggaattgtagcaaagaatagtctccggaatagggcaagctgaaccttgcccaagggactggtttgtcttctggtcagtaacacagagcagctgcatgatgtgtcattgaaagtggacgtctcccaggtagtcatcagcagtctccatggtggtctgttcccaggtttcaccttagtcacccatttgcttgtgtggctggcaggcatctaacctgtagctgcagtcaagactgctttaa

SEQ ID NO: 27917 - DNA, 444 bp, Chicken  19866894245429_1
cagatccttcccaaccttaggaaataagtggggatggattttttcccttagatatcgttactgggagagagtctgggaggcaaatgcagaaccttggcaccaatccaacaaagtaagtgttgggataagttttctttcagggatttcaacccattcgtgtagtttcttaatgatccaaaatcttcaaggagttgccttttagccccagctccctttcaatatttgtcaagtgtgtcaaagttggtacttcatgtttcttctgtaccttaatgctctcaaggagaaactttggttttagargcttgaaagctatcttttccctgttgatttattttattactggaaggaaagacgatcgtttttaaagcaagcagcaagaatctatgagtgtgagagtggaagcagcctgtctcttttggaatctcagtgctcacgtcccagcat

SEQ ID NO: 27918 - DNA, 552 bp, Chicken  19866894245430_1
  misc_feature (1)..(74): n is any nucleotide
nnnnnnnnnnnnnnnnnnnnnnnnnnnnnnnnnnnnnnnnnnnnnnnnnnnnnnnnnnnnnnnnnnnnnnnnnnatccgtaagcattcctaggatgttggtctccctgctgtgaaggaaagctggtctcccttgggaagtcctgggattctgagggattaaatacaataaaaatgagcgatatcatttatggagaaatgatatgcatacatcaggtgataatcgcgcctctctgctctctcccttcagcatacctatagccaagcagctggcatcaataaaaggtaagggcctccacccmcagtgttcatccatgtctcctctcctgctcacctttcccttaaagtcacagtcaaaccacatccaggatctgacartaactgtgagcagggagcgtatggtcttcaaggtatggtttaggagtgaggggatgaacccagccaaatatttcagccaaaattccaaatacatcacaaagctagtgtacagctctgctgcctatgcttaccagttgggccatgtttccctgccagaggtccctgggagccaacac

SEQ ID NO: 27919 - DNA, 476 bp, Chicken  19866894245430_2
atccgtaagcattcctaggatgttggtctccctgctgtgaaggaaagctggtctcccttgggaagtcctgggattctgagggattaaatacaataaaaatgagcgatatcatttatggagaaatgatatgcatacatcaggtgataatcgcgcctctctgctctctcccttcagcatacctatagccaagcagctggcatcaataaaaggtaagggcctccacccmcagtgttcatccatgtctcctctcctgctcacctttcccttaaagtcacagtcaaaccacatccaggatctgartaactgtgagcagggagcgtatggtcttcaaggtatggtttaggagtgaggggatgaacccagccaaatatttcagccaaaattccaaatacatcacaaagctagtgtacagctctgctgcctatgcttaccagttgggccatgtttccctgccagaggtccctgggagccaacac

SEQ ID NO: 27920 - DNA, 600 bp, Chicken  19866894245434_1
agcgccacgctgcctgtgctgctgctcgcctctgtgctgcttctccccatgcaaatcaccccaaaacacagcacaaaacccaaacagctgggacacaatgccttcgacttcactgggattaattctgatctcctctggccggcgtgtgtgcaaatagcaccggcttcctaaatgaagatgataatttggggtaaggctgatccctctccccagccagcaggtcaaggaggggatgctccttccacggggcctttgatctttgctgcttgaccttgcttttggcaacacaggggggtcagrgaaattgttttcagagccccacagcccattgattccccattatcatggtaatggcagacccaagagcctatggcttgtggccatgccatcccttggcaccacgcgtcccgcagagaccaacaagtgcccatcggttccaccccatgaaagagaaggtgaacgcggggagacctcaccacctgtattataatacacagctgtattgaaattttcctggcagagctgaaattttaatgtttaatttacttgaactaatgggtcacagaattcccatctacgctgaaaatactaatgaacctt

SEQ ID NO: 27921 - DNA, 599 bp, Chicken  19866894245435_1
  misc_feature (1)..(89): n is any nucleotide
nnnnnnnnnnnnnnnnnnnnnnnnnnnnnnnnnnnnnnnnnnnnnnnnnnnnnnnnnnnnnnnnnnnnnnnnnnnnnnnnnnnnnnnnnacttcctttaaatccccaaagctctttgcctcagtttgactcccattctgttaacagcatgccacatcaattcttatacgtgcttcatacatgcaccatttgctttccagcctggctgactcctaaaattagcatccttacggacatgatgaacaatgcaacttccctgctctgaatatggattgatctcaccctgccctgtgcctactgygacacaaagtctagtgaaacccaacctgcttgctctacagcagcttgctcttgctttatacatatccaccaaggaatttcaatcactttttattgaatgtgttattgaatatgagcagcatttcctgctaatttaaagcacagcagctcacagaaagaagagccacataaaacattgagtaggtctatgctttcatgttaaatttatgagtcctttcatataacctcactgaggcaacaaasacaactgggggcttaacttctacttcattagaaaacctctagtctctctaactcttc

SEQ ID NO: 27922 - DNA, 600 bp, Chicken  19866894245435_2
caatgcaacttccctgctctgaatatggattgatctcaccctgccctgtgcctactgygacacaaagtctagtgaaacccaacctgcttgctctacagcagcttgctcttgctttatacatatccaccaaggaatttcaatcactttttattgaatgtgttattgaatatgagcagcatttcctgctaatttaaagcacagcagctcacagaaagaagagccacataaaacattgagtaggtctatgctttcatgttaaatttatgagtcctttcatataacctcactgaggcaacaaasacaactgggggcttaacttctacttcattagaaaacctctagtctctctaactcttcaagaggcaatttgaaatttcttaagacaaaaaacaaacgaccaatgaattatcttgtcatctcagtgtttttaatttgctgcaacgttttgcaataaatacgcataagagcaccatgaaatttacatgaaggcagctagaggctgtggtgcatatgggtaaggagcttacggcagttttaagcatactgaaaagcccaagagatgcttgaggttctgggactgtgaagaggtttgtagcaaca

SEQ ID NO: 27923 - DNA, 600 bp, Chicken  19866894245436_1
tgtgctggggagttggggcaggcctcattacctcggggttctttaaaaggccaaacaaaaaccagaagaaagagtgttaagggtagaggggggcagggaggcgagaactagaaaaaagttgaaagaaaagaaaagacgactggagttgatggatattccatctgtttatgttcagaccagtgctgggaattaacaaaggctgttggagacgtaggctctctttctccctccctccctccctatctttctccaaatgttctggatgatttggttttgttcgctgctcgcaaggaacagagygggttgtgttttgttgtgttgggtgggtttttttttcgggaccatgtgtctttgcatgggggctctrcagctggtacccgcactgccagaccctgatttgcagtaggagctgctggggccccaatggctctcagcactttcacatgcagagtagatggagtctccagggccagatccctccacccagagaaatgagtgcagtttcttggctttcaccagagctgcacaccaatgcaagagtgtttattccgtctatacacgtggcacagggatgatcagctggttaaggatgcaattcct

SEQ ID NO: 27924 - DNA, 600 bp, Chicken  19866894245436_2
gaaagagtgttaagggtagaggggggcagggaggcgagaactagaaaaaagttgaaagaaaagaaaagacgactggagttgatggatattccatctgtttatgttcagaccagtgctgggaattaacaaaggctgttggagacgtaggctctctttctccctccctccctccctatctttctccaaatgttctggatgatttggttttgttcgctgctcgcaaggaacagagygggttgtgttttgttgtgttgggtgggtttttttttcgggaccatgtgtctttgcatgggggctctrcagctggtacccgcactgccagaccctgatttgcagtaggagctgctggggccccaatggctctcagcactttcacatgcagagtagatggagtctccagggccagatccctccacccagagaaatgagtgcagtttcttggctttcaccagagctgcacaccaatgcaagagtgtttattccgtctatacacgtggcacagggatgatcagctggttaaggatgcaattcctgctcccctgtggggttagagtagccttcgtgtagcttaacttccagcttcaaggccaaggtttgtgc

SEQ ID NO: 27925 - DNA, 600 bp, Chicken  19866894245440_1
tgggtaactttgcctcaaacctttcgggaggtcagatatatgcacctggggcacctcttggtggagcacctgcagctgctaattttaacagacagcatttttccccacttagtttattgcctccatgttcatcagcatcaaatggtgagttctactcagctggaagtagttgagaagcttttgtatttaaacaaaacaaaagaaggcagccttgtgttacctgttactactacctattaagacttctattttaggaaggctttttcagcagctgtgatttttgtcatgctattggagttscttattcttgttgccaataaccctggaatgctgatatatgygataatgttgtgagggtattatttgaagtgtaagtagtgtaaatcctgtagtgataytttackaaagccagttctgcagataagctggtattcttgatgttgttaaaacaaaactgtataatgtgtttcaagggaggctgcttatggcaagttctggtacctttttccatttctgccctatgtagcagagttcttgggcagaaaaagttctattgaatgctgacttattccgggaacaagttaatctgttttagtagca

SEQ ID NO: 27926 - DNA, 600 bp, Chicken  19866894245440_2
gcacctggggcacctcttggtggagcacctgcagctgctaattttaacagacagcatttttccccacttagtttattgcctccatgttcatcagcatcaaatggtgagttctactcagctggaagtagttgagaagcttttgtatttaaacaaaacaaaagaaggcagccttgtgttacctgttactactacctattaagacttctattttaggaaggctttttcagcagctgtgatttttgtcatgctattggagttscttattcttgttgccaataaccctggaatgctgatatatgygataatgttgtgagggtattatttgaagtgtaagtagtgtaaatcctgtagtgataytttackaaagccagttctgcagataagctggtattcttgatgttgttaaaacaaaactgtataatgtgtttcaagggaggctgcttatggcaagttctggtacctttttccatttctgccctatgtagcagagttcttgggcagaaaaagttctattgaatgctgacttattccgggaacaagttaatctgttttagtagcaaatataaaaacaaaaaacaaccagccagcatctccagatta

SEQ ID NO: 27927 - DNA, 600 bp, Chicken  19866894245440_3
ttttccccacttagtttattgcctccatgttcatcagcatcaaatggtgagttctactcagctggaagtagttgagaagcttttgtatttaaacaaaacaaaagaaggcagccttgtgttacctgttactactacctattaagacttctattttaggaaggctttttcagcagctgtgatttttgtcatgctattggagttscttattcttgttgccaataaccctggaatgctgatatatgygataatgttgtgagggtattatttgaagtgtaagtagtgtaaatcctgtagtgataytttackaaagccagttctgcagataagctggtattcttgatgttgttaaaacaaaactgtataatgtgtttcaagggaggctgcttatggcaagttctggtacctttttccatttctgccctatgtagcagagttcttgggcagaaaaagttctattgaatgctgacttattccgggaacaagttaatctgttttagtagcaaatataaaaacaaaaaacaaccagccagcatctccagattaaaaacaaacaaaaacacaataaattgcagctatgcttttgaacatactcctcagatc

SEQ ID NO: 27928 - DNA, 600 bp, Chicken  19866894245440_4
ccacttagtttattgcctccatgttcatcagcatcaaatggtgagttctactcagctggaagtagttgagaagcttttgtatttaaacaaaacaaaagaaggcagccttgtgttacctgttactactacctattaagacttctattttaggaaggctttttcagcagctgtgatttttgtcatgctattggagttscttattcttgttgccaataaccctggaatgctgatatatgygataatgttgtgagggtattatttgaagtgtaagtagtgtaaatcctgtagtgataytttackaaagccagttctgcagataagctggtattcttgatgttgttaaaacaaaactgtataatgtgtttcaagggaggctgcttatggcaagttctggtacctttttccatttctgccctatgtagcagagttcttgggcagaaaaagttctattgaatgctgacttattccgggaacaagttaatctgttttagtagcaaatataaaaacaaaaaacaaccagccagcatctccagattaaaaacaaacaaaaacacaataaattgcagctatgcttttgaacatactcctcagatcctcttt

SEQ ID NO: 27929 - DNA, 600 bp, Chicken  19866894245445_1
aatattagaagttttcttttcctttggtatttgtttttgcaattgggcaaaggaataagtagtggatgaggaaggaagctgaagcagaagtatttttccaactgatcaaagaagatgctattttgcatggaacaacatttagctgaactttgcaatgaatgccataaaacagtattttgaccagaaatgaaacatttttcagaaggattattgttttatctctgtctgtctctctatctatgcaagatcttacaaagacgaaaggaaggctagcttcttcgctcactctcacttgtaatygcatctgtaaaactttaaaactatgcaagatctttcttgaccgtgctggatgccattagcattagcattttaccacaggaaaagaatttaaaatagactgcgaactttgtaagaaatcttccaaaagccttccatccctcaaaaactttaatccccaactaggacctgacttacagaaagctctccaaaatatatgagctgttcagtacgctcacagagttgataacagtcagagttctttttttataatgagaaaatccagacctatatttgagatgggaaaaagtaatttttgagaat

SEQ ID NO: 27930 - DNA, 600 bp, Chicken  19866894245445_2
cacagagttgataacagtcagagttctttttttataatgagaaaatccagacctatatttgagatgggaaaaagtaatttttgagaatactgctcagtcaccacgcttatacctggggatctttttatttctttatgcagtttgcattgtgtctttgtagtggcactgggacgtgttaccatcacactgcctgtctcatggctttcatacaagactgcacaagtcattctttgtctttcctgaccctgtatgttaggtgagcctgcacataggaatgaacttggaaacagaaccaacacygaacaagttagacccgtggctctgggcagcctggtctggtggttggcgaccctgcacatagcaaggggttgaaactagatggtcattgtggtccttttcaatccaggccattctatgattctgcaattcataaatactttctaacatgggcttaaaggatgcattaaaaacagggaaagaattgctctggattcaggagtactctactggtactcattcacagttccaagtaaaaatgcttcagctgatctcagtgtaatattagttccttggaatgggtgaccacacacgtcctttggc

SEQ ID NO: 27931 - DNA, 600 bp, Chicken  19866894245459_1
aggaaaaacagcaaaacaagttcccagaagcctggactatctcctgtgttgagtaactgatcaagcaaagacctcccttgtttcacctgtgagtgcctaatcctctatttacccactggagcaagcgatgtgttcttcagaccttgggagcaaccagcacattcagcctgtacctctggaaaatggagccacatggctaatttattctctagtgctctttgggagagacaaaggatgcttgtacccccggtgctcaggcctgttttaccagcagcttttaaatacacagcattatgtgcracttgaggcaactgtaagtggaagtattgtctggaaatgctgcaggtttctttcaggtatgtgccacaggtctcagtgacagcaggtactgagtgaagtttaaacatacatgtaatcaaatcatacaaaagtcatttttcaaatgaaactgaaacacacgcatcatgcacaagccatgccttatttatatctcgaccaactggctgacaggtaacatgaaattaaagcattacagctttctgttgtttccaaaaggtttccactgctccaagtacagcgttmcaaacttcatgtttgctc

SEQ ID NO: 27932 - DNA, 600 bp, Chicken  19866894245459_2
tacacagcattatgtgcracttgaggcaactgtaagtggaagtattgtctggaaatgctgcaggtttctttcaggtatgtgccacaggtctcagtgacagcaggtactgagtgaagtttaaacatacatgtaatcaaatcatacaaaagtcatttttcaaatgaaactgaaacacacgcatcatgcacaagccatgccttatttatatctcgaccaactggctgacaggtaacatgaaattaaagcattacagctttctgttgtttccaaaaggtttccactgctccaagtacagcgttmcaaacttcatgtttgctcgttgtaagtgaattttctgttacaacaraaaaataattggttgtatttctcatatctggaattctcatccagcaaggtgtggacatctcacaaggaggaaatgctggtgaaagccctcaggcaacatgctttaagggctaaaacatgatgcaaaatggactgctagcaagcctaatactaacataggaaagcaccttgcaaattgatagctcaaaagccaacaatgaaagaacggaaacaccattttaacacttaaaatgataggcctgacacagtgtcatg

SEQ ID NO: 27933 - DNA, 600 bp, Chicken  19866894245459_3
gtctggaaatgctgcaggtttctttcaggtatgtgccacaggtctcagtgacagcaggtactgagtgaagtttaaacatacatgtaatcaaatcatacaaaagtcatttttcaaatgaaactgaaacacacgcatcatgcacaagccatgccttatttatatctcgaccaactggctgacaggtaacatgaaattaaagcattacagctttctgttgtttccaaaaggtttccactgctccaagtacagcgttmcaaacttcatgtttgctcgttgtaagtgaattttctgttacaacaraaaaataattggttgtatttctcatatctggaattctcatccagcaaggtgtggacatctcacaaggaggaaatgctggtgaaagccctcaggcaacatgctttaagggctaaaacatgatgcaaaatggactgctagcaagcctaatactaacataggaaagcaccttgcaaattgatagctcaaaagccaacaatgaaagaacggaaacaccattttaacacttaaaatgataggcctgacacagtgtcatgttcttcccattcctgagcaggactctccgctcctgcaagacagcac

SEQ ID NO: 27934 - DNA, 600 bp, Chicken  19866894245473_1
caaaagttccagggaagatagggagaaaaaaaaaagtctcctttcaaacagggagtcttactctctggtttctgtactagtggcaggtggcagatgtgcctgtcttgtgtgtgctgtgctttcttctgcctgtgccctgctggcgcaaagagccccgtgctggcttcagtcactgctggacccactctcgctgtccctggaggggagcgttatgagattacttcccctccttacagtaacagatgactctcagaaatgcttcgattagggtaaaagcagagagaacatttccactgatcragcgctcaacaaacatctgttttgcagatgaaatggactctcaaggagctttgcttcccattatgttacagcctgtttattctgatttcttgccttcagcacgtatggaaatacttcttcattccaagcaacgtgcaagcaggtgtgtcacagtaggcgcacaactggccccctttaagctagagggagccgtgtgtgagggcgctctggtgaaataacgagagtaacgctgaagggggcgaggcgggacccgcggcgcgcatttccccgcgctgcccgctctgcccagcaggtggcggc

SEQ ID NO: 27935 - DNA, 599 bp, Chicken  19866894245482_1
  misc_feature (1)..(107): n is any nucleotide
nnnnnnnnnnnnnnnnnnnnnnnnnnnnnnnnnnnnnnnnnnnnnnnnnnnnnnnnnnnnnnnnnnnnnnnnnnnnnnnnnnnnnnnnnnnnnnnnnnnnnnnnnnnacatttcctttgccagctttttaccttatttctccttctgggtctttcttacattataaaaaaaagaaaaaaagaaattacctttcactcctcaagtcagacatctgttcccaatgctccagccagcagttacaccatttttggtgtgtaaaattagtatgtcaattttactcttttgtatggtttttttttyctattactgtaatcattatttcactcacattctccatttcagttatatctcaaatgaaacacagcaccccctracccccaaaaatgccaagcaaaaacagagaaagatttgagttttagactcctctccccctttactgccgataactaaactttcccctctagcagtggcacaagaagcacctatatctggagagagccaacaaaatccagaccctcaaattcttctctctttcaggcttyaaaattaatccttctttaaattccctcttcagaatgctggatgcctttcttactcat

SEQ ID NO: 27936 - DNA, 599 bp, Chicken  19866894245482_2
  misc_feature (1)..(34): n is any nucleotide
nnnnnnnnnnnnnnnnnnnnnnnnnnnnnnnnnnacatttcctttgccagctttttaccttatttctccttctgggtctttcttacattataaaaaaaagaaaaaaagaaattacctttcactcctcaagtcagacatctgttcccaatgctccagccagcagttacaccatttttggtgtgtaaaattagtatgtcaattttactcttttgtatggtttttttttyctattactgtaatcattatttcactcacattctccatttcagttatatctcaaatgaaacacagcaccccctracccccaaaaatgccaagcaaaaacagagaaagatttgagttttagactcctctccccctttactgccgataactaaactttcccctctagcagtggcacaagaagcacctatatctggagagagccaacaaaatccagaccctcaaattcttctctctttcaggcttyaaaattaatccttctttaaattccctcttcagaatgctggatgcctttcttactcatatctgctggtatcaaaatcttggcagtcatctcctattttaatacatgtaagcattccagaaaatacacaaac

SEQ ID NO: 27937 - DNA, 600 bp, Chicken  19866894245482_3
catttttggtgtgtaaaattagtatgtcaattttactcttttgtatggtttttttttyctattactgtaatcattatttcactcacattctccatttcagttatatctcaaatgaaacacagcaccccctracccccaaaaatgccaagcaaaaacagagaaagatttgagttttagactcctctccccctttactgccgataactaaactttcccctctagcagtggcacaagaagcacctatatctggagagagccaacaaaatccagaccctcaaattcttctctctttcaggcttyaaaattaatccttctttaaattccctcttcagaatgctggatgcctttcttactcatatctgctggtatcaaaatcttggcagtcatctcctattttaatacatgtaagcattccagaaaatacacaaactctgccattactttaacattatcaatgagccttcttttacaccagctctttccccacttttgtcacttcctttaactggctctgattgtccactctcagccttaaatagctattactgtacattatagatgactatagaaatgattctatctccatttgaagcttcctcc

SEQ ID NO: 27938 - DNA, 600 bp, Chicken  19866894245486_1
ggcattttgcctctgaggttggagccaagaacattatgtaaaacgccatgttgtatgaaaccagatgaggtgattaaatctactttttactttcactttctttctcttaaaaaaatgtcctcctaatctcccggaagacagcacccctctgtaaaatgaagcaaggcacggccatgtgggaacagagggatgtccattctgtgtgatcagaaaacaagaactgaaatgcattcatcagttctcatttagttctcactagctggtcaaatatatcccctgtttgtcctgataaattatttkagttcccaccaacacacttcagagggccttgggtcatgctgacagcacagatatctgcagcagactggcaaggaatctagactcgtgggaaatcatattgatctgggacaaaaagtcttgcatcgttctggatctttctgtccaaacatacatctagttctgtgcacatatgcaaacatgattttgtaattacctcaaaactacttatggggaagtagattcaccagcagttgtaaagatcttattggaagctatttttattcagatttcttccctaatttaatggcaatgaaatcatgg

SEQ ID NO: 27939 - DNA, 600 bp, Chicken  19866894245489_1
ctccccagaaatgacaaaaagtaacaaagaagagtcaggacttggctccacacatctggagaactgctactttgttggatacggggatgcaatacggtgacaattcactgctactcaatgtcccactcctgcttgcacccctctggaagggtattaattgatggccagccaggaaatgcctgttcccatagacgtggcacttggtgcctgaccactgcaaaatgagcagcacagcttggtcagaaacacaatgcaaatcctggggttgccaaacttgccttgagttgctgccacagtagrttttatctacgacattactttatttggatttgttatgctcaggcaaataaaaagcattgcctaatttatcaagacttatcaagagttcacttcaaactttaaggcctcaatctggagtccatttgcccccacactactcacacaacaaagccattattccaaacttggcaagcagtggaagagaattaatctggaaagatctggggaaaaagaaggcagttcccttgtcacttgtccaggtctcaccaccaatttcagaaaccattctgcgactttacagaccttgtcaggatgtttgct

SEQ ID NO: 27940 - DNA, 600 bp, Chicken  19866894245496_1
ctccgatggtacctccgatggttcctccgatggtacctccgatggtacctccagcggttcctccaatggctcctctgacggtacctccaacgcatccgatggtacctccggtggtacctccggtggggcctccggtgggacctctgacggtgatacctccgggcacacctccggttgtagctccggttgtacctccggcggttgtcacacctctggcggcggtagctctggtggttgcagctctggcggcggtacctccggttctggtagctccggcggtagctctggtggtcggacctwtggcggttgtagctctgctggttgtcgcccggccggcggtacctctggaggtggcacttctggtggtggcacctctggtggtgacacctccggaggccgtggctgcaccggcggtgcttttggaggcgtccatcgcacctccggtggtcgtcaccgcrtcgacggtggtttctgaggcgtcygtggaggcggcggcacttccggtggctttggatgcagccctggtggtggtggcaccgcgggagggggtgacggtgacaccgcgggagcgggtggtggtggtgacagctctgggcccgg

SEQ ID NO: 27941 - DNA, 600 bp, Chicken  19866894245496_2
ccgggcacacctccggttgtagctccggttgtacctccggcggttgtcacacctctggcggcggtagctctggtggttgcagctctggcggcggtacctccggttctggtagctccggcggtagctctggtggtcggacctwtggcggttgtagctctgctggttgtcgcccggccggcggtacctctggaggtggcacttctggtggtggcacctctggtggtgacacctccggaggccgtggctgcaccggcggtgcttttggaggcgtccatcgcacctccggtggtcgtcaccgcrtcgacggtggtttctgaggcgtcygtggaggcggcggcacttccggtggctttggatgcagccctggtggtggtggcaccgcgggagggggtgacggtgacaccgcgggagcgggtggtggtggtgacagctctgggcccggtgayggggacgccttcggggggtctggaggggacgtccacagctgggacgggggcatctgaggtgacggcggcagctctggacctgcgggaggggacagcaatggtggaggggacgttggttggggtgacaccaatgggggggacagcaagggaggtg

SEQ ID NO: 27942 - DNA, 600 bp, Chicken  19866894245496_3
ccggttgtacctccggcggttgtcacacctctggcggcggtagctctggtggttgcagctctggcggcggtacctccggttctggtagctccggcggtagctctggtggtcggacctwtggcggttgtagctctgctggttgtcgcccggccggcggtacctctggaggtggcacttctggtggtggcacctctggtggtgacacctccggaggccgtggctgcaccggcggtgcttttggaggcgtccatcgcacctccggtggtcgtcaccgcrtcgacggtggtttctgaggcgtcygtggaggcggcggcacttccggtggctttggatgcagccctggtggtggtggcaccgcgggagggggtgacggtgacaccgcgggagcgggtggtggtggtgacagctctgggcccggtgayggggacgccttcggggggtctggaggggacgtccacagctgggacgggggcatctgaggtgacggcggcagctctggacctgcgggaggggacagcaatggtggaggggacgttggttggggtgacaccaatgggggggacagcaagggaggtgacaccaatgggggtgacgttggct

SEQ ID NO: 27943 - DNA, 540 bp, Chicken  19866894245496_4
ggttgtagctctgctggttgtcgcccggccggcggtacctctggaggtggcacttctggtggtggcacctctggtggtgacacctccggaggccgtggctgcaccggcggtgcttttggaggcgtccatcgcacctccggtggtcgtcaccgcrtcgacggtggtttctgaggcgtcygtggaggcggcggcacttccggtggctttggatgcagccctggtggtggtggcaccgcgggagggggtgacggtgacaccgcgggagcgggtggtggtggtgacagctctgggcccggtgayggggacgccttcggggggtctggaggggacgtccacagctgggacgggggcatctgaggtgacggcggcagctctggacctgcgggaggggacagcaatggtggaggggacgttggttggggtgacaccaatgggggggacagcaagggaggtgacaccaatgggggtgacgttggctggggtgacaccaatgggggtgacaccaagggaggtgacaccaatgggggtgacgttggttgg

SEQ ID NO: 27944 - DNA, 599 bp, Chicken  19866894245498_1
  misc_feature (1)..(91): n is any nucleotide
nnnnnnnnnnnnnnnnnnnnnnnnnnnnnnnnnnnnnnnnnnnnnnnnnnnnnnnnnnnnnnnnnnnnnnnnnnnnnnnnnnnnnnnnnnncaaatgatgtgattgaaatggctgccagagcacagatgtaaatggggaattgctctgctgagaaaaccaaaaggaaaaaatagtgcagcaatcagaagagtcagcagggctccactctgcagtacatccagtaggaaagaatgagacactgacagaatttctgttggggatcttatgtggggtagctggaaacacagagcaagaattcrcagagcacaaacccctggtaagcaggaagacggactgatggactgaccccatgaaagtcaggcatcaggcagcattttcacatgcacttaaaactcaaagattttgtctcactttcttttgaatgtgccatggaaggagaacccagagtcctttgaatcttaaaatcctaaggcaatcccaagcaaatcctaaaatccaaggcaaaactaagttactgtgttcccttcgccacttgatcttgtatgcatcaaagaagtaggaacagtctggtaagataaaccatagcaatatggtgctc

SEQ ID NO: 27945 - DNA, 462 bp, Chicken  19866894245498_2
tttgaatgtgccatggaaggagaacccagagtcctttgaatcttaaaatcctaaggcaatcccaagcaaatcctaaaatccaaggcaaaactaagttactgtgttcccttcgccacttgatcttgtatgcatcaaagaagtaggaacagtctggtaagataaaccatagcaatatggtgctctaaatacattattagttggaatgtttaggtatgtataagcagtactactgaaccttaaattctttaaaattttacactgatatttatgggatttttttccattaagtggatattgggraaaaaaaataacacaactggaaatgaattgtgtggatatagcagttcctaactagaactgtaactgttatctttttctgaatgttagagagctttgctctgttttctctgtaaattaccatgctccagcatcccacatcttctgtaaaatgatttgctcagg

SEQ ID NO: 27946 - DNA, 400 bp, Chicken  19866894245500_1
acctacaatctcatagagccaattcctgactatgtagttcttgatagtgggttgaaagaagaacaaaaccacagaggtcaacaaagtaaacattcagtataagctaatctagaggcactggtgatcctcacacattaactacagtacctatgaatggcaacatctacacaggctcaaaatcagacatactgtatttcaaggcaacatcccccttctgtcttagtacttatgcgaagtacctgaattgatataaggcaattggatgcaattgtagtcctttactttttttttttttttttwaaaaaaaaaaaaaaaaagcaacatacctactgcccacttcacaattgagccatttcaccacacctttttgtgcacaggtcctggctcattttcctctaac

SEQ ID NO: 27947 - DNA, 486 bp, Chicken  19866894245505_1
tagagtttagatggcatcactgatcagcgtgccatgcatgccaacacgttgcagtcagcagaagtggagagatggactagttaaacctcagatgtggaacaaatagctgttcatacagaaaagaaacttcagcaatgttaaatagggatgaagaactgtgaagtaaggctgctacctatagaaagttaatgtggccagaaagcatgtaaattagggaagaaataacaggagattctttgttgaacataataaaatagtaaagatgtatgggtaggatgatcattagcaatactaacaaartttctcatgaataatacagctgtttcggtagaagaaattactcaacgctggtgggggcttttgagaatgagttatatctagtattggctctggatatcccatagggtagagagtcatgtgactgaaaatgaaattaagagctttcaggtatctgcaacaccagtcgagacaatgatatatgtgaaa

SEQ ID NO: 27948 - DNA, 600 bp, Chicken  19866894245508_1
ttgcttagtctgctctcggctcttttcctgaagtgaaagtttctacattttttaaatgagtctgcagtagtgttactcctggtatgcatctgacctggccgttgttatgcataccacggtcttttgagtagtgatcttacatgttgctgtaattcagcagaactgagagtactttaggcaaggaggaatgccccccaagtccactttgaatctggtttgcctttggtttttgtggtgtttaagttcttgcacgagctccctggaagcagagagaagctgccttctgggtgcttgctccckgatgcttgtcactttgtgttacgggtcagctgcttgggaaggtgtggacatggcactgagcaatgtggtcagtggttggactggttgatccagttggtggttggaccgggtgatcttgaaggccttttccaacccggatgacaacatgaaaagcagttaactgctgagctgctcagcacatacaaatgaagggtcctgctcaagggtagagcgtgatccatagtggctaccaatggcagagtcctctcgtgtagctgttggcagaggtaactcccagtactgccagctgtggcatcccaa

SEQ ID NO: 27949 - DNA, 600 bp, Chicken  19866894245513_1
gacttgggaaactagtagctgacaaaatacattacagtcaagctttgcaatatttcatatttcatatttaatatttaatcattttcttagaaagagagaaactgtgcatgaatggaagtaccagacaccagccctgaatgagaaattcttttaattaacaggtttgaaaatataagaaacagctgtcagaaagaactagtgctgtttcctaagaaagtctgaggaaaagactcataagtaaataaaagtgtacagatttggcattttaaaaatatggatgaatatttagataattgaaakcaaagcctttattttgaaactcagagtaaatgctttaggagataaacaaccccaaagtcctaacaaaagaaaaatctcagttacaaaggataattaaggaaaataaatatttttttaaatactactctttctaaaaactttattacaaattataagcagatgaaattggaaatatgttttagaattgttgataaagtacaaaatgataaaatatatcaatcactatcacagtcttctttaaattatgaagggtaattaatttaattctcaaaattccaaagtactatttttatagtgaaa

SEQ ID NO: 27950 - DNA, 600 bp, Chicken  19866894245517_1
tggctgatttccaccaggatatgagcagctcttgctttccccctgcatgctgcagcagcgcagtcagagggacacagaccagtccgtccccatccttgtgctgatcactgctttcatcccttgccatgccatctcgctgtcatccaggatccatccattttgtgtccgcctgcagatgtcatttggcttttctccactgcatgcagaaatgagaacatgaggatactgaaagtgtaaaagagctattcattgtgaaactgtccaaatctggcagaatcagaaggtactccaagcagcatrtacaaatctggaagctttgctgtggaaatgcttaaattcaaatttgtagactgattaataatcccattattgtctactgctctgctgggaaggcataaatggtttcctcacagccttctcctccccattacttgatatggaaacaaaaagttaagctgagtaacaaaacttctgtttcttctcccattgccttaccacaacagcaaacagtctagcccacataccacagcattaaatctgcctccccagagataccaaccttccacttacagactgttttccagaagagcgctttcatta

SEQ ID NO: 27951 - DNA, 600 bp, Chicken  19866894245517_2
ccagagataccaaccttccacttacagactgttttccagaagagcgctttcattacagcaccttctcccatcacctcttgttacctgcgttcaggcagcagcctgatgagcctggtgatggaaggctggtagctcagtgatggggagccctatcacgaagtcacttgtgacttctatgccagtgaggctgcagtggtggtggtttgagattatttgagagtttctttaaaaatttggtgtactcagccctgctgactgacaacagacactgacacttcttcattttcaacacttcctttygatagttacagatattacccatttcagctgtgtgccattttttgaaaggtgtccttagatggaaaaacagatatcccactaaatttcatacacaatgtgattacaaatgtcttacagaaaatttaataaaatcttcagaagatgatcagaatgggtagaagcacaccattaaccccattaaccattaaccccatagaacaaaygagmaatttctgatctgcatagggatagtctcatggtgggaccccaatgagtgagctgttagcactgagagatatggcagctcagagctgtgtctcc

SEQ ID NO: 27952 - DNA, 600 bp, Chicken  19866894245517_3
catcacctcttgttacctgcgttcaggcagcagcctgatgagcctggtgatggaaggctggtagctcagtgatggggagccctatcacgaagtcacttgtgacttctatgccagtgaggctgcagtggtggtggtttgagattatttgagagtttctttaaaaatttggtgtactcagccctgctgactgacaacagacactgacacttcttcattttcaacacttcctttygatagttacagatattacccatttcagctgtgtgccattttttgaaaggtgtccttagatggaaaaayagatatcccactaaatttcatacacaatgtgattacaaatgtcttacagaaaatttaataaaatcttcagaagatgatcagaatgggtagaagcacaccattaaccccattaaccattaaccccatagaacaaaygagmaatttctgatctgcatagggatagtctcatggtgggaccccaatgagtgagctgttagcactgagagatatggcagctcagagctgtgtctcctggcgcatggaggatgtgggagattgctgctcgggaaatgtgattttcccttctggagcaactcacag

SEQ ID NO: 27953 - DNA, 600 bp, Chicken  19866894245517_4; identical to SEQ ID NO: 27952

SEQ ID NO: 27954 - DNA, 600 bp, Chicken  19866894245517_5; identical to SEQ ID NO: 27952

SEQ ID NO: 27955 - DNA, 600 bp, Chicken  19866894245517_6; identical to SEQ ID NO: 27952

SEQ ID NO: 27956 - DNA, 508 bp, Chicken  19866894245517_7
ttgagattatttgagagtttctttaaaaatttggtgtactcagccctgctgactgacaacagacactgacacttcttcattttcaacacttcctttygatagttacagatattacccatttcagctgtgtgccattttttgaaaggtgtccttagatggaaaaacagatatcccactaaatttcatacacaatgtgattacaaatgtcttacagaaaatttaataaaatcttcagaagatgatcagaatgggtagaagcacaccattaaccccattaaccattaaccccatagaacaaaygagmaatttctgatctgcatagggatagtctcatggtgggaccccaatgagtgagctgttagcactgagagatatggcagctcagagctgtgtctcctggcgcatggaggatgtgggagattgctgctcgggaaatgtgattttcccttctggagcaactcacagggaaaaaaaagaagtttcacttatttctgtacaataacacaat

SEQ ID NO: 27957 - DNA, 504 bp, Chicken  19866894245517_8
gattatttgagagtttctttaaaaatttggtgtactcagccctgctgactgacaacagacactgacacttcttcattttcaacacttcctttygatagttacagatattacccatttcagctgtgtgccattttttgaaaggtgtccttagatggaaaaacagatatcccactaaatttcatacacaatgtgattacaaatgtcttacagaaaatttaataaaatcttcagaagatgatcagaatgggtagaagcacaccattaaccccattaaccattaaccccatagaacaaaygagmaatttctgatctgcatagggatagtctcatggtgggaccccaatgagtgagctgttagcactgagagatatggcagctcagagctgtgtctcctggcgcatggaggatgtgggagattgctgctcgggaaatgtgattttcccttctggagcaactcacagggaaaaaaaagaagtttcacttatttctgtacaataacacaat

SEQ ID NO: 27958 - DNA, 599 bp, Chicken  19866894245529_1
  misc_feature (1)..(202): n is any nucleotide
nnnnnnnnnnnnnnnnnnnnnnnnnnnnnnnnnnnnnnnnnnnnnnnnnnnnnnnnnnnnnnnnnnnnnnnnnnnnnnnnnnnnnnnnnnnnnnnnnnnnnnnnnnnnnnnnnnnnnnnnnnnnnnnnnnnnnnnnnnnnnnnnnnnnnnnnnnnnnnnnnnnnnnnnnnnnnnnnnnnnnnnnnnnnnnnnnnnnnnnnnncctagaagaaaaataatcatgttttgttgtgggatattttggggagttagacgataatccattaaatgttaccatctctttcctttcctttacccgcytcgaaagtgcttcacctgtgaaagggggcattggtctccygaggtagtgtcatgggttggaaaagaccatcaagcacattcagtccaaccagcaatctgatccacctagtcccatcactaaaatatgtgccttagggccatgcccacagttagctttaaatatctgcagagatgggggctctaccgctaccctgggcagcccatcccaatgctcaaccaccctaataccctgcagggattctcagataggatgccaggatctctggcatccttcccatgaagctgagccaccagctggt

SEQ ID NO: 27959 - DNA, 599 bp, Chicken  19866894245529_2
  misc_feature (1)..(162): n is any nucleotide
nnnnnnnnnnnnnnnnnnnnnnnnnnnnnnnnnnnnnnnnnnnnnnnnnnnnnnnnnnnnnnnnnnnnnnnnnnnnnnnnnnnnnnnnnnnnnnnnnnnnnnnnnnnnnnnnnnnnnnnnnnnnnnnnnnnnnnnnnnnnnnnnnnnnnnnnnnnnnnnnnncctagaagaaaaataatcatgttttgttgtgggatattttggggagttagacgataatccattaaatgttaccatctctttcctttcctttacccgcytcgaaagtgcttcacctgtgaaagggggcattggtctccygaggtagtgtcatgggttggaaaagaccatcaagcacattcagtccaaccagcaatctgatccacctagtcccatcactaaaatatgtgccttagggccatgcccacagttagctttaaatatctgcagagatgggggctctaccgctaccctgggcagcccatcccaatgctcaaccaccctaataccctgcagggattctcagataggatgccaggatctctggcatccttcccatgaagctgagccaccagctggtcctgcttagctgtggcttggtctggccgtgtcctacccac

SEQ ID NO: 27960 - DNA, 600 bp, Chicken  19866894245529_3
acctaaataatcctgaaattaagatcagagtctgtcactgtggttgctgccatatgtagtcgatgcctagctctttctcccatgcagcagttgggatcggggtgcatgaaagccccatcctgctgagcagtgggagcactggctcaggagcagcaggcagtgggagcaccgctcctctgtggggaaggcaaatgctggagtcccagggacccggaatcaaagagctgcagaaatgacaagcattgcctgtcacagcacgtcccctgccaggaagttcagggcacagtgtggacaaccacrcatggcactgcttaattagagggaaatgcagcctccccagtagtggccttgaaccagaagggatgagctaagagggcggcatcctccgaataaagagatgtgcaagaatacaaatgccttggaatggggccatgragagaatgaataagatacccttctaaagcatctctttatttgttagacttattagaaataaaagataaaataaaagctacaagcattttgcgcaacacagcatttgaaaagttcacatgcttttcaagcataccccactaagcacaaactatgattcattttgga

SEQ ID NO: 27961 - DNA, 529 bp, Chicken  19866894245529_4
gcactggctcaggagcagcaggcagtgggagcaccgctcctctgtggggaaggcaaatgctggagtcccagggacccggaatcaaagagctgcagaaatgacaagcattgcctgtcacagcacgtcccctgccaggaagttcagggcacagtgtggacaaccacrcatggcactgcttaattagagggaaatgcagcctccccagtagtggccttgaaccagaagggatgagctaagagggcggcatcctccgaataaagagatgtgcaagaatacaaatgccttggaatggggccatgragagaatgaataagatacccttctaaagcatctctttatttgttagacttattagaaataaaagataaaataaaagctacaagcattttgcgcaacacagcatttgaaaagttcacatgcttttcaagcataccccactaagcacaaactatgattcattttggaatttgctaattaatactggcatggcattgtcccctgctgttgcccaacttcttgcttgagagaa

SEQ ID NO: 27962 - DNA, 600 bp, Chicken  19866894245530_1
ttaccttccataaggggacagtaataaatacttttggtcaggttttctggacaaatcagcatggaggtccttaaagaagtgttcacaagtattccccattcctgttatttgtggctgtttttgcagtcagctaaatatagttctgcttcccacagcgtttgctaaaagctaaaatgtcacagatgttagataaatacatatttgctggagtgttcaccctggtggtatcaagcagttatgctggtggtactttgtggatttttggaaaacagaaataacagtgtgcaatggctccttgtyggcagctgaagtgcaggatgtggcctccctatatttagcctctgctgctatacccatctgtattaagaagacatcctggaagtgttaatgtaggtgattgagctgcaaacttcgaaagactggagaaccgctttcattcttcaaagctttataattcttgtggaaggagtaagcataattccacaacagggacttgtttttcagaaagctacaaccttgtacgccttcaaatatcccaactattggtgttttacaccagaatattcacaatgtgatacattttgaagtgtcctgaatgct

SEQ ID NO: 27963 - DNA, 599 bp, Chicken  19866894245540_1
  misc_feature (1)..(7): n is any nucleotide
nnnnnnnaaaaatccctcttgccagatcctctacaggaagtaatttaatttaccagcaacctggcaagggatgtgtgtgtgtatttatgtaagtaatacatatgcttgtataaacatgcacacagttaggaatatgtattttctactctctcttaaaggtaagtttcaaggagacaaagttaaccctttctctctgcttctccagtgctggcagagctccatggcccatctcagacttctggatacacccctatgctctgcaatgcttaaaggaagctcctcctttcttagacattccaktaagcactgaaayattctrtcacaacatttacatcattatttacatgggaatatgcagtagacatgagtgagtatcactgcacaagttgcactgtgctcacaaggacaggggggactggcttgcaactaaaaggggagatttaggttagatgttagaagcaaattctttactcagagagcggagaggccccggcactgctgcccagagctgcggatgccccatccctggaggtgcccaaggccatgggatgggccctgggcagcctgagctggggggtgggagggctgccattttcact

SEQ ID NO: 27964 - DNA, 600 bp, Chicken  19866894245540_2
ccctcttgccagatcctctacaggaagtaatttaatttaccagcaacctggcaagggatgtgtgtgtgtatttatgtaagtaatacatatgcttgtataaacatgcacacagttaggaatatgtattttctactctctcttaaaggtaagtttcaaggagacaaagttaaccctttctctctgcttctccagtgctggcagagctccatggcccatctcagacttctggatacacccctatgctctgcaatgcttaaaggaagctcctcctttcttagacattccaktaagcactgaaayattctrtcacaacatttacatcattatttacatgggaatatgcagtagacatgagtgagtatcactgcacaagttgcactgtgctcacaaggacaggggggactggcttgcaactaaaaggggagatttaggttagatgttagaagcaaattctttactcagagagcggagaggccccggcactgctgcccagagctgcggatgccccatccctggaggtgcccaaggccatgggatgggccctgggcagcctgagctggggggtgggagggctgccattttcactcatgaggtcatcag

SEQ ID NO: 27965 - DNA, 600 bp, Chicken  19866894245540_3
tgccagatcctctacaggaagtaatttaatttaccagcaacctggcaagggatgtgtgtgtgtatttatgtaagtaatacatatgcttgtataaacatgcacacagttaggaatatgtattttctactctctcttaaaggtaagtttcaaggagacaaagttaaccctttctctctgcttctccagtgctggcagagctccatggcccatctcagacttctggatacacccctatgctctgcaatgcttaaaggaagctcctcctttcttagacattccaktaagcactgaaayattctrtcacaacatttacatcattatttacatgggaatatgcagtagacatgagtgagtatcactgcacaagttgcactgtgctcacaaggacaggggggactggcttgcaactaaaaggggagatttaggttagatgttagaagcaaattctttactcagagagcggagaggccccggcactgctgcccagagctgcggatgccccatccctggaggtgcccaaggccatgggatgggccctgggcagcctgagctggggggtgggagggctgccattttcactcatgaggtcatcagcttgcc

SEQ ID NO: 27966 - DNA, 600 bp, Chicken  19866894245542_1
agtgcccagagaaaccccgattctagttcaggtcaagagctacccttactaatgctctaatcattgaatgactatacctccctctcattctgctagaagtgcatatgaagcatatttggtgtctatcttgagactcccaaggattccctggtgagaggcaggtatctaggtactgagctctgcaaggactgggctgcatcaaaagaggggtggccagcagggcaagggaggtgatcgtctcccctctactatgcccttttaaggcctcatctggaacaccgcatccacacttggggcccycaacataggaacagtgcagaactcagagcaggcccagaggaggccatgaagatgatcaaaggactgaagaaactcttctcggaagaaaggttgaggaagttggatttgtttagcttggagaaggctctggggagaccttattgagacattccagtacttgaagggaagggaattctttacacagaaggtgatgaggcactggaacagcttgctcagaacagcacacaggctgtgtgtgccccatccctggaggtgctcagggccaggttgcatggagctctgggcagcctgagcaggtgg

SEQ ID NO: 27967 - DNA, 600 bp, Chicken  19866894245542_2
gataaatcatgatttgtgtttaaaacaaacaaaaaaagcctaatctagttctcagaaagatgtgacatcctgatacaaatgaaccataatgcaacaaagaggagcatccccagctttagtgccagttaaaacaggaatataacaaaacacttagataccaattgtttgaaagggccttatcttctctcattcatacgctatgttacatcacactagcattgttaggttttaattaaacatttggaaattgctatgcattcttccaagggagaaaccagtataaataagacaattacactraaacgggtgatgaagtaagtaagtgatagaagtagttcwatttgttatggcaactctaacatctgatcgcctttccttcaccttattmaaataaaccctactttacaaactatgtatgcagatctttttttttttttaactgcaaggataacagaaaaaggtatttctttcaagaagagaattgtgcttggcagaaagggttggcatctgtctggctcagataacatcagacagctgtgttctatcctgaaagggtattgtgaagctaagttttcctagggaaataatgtctttggtatg

SEQ ID NO: 27968 - DNA, 600 bp, Chicken  19866894245542_3
ctaatctagttctcagaaagatgtgacatcctgatacaaatgaaccataatgcaacaaagaggagcatccccagctttagtgccagttaaaacaggaatataacaaaacacttagataccaattgtttgaaagggccttatcttctctcattcatacgctatgttacatcacactagcattgttaggttttaattaaacatttggaaattgctatgcattcttccaagggagaaaccagtataaataagacaattacactraaacgggtgatgaagtaagtaagtgatagaagtagttcwatttgttatggcaactctaacatctgatcgcctttccttcaccttattmaaataaaccctactttacaaactatgtatgcagatctttttttttttttaactgcaaggataacagaaaaaggtatttctttcaagaagagaattgtgcttggcagaaagggttggcatctgtctggctcagataacatcagacagctgtgttctatcctgaaagggtattgtgaagctaagttttcctagggaaataatgtctttggtatgaaaagcagcaaaatgtaatgaagtctccaagtaagtaag

SEQ ID NO: 27969 - DNA, 600 bp, Chicken  19866894245542_4
atgcaacaaagaggagcatccccagctttagtgccagttaaaacaggaatataacaaaacacttagataccaattgtttgaaagggccttatcttctctcattcatacgctatgttacatcacactagcattgttaggttttaattaaacatttggaaattgctatgcattcttccaagggagaaaccagtataaataagacaattacactraaacgggtgatgaagtaagtaagtgatagaagtagttcwatttgttatggcaactctaacatctgatcgcctttccttcaccttattmaaataaaccctactttacaaactatgtatgcagatctttttttttttttaactgcaaggataacagaaaaaggtatttctttcaagaagagaattgtgcttggcagaaagggttggcatctgtctggctcagataacatcagacagctgtgttctatcctgaaagggtattgtgaagctaagttttcctagggaaataatgtctttggtatgaaaagcagcaaaatgtaatgaagtctccaagtaagtaagctgagaaaacagtcacagaggtcatttttatctaaaataccaaacctgt

SEQ ID NO: 27970 - DNA, 600 bp, Chicken  19866894245542_5
ttgtgaagctaagttttcctagggaaataatgtctttggtatgaaaagcagcaaaatgtaatgaagtctccaagtaagtaagctgagaaaacagtcacagaggtcatttttatctaaaataccaaacctgtatcaggagaaaaagagaacagaaagagaggaagataacatcttcaccaaacagtaagaaaaataaggagtaggaggatcatctcactgtatattctcaattaaattaatcctttagattaaaagagaaatacaaaggtaagaggcaacagagctgctggataacaagcwgcactgggatgcaagactcctaggaccatgggaacaggggcagctacaatggagacatgaaagcaagccaagcagaaatgcagttgctggcttgcagtaactacaggggaaggtggattcaggctgttcagagaggcgcacaatagaaggaaagtaataatcagcacaaaccacaataagggaaacgtgggtttgactaaaggaaaaagcattcctcactgttaggcactggaagagacatgccagggaggctgcatggggatttcagcacatggcagagcaggggcctgagcagctcag

SEQ ID NO: 27971 - DNA, 599 bp, Chicken  19866894245549_1
  misc_feature (1)..(80): n is any nucleotide
nnnnnnnnnnnnnnnnnnnnnnnnnnnnnnnnnnnnnnnnnnnnnnnnnnnnnnnnnnnnnnnnnnnnnnnnnnnnnnnnaattaaaatgagaggttctgcacctgggtcaaggtaatccggagtatgtattgggggtcccagtatggggctgggaaggactcaggggtcctggtacttaaaaaactcaacgtgagccagtagtgtgcacttgcagcctggaaagccagtggtatcctgggcagcaccagaagaggggtggccagcagtttgagagaggtgatcgcccactatctactcyctcctcatgaggccctaagcaggaggcaaatcaattttttacatgagtagatagcrataggacaagggggaatggttttaaactaaaggarggaagatttagattagacaccggggaaaatcttttcactggaagagtggcgaggtgctggaacaggttgcctagagaggcagtggaagccccacccctggaggcattcaaggtcaggttggatggggccctgggcaacctgatctagtacttgatctagcagctgagcgtgctgacccttgaggtcccttccaacccaagccactcta

SEQ ID NO: 27972 - DNA, 599 bp, Chicken  19866894245549_2
  misc_feature (1)..(24): n is any nucleotide
nnnnnnnnnnnnnnnnnnnnnnnnaattaaaatgagaggttctgcacctgggtcaaggtaatccggagtatgtattgggggtcccagtatggggctgggaaggactcaggggtcctggtacttaaaaaactcaacgtgagccagtagtgtgcacttgcagcctggaaagccagtggtatcctgggcagcaccagaagaggggtggccagcagtttgagagaggtgatcgcccactatctactcyctcctcatgaggccctaagcaggaggcaaatcaattttttacatgagtagatagcrataggacaagggggaatggttttaaactaaaggarggaagatttagattagacaccggggaaaatcttttcactggaagagtggcgaggtgctggaacaggttgcctagagaggcagtggaagccccacccctggaggcattcaaggtcaggttggatggggccctgggcaacctgatctagtacttgatctagcagctgagcgtgctgacccttgaggtcccttccaacccaagccactctatgattctctgaaaacaaaagctctccctcaacatataattaaaaagaacaaaggaa

SEQ ID NO: 27973 - DNA, 600 bp, Chicken  19866894245549_3
gaggttctgcacctgggtcaaggtaatccggagtatgtattgggggtcccagtatggggctgggaaggactcaggggtcctggtacttaaaaaactcaacgtgagccagtagtgtgcacttgcagcctggaaagccagtggtatcctgggcagcaccagaagaggggtggccagcagtttgagagaggtgatcgcccactatctactcyctcctcatgaggccctaagcaggaggcaaatcaattttttacatgagtagatagcrataggacaagggggaatggttttaaactaaaggarggaagatttagattagacaccggggaaaatcttttcactggaagagtggcgaggtgctggaacaggttgcctagagaggcagtggaagccccacccctggaggcattcaaggtcaggttggatggggccctgggcaacctgatctagtacttgatctagcagctgagcgtgctgacccttgaggtcccttccaacccaagccactctatgattctctgaaaacaaaagctctccctcaacatataattaaaaagaacaaaggaagaaagacagctagcagcctagattcccattttaagc

SEQ ID NO: 27974 - DNA, 499 bp, Chicken  19866894245549_4
tggcgaggtgctggaacaggttgcctagagaggcagtggaagccccacccctggaggcattcaaggtcaggttggatggggccctgggcaacctgatctagtacttgatctagcagctgagcgtgctgacccttgaggtcccttccaacccaagccactctatgattctctgaaaacaaaagctctccctcaacatataattaaaaagaacaaaggaagaaagacagctagcagcctagattcccattttaagccaaaacattaaatgctcagagagagtacttaaaacagcctgtcccycacrttgtcctgttcagacttaacttgcatctccctgaacttaaccttttcccagctgaatgagagcagcgatacgtaggcattatgatttaatactttttaactagccctcatagaaatgttttcttcacatttgacattaaaattttaagaccaagactagaacatccccaagtgtcaaagtcatgaaaaactcctt

SEQ ID NO: 27975 - DNA, 495 bp, Chicken  19866894245549_5
gaggtgctggaacaggttgcctagagaggcagtggaagccccacccctggaggcattcaaggtcaggttggatggggccctgggcaacctgatctagtacttgatctagcagctgagcgtgctgacccttgaggtcccttccaacccaagccactctatgattctctgaaaacaaaagctctccctcaacatataattaaaaagaacaaaggaagaaagacagctagcagcctagattcccattttaagccaaaacattaaatgctcagagagagtacttaaaacagcctgtcccycacrttgtcctgttcagacttaacttgcatctccctgaacttaaccttttcccagctgaatgagagcagcgatacgtaggcattatgatttaatactttttaactagccctcatagaaatgttttcttcacatttgacattaaaattttaagaccaagactagaacatccccaagtgtcaaagtcatgaaaaactcctt

SEQ ID NO: 27976 - DNA, 600 bp, Chicken  19866894245553_1
taatgaaagattggtgtgttaaagatacagaccaaagaagaagtagacatgcttgctattagctctgagcaaggcccgttgaattttatctgctctgttctccccattgcagattttgttataaataccagtactgtaagaaaattgttcagtcattgagaggccatgaggtttaatgcaatgttcattaatttggaataggcccttgtctctatcatatttatctcactcgctgaacttcttccagccaagctgatgtcaaaattactttccccaaattgaacttctagaggtggtgarggtaggacaggattcactgcagaagaggcccagggaaacataatcagacacattagaaatactgtgtttataaataccctggattctctaaacagatgttgagctaatgtatgrtaacagaagtattttgctaagttcagatactgtgtgcttctttgcaggtgtccatggtagatgctattccagggcttataaatgcaattcaaatgattcagagtgtctcactgtattacaatacctctgaaaagatctcctcgttgtttgtgaaggtaggtgcagacagtgtgaaaatcatcacag

SEQ ID NO: 27977 - DNA, 600 bp, Chicken  19866894245553_2
tttgttataaataccagtactgtaagaaaattgttcagtcattgagaggccatgaggtttaatgcaatgttcattaatttggaataggcccttgtctctatcatatttatctcactcgctgaacttcttccagccaagctgatgtcaaaattactttccccaaattgaacttctagaggtggtgarggtaggacaggattcactgcagaagaggcccagggaaacataatcagacacattagaaatactgtgtttataaataccctggattctctaaacagatgttgagctaatgtatgrtaacagaagtattttgctaagttcagatactgtgtgcttctttgcaggtgtccatggtagatgctattccagggcttataaatgcaattcaaatgattcagagtgtctcactgtattacaatacctctgaaaagatctcctcgttgtttgtgaaggtaggtgcagacagtgtgaaaatcatcacagtttttttgttgttgttggttgaatgagagaataccaagagaaaaagcaattaaagagctcatctgttgatcagtataatgctatttttgaatgtagagagatttgaaaataatg

SEQ ID NO: 27978 - DNA, 600 bp, Chicken  19866894245574_1
actattgtatggctcaaaacagtgctggatattaggcaaaagatgtgcattgcatagaggtctggcctttgtaaggtacggccttcttcagcttgcctgagtgagacctgtgctggaactggggtgtatttttggaagtgaatttcctggttgtcaccacgtgttgtgctttgatttacatctccagctgtgccactgttctttcttctaacctgaactgaaagatgctctccaggatcacagttaatgcacaccatccagggctaagtaataggaggcaggcagagagtcacagaacgrcttggcttgcaagggacctcagagatcgtctagatccaatgccctgctatggacagcattgccaaacactatctcagacaccagatcaggcttctcagggcctcatccacctggcctcgaacacctccagggatggggcattatctccaatattgccatccccattgtaaaaagggggaaatacagtgcctgaagaccgaatgaagcttattggctttctccaaatctactcctcctgtgctgcgccatgagctacttacagaatagctttgagggttttttctttaagtccactaaaga

SEQ ID NO: 27979 - DNA, 600 bp, Chicken  19866894245574_2
ttgcaagggacctcagagatcgtctagatccaatgccctgctatggacagcattgccaaacactatctcagacaccagatcaggcttctcagggcctcatccacctggcctcgaacacctccagggatggggcattatctccaatattgccatccccattgtaaaaagggggaaatacagtgcctgaagaccgaatgaagcttattggctttctccaaatctactcctcctgtgctgcgccatgagctacttacagaatagctttgagggttttttctttaagtccactaaagaaatggrtgagaaagttgtacttcttacaayraaacaaaaggagcttttgagtatttttagtgtaaggatatttctcatatggaatcaattttgtgcgttcagcctgtatgcaatttcatcccaggaaagtcatctgagaaatgctcattttctgtttgctctatttatggtgctgcttttttagtctcctctcccagttccatgtgtatgtggtgcctgaccaaattttaaatgaaccatggctgccctgctgcatctgcagtcaaggatcgtgatakgccctaccactgcttaactcacagaacc

SEQ ID NO: 27980 - DNA, 600 bp, Chicken  19866894245574_3
gagatcgtctagatccaatgccctgctatggacagcattgccaaacactatctcagacaccagatcaggcttctcagggcctcatccacctggcctcgaacacctccagggatggggcattatctccaatattgccatccccattgtaaaaagggggaaatacagtgcctgaagaccgaatgaagcttattggctttctccaaatctactcctcctgtgctgcgccatgagctacttacagaatagctttgagggttttttctttaagtccactaaagaaatggrtgagaaagttgtacrtcttacaayraaacaaaaggagcttttgagtatttttagtgtaaggatatttctcatatggaatcaattttgtgcgttcagcctgtatgcaatttcatcccaggaaagtcatctgagaaatgctcattttctgtttgctctatttatggtgctgcttttttagtctcctctcccagttccatgtgtatgtggtgcctgaccaaattttaaatgaaccatggctgccctgctgcatctgcagtcaaggatcgtgatakgccctaccactgcttaactcacagaaccatacaatggcctggg

SEQ ID NO: 27981 - DNA, 600 bp, Chicken  19866894245574_4
tagatccaatgccctgctatggacagcattgccaaacactatctcagacaccagatcaggcttctcagggcctcatccacctggcctcgaacacctccagggatggggcattatctccaatattgccatccccattgtaaaaagggggaaatacagtgcctgaagaccgaatgaagcttattggctttctccaaatctactcctcctgtgctgcgccatgagctacttacagaatagctttgagggttttttctttaagtccactaaagaaatggrtgagaaagttgtacttcttacaayraaacaaaaggagcttttgagtatttttagtgtaaggatatttctcatatggaatcaattttgtgcgttcagcctgtatgcaatttcatcccaggaaagtcatctgagaaatgctcattttctgtttgctctatttatggtgctgcttttttagtctcctctcccagttccatgtgtatgtggtgcctgaccaaattttaaatgaaccatggctgccctgctgcatctgcagtcaaggatcgtgatakgccctaccactgcttaactcacagaaccatacaatggcctgggttgcaaagg

SEQ ID NO: 27982 - DNA, 600 bp, Chicken  19866894245574_5
agatccaatgccctgctatggacagcattgccaaacactatctcagacaccagatcaggcttctcagggcctcatccacctggcctcgaacacctccagggatggggcattatctccaatattgccatccccattgtaaaaagggggaaatacagtgcctgaagaccgaatgaagcttattggctttctccaaatctactcctcctgtgctgcgccatgagctacttacagaatagctttgagggttttttctttaagtccactaaagaaatggrtgagaaagttgtacttcttacaayraaacaaaaggagcttttgagtatttttagtgtaaggatatttctcatatggaatcaattttgtgcgttcagcctgtatgcaatttcatcccaggaaagtcatctgagaaatgctcattttctgtttgctctatttatggtgctgcttttttagtctcctctcccagttccatgtgtatgtggtgcctgaccaaattttaaatgaaccatggctgccctgctgcatctgcagtcaaggatcgtgatakgccctaccactgcttaactcacagaaccatacaatggcctgggttgcaaagga

SEQ ID NO: 27983 - DNA, 447 bp, Chicken  19866894245574_6
ttttctttaagtccactaaagaaatggrtgagaaagttgtacttcttacaayraaacaaaaggagcttttgagtatttttagtgtaaggatatttctcatatggaatcaattttgtgcgttcagcctgtatgcaatttcatcccaggaaagtcatctgagaaatgctcattttctgtttgctctatttatggtgctgcttttttagtctcctctcccagttccatgtgtatgtggtgcctgaccaaattttaaatgaaccatggctgccctgctgcatctgcagtcaaggatcgtgatakgccctaccactgcttaactcacagaaccatacaatggcctgggttgcaaaggaccacaatgctcatccagttccaaccccctgctatgtgcagggtcgccaaccaccggaccaggctgcccagagccacatccagcctcatcctcat

SEQ ID NO: 27984 - DNA, 454 bp, Chicken  19866894245587_1
actatggcaggaatcttgatgaatctcaaacttcatcctcagcatccttgcctccatcatatgacagtgtcacaagagccagtagtggcaatctgatagttgagaatgaatttacaggtgaccaaaaatctctggacattaaatagttcatgagtaacagtgctgttaagaaatgttcacagaagacgatactgtaaatacacataatctgaggctgccttccccattaaaatggaactgtcagaattgatcatttagccatggttaagcctgattacttaactatgctagtggccaagstttggccttggactctaagttcagctttgttcaatattaatacgggcagaaaaagctgtgaaggattttgagtatgtcttatcaatgatatcccactacttcaaggcagctgccatggggggtgtgttcacagcagtgacaaatgtcacatctg

SEQ ID NO: 27985 - DNA, 599 bp, Chicken  19866894245594_1
  misc_feature (1)..(110): n is any nucleotide
nnnnnnnnnnnnnnnnnnnnnnnnnnnnnnnnnnnnnnnnnnnnnnnnnnnnnnnnnnnnnnnnnnnnnnnnnnnnnnnnnnnnnnnnnnnnnnnnnnnnnnnnnnnnnncttgctagcagcagtgtccatgcccttatctacagggacaagtacacgcaaagtgaggaagctcacctttctcttcatcatcattgcagcagtcctctcacttttcttcctggaagcacattatgaacacctatttactcctactccttactattcttccagccttcctcactcaccttgctcccttgtwgtgccatcactgcaagtttttgtttttccaatacagtacttaaattctgcatgttatggaggacagaaaaaatggctggtttccttacctggctgttgctatcagtatttgctgtcctgttcaagaaagagtactggcagcagaataaccatyatgacatcattctccaatttgtttaagccaatgaaatatcatagaatcatagaatcactaaggttggaaaagacccgcaggatcatccagtccaaccattcacccatcaccaatggttcttgctaaaccatgtcccacaacacaac

SEQ ID NO: 27986 - DNA, 600 bp, Chicken  19866894245594_2
acacgcaaagtgaggaagctcacctttctcttcatcatcattgcagcagtcctctcacttttcttcctggaagcacattatgaacacctatttactcctactccttactattcttccagccttcctcactcaccttgctcccttgtwgtgccatcactgcaagtttttgtttttccaatacagtacttaaattctgcatgttatggaggacagaaaaaatggctggtttccttacctggctgttgctatcagtatttgctgtcctgttcaagaaagagtactggcagcagaataaccatyatgacatcattctccaatttgtttaagccaatgaaatatcatagaatcatagaatcactaaggttggaaaagacccgcaggatcatccagtccaaccattcacccatcaccaatggttcttgctaaaccatgtcccacaacacaacatccaaatatcttctcttgtgaatggctagagtctgtatttggactctatttggactctctcctgtacatttctagctgttgttattattatttttttcagaatggtgattcagaattaggatgacttatcaccatgttgttccactgtaatta

SEQ ID NO: 27987 - DNA, 600 bp, Chicken  19866894245599_1
cgaggggctgtagtagcaagagtagagccaacgggtcaaggtatgtgtttgttgctgatgttctgcacccaaatatttacctgctatgtacttgttatgaatattaactagtaggtaaatgaataactgaattaacctcatgcaagagaggagttagctgcctggacttcaagaacttaaaatttaaattatacttgacctgctgaggtgtacctgcagccttaacttccccagagtaaggttttgtgagtagaagtgaaatcagttgtgcagtcttagactgttgttttcacttttccrttctttgttaccattttagacagcaactggtaccttacagatatttgtccagaaggagcgcatgtcatttttctcagtgtcaaatwagaacagcagcatcgtttttctttcgattcagccatgttttgtctgttattacactgctactatattccaagaaaaggaaagaacattttccaattattattttttttaatttagagtaattttgtctttaaacatgactatctgatgtcacaaccccctgtgaagtcaatgccactaacgagcaactgctttcatgaccgtagctcactgtgt

SEQ ID NO: 27988 - DNA, 600 bp, Chicken  19866894245599_2
tgtacttgttatgaatattaactagtaggtaaatgaataactgaattaacctcatgcaagagaggagttagctgcctggacttcaagaacttaaaatttaaattatacttgacctgctgaggtgtacctgcagccttaacttccccagagtaaggttttgtgagtagaagtgaaatcagttgtgcagtcttagactgttgttttcacttttccrttctttgttaccattttagacagcaactggtaccttacagatatttgtccagaaggagcgcatgtcatttttctcagtgtcaaatwagaacagcagcatcgtttttctttcgattcagccatgttttgtctgttattacactgctactatattccaagaaaaggaaagaacattttccaattattattttttttaatttagagtaattttgtctttaaacatgactatctgatgtcacaaccccctgtgaagtcaatgccactaacgagcaactgctttcatgaccgtagctcactgtgtcactgtgctggctcagtacctcctgtggttgcacatctgagtggccatgttgtccttcagagtgggctctttgcaaattgctcaga

SEQ ID NO: 27989 - DNA, 600 bp, Chicken  19866894245599_3
aattgctcagaagctgcgggttgtcaaagcagcagctcctgcagtcatggattacaacagctccctcacttctgtccccactgtgcaggaggcaagaagaagctgtaacactgctgtctcgcattaaaatgtctgacagtgttgcccaaggaagtcctttatggggattcgtagttactagaaacccacattctaataggatgtgccctttcaagaggagatgcggtactgaatgggacacgcacagagccctgtgtcttcagccccctcagctccactaaggtcatggcctcactagcrgcagtgtgagtgtagcactcattcgttctgaagagaaaatagcaataagcatcattctggtgttatcagcagaaaaatctgaatgctttccttttgtgttgcagcttttcattatattgtctggccagcagcgtaaactgtgactactgtgtacaataaaatcccagtggtttcctggattaggccaattagagtttgtttggataattcagggcttgaatggcttcctgtcaggaagtgccgagctgaagcactccgaaggcacacctcttctgagctgcctggccatttgctccaaga

SEQ ID NO: 27990 - DNA, 599 bp, Chicken  19866894245602_1
  misc_feature (1)..(4): n is any nucleotide
nnnntgttgtaaacctcagtgtcctcattgcattcacctgaagctacctgtaaaacagtaatgaaagaaattgtttttacctcgctgaaaacaacgccagaaattatatcaagcctaatgagattggacttaaaggcagtactttgggcgaaacaaaactgttttcatttgaacagctgagtaatcagacacatatgaagtttaatgtaaggctcagtcaagtaaccttcttaactgttctgcgtattctttcatcttactagaggggaagcagccacttggaaatgccaaggaaggcaygagaacaaacataacaaactttaaaataaaggacaactcccagcaattcaaacagccagttgtgtcacactgctatgacagaacctatctggatttgcttgggtatcttctcttctctccttggttttgctctaacttatttgctaggctcttgaaggaggcaaacattcttctcccaccaactgcatctccccagggagctggaaaggggacctcatcaytacgaatgaagcatatccctttgatataaccttttcacagctatggtgaatgacagatgacatctattccctgaagga

SEQ ID NO: 27991 - DNA, 600 bp, Chicken  19866894245602_2
gtaaccttcttaactgttctgcgtattctttcatcttactagaggggaagcagccacttggaaatgccaaggaaggcaygagaacaaacataacaaactttaaaataaaggacaactcccagcaattcaaacagccagttgtgtcacactgctatgacagaacctatctggatttgcttgggtatcttctcttctctccttggttttgctctaacttatttgctaggctcttgaaggaggcaaacattcttctcccaccaactgcatctccccagggagctggaaaggggacctcatcaytacgaatgaagcatatccctttgatataaccttttcacagctatggtgaatgacagatgacatctattccctgaaggaaaagtcaagaatattggctctatcccacacgcccaactccccctctgcctttagactttcttcttcattttttgatcataatggcaatttaagagattaaacaacatatgcaaagccatgtgtgtgcttttctactatagaaattgtactggaattaaaaaaaaaagaagcaaaacagatgtccaaggctcatttattccctgaagttatttccttaagact

SEQ ID NO: 27992 - DNA, 599 bp, Chicken  19866894245603_1
  misc_feature (1)..(30): n is any nucleotide
nnnnnnnnnnnnnnnnnnnnnnnnnnnnnnaggttcttgcctatgagtctgtgcttactgtgccgctcgctctcaggtggcccaggataatccccaaacttttcacttggatctcggttgacaaagactaatagctgtgttacagaatgcgttcctctcggttactgcaagcagaacgtggttatgatgcatgctgttgccagcatggctgcctttgctttaacttccagaatctgcccacagttagcagacctgacacctcctcttgcagaacctcgtttccttccttttgctgtaaargttctcatccagtgctggctstaggtggaaatacccctgttggtagcttattgaactgagattttaccaaaggtcccacaagtagattcttccatcaaagctactcttgggtatttcttcctttacagctttttttgtgcaccttttccattcaggcagttctgattcagaaatcatatatgagatgttcgtgaggactactgggcagttggcatatctgaaaaagtgagagtagttctgctctgtacyctgaatatggaagaggctgggtctccgttagcactttgagtcagaggatc

SEQ ID NO: 27993 - DNA, 599 bp, Chicken  19866894245603_2
  misc_feature (1)..(9): n is any nucleotide
nnnnnnnnnaggttcttgcctatgagtctgtgcttactgtgccgctcgctctcaggtggcccaggataatccccaaacttttcacttggatctcggttgacaaagactaatagctgtgttacagaatgcgttcctctcggttactgcaagcagaacgtggttatgatgcatgctgttgccagcatggctgcctttgctttaacttccagaatctgcccacagttagcagacctgacacctcctcttgcagaacctcgtttccttccttttgctgtaaargttctcatccagtgctggctstaggtggaaatacccctgttggtagcttattgaactgagattttaccaaaggtcccacaagtagattcttccatcaaagctactcttgggtatttcttcctttacagctttttttgtgcaccttttccattcaggcagttctgattcagaaatcatatatgagatgttcgtgaggactactgggcagttggcatatctgaaaaagtgagagtagttctgctctgtacyctgaatatggaagaggctgggtctccgttagcactttgagtcagaggatcagacttctttcccttggcttc

SEQ ID NO: 27994 - DNA, 600 bp, Chicken  19866894245603_3
gacctgacacctcctcttgcagaacctcgtttccttccttttgctgtaaargttctcatccagtgctggctstaggtggaaatacccctgttggtagcttattgaactgagattttaccaaaggtcccacaagtagattcttccatcaaagctactcttgggtatttcttcctttacagctttttttgtgcaccttttccattcaggcagttctgattcagaaatcatatatgagatgttcgtgaggactactgggcagttggcatatctgaaaaagtgagagtagttctgctctgtacyctgaatatggaagaggctgggtctccgttagcactttgagtcagaggatcagacttctttcccttggcttctcttcctaatgatttggtcctggcagcgttgagatgctgctgttgtcattcctctggtggtgacggttgctgtaaaccactgacccgttactgtgtgctgactcagtggtgaaaagttgctttaatttcctgcctttgcaaggacaaaatagaccctctgtgcagtatgctggtacctgaattcctctacttctggtggaaggtgcaaagcatcatcgagcaggtccac

SEQ ID NO: 27995 - DNA, 600 bp, Chicken  19866894245605_1
aaagggcaatttctaaccgaaacttgcaaaaattatattaactttcatttaaatttcacttgagagaaaccacagcgaggctgagaaacagatgaacatctgcatctagccaaacaaataacatgagggtggaagggatctctgggtcatcaagtccagcgcactgctagcctgggaattgcatcagataattctcttttcataaatgttgccaatactaaattggagttgttatttctttgcccccagtgtttccgccaaaggctgttccagagcttgatttattttaatgcctacagrctctgtagtaatttgcaatctgcattttttcagcgacagtttatatccatttgttcttctgcctatgctaaccactgtcttaaggagaggactttttcatttttgaagtttgtttgaattttctacttatacagaaatgaaaaaaatgattcagmatgagtttgtaaaacaagtcattctaataggaatggagatttccttgagtaagctgctgttggctgaagttacaggaataagaaatactattgcttttaaaaaggaaatgccaaaagcttttgcctaaggcaatattattattag

SEQ ID NO: 27996 - DNA, 600 bp, Chicken  19866894245605_2
ccagcgcactgctagcctgggaattgcatcagataattctcttttcataaatgttgccaatactaaattggagttgttatttctttgcccccagtgtttccgccaaaggctgttccagagcttgatttattttaatgcctacagrctctgtagtaatttgcaatctgcattttttcagcgacagtttatatccatttgttcttctgcctatgctaaccactgtcttaaggagaggactttttcatttttgaagtttgtttgaattttctacttatacagaaatgaaaaaaatgattcagmatgagtttgtaaaacaagtcattctaataggaatggagatttccttgagtaagctgctgttggctgaagttacaggaataagaaatactattgcttttaaaaaggaaatgccaaaagcttttgcctaaggcaatattattattagaatttttatgttattttagctttttttttaatgaagtagatattgacatagtaacctgtaggaattactttatttcattttcaggtatttgtttttctactctatactcagttcagatataaatgtctaaataaaactcagaatagtttttccag

SEQ ID NO: 27997 - DNA, 527 bp, Chicken  19866894245615_1
gggaattaaaggaatcatagaatcattaaggttggaaagatcactaagatcatctagtccaaccatcgacccagcaccaccacaccactaaaccatgtccttcagtgccacatctccacatttcttgaacaccttgagggatggtgactctacaacctccctgggcagcctgtgccaacaccccaccactcttggagaagaaaattttcctgaaatcaagcctaaacttcccttggtgcaacttgaggccattgagaccctctagtcttgtctagtcttagtttgagatcctttacttcrgggactcattagtctgggggtagttctttgcttagcaatgctgtaagcaaagcaacagcagccctgtagcacctaccaccactggcaatacgctgtaggctgccctgcatgtattttgcgatggcttctattcttctgctgccatatgcccctggcgtgaacctgtgcctgcggctgggctggctggatccagccaccaaacttttggggttcctgttgctccgctg

SEQ ID NO: 27998 - DNA, 472 bp, Chicken  19866894245621_1
tgtgcctcagtaatttgggaaaatcccctcagcttacgatgacctacaagccagagctctgcgcttgtaggtcatcgtacaaacagctttaattagaaaatgctttctccaagctctacgctaaaatacttatagcagtaccatataagaattaattgtcaaagttagcttagctccccctggtgaacactaatttggatgcctcatctacagtgtgccactctcaatctatgtatttaatgtgaagatctagtattgttttattttggaggatgtggtggagattgagcattctggggmaaaagaggtgtgtaactacagtgtagacaattgtgggtttattgtctatgggaaatgaaccttttggttcaaaggtcttgaagcataccattctcaaagccacctcctccaaaagtcctttgaggttctggtttatatcttcagagaacatgtttctaaaggatatgtgtca

SEQ ID NO: 27999 - DNA, 600 bp, Chicken  19866894245628_1
gcggctcccagcccagcagtgtgacagggctatggagcagcccaggtgggagtggcagctccacagagcacccttcccgtgcaccctgcccacagaggggacatggcagcacggcgctgggaagccaccagggcttctcccttcctgctggcttggattttaagacacttgtttgtttgtttgtcgctgggcaaccaagagaggatggaaaaaaaaaaaaaaaatcgatatcacattgtcacctatgagtcactgctcccagctggctgaaacgccccattcttcccccaagatgctgcrgaagccttggggaaaggggagaagagcccgaggtgccccacggccaccagcactacccccagacctgtgccccatcctcctcctggtgcccacaggcagggacaccggctagtggccccgggatgattttccagggccttgaaggcagtgaaggaatttgcattcatatttgcatttcctaattgcgcctccgggtttcctgggacagcggccgggtttggtttccatggcaggttttgtgcgggctgggagaaccgaggagggcacaaaggagccacaatgggcctgccactcaccagc

SEQ ID NO: 28000 - DNA, 600 bp, Chicken  19866894245629_1
gttgttatttggaatacaaggggcagtgaattggggagctttgtttctctgtcatgctggtcaaattgacccccaccaaggaagagtagccagagtgcatacttgtaaggtagcctgctgctcagagtgttggccagggataatgaagatctgcatgctcccacaaactgcctgaaccaggtaggacagaggtagagatttagcacgctgcatgttaaaaaaggttgggtttccctggatctggctgtactatgagaatctgttcctttggtaagagaaatccctttaagtgagtgttcytgtggaatttgttcttagttttgctttatttgcaacctagtctttatttatttccctttttctttttcatcytctaaaatgtttgcaaagaatatgaagcattatcaaataatcatttttctattttattttaacatatctgtgtgcaagctggagcccaaggggcatttgagagttaaaccatatacaagagcagagagtaaaagaaaaatgatgaagcagtagatgagggagaaaagatagagattttaacagagacagaggagsaatgaagcaatgagatgcaggaaggctgttcca

SEQ ID NO: 28001 - DNA, 600 bp, Chicken  19866894245629_2
ccaccaaggaagagtagccagagtgcatacttgtaaggtagcctgctgctcagagtgttggccagggataatgaagatctgcatgctcccacaaactgcctgaaccaggtaggacagaggtagagatttagcacgctgcatgttaaaaaaggttgggtttccctggatctggctgtactatgagaatctgttcctttggtaagagaaatccctttaagtgagtgttcytgtggaatttgttcttagttttgctttatttgcaacctagtctttatttatttccctttttctttttcatcytctaaaatgtttgcaaagaatatgaagcattatcaaataatcatttttctattttattttaacatatctgtgtgcaagctggagcccaaggggcatttgagagttaaaccatatacaagagcagagagtaaaagaaaaatgatgaagcagtagatgagggagaaaagatagagattttaacagagacagaggagsaatgaagcaatgagatgcaggaaggctgttccagatggcagaagcagcagttgggaaggctttggcaccaacagtcgcaagattgcaggcagggacagtgaagaa

SEQ ID NO: 28002 - DNA, 600 bp, Chicken  19866894245629_3
ttggtaagagaaatccctttaagtgagtgttcytgtggaatttgttcttagttttgctttatttgcaacctagtctttatttatttccctttttctttttcatcytctaaaatgtttgcaaagaatatgaagcattatcaaataatcatttttctattttattttaacatatctgtgtgcaagctggagcccaaggggcatttgagagttaaaccatatacaagagcagagagtaaaagaaaaatgatgaagcagtagatgagggagaaaagatagagattttaacagagacagaggagsaatgaagcaatgagatgcaggaaggctgttccagatggcagaagcagcagttgggaaggctttggcaccaacagtcgcaagattgcaggcagggacagtgaagaactgtgcacttctgcagggagaggaggaggagagaaatacaaggtcagggaggcactctggctcaactgcatggaaaattataaagccttgactgctgatactctgtcatccaacttgtacagctgatttacacctctgcagaactgagcaaattggtgactgaaaggtagcaatctttcacctctgtggtgaaaa

SEQ ID NO: 28003 - DNA, 600 bp, Chicken  19866894245630_1
ttgttttgtcaaattttgcaaaggaaaatgtaggttttgattatggctttgtttaaaatggttgtggcacctgtgggcacttcctgaatcatggcggagaagaaagcacaactgtacattatgtttcaaatggaaaagatcctaaatgatggaatgaaatgaatgaagtttaatactcttttctcagtagcgtcaggcataggtgggtgaaaaaaaataccacacagtaacttgtcagcacactgcctttggcacagtagctcaaaaagcagcaatgtacccgaagtaagaaattactgkttttcttttttttaattcagtgttttctatgtagttctattatgagtatttttaagaaaatccatgtaatctattaacaaaaaatgcaaataaataattactgtatatcaaaggagaacccaaagacagtaaaaaaataaacagaattgaactttgaagtttcacggatgagatcygccactactaacttcccagataaactgaggcatgttgcgagttgtttcaatgaacaccaagcaaacaccactcaccgctttacatcctgtactgacccaaattgtggtaagcaacacattcctt

SEQ ID NO: 28004 - DNA, 600 bp, Chicken  19866894245630_2
tcttttctcagtagcgtcaggcataggtgggtgaaaaaaaataccacacagtaacttgtcagcacactgcctttggcacagtagctcaaaaagcagcaatgtacccgaagtaagaaattactgkttttcttttttttaattcagtgttttctatgtagttctattatgagtatttttaagaaaatccatgtaatctattaacaaaaaatgcaaataaataattactgtatatcaaaggagaacccaaagacagtaaaaaaataaacagaattgaactttgaagtttcacggatgagatcygccactactaacttcccagataaactgaggcatgttgcgagttgtttcaatgaacaccaagcaaacaccactcaccgctttacatcctgtactgacccaaattgtggtaagcaacacattcctttaaataagaaaataagattacttttgtacaagagcaacattactcgtaggacctttacacacctccgtctctccctgacctctgatgttgaggacacagtgccagaagtagctgtagtcatggctgtggtagtggctgcagcatttacaacagatggtgcaacaggaaccgtcact

SEQ ID NO: 28005 - DNA, 600 bp, Chicken  19866894245631_1
ccattctatgattctttgattttcttaggaaataatgagttttgctgaaattacttgagatggggtagaaggaagttctttaatgaggcctacaattcaatacccatctcatgtaaaatattaaatatttcaattaaataatttttgagaaagaagtctagaagttggtgtagtctgcacatgcttatcttccactcctgcacaggcaaaatataatcttgcttagaatcacgctgatattaagcggtggtatttatctcacctggctgtaatccatagaacatattctttttcattccytccgtggtcactggaggcagagtacatgtagagagaagtctgtctctctatcttgggcacctctcttaagattgcctatggaatgtacctacctgcttactttgactacactcaaagactagatgagtgcacatggatatgattactagcttttaggcagttaaggaaagagaatagagcaggaaattcattcccagtcataggaacttcagtaaaggaatctgtgctgcttcttatatagtcagatgagagctgagagcagacaaaaagagaaaaaaaaaaggtctccagcacataaaa

SEQ ID NO: 28006 - DNA, 600 bp, Chicken  19866894245631_2
cagagtacatgtagagagaagtctgtctctctatcttgggcacctctcttaagattgcctatggaatgtacctacctgcttactttgactacactcaaagactagatgagtgcacatggatatgattactagcttttaggcagttaaggaaagagaatagagcaggaaattcattcccagtcataggaacttcagtaaaggaatctgtgctgcttcttatatagtcagatgagagctgagagcagacaaaaagagaaaaaaaaaaggtctccagcacataaaactactcgtggtagacarggtaaaatgtcttaagcttcagggctctcctctttctctgctcattatcctgttcctgtgagctctgctatttcctgtgttagtatttgctgtgagttattgcttagcattatgttaagcattatgttaagcaaagtgtgcagcatctctatacttgtctcgcccactcgtaagactgtgtagctctttattgctctcagttcttagcatgttttaatttgtattacagaaktagtgtgcagttttcttcagcaaatatctccatccatataaacctcttactttgttgtgacttcactg

SEQ ID NO: 28007 - DNA, 600 bp, Chicken  19866894245631_3
gagctgagagcagacaaaaagagaaaaaaaaaaggtctccagcacataaaactactcgtggtagacarggtaaaatgtcttaagcttcagggctctcctctttctctgctcattatcctgttcctgtgagctctgctatttcctgtgttagtatttgctgtgagttattgcttagcattatgttaagcattatgttaagcaaagtgtgcagcatctctatacttgtctcgcccactcgtaagactgtgtagctctttattgctctcagttcttagcatgttttaatttgtattacagaaktagtgtgcagttttcttcagcaaatatctccatccatataaacctcttactttgttgtgacttcactgtattaactttgcaactgtttacctggtcacagttactgtgagtttaatggaggaggtgaaatacggggagaagggaataacgcacactaggtatgaaagtagtcactacctgggaatatcaggtctctgctaccatttaatgaataaataaatagattgcaaacacactcacatactactctgaatgagaaacaactatgaaagtatttctgttcccttatcaggaaacagt

SEQ ID NO: 28008 - DNA, 599 bp, Chicken  19866894245635_1
  misc_feature (1)..(149): n is any nucleotide
nnnnnnnnnnnnnnnnnnnnnnnnnnnnnnnnnnnnnnnnnnnnnnnnnnnnnnnnnnnnnnnnnnnnnnnnnnnnnnnnnnnnnnnnnnnnnnnnnnnnnnnnnnnnnnnnnnnnnnnnnnnnnnnnnnnnnnnnnnnnnnnnnnnnnttttaatagtagtttgcttctttatctgagtcattacattcttgttaagttaaaggacaatgagatagaattggactgctacacatgttaaaacaatctttaattactgaattagtaataattatatatgaattactaaaaatgatttttmttgtcttcttatataatgcttttcatattcagcttttgtgttcataagttctatataaaagatatttagacttaaagcagatctagagcactgtatttaagattctattgctttgttaaaaggtcattagggaattgtaattcaaaaaaaaatattcctgacaattaaaaactatttwaaaagatttattctcttttgtgttaaataaataaagagaaagttgaatcaagcaaacttgttttgcagtgttagaaagtagcctttgattaaaactttccttcatagattccagcagagtt

SEQ ID NO: 28009 - DNA, 599 bp, Chicken  19866894245635_2
  misc_feature (1)..(5): n is any nucleotide
nnnnnttttaatagtagtttgcttctttatctgagtcattacattcttgttaagttaaaggacaatgagatagaattggactgctacacatgttaaaacaatctttaattactgaattagtaataattatatatgaattactaaaaatgatttttmttgtcttcttatataatgcttttcatattcagcttttgtgttcataagttctatataaaagatatttagacttaaagcagatctagagcactgtatttaagattctattgctttgttaaaaggtcattagggaattgtaattcmaaaaaaaatattcctgacaattaaaaactatttwaaaagatttattctcttttgtgttaaataaataaagagaaagttgaatcaagcaaacttgttttgcagtgttagaaagtagcctttgattaaaactttccttcatagattccagcagagttgtttatatttataaagcatgggaaaactgtcttttttatgctactctagcatcacttctgaaataaaacaatcaatacaatttcatacttctgattttccatttaaaaaataagattatctaaatgaagcaaggaaattatgag

SEQ ID NO: 28010 - DNA, 600 bp, Chicken  19866894245635_3
gtcattacattcttgttaagttaaaggacaatgagatagaattggactgctacacatgttaaaacaatctttaattactgaattagtaataattatatatgaattactaaaaatgatttttmttgtcttcttatataatgcttttcatattcagcttttgtgttcataagttctatataaaagatatttagacttaaagcagatctagagcactgtatttaagattctattgctttgttaaaaggtcattagggaattgtaattcaaaaaaaaatattcctgacaattaaaaactatttwaaaagatttattctcttttgtgttaaataaataaagagaaagttgaatcaagcaaacttgttttgcagtgttagaaagtagcctttgattaaaactttccttcatagattccagcagagttgtttatatttataaagcatgggaaaactgtcttttttatgctactctagcatcacttctgaaataaaacaatcaatacaatttcatacttctgattttccatttaaaaaataagattatctaaatgaagcaaggaaattatgaggaaagagtaaaacttctaccacctaatggctacac

SEQ ID NO: 28011 - DNA, 599 bp, Chicken  19866894245637_1
  misc_feature (1)..(110): n is any nucleotide
nnnnnnnnnnnnnnnnnnnnnnnnnnnnnnnnnnnnnnnnnnnnnnnnnnnnnnnnnnnnnnnnnnnnnnnnnnnnnnnnnnnnnnnnnnnnnnnnnnnnnnnnnnnnnntgcttgtgcttgaaggccttctgtttaagccagctttccctgtgcttaatttgccatttgtaatgggggtaaagctgcagctgattttcctttggtgaggagtgaaaaatttgcttgggagggagaggaatcagtggatgtaggtcctaaccacctctggtcttctccagatctgctgtggtttgccccwaattaycactgaraaggtaagggcatggtttcagtaccaagacacagaataaatatatgtgtttttatctgcattaccactactggaagcattttaactagtttctttttttttttttggttgtgatggtcttggtcttgtaaaggacggacaggtcggttttttacaygctaagccccagcagctcacctgtccctcagtcctggaaagccttttagactttatgatktagcctgagtttaaaagaggctaaaatgtgtgttgggcctgatccctttaggtcttcagctgcttyaagc

SEQ ID NO: 28012 - DNA, 599 bp, Chicken  19866894245637_2
  misc_feature (1)..(104): n is any nucleotide
nnnnnnnnnnnnnnnnnnnnnnnnnnnnnnnnnnnnnnnnnnnnnnnnnnnnnnnnnnnnnnnnnnnnnnnnnnnnnnnnnnnnnnnnnnnnnnnnnnnnnnnntgcttgtgcttgaaggccttctgtttaagccagctttccctgtgcttaatttgccatttgtaatgggggtaaagctgcagctgattttcctttggtgaggagtgaaaaatttgcttgggagggagaggaatcagtggatgtaggtcctaaccacctctggtcttctccagatctgctgtggtttgccccwaattaycactgaraaggtaagggcatggtttcagtaccaagacacagaataaatatatgtgtttttatctgcattaccactactggaagcattttaactagtttctttttttttttttggttgtgatggtcttggtcttgtaaaggacggacaggtcggttttttacaygctaagccccagcagctcacctgtccctcagtcctggaaagccttttagactttatgatktagcctgagtttaaaagaggctaaaatgtgtgttgggcctgatccctttaggtcttcagctgcttyaagccactca

SEQ ID NO: 28013 - DNA, 599 bp, Chicken  19866894245637_3
  misc_feature (1)..(97): n is any nucleotide
nnnnnnnnnnnnnnnnnnnnnnnnnnnnnnnnnnnnnnnnnnnnnnnnnnnnnnnnnnnnnnnnnnnnnnnnnnnnnnnnnnnnnnnnnnnnnnnnntgcttgtgcttgaaggccttctgtttaagccagctttccctgtgcttaatttgccatttgtaatgggggtaaagctgcagctgattttcctttggtgaggagtgaaaaatttgcttgggagggagaggaatcagtggatgtaggtcctaaccacctctggtcttctccagatctgctgtggtttgccccwaattaycactgaraaggtaagggcatggtttcagtaccaagacacagaataaatatatgtgtttttatctgcattaccactactggaagcattttaactagtttctttttttttttttggttgtgatggtcttggtcttgtaaaggacggacaggtcggttttttacaygctaagccccagcagctcacctgtccctcagtcctggaaagccttttagactttatgatktagcctgagtttaaaagaggctaaaatgtgtgttgggcctgatccctttaggtcttcagctgcttyaagccactcataccctt

SEQ ID NO: 28014 - DNA, 600 bp, Chicken  19866894245637_4
gtaatgggggtaaagctgcagctgattttcctttggtgaggagtgaaaaatttgcttgggagggagaggaatcagtggatgtaggtcctaaccacctctggtcttctccagatctgctgtggtttgccccwaattaycactgaraaggtaagggcatggtttcagtaccaagacacagaataaatatatgtgtttttatctgcattaccactactggaagcattttaactagtttctttttttttttttggttgtgatggtcttggtcttgtaaaggacggacaggtcggttttttacaygctaagccccagcagctcacctgtccctcagtcctggaaagccttttagactttatgatktagcctgagtttaaaagaggctaaaatgtgtgttgggcctgatccctttaggtcttcagctgcttyaagccactcatacccttgtggggctgagcccttgttggctgtgactgcctgctgtattggctgtgtctctgtggctaggaacccaggaaatctttggtgtttgcaggttatttttgagctctgctatttcctttttgtcggttttgtgagtgaccagaatctggttttgttcta

SEQ ID NO: 28015 - DNA, 600 bp, Chicken  19866894245637_5
agggagaggaatcagtggatgtaggtcctaaccacctctggtcttctccagatctgctgtggtttgccccwaattaycactgaraaggtaagggcatggtttcagtaccaagacacagaataaatatatgtgtttttatctgcattaccactactggaagcattttaactagtttctttttttttttttggttgtgatggtcttggtcttgtaaaggacggacaggtcggttttttacaygctaagccccagcagctcacctgtccctcagtcctggaaagccttttagactttatgatktagcctgagtttaaaagaggctaaaatgtgtgttgggcctgatccctttaggtcttcagctgcttyaagccactcatacccttgtggggctgagcccttgttggctgtgactgcctgctgtattggctgtgtctctgtggctaggaacccaggaaatctttggtgtttgcaggttatttttgagctctgctatttcctttttgtcggttttgtgagtgaccagaatctggttttgttctatgtcccgcagggttgctgagctggaagatgaacatctaagatggaaacttctgcttcaac

SEQ ID NO: 28016 - DNA, 600 bp, Chicken  19866894245637_6
ccccwaattaycactgaraaggtaagggcatggtttcagtaccaagacacagaataaatatatgtgtttttatctgcattaccactactggaagcattttaactagtttctttttttttttttggttgtgatggtcttggtcttgtaaaggacggacaggtcggttttttacaygctaagccccagcagctcacctgtccctcagtcctggaaagccttttagactttatgatktagcctgagtttaaaagaggctaaaatgtgtgttgggcctgatccctttaggtcttcagctgcttyaagccactcatacccttgtggggctgagcccttgttggctgtgactgcctgctgtattggctgtgtctctgtggctaggaacccaggaaatctttggtgtttgcaggttatttttgagctctgctatttcctttttgtcggttttgtgagtgaccagaatctggttttgttctatgtcccgcagggttgctgagctggaagatgaacatctaagatggaaacttctgcttcaactgctgctgggaaaaaagaaggcaaagggtgtggttctggagggggatggctttacggagacggggg

SEQ ID NO: 28017 - DNA, 599 bp, Chicken  19866894245641_1
  misc_feature (1)..(81): n is any nucleotide
nnnnnnnnnnnnnnnnnnnnnnnnnnnnnnnnnnnnnnnnnnnnnnnnnnnnnnnnnnnnnnnnnnnnnnnnnnnnnnnnntcattctttattctcagatcattttctacttcctattttaaatgtgtaataaatacatgcataattttagcttttttttttttcatgaacgagttgtggcacatggcaatttttcattctggcatgctcagaataattcttcacagcaatgtgagtcactagaaaatattctcccacttttgcacaaaacagtgagcagaaaaggatatgaatgggaawtacttttttgttattgatctacatcattagcataggaaacaaaaccctaagatgcactgcaccaatgcaggaaggagagaaggaatttgagtgagacatacataaggacaaaaatattataaatatttattcagagaaattttctgaaacaaattgaggagaggttttcaaatttatggttggtccctatataattcttacgccattttcytataataaaaggcgcacatatctgtttaatgcacatacaaacaccactgcagattcttctccggattctcctctgtttgctacrtgat

SEQ ID NO: 28018 - DNA, 600 bp, Chicken  19866894245641_2
gaataattcttcacagcaatgtgagtcactagaaaatattctcccacttttgcacaaaacagtgagcagaaaaggatatgaatgggaawtacttttttgttattgatctacatcattagcataggaaacaaaaccctaagatgcactgcaccaatgcaggaaggagagaaggaatttgagtgagacatacataaggacaaaaatattataaatatttattcagagaaattttctgaaacaaattgaggagaggttttcaaatttatggttggtccctatataattcttacgccattttcytataataaaaggcgcacatatctgtttaatgcacatacaaacaccactgcagattcttctccggattctcctctgtttgctacrtgatcaagcacctatggraaggactcttcccatccttacacagccagtgtaagacagaaccagagtgagagatcccatgttcaagatctgttaagaacattcctcagtaactaagcaaataaacatacggcacaaccaggaatagaaatgatgcatgcagaagaaaggcattcttcccttgctagaaaacgcattgcactgatccattgtagtttc

SEQ ID NO: 28019 - DNA, 600 bp, Chicken  19866894245641_3
ggaawtacttttttgttattgatctacatcattagcataggaaacaaaaccctaagatgcactgcaccaatgcaggaaggagagaaggaatttgagtgagacatacataaggacaaaaatattataaatatttattcagagaaattttctgaaacaaattgaggagaggttttcaaatttatggttggtccctatataattcttacgccattttcytataataaaaggcgcacatatctgtttaatgcacatacaaacaccactgcagattcttctccggattctcctctgtttgctacrtgatcaagcacctatggraaggactcttcccatccttacacagccagtgtaagacagaaccagagtgagagatcccatgttcaagatctgttaagaacattcctcagtaactaagcaaataaacatacggcacaaccaggaatagaaatgatgcatgcagaagaaaggcattcttcccttgctagaaaacgcattgcactgatccattgtagtttcatgatgctaaaacacaaccatgcacagtacaaatctagttactcatgctttgttctgtcccagctatttgtatgcaatggtcac

SEQ ID NO: 28020 - DNA, 600 bp, Chicken  19866894245641_4
ttgatctacatcattagcataggaaacaaaaccctaagatgcactgcaccaatgcaggaaggagagaaggaatttgagtgagacatacataaggacaaaaatattataaatatttattcagagaaattttctgaaacaaattgaggagaggttttcaaatttatggttggtccctatataattcttacgccattttcytataataaaaggcgcacatatctgtttaatgcacatacaaacaccactgcagattcttctccggattctcctctgtttgctacrtgatcaagcacctatggraaggactcttcccatccttacacagccagtgtaagacagaaccagagtgagagatcccatgttcaagatctgttaagaacattcctcagtaactaagcaaataaacatacggcacaaccaggaatagaaatgatgcatgcagaagaaaggcattcttcccttgctagaaaacgcattgcactgatccattgtagtttcatgatgctaaaacacaaccatgcacagtacaaatctagttactcatgctttgttctgtcccagctatttgtatgcaatggtcacaaccattttcgttaatgt

SEQ ID NO: 28021 - DNA, 599 bp, Chicken  19866894245645_1
  misc_feature (1)..(84): n is any nucleotide
nnnnnnnnnnnnnnnnnnnnnnnnnnnnnnnnnnnnnnnnnnnnnnnnnnnnnnnnnnnnnnnnnnnnnnnnnnnnnnnnnnnncgtatctggtgatggtgggtatttttccagagggggctcatgtgaggcccgggcgaaggggatttccactggggctggcagcctgaaggtgatacccggcatttcttgcgcgggtaaggttgaaagtgtgtacaaacaatgcatgtgggcatcatttccacgcatgctagcaaatcactaaccaggttaaagagtaatctggcttggcccatatgytgatgtttctggtctctgagtaataaatgaaaaatattaatatcttgctctgatttagtttgtattgtatgcgagaagccagctgtgaagtctgggctttaaatcacttcaaggggaaaaactttttaactgtggtttcttcgtgtcctggcaacatctaacagctcacagcgctgtttctttcagatgttagcgcatgttcagcatattgagggaaaaaaagtcttgatctggataatctgtttgatttttattctgcttatttctaaacatttcttcctaaatagcgcttatgcgaa

SEQ ID NO: 28022 - DNA, 600 bp, Chicken  19866894245646_1
gatctttcagggaatagaagagacattgtgtggcccagatgtctcagcaaaccagcagaagtgctgactatcaaatgcctgcacttacatacttgcgatctagccaggtctaaaaactatgcaaattcatcttttacccaactgtaccatatgcaaggaaacatgtacaagacaaaatcagtcttctatgttgttcgttgcaattacttccatggctctgattaaataggtgttactcaaggtatatgaaagcacgaagttttaaaacactatggttttggtctgatttctctgcaaacktacaggaataagtaaatatcctagtttccagattagcctcccacagcagattatcagggctgcaagcttcaccaaaacccatcccatgattctgaggctgtgtgctcctggcacaggtatggtcatagaatcattacattgacccaacctgcaacactgcagacgcagatgtatctcactgactgcgataccagtgtatacacttgaatattaggacttaattctctgctagaaaaaaagtcaaagatgagggaaaccctggaaaaagaagtctgactgatttcttcagtgttgttttgt

SEQ ID NO: 28023 - DNA, 554 bp, Chicken  19866894245654_1
ctctgctaatctcagaccttgcaactagagcaacttgtcaaataattacacaggtattactcttaaaaaaactaatacatctttctaaatcaaaaggaaccaccatgctcacgtccccttgtacgtcacattaccacaaagctctcttcttcactatttctgatgttttccaatctgctgtagtctggattctgttttctcttaccagttgcactttttggttgtttcctctttcaaattagtttccagatgttgttacttatccatttttccctgcaacacagcatcctctgcttgaaygtctccaccattcccttctgcatttcctccctctattcaactcacaatctaagtcaagattttgaaacctgttgtgaattacattaattggtagttctttcctacagctgcatcaatttcttaaggctacatacctggggggggggggggagagagagagacttcttttttttcttttaaccttctgtggacaaattttatgctgaaccaaactgtaactgcctccaacaccagctgaagagttatactggtac

SEQ ID NO: 28024 - DNA, 600 bp, Chicken  19866894245660_1
cccacagcgtgggacacagagagatgaaatcaatgcgtttggcagtacaaacaaagtatttagaaacaggactggttgtgaccatctccccgcagccccagagcagtttacagattctgttctctttttccttggatccctattgtatagttaaggggaaaaaaaatgcactcacaaacacgctattgttaaagcagagctgaagaatgtgcatttgctactgaaaaccatttccaagctgcttcaccatcacagggggaagcatttagctcccacagaccagctggcaaccacgaggaygaggttttccatgtgaacaacccttcctgcagccggctgggaaggcatccagccctgagatacctttctgggagctgttatctgccactcggtacgggacctgccacgtgctgagatgtgagcccacagccgctgccttggatacccaactcacttgttcagagatgcacaggggatgacacaacctgttgggccagstgagaacagccctcctgctgcctgctgggggaatggggatgggttcacttaccaggttccatctcgcttrggtctgcagccattggaagcagaggagctcag

SEQ ID NO: 28025 - DNA, 600 bp, Chicken  19866894245660_2
gctgaagaatgtgcatttgctactgaaaaccatttccaagctgcttcaccatcacagggggaagcatttagctcccacagaccagctggcaaccacgaggaygaggttttccatgtgaacaacccttcctgcagccggctgggaaggcatccagccctgagatacctttctgggagctgttatctgccactcggtacgggacctgccacgtgctgagatgtgagcccacagccgctgccttggatacccaactcacttgttcagagatgcacaggggatgacacaacctgttgggccagstgagaacagccctcctgctgcctgctgggggaatggggatgggttcacttaccaggttccatctcgcttrggtctgcagccattggaagcagaggagctcagcagcagtcctgggagctggatctcccagccaggtagccttttatctcccagttccagagttcaagggttgaataagaactgaaactatagcagcaaccaacgtgcttcactgagaagaaacgagagctgctccactttaaaatggagcagttgaaacgactgccaaagtaaaccatttgcatttaagtcgtgaaatgg

SEQ ID NO: 28026 - DNA, 600 bp, Chicken  19866894245660_3
gctcccacagaccagctggcaaccacgaggaygaggttttccatgtgaacaacccttcctgcagccggctgggaaggcatccagccctgagatacctttctgggagctgttatctgccactcggtacgggacctgccacgtgctgagatgtgagcccacagccgctgccttggatacccaactcacttgttcagagatgcacaggggatgacacaacctgttgggccagstgagaacagccctcctgctgcctgctgggggaatggggatgggttcacttaccaggttccatctcgcttrggtctgcagccattggaagcagaggagctcagcagcagtcctgggagctggatctcccagccaggtagccttttatctcccagttccagagttcaagggttgaataagaactgaaactatagcagcaaccaacgtgcttcactgagaagaaacgagagctgctccactttaaaatggagcagttgaaacgactgccaaagtaaaccatttgcatttaagtcgtgaaatgggatatgaagcactttgcagcgagaaacaggagagtcactttattagagaaatacttttaaggctcaaatt

SEQ ID NO: 28027 - DNA, 600 bp, Chicken  19866894245666_1
ttgcaaagtacagcgccgagtgacaccggggcccagggcagctccaggtaaggggcacactcctgcagggagctgctggtgctcgctgagccgcgtgttaacatgcctctctctttccttttaattaagcaggctgcctggctcgcaatgcaaattccatatgtacgccattattactattatttctggcatcaacaaatgtttttttcccctctttttttggccttctccagaacagccgcctgggttttgtctctgtatggcagacgttgtcacacagtgacaaaacccatggtgtcyctmattggaggaagagcaaaatctcagatggccaaggaagttaccacaggaractgggaaagaaattacgtggagaaacatttgccattcttacagccaagacagggagcaggatctcttcctgaaagtgctcggtatgcagacctgctctcactaggtgccccgttcacagtcttacagatttaattattgaagtgagaaagtatgggtatgatgatgcatgctgacttcgtgcacggtgtgggctgtgacatccccatcagaagcccatgctcatgacagctcaggcaagccaatccc

SEQ ID NO: 28028 - DNA, 600 bp, Chicken  19866894245666_2
caaagtacagcgccgagtgacaccggggcccagggcagctccaggtaaggggcacactcctgcagggagctgctggtgctcgctgagccgcgtgttaacatgcctctctctttccttttaattaagcaggctgcctggctcgcaatgcaaattccatatgtacgccattattactattatttctggcatcaacaaatgtttttttcccctctttttttggccttctccagaacagccgcctgggttttgtctctgtatggcagacgttgtcacacagtgacaaaacccatggtgtcyctmattggaggaagagcaaaatctcagatggccaaggaagttaccacaggaractgggaaagaaattacgtggagaaacatttgccattcttacagccaagacagggagcaggatctcttcctgaaagtgctcggtatgcagacctgctctcactaggtgccccgttcacagtcttacagatttaattattgaagtgagaaagtatgggtatgatgatgcatgctgacttcgtgcacggtgtgggctgtgacatccccatcagaagcccatgctcatgacagctcaggcaagccaatcccatg

SEQ ID NO: 28029 - DNA, 600 bp, Chicken  19866894245666_3
gggcacactcctgcagggagctgctggtgctcgctgagccgcgtgttaacatgcctctctctttccttttaattaagcaggctgcctggctcgcaatgcaaattccatatgtacgccattattactattatttctggcatcaacaaatgtttttttcccctctttttttggccttctccagaacagccgcctgggttttgtctctgtatggcagacgttgtcacacagtgacaaaacccatggtgtcyctmattggaggaagagcaaaatctcagatggccaaggaagttaccacaggaractgggaaagaaattacgtggagaaacatttgccattcttacagccaagacagggagcaggatctcttcctgaaagtgctcggtatgcagacctgctctcactaggtgccccgttcacagtcttacagatttaattattgaagtgagaaagtatgggtatgatgatgcatgctgacttcgtgcacggtgtgggctgtgacatccccatcagaagcccatgctcatgacagctcaggcaagccaatcccatggcagcctcagggctcaaggggaaggagctcccaggctcagcccatggca

SEQ ID NO: 28030 - DNA, 600 bp, Chicken  19866894245671_1
gaatcgcacatgatgctggccttgtttcctgaaggtaccaagagggactaaattatttgtggttttggaatagtactcagcttgagattagcgttatgaggtaaagacttaatgctgcccacaaactccacttcttctcctagatttcctttcaatgcaggtatttcaagtagagggagatctgagtggttgagggaatagtgtatattcctgcatggaaaaagcatgcaagatcacctgttatttctcccaacgccactgttaagcctgacttttagatcttctttcccctttgtcagytttgctgatttaaattaatttcactaaccaaatcagtacatagacggaagtatatacttcctggatgtgatcttacttgagggttccaggactgaattttttcatcagaccaggtctaatcctggtctttgtactgagtaactagtcagggactgggagtttgatgtgtttgggtcycatcttccttgttttcagcagtgtaggcatctaggcattgtttacttctcagtgctcatgttctcagctttttctgctgaagattcagctgtgttgagcatactgcttttctgtgtgaattgt

SEQ ID NO: 28031 - DNA, 584 bp, Chicken  19866894245671_2
agatctgagtggttgagggaatagtgtatattcctgcatggaaaaagcatgcaagatcacctgttatttctcccaacgccactgttaagcctgacttttagatcttctttcccctttgtcagytttgctgatttaaattaatttcactaaccaaatcagtacatagacggaagtatatacttcctggatgtgatcttacttgagggttccaggactgaattttttcatcagaccaggtctaatcctggtctttgtactgagtaactagtcagggactgggagtttgatgtgtttgggtcycatcttccttgttttcagcagtgtaggcatctaggcattgtttacttctcagtgctcatgttctcagctttttctgctgaagattcagctgtgttgagcatactgcttttctgtgtgaattgtgttactggagcagcattttgcacgtgcttggatgaagtgtgccaacatggcagccctgggctgagctcagcctcagaagctgagggagcccatgaaagggaagaagccacaagggagacatggaagggcagagctgggagctaccaccagctctgcatcgc

SEQ ID NO: 28032 - DNA, 600 bp, Chicken  19866894245672_1
ctcccactggtttgaaagatctttctgcaaaggaaatggatctaatgcaactgttctagcattgtcatgggaaattcaagtggatgcactgttctttttgattaggctgaatatgaacactgcttttttccccacagtattcctgaaaaattcatggtagacatccctgaaattgtgatgttttggtttaatttattaaactgttttaaaaaataaaaatcaatgcagtgaccagtggactctgctggtttatctcagggcaatgtgggaactgtagttcagccatccatagtgtctgtktaagtagtggtgtctgaaaatagagtactggtgaccaggtcagctatgggcattcatactgtgggtgtctggagatgaattattcttcattttctcctttattccttatattctacttcccagtttatttgatatacatttgaataaaaacatgatcaggcataaagatcagagggaaatctatgtttcctttcaaactcagtagttgtcaagagctctgagtcgttagagaatatgtggtttctgtctgcagttttgtatgggagtgcagtaatggaaagaaaactgactgctttgttc

SEQ ID NO: 28033 - DNA, 599 bp, Chicken  19866894245681_1
  misc_feature (1)..(38): n is any nucleotide
nnnnnnnnnnnnnnnnnnnnnnnnnnnnnnnnnnnnnngccgggttggtgctcacggggcaggagcgcatggcagggtgtgcggggtgtgagtcatcgcagggctcctgggagcgaggaggagattcccgggagcaggggttggcttcgaggcagatccctgtgctgggtcacactctgctcgcattgcaggaagggctgtaccgctgcagggatgcgctccgggcgcctggctgtcctggggattttggggtgtcccagcagagtgggtgctgctgtcccaccatgtggtccctactgytgccccacaccttctcttgctcagacccccargggctgccccaaagccctgcccagatgggggctccrtcccacagcagtgcgggggctgcctgggtgctgcacgcagtgccagagcacaggtagggctgacaccatttgaagagcaaatagatgtttcatttgcaattccgctgggtgttaaaaaaaaaaaaataaatgtagagaaacaaatctaaacagctgtaaagtaaattaccactgtttgctgatggctccagggaagagttctgcagtttgaaatcaaacaagccctttttt

SEQ ID NO: 28034 - DNA, 599 bp, Chicken  19866894245681_2
  misc_feature (1)..(6): n is any nucleotide
nnnnnngccgggttggtgctcacggggcaggagcgcatggcagggtgtgcggggtgtgagtcatcgcagggctcctgggagcgaggaggagattcccgggagcaggggttggcttcgaggcagatccctgtgctgggtcacactctgctcgcattgcaggaagggctgtaccgctgcagggatgcgctccgggcgcctggctgtcctggggattttggggtgtcccagcagagtgggtgctgctgtcccaccatgtggtccctactgytgccccacaccttctcttgctcagacccccargggctgccccaaagccctgcccagatgggggctccrtcccacagcagtgcgggggctgcctgggtgctgcacgcagtgccagagcacaggtagggctgacaccatttgaagagcaaatagatgtttcatttgcaattccgctgggtgttaaaaaaaaaaaaataaatgtagagaaacaaatctaaacagctgtaaagtaaattaccactgtttgctgatggctccagggaagagttctgcagtttgaaatcaaacaagcccttttttttttttaaagcatcagagtgacagctgtgacc

SEQ ID NO: 28035 - DNA, 600 bp, Chicken  19866894245681_3
atggcagggtgtgcggggtgtgagtcatcgcagggctcctgggagcgaggaggagattcccgggagcaggggttggcttcgaggcagatccctgtgctgggtcacactctgctcgcattgcaggaagggctgtaccgctgcagggatgcgctccgggcgcctggctgtcctggggattttggggtgtcccagcagagtgggtgctgctgtcccaccatgtggtccctactgytgccccacaccttctcttgctcagacccccargggctgccccaaagccctgcccagatgggggctccrtcccacagcagtgcgggggctgcctgggtgctgcacgcagtgccagagcacaggtagggctgacaccatttgaagagcaaatagatgtttcatttgcaattccgctgggtgttaaaaaaaaaaaaataaatgtagagaaacaaatctaaacagctgtaaagtaaattaccactgtttgctgatggctccagggaagagttctgcagtttgaaatcaaacaagcccttttttttttttaaagcatcagagtgacagctgtgacccggagggggggtttccagtttctcctttagtgatgga

SEQ ID NO: 28036 - DNA, 600 bp, Chicken  19866894245681_4
tgaccagagtgctcctacggcacaaaccgtggcagaatgctgggaagagaggctattttcatcttattaaagagccttatatttaaaacccttcttcaggtccatagcacaagatgattgcaaaggcttttacacactaacgcagcaggaatcactcctgctttcagtgatgttgcatgcagatgctgcttagtagggcagaatcccattattgatgctggataaatacagcaaaagagctctgggagcagtgatggagctgctgtgcacggcgtcaggctcgtggtgttctctgctccycagcagccagcaggaggggagcagtggtggggaacaggggctgtgttctgcttcggaagcccaggtcctgggagcagagagcaggcatgaccccatgcagcagcgctgcctctgcccaacatgtttgctatgcaaagaaggtggcactttgtttgcagacaattaaaaaaccaaacagattagtgcaaaccaaacacaccgagcaggctgggtgttggctgaactcctgggaaagtcacacgagcatccagagctgttgcaggtaatgtgagcagcagcgtgccctgtgcccagccctgc

SEQ ID NO: 28037 - DNA, 600 bp, Chicken  19866894245681_5
gagcagtggtggggaacaggggctgtgttctgcttcggaagcccaggtcctgggagcagagagcaggcatgaccccatgcagcagcgctgcctctgcccaacatgtttgctatgcaaagaaggtggcactttgtttgcagacaattaaaaaaccaaacagattagtgcaaaccaaacacaccgagcaggctgggtgttggctgaactcctgggaaagtcacacgagcatccagagctgttgcaggtaatgtgagcagcagcgtgccctgtgcccagccctgctgctgtgatgctcccacycctcccagtgcatgggaagcacaggggcagccccagctctgcaggaagggatgggacagccgggcttcccaccccatgtagcaggttctgttctgctcagagctgcggaaggagggaacctgcaattaaaggaaggatcgtgagaagggggcactgctaatgagaccaacagcaattaaagcacctcctggggcagcagtggggcgagggcactgtgctaatgaggaggggctgcggcacgaaggtgcaggggttcaatgagcaacattttgcagctgtgctgtggccccatttctgcaa

SEQ ID NO: 28038 - DNA, 600 bp, Chicken  19866894245684_1
tgctactgcagaggaaggcttctataatttacttgctgaatgaggcctaggaaacacagatttaattcttccctccactaccaactttctcatataattaatgcaaatgagctgtcagggcctcaagttactatgatttactatattcagaaagcttcatgctaatggaaggttagtaccatatgcttacgatgactgaggaaagaaaggtaaacttgtttgtggaaagtattttgcctagggtagacagatgtaaacttcctgcagggctgtgttttgttcagtctcactatgtcccartgtctaacaaagttactgaaaaagatggagctgaggatgtgctgacaaatgtaattgttgtttgccattcattttctctggaacaaaaagtaagaagcaggctaattggttcaacatgaattctcattctttatgtgaaggattttgaggttactctttcttgattggcattattattctttgatttttttttaattttatttatttatttatttgtttgtttgctaggacagtggtataacacaatcactgacaactggtgttcaaatttcatctagcttcattaacttttgtgggaaa

SEQ ID NO: 28039 - DNA, 599 bp, Chicken  19866894245686_1
  misc_feature (1)..(110): n is any nucleotide
nnnnnnnnnnnnnnnnnnnnnnnnnnnnnnnnnnnnnnnnnnnnnnnnnnnnnnnnnnnnnnnnnnnnnnnnnnnnnnnnnnnnnnnnnnnnnnnnnnnnnnnnnnnnnnctccctcccccaagcactgagattcacatttctcaaagcttctaagcccgctgttctgagaacagttcaaatgctccagtaagacactcctgcagcaaggtgctagggcgttttgtcagccctgtggtatgagggcaacagcaggtgaaaaacacaaaagagcagtcagcatacagcactgttataaccrctttygtctagtcttggtcaacaggcaagttaatgtagcaagaaagaagcaaagtacttatgtgccaggatgccataatccacaaaaatccagcctcaaacagtctgaaagctgctagctgaccactgcttctgacttgaatgaaaattgttccacagccttcttaggaagttctcacagtcatcactggaaaaagagcaatttcagtgttgagaaaaaaagtcaggctaagctctgcagcaacactctacattgcactcacactttaatattgcactgagttgcagtaacgcactgcg

SEQ ID NO: 28040 - DNA, 599 bp, Chicken  19866894245686_2
  misc_feature (1)..(105): n is any nucleotide
nnnnnnnnnnnnnnnnnnnnnnnnnnnnnnnnnnnnnnnnnnnnnnnnnnnnnnnnnnnnnnnnnnnnnnnnnnnnnnnnnnnnnnnnnnnnnnnnnnnnnnnnnctccctcccccaagcactgagattcacatttctcaaagcttctaagcccgctgttctgagaacagttcaaatgctccagtaagacactcctgcagcaaggtgctagggcgttttgtcagccctgtggtatgagggcaacagcaggtgaaaaacacaaaagagcagtcagcatacagcactgttataaccrctttygtctagtcttggtcaacaggcaagttaatgtagcaagaaagaagcaaagtacttatgtgccaggatgccataatccacaaaaatccagcctcaaacagtctgaaagctgctagctgaccactgcttctgacttgaatgaaaattgttccacagccttcttaggaagttctcacagtcatcactggaaaaagagcaatttcagtgttgagaaaaaaagtcaggctaagctctgcagcaacactctacattgcactcacactttaatattgcactgagttgcagtaacgcactgcgtgacc

SEQ ID NO: 28041 - DNA, 600 bp, Chicken  19866894245686_3
tagctgaccactgcttctgacttgaatgaaaattgttccacagccttcttaggaagttctcacagtcatcactggaaaaagagcaatttcagtgttgagaaaaaaagtcaggctaagctctgcagcaacactctacattgcactcacactttaatattgcactgagttgcagtaacgcactgcgtgacctgtgctccacaccgcctccacaaacctccgctgtaacacaaattattatataggcaaagaaagttggcaaattcactgggattaaactaagttagggggaataataccaakaagcccccgygatgttgcatttctaataggcctcaccacaccaacaaaacgcacgaatggctgcaaaattcagaagcctgcactggtccacaggarccatgartaagagcagcytcccaccccatgtgacagcctcaaatctgcctgcctaccactcctcttctcttctgaattttccccaacttaaattgaatgcaaataagccaggtgtggtccccagagcagtaatcttcagtccccaccgagttcccatagcaacttgcacagctggccactggaaagaagttgtattctgcttca

SEQ ID NO: 28042 - DNA, 600 bp, Chicken  19866894245686_4
ctgcttctgacttgaatgaaaattgttccacagccttcttaggaagttctcacagtcatcactggaaaaagagcaatttcagtgttgagaaaaaaagtcaggctaagctctgcagcaacactctacattgcactcacactttaatattgcactgagttgcagtaacgcactgcgtgacctgtgctccacaccgcctccacaaacctccgctgtaacacaaattattatataggcaaagaaagttggcaaattcactgggattaaactaagttagggggaataataccaakaagcccccgygatgttgcatttctaataggcctcaccacaccaacaaaacgcacgaatggctgcaaaattcagaagcctgcactggtccacaggarccatgartaagagcagcytcccaccccatgtgacagcctcaaatctgcctgcctaccactcctcttctcttctgaattttccccaacttaaattgaatgcaaataagccaggtgtggtccccagagcagtaatcttcagtccccaccgagttcccatagcaacttgcacagctggccactggaaagaagttgtattctgcttcatattggccac

SEQ ID NO: 28043 - DNA, 600 bp, Chicken  19866894245686_5
gagaaaaaaagtcaggctaagctctgcagcaacactctacattgcactcacactttaatattgcactgagttgcagtaacgcactgcgtgacctgtgctccacaccgcctccacaaacctccgctgtaacacaaattattatataggcaaagaaagttggcaaattcactgggattaaactaagttagggggaataataccaakaagcccccgygatgttgcatttctaataggcctcaccacaccaacaaaacgcacgaatggctgcaaaattcagaagcctgcactggtccacaggarccatgartaagagcagcytcccaccccatgtgacagcctcaaatctgcctgcctaccactcctcttctcttctgaattttccccaacttaaattgaatgcaaataagccaggtgtggtccccagagcagtaatcttcagtccccaccgagttcccatagcaacttgcacagctggccactggaaagaagttgtattctgcttcatattggccacagtgtttaaacactcggtgaatgaaacatcaattatggcatctcctaaaggaaacatctactaaaaagcacatccattttgccttg

SEQ ID NO: 28044 - DNA, 600 bp, Chicken  19866894245686_6
aaagtcaggctaagctctgcagcaacactctacattgcactcacactttaatattgcactgagttgcagtaacgcactgcgtgacctgtgctccacaccgcctccacaaacctccgctgtaacacaaattattatataggcaaagaaagttggcaaattcactgggattaaactaagttagggggaataataccaakaagcccccgygatgttgcatttctaataggcctcaccacaccaacaaaacgcacgaatggctgcaaaattcagaagcctgcactggtccacaggarccatgartaagagcagcytcccaccccatgtgacagcctcaaatctgcctgcctaccactcctcttctcttctgaattttccccaacttaaattgaatgcaaataagccaggtgtggtccccagagcagtaatcttcagtccccaccgagttcccatagcaacttgcacagctggccactggaaagaagttgtattctgcttcatattggccacagtgtttaaacactcggtgaatgaaacatcaattatggcatctcctaaaggaaacatctactaaaaagcacatccattttgccttgattagta

SEQ ID NO: 28045 - DNA, 600 bp, Chicken  19866894245686_7
aagctctgcagcaacactctacattgcactcacactttaatattgcactgagttgcagtaacgcactgcgtgacctgtgctccacaccgcctccacaaacctccgctgtaacacaaattattatataggcaaagaaagttggcaaattcactgggattaaactaagttagggggaataataccaakaagcccccgygatgttgcatttctaataggcctcaccacaccaacaaaacgcacgaatggctgcaaaattcagaagcctgcactggtccacaggarccatgartaagagcagcytcccaccccatgtgacagcctcaaatctgcctgcctaccactcctcttctcttctgaattttccccaacttaaattgaatgcaaataagccaggtgtggtccccagagcagtaatcttcagtccccaccgagttcccatagcaacttgcacagctggccactggaaagaagttgtattctgcttcatattggccacagtgtttaaacactcggtgaatgaaacatcaattatggcatctcctaaaggaaacatctactaaaaagcacatccattttgccttgattagtacagaaaaataa

SEQ ID NO: 28046 - DNA, 599 bp, Chicken  19866894245698_1
  misc_feature (1)..(46): n is any nucleotide
nnnnnnnnnnnnnnnnnnnnnnnnnnnnnnnnnnnnnnnnnnnnnncttaacctgcaaggaaggaattttcttatttcaggtgctttttctccagcctaattgctgtggtctgctttacattttaattaatgttgcttggtttgttcaggcagttttagcttgcttgttcatcactctgtggtaggaggtatgctttgtaattaaaagcaagtctgcttgtaagatcatcagtaaggaagtcgtagtttttaaataaagcactttgtagtcacctttagaaaataacgtgtaaactgcartcaattagtctccctgctgaggtacaaattggatgaaggagcrgggatattgtttgagggaaactgaggaatagacacttagtgacatgctgaaatttactgatggaaaagaaaaccagtatagggaagctatggtcagcattcagctcagctgacaggaggtgygcatattgttccccaccacatctcctccctttgctaattatctcacagcctctctggcacttggggtcaccaaagtcacttgttagcaagctgactgccagagacaacaaaaggcacagaattgcatgttttaa

SEQ ID NO: 28047 - DNA, 599 bp, Chicken  19866894245698_2
  misc_feature (1)..(3): n is any nucleotide
nnncttaacctgcaaggaaggaattttcttatttcaggtgctttttctccagcctaattgctgtggtctgctttacattttaattaatgttgcttggtttgttcaggcagttttagcttgcttgttcatcactctgtggtaggaggtatgctttgtaattaaaagcaagtctgcttgtaagatcatcagtaaggaagtcgtagtttttaaataaagcactttgtagtcacctttagaaaataacgtgtaaactgcartcaattagtctccctgctgaggtacaaattggatgaaggagcrgggatattgtttgagggaaactgaggaatagacacttagtgacatgctgaaatttactgatggaaaagaaaaccagtatagggaagctatggtcagcattcagctcagctgacaggaggtgygcatattgttccccaccacatctcctccctttgctaattatctcacagcctctctggcacttggggtcaccaaagtcacttgttagcaagctgactgccagagacaacaaaaggcacagaattgcatgttttaattatggtttcattgtcatgcaattcacagccagtccatagcga

SEQ ID NO: 28048 - DNA, 600 bp, Chicken  19866894245698_3
tgttcatcactctgtggtaggaggtatgctttgtaattaaaagcaagtctgcttgtaagatcatcagtaaggaagtcgtagtttttaaataaagcactttgtagtcacctttagaaaataacgtgtaaactgcartcaattagtctccctgctgaggtacaaattggatgaaggagcrgggatattgtttgagggaaactgaggaatagacacttagtgacatgctgaaatttactgatggaaaagaaaaccagtatagggaagctatggtcagcattcagctcagctgacaggaggtgygcatattgttccccaccacatctcctccctttgctaattatctcacagcctctctggcacttggggtcaccaaagtcacttgttagcaagctgactgccagagacaacaaaaggcacagaattgcatgttttaattatggtttcattgtcatgcaattcacagccagtccatagcgagaagggcttcttactgtttgcttgacagtctgaaaattcacgctggagaatgagaattgctgccacaaagtaagraacacaaacctagagctcctggtcatttgmgaagccctatgcaccagc

SEQ ID NO: 28049 - DNA, 600 bp, Chicken  19866894245698_4
agtatagggaagctatggtcagcattcagctcagctgacaggaggtgygcatattgttccccaccacatctcctccctttgctaattatctcacagcctctctggcacttggggtcaccaaagtcacttgttagcaagctgactgccagagacaacaaaaggcacagaattgcatgttttaattatggtttcattgtcatgcaattcacagccagtccatagcgagaagggcttcttactgtttgcttgacagtctgaaaattcacgctggagaatgagaattgctgccacaaagtaagraacacaaacctagagctcctggtcatttgmgaagccctatgcaccagcattttcctcctaagtgcacatcacagatgtgcccgtattcctcagcccctcctctgtcacccttaacagatatttcagcttctactggtaaagctgcctgaaaaatatgtgctgtgcaragataaacaagcagcaaaaattaaggctgagcaagggtgctgctgcagtggaaaggaggaatgctggaagatattcagagagagagaaatgtaaagatgatgagcatgtcgctttacagcrctggagcccttt

SEQ ID NO: 28050 - DNA, 600 bp, Chicken  19866894245698_5
tcagctgacaggaggtgygcatattgttccccaccacatctcctccctttgctaattatctcacagcctctctggcacttggggtcaccaaagtcacttgttagcaagctgactgccagagacaacaaaaggcacagaattgcatgttttaattatggtttcattgtcatgcaattcacagccagtccatagcgagaagggcttcttactgtttgcttgacagtctgaaaattcacgctggagaatgagaattgctgccacaaagtaagraacacaaacctagagctcctggtcatttgmgaagccctatgcaccagcattttcctcctaagtgcacatcacagatgtgcccgtattcctcagcccctcctctgtcacccttaacagatatttcagcttctactggtaaagctgcctgaaaaatatgtgctgtgcaragataaacaagcagcaaaaattaaggctgagcaagggtgctgctgcagtggaaaggaggaatgctggaagatattcagagagagagaaatgtaaagatgatgagcatgtcgctttacagcrctggagccctttctgatgtgtgatttcacatggccatatcta

SEQ ID NO: 28051 - DNA, 600 bp, Chicken  19866894245698_6
aattgcatgttttaattatggtttcattgtcatgcaattcacagccagtccatagcgagaagggcttcttactgtttgcttgacagtctgaaaattcacgctggagaatgagaattgctgccacaaagtaagraacacaaacctagagctcctggtcatttgmgaagccctatgcaccagcattttcctcctaagtgcacatcacagatgtgcccgtattcctcagcccctcctctgtcacccttaacagatatttcagcttctactggtaaagctgcctgaaaaatatgtgctgtgcaragataaacaagcagcaaaaattaaggctgagcaagggtgctgctgcagtggaaaggaggaatgctggaagatattcagagagagagaaatgtaaagatgatgagcatgtcgctttacagcrctggagccctttctgatgtgtgatttcacatggccatatctagtggaaaattttcaggagaccttttcaaaatgaaggaagtttcagaaatagcccaaacttccctacwcacggccaaaccagcctcaagtggggagatgagagaagggagatgaaaagaaataaaaaaggaaaagagg

SEQ ID NO: 28052 - DNA, 600 bp, Chicken  19866894245698_7
cacaaagtaagraacacaaacctagagctcctggtcatttgmgaagccctatgcaccagcattttcctcctaagtgcacatcacagatgtgcccgtattcctcagcccctcctctgtcacccttaacagatatttcagcttctactggtaaagctgcctgaaaaatatgtgctgtgcaragataaacaagcagcaaaaattaaggctgagcaagggtgctgctgcagtggaaaggaggaatgctggaagatattcagagagagagaaatgtaaagatgatgagcatgtcgctttacagcrctggagccctttctgatgtgtgatttcacatggccatatctagtggaaaattttcaggagaccttttcaaaatgaaggaagtttcagaaatagcccaaacttccctacwcacggccaaaccagcctcaagtggggagatgagagaagggagatgaaaagaaataaaaaaggaaaagaggcatgtacactttcctttgctttctagcatgtcagatgcttgatcacatgaggaatgagcacatgatccgagacagccagcacggcttcaccaggggaaggtcatgcttaaccaatcttgtg

SEQ ID NO: 28053 - DNA, 560 bp, Chicken  19866894245698_8
tcctctgtcacccttaacagatatttcagcttctactggtaaagctgcctgaaaaatatgtgctgtgcaragataaacaagcagcaaaaattaaggctgagcaagggtgctgctgcagtggaaaggaggaatgctggaagatattcagagagagagaaatgtaaagatgatgagcatgtcgctttacagcrctggagccctttctgatgtgtgatttcacatggccatatctagtggaaaattttcaggagaccttttcaaaatgaaggaagtttcagaaatagcccaaacttccctacwcacggccaaaccagcctcaagtggggagatgagagaagggagatgaaaagaaataaaaaaggaaaagaggcatgtacactttcctttgctttctagcatgtcagatgcttgatcacatgaggaatgagcacatgatccgagacagccagcacggcttcaccaggggaaggtcatgcttaaccaatcttgtggccttctatgatggagtgatggcattggtggatgaggggaaggcaactgatgtcatttacctggacttg

SEQ ID NO: 28054 - DNA, 600 bp, Chicken  19866894245702_1
atgtttgggctaataaaaacaaaatcataaggtcttgaaatagtattactggtagcatacatgcaattgcaaaatcagaagaactgcctgcctggagtgatctaaacataagcagcaagtgcagctcccttagcttatctttctccagagcacaagttccctacccacatatcacattcacaacactgaagtaaattactgaaacagttcccccaaaggcatttccctgtacctgcattcataaagaagtcccacacaggcaacctgcaacccccacaaaaatgaatcatctagcttccyagggatggactttgcattttgaatacctccaactgtcctagttttgagtaaaatgcagaggacaggccatcagctatgtgctgaggacagaatggaytacagcttctgtgtagtgccyttctctaaccatatacacctgtggcagggagtgacaggtagtgggggaagaagtgtcaaagtgatttagcattctggtctcagaatttaaaacagtatttccctgctgaagtctgcagacaaatgttaagagatgagagaacagaaaggatgttacctaactctcaaactggacaaaaaaat

SEQ ID NO: 28055 - DNA, 600 bp, Chicken  19866894245702_2
tgatctaaacataagcagcaagtgcagctcccttagcttatctttctccagagcacaagttccctacccacatatcacattcacaacactgaagtaaattactgaaacagttcccccaaaggcatttccctgtacctgcattcataaagaagtcccacacaggcaacctgcaacccccacaaaaatgaatcatctagcttccyagggatggactttgcattttgaatacctccaactgtcctagttttgagtaaaatgcagaggacaggccatcagctatgtgctgaggacagaatggaytacagcttctgtgtagtgccyttctctaaccatatacacctgtggcagggagtgacaggtagtgggggaagaagtgtcaaagtgatttagcattctggtctcagaatttaaaacagtatttccctgctgaagtctgcagacaaatgttaagagatgagagaacagaaaggatgttacctaactctcaaactggacaaaaaaatgtaaaataaataaataaataaaataaaatcgacctttggtttatggtgtcaaagcaactactgaggcttgcacactgaaatgggtatttaaaatttc

SEQ ID NO: 28056 - DNA, 600 bp, Chicken  19866894245702_3
gtgcagctcccttagcttatctttctccagagcacaagttccctacccacatatcacattcacaacactgaagtaaattactgaaacagttcccccaaaggcatttccctgtacctgcattcataaagaagtcccacacaggcaacctgcaacccccacaaaaatgaatcatctagcttccyagggatggactttgcattttgaatacctccaactgtcctagttttgagtaaaatgcagaggacaggccatcagctatgtgctgaggacagaatggaytacagcttctgtgtagtgccyttctctaaccatatacacctgtggcagggagtgacaggtagtgggggaagaagtgtcaaagtgatttagcattctggtctcagaatttaaaacagtatttccctgctgaagtctgcagacaaatgttaagagatgagagaacagaaaggatgttacctaactctcaaactggacaaaaaaatgtaaaataaataaataaataaaataaaatcgacctttggtttatggtgtcaaagcaactactgaggcttgcacactgaaatgggtatttaaaatttctgcataaaaatctgtgcagtg

SEQ ID NO: 28057 - DNA, 600 bp, Chicken  19866894245704_1
taccacagaaggtggaattgcctctgtggtttgagaactttgacatggatacgtgaagcatccacagctgagccctcatgagacctagaagtggatgactgctgtactgagccctgtgcaggcagagccagttgagtgtgaggtgatgggtctccctgtgatgcactctccatctttcatttggttctggctgttggctcagaaaaaaaaaatgcagagaatttaatttttctgtcttcagggcaagccaagacatttctagcagtaattacaccttctacaagccaataatttcatttkcagatcaggtcttccaaagatgccatcccacctggcttatgaacagcagygctktgaatagtcagttggtccaactgctcattagtcacctcgttagaaaatggcattatccctggagacaatcaagatcaggttggatggggctctgagcacctgatggagctgtgggtgcccctgttcattgcaggggagttggaccagatggcctttaaaggtcccttccaactccaactattctatgattctactctatgattctaccaatgaatcttcacagagacatttctggacctcagaaca

SEQ ID NO: 28058 - DNA, 600 bp, Chicken  19866894245704_2
acgtgaagcatccacagctgagccctcatgagacctagaagtggatgactgctgtactgagccctgtgcaggcagagccagttgagtgtgaggtgatgggtctccctgtgatgcactctccatctttcatttggttctggctgttggctcagaaaaaaaaaatgcagagaatttaatttttctgtcttcagggcaagccaagacatttctagcagtaattacaccttctacaagccaataatttcatttkcagatcaggtcttccaaagatgccatcccacctggcttatgaacagcagygctktgaatagtcagttggtccaactgctcattagtcacctcgttagaaaatggcattatccctggagacaatcaagatcaggttggatggggctctgagcacctgatggagctgtgggtgcccctgttcattgcaggggagttggaccagatggcctttaaaggtcccttccaactccaactattctatgattctactctatgattctaccaatgaatcttcacagagacatttctggacctcagaacaagacaacctcacggctagagggtggacttctacccaacaagagttgggtg

SEQ ID NO: 28059 - DNA, 600 bp, Chicken  19866894245704_3
gaagcatccacagctgagccctcatgagacctagaagtggatgactgctgtactgagccctgtgcaggcagagccagttgagtgtgaggtgatgggtctccctgtgatgcactctccatctttcatttggttctggctgttggctcagaaaaaaaaaatgcagagaatttaatttttctgtcttcagggcaagccaagacatttctagcagtaattacaccttctacaagccaataatttcatttkcagatcaggtcttccaaagatgccatcccacctggcttatgaacagcagygctktgaatagtcagttggtccaactgctcattagtcacctcgttagaaaatggcattatccctggagacaatcaagatcaggttggatggggctctgagcacctgatggagctgtgggtgcccctgttcattgcaggggagttggaccagatggcctttaaaggtcccttccaactccaactattctatgattctactctatgattctaccaatgaatcttcacagagacatttctggacctcagaacaagacaacctcacggctagagggtggacttctacccaacaagagttgggtgcaat

SEQ ID NO: 28060 - DNA, 600 bp, Chicken  19866894245712_1
gtgaaccaagaaataaccctgttgtgcaagagcagaatctttttttaaagagaataactgcttcaagaggtttatcaggcatgcctcgtatacatcgacttaaaagacatgaatgaaaaggttaaggagaaaatgaaaaagcagaaaaaaaatgatgttacatattatctgcaagttataataactatgggtatagttgccttttatttttattgctttatgtaaaacaatgctttagtattacctttttgagtttatatatagctaattttatacctgttagcctttcttcttagaagytaatagtctcctggaagcctactaaaatacacaggatttctgcttaaaaatagaggttacaaggcttgctgaagacagccttttttaaagcaatgtagagaaaaaatattttgaatctggatgatctagggtagctactagactgcttgtgctaatattatacttactctttccctgtgtcagtgaaatattttcctcccccttattattattatttttaaataaactgctcttggttatactttttggtgaagttctttatcactttcctggaatgtggtcccactaagatcagagaat

SEQ ID NO: 28061 - DNA, 600 bp, Chicken  19866894245713_1
aaatacccagctgaagtacggttgatatttatctgaagcttcaagttactgtgtgcggagtcaaaataaagtggaacttaaaggtttgctgttttccttccatagtaagtctacagaaagatttgaaaagcaaaactgaactgaaatgtactggaaaggtattaaaacttcgtaaatcaaatgtggggaaaaaaaatcctcaattttccaacaatttcatcatttaaagaaggtctaaagcagaacttcagtgtcattttactgtaatataaatcagaattgccatgtgctgcttcaaaygttcctgctgtgttttcaggtgggtgctgcagtttgaaaactggggaatggtgcccctgactgttggatgtttttttgtagccctctgtgagatgtgaatcttcgtcttcctttccctgctcagccaccacaaatcaggctcttcatagactgtgtgatattaatctccatggggtggacacctccatgcaggtgctatagctctccccctcctccagttaattcgggttttaatctcacttcctttgatttatttacttatgtcatgtgcaatgtgtctggctccttgccctcgctttg

SEQ ID NO: 28062 - DNA, 600 bp, Chicken  19866894245713_2
tggacacctccatgcaggtgctatagctctccccctcctccagttaattcgggttttaatctcacttcctttgatttatttacttatgtcatgtgcaatgtgtctggctccttgccctcgctttgctttccccctcgtatacatctgacacattcttgctgtttcattgttctcctcacctcttgcttttgttcgctgggataaacctgtttgataccgtgttctccagtggcggatttcctacggtttgcttactctgctttaactttgtcacattattacacaaattgcttttggtgwttgcttcagttgaaacatatgaatcaaaataataatgcctgttatgcaggaaaataagggccctggcacagtgatcctttgttttgttaaatttccctaatcacattgtgacccctgttctcatcttgctgcagcttcctggtgtgtttgtattcagtttcgctccctcaatgggctgctgcaaagtttattcactctgagaatataaggttttaatggaggaaggggtaaaaggaggcttaataatgcagccttgtgattctgtcactatatggcatgtgtatagtatctctagcagaa

SEQ ID NO: 28063 - DNA, 600 bp, Chicken  19866894245718_1
agtaagtctttctaacaaggacttaagactgcatccctcaggataccctaatataatatcatcctttctctgtgctaaagaaaaaaaacttagcagccaaagatcctgctcaaaaagcgtatatccttcctcatatttgagcaagacacacaaggtacatggcaaccaagatctggttttagccactgttttcaatggtttctcttctatacaagcatagcacatctgtctgttgtgacagtgactgatattacatagtttgtttctttttctgttgcttgctctaaaattctctcctgrgtgtaactttatctttcttccccactagaatatgctgagcctcagatatcaagtcagagagaaccagagrtatcactaagtcagttaaacccacaaggttatgcagtactttgctgtctttttaccctaacatagattgcccggctgcgcagtgaactggatattgttcgtgggaataccaaagtgatgtctgaaatgctgacagaaatggtacctggacaagaggattcttcagaccttgagttactccaggtaatacttttctagcaaatacgaatctgatattggctgtgcttgagg

SEQ ID NO: 28064 - DNA, 600 bp, Chicken  19866894245718_2
tgtgctaaagaaaaaaaacttagcagccaaagatcctgctcaaaaagcgtatatccttcctcatatttgagcaagacacacaaggtacatggcaaccaagatctggttttagccactgttttcaatggtttctcttctatacaagcatagcacatctgtctgttgtgacagtgactgatattacatagtttgtttctttttctgttgcttgctctaaaattctctcctgrgtgtaactttatctttcttccccactagaatatgctgagcctcagatatcaagtcagagagaaccagagrtatcactaagtcagttaaacccacaaggttatgcagtactttgctgtctttttaccctaacatagattgcccggctgcgcagtgaactggatattgttcgtgggaataccaaagtgatgtctgaaatgctgacagaaatggtacctggacaagaggattcttcagaccttgagttactccaggtaatacttttctagcaaatacgaatctgatattggctgtgcttgaggttggttgtgggttttttatttttattttttgggtgggatgttttttgttgttgttcccttcagtgctgtg

SEQ ID NO: 28065 - DNA, 600 bp, Chicken  19866894245720_1
gaggcaatgcaggcagtgctctgtcagcccaactgcagctgtgtctcagcaaaacccatggactaccaaaagggaggccctgcccgagaactgccgtgccaggcttcactttgtcacctcagctctccttgagcaccggtggctctgccccagtcagggtcgtggtggtgtggtgggtgttgtggttctggctgccctctgatggggaccgtgtgaagctgtggctggtggcggcactgagcctcagctccggcccctgtcacccccagtacctctgaaaccgagggatggctgtctagrtaaagaggatttgcatcagcawagcaaggatgaacgctgtctccttgcctcaggcaagttttccttatttttgaagacttcaggcccgataccaggaggtcatttgactgatgtgcactttcattttttttttttttttgcaatacctgacatgtgtgcttgctgacttctattatattattaactattcaaggcagaaatcaagccgaggctataattaatataggagaactccttttctttgcccctggcttgtttttggtttgtttgtttcagtacatctcagtgtgtttgttttgg

SEQ ID NO: 28066 - DNA, 600 bp, Chicken  19866894245720_2
gtcagcccaactgcagctgtgtctcagcaaaacccatggactaccaaaagggaggccctgcccgagaactgccgtgccaggcttcactttgtcacctcagctctccttgagcaccggtggctctgccccagtcagggtcgtggtggtgtggtgggtgttgtggttctggctgccctctgatggggaccgtgtgaagctgtggctggtggcggcactgagcctcagctccggcccctgtcacccccagtacctctgaaaccgagggatggctgtctagrtaaagaggatttgcatcagcawagcaaggatgaacgctgtctccttgcctcaggcaagttttccttatttttgaagacttcaggcccgataccaggaggtcatttgactgatgtgcactttcattttttttttttttttgcaatacctgacatgtgtgcttgctgacttctattatattattaactattcaaggcagaaatcaagccgaggctataattaatataggagaactccttttctttgcccctggcttgtttttggtttgtttgtttcagtacatctcagtgtgtttgttttggtttgctgactgcaacgtgatgg

SEQ ID NO: 28067 - DNA, 600 bp, Chicken  19866894245722_1
cacatacagaaattgtatctctgtgcaaacaatgtgtagcaatcccagatgcaggtgatgaacccggtccagtgtgtttgctgatctagtgttacaggaaagttgggctacagattgcaatctgatctgtttatttctgctatgcagaaaggaatttatggtaacttctctacgtacatatagcaaagcttatgatgaggctattatactgatgcagatttctggattatactaaactgtttttgtatatccaatgttgtgttggctttcattgtaatttgtggttgatttttaaagacraaatctttgtccacatgtatatctttgtgtttctgtggccacacttgaggcagtattgtagactttatcagtgcaacccttaaggcttttctacactcacagggacttgagatgcaaatgagtaaaactgtagccacgcagagacaaaatgttttgatacttattaagaaaagataacagcaaaactcctacaatctgcaagtcagacaccaaaataattacaagtcctggtgtctgaactcagaaaataggaaactatgcatttggtgaaggaagctaaatgatggccaaaccaggtgc

SEQ ID NO: 28068 - DNA, 600 bp, Chicken  19866894245730_1
atcagaatagaaattggttttgtggagtaccattcatatctggggtatcccagagtacttcacagcaatgattttgatgtggatggaactgcagatgtgtaggtaaacaacagccattgtgttctcacatgagagctctcatacaccttcaaataaatgaatatcaaagtgctagggggattctcttttagacaattgctgtgggatcattggctcggaggaggttgatcagctggaatgggcagaagggatttctctttgacatcttctctgagggagcccagggggtctgtgactaayacaggaactggtggcccttctttttccccctctctgacttacagaatgaagtgctgtttttctgcatattgcagtcaaaaagaaaaatgtgacccgcagagacagaaaatgcagcagaagaagcaagcatgaaagagacttggacatcgcttagctgtatcatctgcatcttgtctgaaatcattaacatctctaaccctccatgtggtgtataggaaataaggagcagagatgcatctctgtctctttttagaggtaaccagtgccaggacaagagacgggggcacaaactgacacaca

SEQ ID NO: 28069 - DNA, 600 bp, Chicken  19866894245731_1
aaatgcagggaggtgttcagttattgtctttgatagataggcttcttaattttccagaatacatggtggaccaggccagggtcagtgtgtgataacacaataagagaaatttggaaatactaaaagatcaaagaggaggagaaaacaggcaaggaagagccatctagaagcaggaatagatgcagtcctgcaagtcatgtttacctcacatgtcagtgtccccatggggacattccacagcagttgttaccaggatggaccttcaaagtcctttctgcccttagaatctgtgaaccccaragatttccccaaatctccacaggttcaggagagctgtagaaaaaactttacatcacaatggtatccctgtgatgaggacagtgactgtatatcacggggaaagggacatcggtcataggataatgtcctatgagcatatagcatgtgttgtctccttgactttttctctaagagaataggtaatgctagaaatgacataaaaatcaggcttctcatgtgattttaaacaagaatatcacactggctgttgtagcaagacaatcttagtagcattaatgctgttgctctaccactaatatc

SEQ ID NO: 28070 - DNA, 600 bp, Chicken  19866894245734_1
ggcagaagcataaatttggggaatacaatgaatgagaatgatttttcagaataagatattaaaaatgaaataatttcagttttcaaaaaaaaaggtaggaaattcatcttttttttttttgttctttcacttggtgtctactctatgatcaaactagacactctcctgggaaagttcattagctaggcttaaactacacacctcagatagaaatggaacttgtgcgacattttattgcaaaggttaatgatctgacaacttcaaaatcagtaatgcttaacaacttccctttttattttrcagtttggtttctacggcaacattatttagaaagaaatacaattacttgaaatactaatgacaaaaactccacacttcaaattgataatgttttgcttgaatttgaaagcgtctgaagctttatatcaaagtatgcttcaacaaaaataacaaaaacattttaaaaatagtagtagattaggagaaatgtttacctcatcataaacagattttgcacctctcctttaattttgcagcttctttccattatatttgctgtgaaattattattattccatgattttatttttattttacttt

SEQ ID NO: 28071 - DNA, 600 bp, Chicken  19866894245735_1
tgtttttagaaccagggaaggcaattgctataacaatcatcctctctccattttttttcagcttatgagtaacaaaacatctgttgtgacacattgagaagagtgacctacagcagcaaaacctgtgctgtatttgttgctgaaggcagtgttgtgccagttttcccaaataacacacccttgctgtttcccctgctgtgagagcatttctagcacaaatgccttactgactttctaggatgttgatgttttatagccactgagccatatgctggctatgacatttttattcaagaatayagaggttttatctgaatatacatactaatctgttatgacatctgtcaggattcagctaggtaagatwttcatattccattaaccarctagtaactgcaaaaaagcaggctttcaggtttgagagagaggctcttcattatcatattgtattgatcatttgtaaaaaatatttttctagtagttttggatactctgaagaaaatgttcatgtagatcatgccacttattataaggttccaccctgctatgcagcatcccaaactgattagtccagactgggcatccttgcaacattaaaga

SEQ ID NO: 28072 - DNA, 600 bp, Chicken  19866894245735_2
agtaacaaaacatctgttgtgacacattgagaagagtgacctacagcagcaaaacctgtgctgtatttgttgctgaaggcagtgttgtgccagttttcccaaataacacacccttgctgtttcccctgctgtgagagcatttctagcacaaatgccttactgactttctaggatgttgatgttttatagccactgagccatatgctggctatgacatttttattcaagaatayagaggttttatctgaatatacatactaatctgttatgacatctgtcaggattcagctaggtaagatwttcatattccattaaccarctagtaactgcaaaaaagcaggctttcaggtttgagagagaggctcttcattatcatattgtattgatcatttgtaaaaaatatttttctagtagttttggatactctgaagaaaatgttcatgtagatcatgccacttattataaggttccaccctgctatgcagcatcccaaactgattagtccagactgggcatccttgcaacattaaagaaattgaatctcttagtctgacccttgctccctgcctacttttctactgaaagaaagagtatgtgtac

SEQ ID NO: 28073 - DNA, 600 bp, Chicken  19866894245735_3
tgacacattgagaagagtgacctacagcagcaaaacctgtgctgtatttgttgctgaaggcagtgttgtgccagttttcccaaataacacacccttgctgtttcccctgctgtgagagcatttctagcacaaatgccttactgactttctaggatgttgatgttttatagccactgagccatatgctggctatgacatttttattcaagaatayagaggttttatctgaatatacatactaatctgttatgacatctgtcaggattcagctaggtaagatwttcatattccattaaccarctagtaactgcaaaaaagcaggctttcaggtttgagagagaggctcttcattatcatattgtattgatcatttgtaaaaaatatttttctagtagttttggatactctgaagaaaatgttcatgtagatcatgccacttattataaggttccaccctgctatgcagcatcccaaactgattagtccagactgggcatccttgcaacattaaagaaattgaatctcttagtctgacccttgctccctgcctacttttctactgaaagaaagagtatgtgtacacaccagtctgattttgac

SEQ ID NO: 28074 - DNA, 600 bp, Chicken  19866894245736_1
tggttttaagctgacagggaaggtttaggtgagatattaggaggaagtttttcacccagagggtggtgaggcactgaacaggttgcccaaggaggctgtggatgccccatccctgcaggcattcaaggccaggctggatgtggctctgggcagcctgggctgctggttggtgaccctgcacatagcagggggttggaactggatgagcattgtggtccttttcaacccaggccatcctatgactctactttatacaggagcctggtaagaatgacattagctaatggcatcaaaaatacrgttgaccagaaraaaaaagaggattctttgttttggatttgtttttcacaagctgggtcctcatcagtccctgggaaggtgaaactactcgagctctgatacagaaacctcaccaaagctgcaggtcgaacacctggacgttctgaaagatgacatttggcaaaacttgtatctgctatatctgtgttacccaaaagattgtaaaagcatggcaaattcctaagtgctttctttgccaatgacagatatctttcacrttaaaagacctaagatttttcaagtcttcattcgraaggagag

SEQ ID NO: 28075 - DNA, 600 bp, Chicken  19866894245736_2
gacagggaaggtttaggtgagatattaggaggaagtttttcacccagagggtggtgaggcactgaacaggttgcccaaggaggctgtggatgccccatccctgcaggcattcaaggccaggctggatgtggctctgggcagcctgggctgctggttggtgaccctgcacatagcagggggttggaactggatgagcattgtggtccttttcaacccaggccatcctatgactctactttatacaggagcctggtaagaatgacattagctaatggcatcaaaaatacrgttgaccagaaraaaaaagaggattctttgttttggatttgtttttcacaagctgggtcctcatcagtccctgggaaggtgaaactactcgagctctgatacagaaacctcaccaaagctgcaggtcgaacacctggacgttctgaaagatgacatttggcaaaacttgtatctgctatatctgtgttacccaaaagattgtaaaagcatggcaaattcctaagtgctttctttgccaatgacagatatctttcacrttaaaagacctaagatttttcaagtcttcattcgraaggagagcagattccagac

SEQ ID NO: 28076 - DNA, 600 bp, Chicken  19866894245736_3
gagcctggtaagaatgacattagctaatggcatcaaaaatacrgttgaccagaaraaaaaagaggattctttgttttggatttgtttttcacaagctgggtcctcatcagtccctgggaaggtgaaactactcgagctctgatacagaaacctcaccaaagctgcaggtcgaacacctggacgttctgaaagatgacatttggcaaaacttgtatctgctatatctgtgttacccaaaagattgtaaaagcatggcaaattcctaagtgctttctttgccaatgacagatatctttcacrttaaaagacctaagatttttcaagtcttcattcgraaggagagcagattccagacaaagggagtctgggttctagaacaccaaggtgtttgtctgcaggtgcatctcatcctgcagcacttctcagcaactgccctcctttgcctcccaggaagcagtgctgggctccattgcaggaggacagaactcatttgcgacgtgcccagcagcacagagtacttacaaacaactcctcacagcctgcatcgtgctgcagagacacaccccacagtaagtccagagcacagctgcagtgtgccac

SEQ ID NO: 28077 - DNA, 600 bp, Chicken  19866894245736_4
aaaatacrgttgaccagaaraaaaaagaggattctttgttttggatttgtttttcacaagctgggtcctcatcagtccctgggaaggtgaaactactcgagctctgatacagaaacctcaccaaagctgcaggtcgaacacctggacgttctgaaagatgacatttggcaaaacttgtatctgctatatctgtgttacccaaaagattgtaaaagcatggcaaattcctaagtgctttctttgccaatgacagatatctttcacrttaaaagacctaagatttttcaagtcttcattcgraaggagagcagattccagacaaagggagtctgggttctagaacaccaaggtgtttgtctgcaggtgcatctcatcctgcagcacttctcagcaactgccctcctttgcctcccaggaagcagtgctgggctccattgcaggaggacagaactcatttgcgacgtgcccagcagcacagagtacttacaaacaactcctcacagcctgcatcgtgctgcagagacacaccccacagtaagtccagagcacagctgcagtgtgccacctcctgctgacagcagctaccaacacatgggctaa

SEQ ID NO: 28078 - DNA, 600 bp, Chicken  19866894245738_1
aaagacagacacagcaggattaacatgttaacatcgccatcctttggagtgaatgcgtatgttcatcttatggcatgtgcttccaggtaacaaatagaaacctcaggtggggtgtgttatcgagcatctgaaatgctctcccatctgtgttttccacaaactagtgctgagtcaagtgtttaagttacagctggtgttcattataatgttactgatttctctaggtttgaatacccgcatctgtctctgcgtgcaccttcacatactgtatgtacatatttgtgtgtctgaaaatatatrtatatatacacacatacacacagcgggggtatgtgtgcatattacatagtttatatcaaaaggttttgtgcacacatggtggtgtgtgcagcacactcatgcacatagagagagaggaaaaaaaaaaaaagagaaactttatttttaggcaagttgtaaatacaaaatctttaccgcatatcccagaaatatgggtgatgttggcagaacttcgcaggggagaaatgtggggttttctgtttattttcaagggcaacacagggacagagtgaattacagtaaattatactctgaaaatga

SEQ ID NO: 28079 - DNA, 599 bp, Chicken  19866894245741_1
  misc_feature (1)..(246): n is any nucleotide
nnnnnnnnnnnnnnnnnnnnnnnnnnnnnnnnnnnnnnnnnnnnnnnnnnnnnnnnnnnnnnnnnnnnnnnnnnnnnnnnnnnnnnnnnnnnnnnnnnnnnnnnnnnnnnnnnnnnnnnnnnnnnnnnnnnnnnnnnnnnnnnnnnnnnnnnnnnnnnnnnnnnnnnnnnnnnnnnnnnnnnnnnnnnnnnnnnnnnnnnnnnnnnnnnnnnnnnnnnnnnnnnnnnnnnnnnnnnnnnnnnnnnnaatcaaggaattattttggtcagaagggacccttaaaggtcatctagtccaacwgccctgcaacgagcagtgactcctacagctagatctggtgctcagagccccatccagcctggctttgaatgtttccagggacggagcatccaccacataggttgacctagcagagagaaattagaaacaccgtgcccctgtagctgacagctgcctagtgattctgtattgttcttatacaagtttcctgttctatcagtaagatacatgtccttctacgtgtaataattaatgtggaaagatgaagccaaatagttattattcaatgattttaaagtagagtacttttttaaaaataa

SEQ ID NO: 28080 - DNA, 600 bp, Chicken  19866894245743_1
ttctagatgcatttcacataaaagtataaagtcagttgcctaactagtcatttatactttcccttagtcactggagggatacatgcattccccaagatgactattccaatcccagacaggcacataaattaagcttccggggcaactccagcagagactccaacttgatgggacagcaaaaatccatcaagaactcccttagagaccacaaccttttcctaaaagaatctagaaagtatattttggataccctagccttcaggcacttaatagatgaaatgaacccaaatcttcaaatcrattatcagtagayctaaatttcacattttgattcccataagaaaaggaaatacacactcaatgcaggatgtttcttcaaggcattgtcagcctaattcactttcagagtttccctatcatgccctttgtgcctgccctttatgcacaagaagacagrcagacacwgctaaggctcagaagcagaggtcactgtgataatgatgcrtaccagtaacayccaaaaggatcagatcatgatttagtgtactgctggaaagtacctgtctccttcatgccttatagctatgaggcagtgggaca

SEQ ID NO: 28081 - DNA, 600 bp, Chicken  19866894245743_2
tcacataaaagtataaagtcagttgcctaactagtcatttatactttcccttagtcactggagggatacatgcattccccaagatgactattccaatcccagacaggcacataaattaagcttccggggcaactccagcagagactccaacttgatgggacagcaaaaatccatcaagaactcccttagagaccacaaccttttcctaaaagaatctagaaagtatattttggataccctagccttcaggcacttaatagatgaaatgaacccaaatcttcaaatcrattatcagtagayctaaatttcacattttgattcccataagaaaaggaaatacacactcaatgcaggatgtttcttcaaggcattgtcagcctaattcactttcagagtttccctatcatgccctttgtgcctgccctttatgcacaagaagacagrcagacacwgctaaggctcagaagcagaggtcactgtgataatgatgcrtaccagtaacayccaaaaggatcagatcatgatttagtgtactgctggaaagtacctgtctccttcatgccttatagctatgaggcagtgggacacagtttccttcct

SEQ ID NO: 28082 - DNA, 600 bp, Chicken  19866894245743_3
ttaagcttccggggcaactccagcagagactccaacttgatgggacagcaaaaatccatcaagaactcccttagagaccacaaccttttcctaaaagaatctagaaagtatattttggataccctagccttcaggcacttaatagatgaaatgaacccaaatcttcaaatcrattatcagtagayctaaatttcacattttgattcccataagaaaaggaaatacacactcaatgcaggatgtttcttcaaggcattgtcagcctaattcactttcagagtttccctatcatgccctttytgcctgccctttatgcacaagaagacagrcagacacwgctaaggctcagaagcagaggtcactgtgataatgatgcrtaccagtaacayccaaaaggatcagatcatgatttagtgtactgctggaaagtacctgtctccttcatgccttatagctatgaggcagtgggacacagtttccttccttcttctattccaagacatgctacagcatataacagacttggcattcacatgaagagctcagaatgacaccagcagcacttcttttcctatgctatctctgtttttccatcacctc

SEQ ID NO: 28083 - DNA, 600 bp, Chicken  19866894245743_4
ctccaacttgatgggacagcaaaaatccatcaagaactcccttagagaccacaaccttttcctaaaagaatctagaaagtatattttggataccctagccttcaggcacttaatagatgaaatgaacccaaatcttcaaatcrattatcagtagayctaaatttcacattttgattcccataagaaaaggaaatacacactcaatgcaggatgtttcttcaaggcattgtcagcctaattcactttcagagtttccctatcatgccctttgtgcctgccctttatgcacaagaagacagrcagacacwgctaaggctcagaagcagaggtcactgtgataatgatgcrtaccagtaacayccaaaaggatcagatcatgatttagtgtactgctggaaagtacctgtctccttcatgccttatagctatgaggcagtgggacacagtttccttccttcttctattccaagacatgctacagcatataacagacttggcattcacatgaagagctcagaatgacaccagcagcacttcttttcctatgctatctctgtttttccatcacctctaktgctctggccaaggacaaaggcttac

SEQ ID NO: 28084 - DNA, 600 bp, Chicken  19866894245743_5
tgatgggacagcaaaaatccatcaagaactcccttagagaccacaaccttttcctaaaagaatctagaaagtatattttggataccctagccttcaggcacttaatagatgaaatgaacccaaatcttcaaatcrattatcagtagayctaaatttcacattttgattcccataagaaaaggaaatacacactcaatgcaggatgtttcttcaaggcattgtcagcctaattcactttcagagtttccctatcatgccctttgtgcctgccctttatgcacaagaagacagrcagacacwgctaaggctcagaagcagaggtcactgtgataatgatgcrtaccagtaacayccaaaaggatcagatcatgatttagtgtactgctggaaagtacctgtctccttcatgccttatagctatgaggcagtgggacacagtttccttccttcttctattccaagacatgctacagcatataacagacttggcattcacatgaagagctcagaatgacaccagcagcacttcttttcctatgctatctctgtttttccatcacctctaktgctctggccaaggacaaaggcttacagtttgat

SEQ ID NO: 28085 - DNA, 600 bp, Chicken  19866894245743_6
ccacaaccttttcctaaaagaatctagaaagtatattttggataccctagccttcaggcacttaatagatgaaatgaacccaaatcttcaaatcrattatcagtagayctaaatttcacattttgattcccataagaaaaggaaatacacactcaatgcaggatgtttcttcaaggcattgtcagcctaattcactttcagagtttccctatcatgccctttgtgcctgccctttatgcacaagaagacagrcagacacwgctaaggctcagaagcagaggtcactgtgataatgatgcrtaccagtaacayccaaaaggatcagatcatgatttagtgtactgctggaaagtacctgtctccttcatgccttatagctatgaggcagtgggacacagtttccttccttcttctattccaagacatgctacagcatataacagacttggcattcacatgaagagctcagaatgacaccagcagcacttcttttcctatgctatctctgtttttccatcacctctaktgctctggccaaggacaaaggcttacagtttgatttcaacactgcctctaacatctcagcttgaccaggtgtag

SEQ ID NO: 28086 - DNA, 600 bp, Chicken  19866894245743_7
cctaaaagaatctagaaagtatattttggataccctagccttcaggcacttaatagatgaaatgaacccaaatcttcaaatcrattatcagtagayctaaatttcacattttgattcccataagaaaaggaaatacacactcaatgcaggatgtttcttcaaggcattgtcagcctaattcactttcagagtttccctatcatgccctttgtgcctgccctttatgcacaagaagacagrcagacacwgctaaggctcagaagcagaggtcactgtgataatgatgcrtaccagtaacayccaaaaggatcagatcatgatttagtgtactgctggaaagtacctgtctccttcatgccttatagctatgaggcagtgggacacagtttccttccttcttctattccaagacatgctacagcatataacagacttggcattcacatgaagagctcagaatgacaccagcagcacttcttttcctatgctatctctgtttttccatcacctctaktgctctggccaaggacaaaggcttacagtttgatttcaacactgcctctaacatctcagcttgaccaggtgtagtgataataaggg

SEQ ID NO: 28087 - DNA, 600 bp, Chicken  19866894245743_8
ctgccctttatgcacaagaagacagrcagacacwgctaaggctcagaagcagaggtcactgtgataatgatgcrtaccagtaacayccaaaaggatcagatcatgatttagtgtactgctggaaagtacctgtctccttcatgccttatagctatgaggcagtgggacacagtttccttccttcttctattccaagacatgctacagcatataacagacttggcattcacatgaagagctcagaatgacaccagcagcacttcttttcctatgctatctctgtttttccatcacctctaktgctctggccaaggacaaaggcttacagtttgatttcaacactgcctctaacatctcagcttgaccaggtgtagtgataataaggggatgggtaacaagtcacaaaaagaaatacacatttccatcactgagcactgtctgttattagtaataattaaaaccttactttggaagaaactctgtccagctgagagctcttgcccagaactttcaccagctgtgtccagcttggcatcctgaatccttgaagaattaacatgctcagagttgatcatcaaattaaaattcctgtatcataat

SEQ ID NO: 28088 - DNA, 599 bp, Chicken  19866894245749_1
  misc_feature (1)..(104): n is any nucleotide
nnnnnnnnnnnnnnnnnnnnnnnnnnnnnnnnnnnnnnnnnnnnnnnnnnnnnnnnnnnnnnnnnnnnnnnnnnnnnnnnnnnnnnnnnnnnnnnnnnnnnnnnaatggcttttcccatttggaaatgagggaaataatcccctcctggggtgatttggagggaaaattcatcgaggataggaaaatagtgacgagaggaaataggcaggaaaggaaagccatccctcagggtgcagtgtttggtatatttttctccaatcctgtggcccaggaattttggggagaacctcctgcagtgrggacagccaggatttttggggagagccttgttgctcacccctcctgctatagggttagggtcgtgacaggggtgtatgcctggtgcctccgcttgaagccccggcttggagcactgcctcaccctgggtctgtttcctataaatttcagagaatcccataaactgtagaaattcagtgcttgctgccaacgtgctttgtgatttattggagaagggtttgggcgaagccccctgatcctgaaagatatgggatttcattgggacctggggctgctacagtgtgggatgtatctgtcctg

SEQ ID NO: 28089 - DNA, 600 bp, Chicken  19866894245749_2
ttttggggagagccttgttgctcacccctcctgctatagggttagggtcgtgacaggggtgtatgcctggtgcctccgcttgaagccccggcttggagcactgcctcaccctgggtctgtttcctataaatttcagagaatcccataaactgtagaaattcagtgcttgctgccaacgtgctttgtgatttattggagaagggtttgggcgaagccccctgatcctgaaagatatgggatttcattgggacctggggctgctacagtgtgggatgtatctgtcctggaggggtgggacarggatgggacaggagggacccctgcggtggtggcayccctggatacagggattgctccacagcagcaaggagatgctagctagaatcaatatatgcccatatacacatacatatagataaaattaaagrcttcacyactgcctgtggggcatccaactttctgttttccatacccaagagcagaagtgctcagtctccctggtcaaagggacttgagacacagaatggctttggaaatgagttggagagctaacaggggaatcgtagaatcattaaagttggaaaagaccttcaggatcca

SEQ ID NO: 28090 - DNA, 600 bp, Chicken  19866894245749_3
atagggttagggtcgtgacaggggtgtatgcctggtgcctccgcttgaagccccggcttggagcactgcctcaccctgggtctgtttcctataaatttcagagaatcccataaactgtagaaattcagtgcttgctgccaacgtgctttgtgatttattggagaagggtttgggcgaagccccctgatcctgaaagatatgggatttcattgggacctggggctgctacagtgtgggatgtatctgtcctggaggggtgggacarggatgggacaggagggacccctgcggtggtggcayccctggatacagggattgctccacagcagcaaggagatgctagctagaatcaatatatgcccatatacacatacatatagataaaattaaagrcttcacyactgcctgtggggcatccaactttctgttttccatacccaagagcagaagtgctcagtctccctggtcaaagggacttgagacacagaatggctttggaaatgagttggagagctaacaggggaatcgtagaatcattaaagttggaaaagaccttcaggatccatcaatcccaaagtcaatctatcaacaccacggccg

SEQ ID NO: 28091 - DNA, 600 bp, Chicken  19866894245749_4
aatttcagagaatcccataaactgtagaaattcagtgcttgctgccaacgtgctttgtgatttattggagaagggtttgggcgaagccccctgatcctgaaagatatgggatttcattgggacctggggctgctacagtgtgggatgtatctgtcctggaggggtgggacarggatgggacaggagggacccctgcggtggtggcayccctggatacagggattgctccacagcagcaaggagatgctagctagaatcaatatatgcccatatacacatacatatagataaaattaaagrcttcacyactgcctgtggggcatccaactttctgttttccatacccaagagcagaagtgctcagtctccctggtcaaagggacttgagacacagaatggctttggaaatgagttggagagctaacaggggaatcgtagaatcattaaagttggaaaagaccttcaggatccatcaatcccaaagtcaatctatcaacaccacggccgctcatagagtcatagtatcgttaagtttggaagagacctttaagatcatcaagtccaactgctgctgaggagtggccacggctctccctgctg

SEQ ID NO: 28092 - DNA, 600 bp, Chicken  19866894245749_5
gagaatcccataaactgtagaaattcagtgcttgctgccaacgtgctttgtgatttattggagaagggtttgggcgaagccccctgatcctgaaagatatgggatttcattgggacctggggctgctacagtgtgggatgtatctgtcctggaggggtgggacarggatgggacaggagggacccctgcggtggtggcayccctggatacagggattgctccacagcagcaaggagatgctagctagaatcaatatatgcccatatacacatacatatagataaaattaaagrcttcacyactgcctgtggggcatccaactttctgttttccatacccaagagcagaagtgctcagtctccctggtcaaagggacttgagacacagaatggctttggaaatgagttggagagctaacaggggaatcgtagaatcattaaagttggaaaagaccttcaggatccatcaatcccaaagtcaatctatcaacaccacggccgctcatagagtcatagtatcgttaagtttggaagagacctttaagatcatcaagtccaactgctgctgaggagtggccacggctctccctgctgccgtaga

SEQ ID NO: 28093 - DNA, 600 bp, Chicken  19866894245754_1
tgattatgctgattacttagtgtagtagaagtatgtctcaatgtgacttcttcacaaaaagacaggtgaagaatcatgctcacttgtgttctgtaagcaaagtgatattcaaaagtcttaattgtgagaactttatgttaaagaaaaacaaagaacagcacacataagaaaaatggcagcatacctaggtgttagaataaaaaagttaattatccgtttgaaagccaattctctaaaatctggcaagaaataagaatgtactcttgagtattggtataaaactgaaaataaacttgagcrgattatttcctgtcataattcccattcttctttggacttcttactgagaggaataattactaccttccacttttcctgttttgtttcttgcactgctattttattctcctcataggatctgwaggagaaggaagaatgacaagcagtccgatagcactgtacatcattcacaaactgaaaaaaactgtggtgttacatctgtaaatgtgtaatctagtgggattccacattcatcttagtgattctaaaaaaggtttttaactagatttatagttgctcaattcacagaacagaatttgc

SEQ ID NO: 28094 - DNA, 600 bp, Chicken  19866894245754_2
tgtgagaactttatgttaaagaaaaacaaagaacagcacacataagaaaaatggcagcatacctaggtgttagaataaaaaagttaattatccgtttgaaagccaattctctaaaatctggcaagaaataagaatgtactcttgagtattggtataaaactgaaaataaacttgagcrgattatttcctgtcataattcccattcttctttggacttcttactgagaggaataattactaccttccacttttcctgttttgtttcttgcactgctattttattctcctcataggatctgwaggagaaggaagaatgacaagcagtccgatagcactgtacatcattcacaaactgaaaaaaactgtggtgttacatctgtaaatgtgtaatctagtgggattccacattcatcttagtgattctaaaaaaggtttttaactagatttatagttgctcaattcacagaacagaatttgccaagtgttacttaaaggttgtgtgttttccattatagrtaaatattatctagtattttagagagtcttctaactgaaaattcagttttgaattttgcagttaaacttagttatttatttctt

SEQ ID NO: 28095 - DNA, 600 bp, Chicken  19866894245754_3
gaatgtactcttgagtattggtataaaactgaaaataaacttgagcrgattatttcctgtcataattcccattcttctttggacttcttactgagaggaataattactaccttccacttttcctgttttgtttcttgcactgctattttattctcctcataggatctgwaggagaaggaagaatgacaagcagtccgatagcactgtacatcattcacaaactgaaaaaaactgtggtgttacatctgtaaatgtgtaatctagtgggattccacattcatcttagtgattctaaaaaawgtttttaactagatttatagttgctcaattcacagaacagaatttgccaagtgttacttaaaggttgtgtgttttccattatagrtaaatattatctagtattttagagagtcttctaactgaaaattcagttttgaattttgcagttaaacttagttatttatttcttctaaactgcaagagtaaagatttgtaggacgtgatctgtgcccagttaggcacctggaatgttgttgatccctcacagactgtgtgctgttacctggatttggtcctggagctgtgatgtttgtgactgtt

SEQ ID NO: 28096 - DNA, 546 bp, Chicken  19866894245754_4
tcttactgagaggaataattactaccttccacttttcctgttttgtttcttgcactgctattttattctcctcataggatctgwaggagaaggaagaatgacaagcagtccgatagcactgtacatcattcacaaactgaaaaaaactgtggtgttacatctgtaaatgtgtaatctagtgggattccacattcatcttagtgattctaaaaaaggtttttaactagatttatagttgctcaattcacagaacagaatttgccaagtgttacttaaaggttgtgtgttttccattatagrtaaatattatctagtattttagagagtcttctaactgaaaattcagttttgaattttgcagttaaacttagttatttatttcttctaaactgcaagagtaaagatttgtaggacgtgatctgtgcccagttaggcacctggaatgttgttgatccctcacagactgtgtgctgttacctggatttggtcctggagctgtgatgtttgtgactgttctgctgtgctaaatttgggtatttcgattat

SEQ ID NO: 28097 - DNA, 600 bp, Chicken  19866894245755_1
ctgctgataaaccaactttcttattctcatattctgataaagcattgacttccatttctattctgttaacgttgctttcagttgctatttctcatatttccataaaatatgttatgcttactcccacagcctgcctgctgtgcttgaaagcagattaaccacagagctgttttaatattttcctccaaatctcaccacaaaagttttgacatcttcaacaacttgtacagtatgatctttggtaacagatttttcacaactagttccttgtactcatctttgatgtaacctgtgttctcrtattgtccccaagtataaaaaaattttgtgcctgtattgttgttgtcctgaacgagcaaaatattccagcctctgagtcagcatgggctgatatggttttgtgctgtaaatatgccttttggcaaatatctgagccatttgttaagtcagtttcttgtcctctaagtgagttggacacctccggcagccagtgtgtctgtcttgaattatcctgtatgttgctagttaggatatctgaaataataataatatctcaaataaagcatagctgcataacctcatcttgttatgcagcaattg

SEQ ID NO: 28098 - DNA, 569 bp, Chicken  19866894245757_1
atttttattcaatttttattcatggttttttgaacagtatatatatatataacataaagaaggcaacagtctcttttttcagatcctgttgtgacaggagaagaagaaatgctttcaaaataaagaggcaagatttagattggacataaggaaaaaagctttttacaataagagtaattaggcactggcaccagttgtccagagaggtggtggatgccccatccctgcagacactcaaggttgggctggatggggctctgagcacctaatcatgctgtagatgtccaggttcattgcagsggagttggaccagatggccttcagaggacccaatttaagcctggtayaaagaagtttaaggtttacacttagtttttgcctttgatcaatgtaaattggacctttaaacatttagtaagttttaattctatagctcataaatttatcttgcttgagtgtgtgtgggtatctgaggaaggaggttattgtttgttctgagctttttgttttggtttggggtttaacaagatttaagactgaaatttcctgcagtgcctgcaaacagcatg

SEQ ID NO: 28099 - DNA, 522 bp, Chicken  19866894245757_2
tataacataaagaaggcaacagtctcttttttcagatcctgttgtgacaggagaagaagaaatgctttcaaaataaagaggcaagatttagattggacataaggaaaaaagctttttacaataagagtaattaggcactggcaccagttgtccagagaggtggtggatgccccatccctgcagacactcaaggttgggctggatggggctctgagcacctaatcatgctgtagatgtccaggttcattgcagsggagttggaccagatggccttcagaggacccaatttaagcctggtayaaagaagtttaaggtttacacttagtttttgcctttgatcaatgtaaattggacctttaaacatttagtaagttttaattctatagctcataaatttatcttgcttgagtgtgtgtgggtatctgaggaaggaggttattgtttgttctgagctttttgttttggtttggggtttaacaagatttaagactgaaatttcctgcagtgcctgcaaacagcatg

SEQ ID NO: 28100 - DNA, 600 bp, Chicken  19866894245760_1
tcatatgctctccgtgtttgatctcttctggattacgtgttatgaagatacctcgaaccttggcagccactgtctggcttgcagatgaatgttctgttcttcctcctgcgtctgtaggcctggaagtctccatagctgtacaacgaaaggggtgactgttacatgctgcagaaaatgagtccctcatctctctggcaacgtttagatatccaaactattgtgctactaacagacctaagttctgcagcaaataaatagtacagcaattcctggttcatatcagctcttatttagtccttrtgcaacctgacaaagctcttctagtttcagctttttcttgcacacatttccacctctatcaggagcttaatgggaaacagtcagcactatttgtacagaagccagtgaagattttggctctgctgctgcagagggatcaggggaaaataaaactctctgcctacaaaggaggaggaggtcacaagtccttacatccccttttgttccagctcatcagcaaatggtcaggaggctgcagccaggatgctctaagcagggtgcagaggctcaaaagctgcactcacatatcacattatgtgg

SEQ ID NO: 28101 - DNA, 600 bp, Chicken  19866894245775_1
gacagcagcacagagaacagtacgcctgcttttgcagacagtcgtgctctttttcataagaagactgcattcttaaaaccagttttttatccttcctccacacattgctgctatttggtagataagcctaaatgcattcagcataattttattaccagagtgcttctgcaccgacttctttcctctttagcttagttttctcccagcttaccctttttctcccctcacatttacaggcagcagagaaactgccctccacttacaacagttgagcagagtaagctctattttctttcagcrctgtagttgccattcttcacgtacagtttgcatctgccttgaatgggagtcagcgcagttgttccctctggagaagtccagtctgagggcattactgaacaacagrgctgtcgcagtatgtgaatcacctgaactgctccttccagaagaacccaagccctcgctgtgaagtggggctcaacaattmcggtaytgaggagtaaaaaacacctcctacacacaccctgattggtgagtgataattcactcacascaagcaacgcagaaccgacttatctctaagcaaatttcttttactga

SEQ ID NO: 28102 - DNA, 600 bp, Chicken  19866894245775_2
gctgctatttggtagataagcctaaatgcattcagcataattttattaccagagtgcttctgcaccgacttctttcctctttagcttagttttctcccagcttaccctttttctcccctcacatttacaggcagcagagaaactgccctccacttacaacagttgagcagagtaagctctattttctttcagcrctgtagttgccattcttcacgtacagtttgcatctgccttgaatgggagtcagcgcagttgttccctctggagaagtccagtctgagggcattactgaacaacagrgctgtcgcagtatgtgaatcacctgaactgctccttccagaagaacccaagccctcgctgtgaagtggggctcaacaattmcggtaytgaggagtaaaaaacacctcctacacacaccctgattggtgagtgataattcactcacascaagcaacgcagaaccgacttatctctaagcaaatttcttttactgagaaatctgtgaaggacaagaatacacagtttgttccgtcaacttcttgagatacactcaaaaatatatggatatgcacatacccatggtaggcattggtatttgaa

SEQ ID NO: 28103 - DNA, 580 bp, Chicken  19866894245775_3
tagcttagttttctcccagcttaccctttttctcccctcacatttacaggcagcagagaaactgccctccacttacaacagttgagcagagtaagctctattttctttcagcrctgtagttgccattcttcacgtacagtttgcatctgccttgaatgggagtcagcgcagttgttccctctggagaagtccagtctgagggcattactgaacaacagrgctgtcgcagtatgtgaatcacctgaactgctccttccagaagaacccaagccctcgctgtgaagtggggctcaacaattmcggtaytgaggagtaaaaaacacctcctacacacaccctgattggtgagtgataattcactcacascaagcaacgcagaaccgacttatctctaagcaaatttcttttactgagaaatctgtgaaggacaagaatacacagtttgttccgtcaacttcttgagatacactcaaaaatatatggatatgcacatacccatggtaggcattggtatttgaagcaacatggaacagtgaaaactaaggtgtaaccaggtcatctgctgtcgtttctgcagtct

SEQ ID NO: 28104 - DNA, 574 bp, Chicken  19866894245775_4
agttttctcccagcttaccctttttctcccctcacatttacaggcagcagagaaactgccctccacttacaacagttgagcagagtaagctctattttctttcagcrctgtagttgccattcttcacgtacagtttgcatctgccttgaatgggagtcagcgcagttgttccctctggagaagtccagtctgagggcattactgaacaacagrgctgtcgcagtatgtgaatcacctgaactgctccttccagaagaacccaagccctcgctgtgaagtggggctcaacaattmcggtaytgaggagtaaaaaacacctcctacacacaccctgattggtgagtgataattcactcacascaagcaacgcagaaccgacttatctctaagcaaatttcttttactgagaaatctgtgaaggacaagaatacacagtttgttccgtcaacttcttgagatacactcaaaaatatatggatatgcacatacccatggtaggcattggtatttgaagcaacatggaacagtgaaaactaaggtgtaaccaggtcatctgctgtcgtttctgcagtct

SEQ ID NO: 28105 - DNA, 514 bp, Chicken  19866894245775_5
ctccacttacaacagttgagcagagtaagctctattttctttcagcrctgtagttgccattcttcacgtacagtttgcatctgccttgaatgggagtcagcgcagttgttccctctggagaagtccagtctgagggcattactgaacaacagrgctgtcgcagtatgtgaatcacctgaactgctccttccagaagaacccaagccctcgctgtgaagtggggctcaacaattmcggtaytgaggagtaaaaaacacctcctacacacaccctgattggtgagtgataattcactcacascaagcaacgcagaaccgacttatctctaagcaaatttcttttactgagaaatctgtgaaggacaagaatacacagtttgttccgtcaacttcttgagatacactcaaaaatatatggatatgcacatacccatggtaggcattggtatttgaagcaacatggaacagtgaaaactaaggtgtaaccaggtcatctgctgtcgtttctgcagtct

SEQ ID NO: 28106 - DNA, 600 bp, Chicken  19866894245781_1
tcttttgttttgttactaaatgacatcaattttttcactcttagatgcttggtgttgagttgctactccggtagtcaacagttgtgctgtgtttcttccattcaactacttcgctcctccatagacatatccagattcagcagtagagttttcagtcaatttttctccactcttccattttacataagcagtgtgacgacttatgactgaccctaatgtttccgtgagcatgattcagcaggatgtggatctctgggggttaactgatggaaaggtgatatacagttcagatttttactygacagacttgagaattaagacacttgttaagctggacagcacaactgaatagaagataactgtagagaaagcgatgggttggagacgagtggttgatgagaagtccagattgaagtcagttacctagagctagggaggtatagaactttggaaacatttcccaccttcctttagagcttgctattaagttgtgcagctacttcaagtatatgccttaaagaaacacctgatgacgagtgcttcacttggtgtgttgaagaccacataaatctctcagggttgaagatcacataaatgtct

SEQ ID NO: 28107 - DNA, 600 bp, Chicken  19866894245789_1
aagatttactgaaatatccttaaaaaaaatgccaagatttattgtttccaataatacactgaatgtagtgtgttggtgattctaatttctgctcaggtggaggcgaggatggtgaaaaaaattaagttgatatgatatggctggtactttgttccttaggagctgtaagaacgaattgacaatttgtccatgtagggaaggtagctaaaataaacactaatgaataatgtgctctgcacttattcttgtaaggctccttttcttaccaaactacgtgcacacttctaaagcagagtgtcyatttactcaggaaaaaatagctgttttaatcccacgtgtcaataaagatcagaattcatactgagttagttcatagcagcatgattaaaaaccgaaacctaattcaaatggtttgtatacacttgaagttgttgcacataggtcttctctaaacataaacatacatttttactctttaaagtgtgattatgtgctagccttattaagccagtccgaatacatgtggataatacaatgttagtctttgtaaatgcaagttaaatttctggaaacagcttcagataaataaaaaagygcagg

SEQ ID NO: 28108 - DNA, 600 bp, Chicken  19866894245789_2
tgtcyatttactcaggaaaaaatagctgttttaatcccacgtgtcaataaagatcagaattcatactgagttagttcatagcagcatgattaaaaaccgaaacctaattcaaatggtttgtatacacttgaagttgttgcacataggtcttctctaaacataaacatacatttttactctttaaagtgtgattatgtgctagccttattaagccagtccgaatacatgtggataatacaatgttagtctttgtaaatgcaagttaaatttctggaaacagcttcagataaataaaaaagygcaggcataaatgtttctgcgtatctaagacatggttaccatgattatctaaatgtcactgcaaaagtcactgttgttctcagtgatcacagcaggtctatttacaaattaaaaccaacctaactgccaacctgatacagttgttttgtattctgaatatatttgagaactctcctacttttctgtcattaaaacttagcttttacatcagtttccacgtatgcaaactggcagtttttgaacagcttctgtagtcatatacagagctatataattcctaccagaaaaaataaatttcaa

SEQ ID NO: 28109 - DNA, 600 bp, Chicken  19866894245791_1
tgcttttaaagacttttaaatgaattgaaaattttacaaaatttcacagaatttacagaataagtagtctttcaacatttctttcttattgccttattttctggcacttcggaggtagtaacatatcagatggacagaatagattgtatcaaaagtaccatcaggacacatgatgtcattctgatgatttctgcaaggttaaaagataagcagataaaaatatctctgtataaattctgaatatttaaatcagtaaaaaaagtgcaagtctcactgtgttagaaggggaaacaattcacrttatgaaggtatgaagatatttctccttttggatttaaaattctcttcagctttaaataagtgaggaaataaaaaatacatctaggagaaaaacccagcattatagatgaggactctgtgtgtactcacagataccttattgcttgtaagatcttgtgtttgcacagtgcttcacgtcttcatttaataagtaacaatgtaaaaagttactacttgaaaaaaacttgtttgatcattctaagaagataattatttgagaattttcatgagttttgaaagttacctgtccttatgatattc

SEQ ID NO: 28110 - DNA, 600 bp, Chicken  19866894245791_2
aaatttgcaagtgtaatgatagctgtgttaatccagagagattttattacagttagagaccaaacatatcagcagatttgggctgtgaatgtaacacttcaatcagagtctgtactcaagttcccactgtgctgaccaaacaagtggtaaggaaaagtaacaagaaaaataagatctgtagaggcaccacctaagttaactaatggatttctaccttcaagtaatggaaaataacaacaagaatcataattacaaagcagtgtttcttgcttggaagatacagtttgggaagatgttgcmcttctactacacaaaatatgacatgtatggtcttgaagaaagacatcaaacatgagtacatgatctatgattccatgatgtcacattaacagtgtaagagatatcrattcatattaaaacaaataaaaaaagaagccaaaccaaataaacaaacaaaccccccaccaacatatagaatctactctcatacagaaagtggtaggacggtaaatatttgtcaagcacgtcattaaaacaggaaatgatttttaagacaaatgcattttgtaaacatgccaaggaaggatgaaaatggaagaa

SEQ ID NO: 28111 - DNA, 600 bp, Chicken  19866894245791_3
agtctgtactcaagttcccactgtgctgaccaaacaagtggtaaggaaaagtaacaagaaaaataagatctgtagaggcaccacctaagttaactaatggatttctaccttcaagtaatggaaaataacaacaagaatcataattacaaagcagtgtttcttgcttggaagatacagtttgggaagatgttgcmcttctactacacaaaatatgacatgtatggtcttgaagaaagacatcaaacatgagtacatgatctatgattccatgatgtcacattaacagtgtaagagatatcrattcatattaaaacaaataaaaaaagaagccaaaccaaataaacaaacaaaccccccaccaacatatagaatctactctcatacagaaagtggtaggacggtaaatatttgtcaagcacgtcattaaaacaggaaatgatttttaagacaaatgcattttgtaaacatgccaaggaaggatgaaaatggaagaataaatagataggttaattattaccatgagttgtctcacttctgttagacagtttcctgtgaaagatgaaggaagtgggggccgttaacagtcctcagtcttactgc

SEQ ID NO: 28112 - DNA, 599 bp, Chicken  19866894245796_1
  misc_feature (1)..(210): n is any nucleotide
nnnnnnnnnnnnnnnnnnnnnnnnnnnnnnnnnnnnnnnnnnnnnnnnnnnnnnnnnnnnnnnnnnnnnnnnnnnnnnnnnnnnnnnnnnnnnnnnnnnnnnnnnnnnnnnnnnnnnnnnnnnnnnnnnnnnnnnnnnnnnnnnnnnnnnnnnnnnnnnnnnnnnnnnnnnnnnnnnnnnnnnnnnnnnnnnnnnnnnnnnnnnnnnnnncagggaacgtttattatatgatgggactactgcaagaccaaggctttttctggtttaggcttctgaagagtgcagcatctttgcaacttrtccgaagagttcttttactccagcaaaacatcaycattgaacaaaggggagaaagaagtcagagcagctccaagtcttgttaagagtgcactgtacttacctatcccaggcaccttatcattacrtactttgcagccctggaaacgttcccttcctctatttttaagatgctgagatcttcccattgcactgacccgatgacagtatactactcacaacaagctaaggcagctttgtttgctttgttctgggctttctgtttaagcttgctgtttgtgggcccagcccttcatcttcag

SEQ ID NO: 28113 - DNA, 599 bp, Chicken  19866894245796_2
  misc_feature (1)..(176): n is any nucleotide
nnnnnnnnnnnnnnnnnnnnnnnnnnnnnnnnnnnnnnnnnnnnnnnnnnnnnnnnnnnnnnnnnnnnnnnnnnnnnnnnnnnnnnnnnnnnnnnnnnnnnnnnnnnnnnnnnnnnnnnnnnnnnnnnnnnnnnnnnnnnnnnnnnnnnnnnnnnnnnnnnnnnnnnnnnnnnnnncagggaacgtttattatatgatgggactactgcaagaccaaggctttttctggtttaggcttctgaagagtgcagcatctttgcaacttrtccgaagagttcttttactccagcaaaacatcaycattgaacaaaggggagaaagaagtcagagcagctccaagtcttgttaagagtgcactgtacttacctatcccaggcaccttatcattacrtactttgcagccctggaaacgttcccttcctctatttttaagatgctgagatcttcccattgcactgacccgatgacagtatactactcacaacaagctaaggcagctttgtttgctttgttctgggctttctgtttaagcttgctgtttgtgggcccagcccttcatcttcagactgtgtaaagctcccccctcaaagcttccacaa

SEQ ID NO: 28114 - DNA, 599 bp, Chicken  19866894245796_3
  misc_feature (1)..(85): n is any nucleotide
nnnnnnnnnnnnnnnnnnnnnnnnnnnnnnnnnnnnnnnnnnnnnnnnnnnnnnnnnnnnnnnnnnnnnnnnnnnnnnnnnnnnncagggaacgtttattatatgatgggactactgcaagaccaaggctttttctggtttaggcttctgaagagtgcagcatctttgcaacttrtccgaagagttcttttactccagcaaaacatcaycattgaacaaaggggagaaagaagtcagagcagctccaagtcttgttaagagtgcactgtacttacctatcccaggcaccttatcattacrtactttgcagccctggaaacgttcccttcctctatttttaagatgctgagatcttcccattgcactgacccgatgacagtatactactcacaacaagctaaggcagctttgtttgctttgttctgggctttctgtttaagcttgctgtttgtgggcccagcccttcatcttcagactgtgtaaagctcccccctcaaagcttccacaaaacgtgtcttgcacagaggcaccttacccttcgttgagatgagaaggaattgcctgtgcatttagcagaacagttgctccactgtaccttt

SEQ ID NO: 28115 - DNA, 600 bp, Chicken  19866894245801_1
ctcccaataataaaatgagctaaaccgtaaattatacaaaattgccattttcacgtgtcaattatcatgctgtgatacattctaaggccactgtacatctgcagttcctatcaagattcctatttgatatgtactttacatacacagttaaagctgaagataggggccataattcttttccaaaggaaaatatgtagcctctctttactgatgggtctctttctaactataggatattctgatcaaaatacaacaaatggacaaggaagagactaaatttcatttttccactactgtagrttgtatattgtgtacttcawaatttctgttggaacaaaagaaaaaacracaaaaacaagaaaaaacacacacaaaaaccccaacaagttgtcccaaaacaagaggcacacaggatcgtttgttttattttcctacactgcagatgctgcatacatttctggtaaactggaaacgaagttcagactccccagaacagcaaaatctgacacagtacttcaatgatctcataaagttagattgctcttgactagagctcaattctttaaatagaatactcctatttatttaggaatatcctgg

SEQ ID NO: 28116 - DNA, 600 bp, Chicken  19866894245801_2
taaaccgtaaattatacaaaattgccattttcacgtgtcaattatcatgctgtgatacattctaaggccactgtacatctgcagttcctatcaagattcctatttgatatgtactttacatacacagttaaagctgaagataggggccataattcttttccaaaggaaaatatgtagcctctctttactgatgggtctctttctaactataggatattctgatcaaaatacaacaaatggacaaggaagagactaaatttcatttttccactactgtagrttgtatattgtgtacttcawaatttctgttggaacaaaagaaaaaacracaaaaacaagaaaaaacacacacaaaaaccccaacaagttgtcccaaaacaagaggcacacaggatcgtttgttttattttcctacactgcagatgctgcatacatttctggtaaactggaaacgaagttcagactccccagaacagcaaaatctgacacagtacttcaatgatctcataaagttagattgctcttgactagagctcaattctttaaatagaatactcctatttatttaggaatatcctggatttaaaatgtgtcttggca

SEQ ID NO: 28117 - DNA, 600 bp, Chicken  19866894245801_3
ttgccattttcacgtgtcaattatcatgctgtgatacattctaaggccactgtacatctgcagttcctatcaagattcctatttgatatgtactttacatacacagttaaagctgaagataggggccataattcttttccaaaggaaaatatgtagcctctctttactgatgggtctctttctaactataggatattctgatcaaaatacaacaaatggacaaggaagagactaaatttcatttttccactactgtagrttgtatattgtgtacttcawaatttctgttggaacaaaagwaaaaacracaaaaacaagaaaaaacacacacaaaaaccccaacaagttgtcccaaaacaagaggcacacaggatcgtttgttttattttcctacactgcagatgctgcatacatttctggtaaactggaaacgaagttcagactccccagaacagcaaaatctgacacagtacttcaatgatctcataaagttagattgctcttgactagagctcaattctttaaatagaatactcctatttatttaggaatatcctggatttaaaatgtgtcttggcagacacataattagaatcacag

SEQ ID NO: 28118 - DNA, 600 bp, Chicken  19866894245801_4
tttcacgtgtcaattatcatgctgtgatacattctaaggccactgtacatctgcagttcctatcaagattcctatttgatatgtactttacatacacagttaaagctgaagataggggccataattcttttccaaaggaaaatatgtagcctctctttactgatgggtctctttctaactataggatattctgatcaaaatacaacaaatggacaaggaagagactaaatttcatttttccactactgtagrttgtatattgtgtacttcawaatttctgttggaacaaaagaaaaaacracaaaaacaagaaaaaacacacacaaaaaccccaacaagttgtcccaaaacaagaggcacacaggatcgtttgttttattttcctacactgcagatgctgcatacatttctggtaaactggaaacgaagttcagactccccagaacagcaaaatctgacacagtacttcaatgatctcataaagttagattgctcttgactagagctcaattctttaaatagaatactcctatttatttaggaatatcctggatttaaaatgtgtcttggcagacacataattagaatcacagaattgct

SEQ ID NO: 28119 - DNA, 600 bp, Chicken  19866894245802_1
acacttactgaatgcttatggagaccaaacagtgagggggctacgttgcaaaatagtgtttggtagctgagaatatgctcagtcaaatagtgttgctgtgctctttgtatctgttgcagtctctgtggaaataaagaggtggtgttactttcagagctacgtacatgcaaagaactgattgcacatgcaggtttgctcagcatgcagtcaggatgtgaccgaaaatgcacagtgtggtaaggaaaggtgctcctccagtccttaaactgcttactcagtttccttgtgtggttctccatytaaagaaccaagaaaaataaaayaaaaagagcaaccttaagtggaacttgaggcttagtattactgatcccacgttttataccaaaatttgtatccaagacttactgaggttgtatagtttaactgccttctacatgggtgttttactgagttaagagtctgctgctttgtgcagttaatttaggtggaatagtggttgcgttgcccttagaagtagaggaaggagtaggctcataaattctgtaaaggttcaggtacaaaatgaaactgatgactgttgttatttgtagaggaagggat

SEQ ID NO: 28120 - DNA, 600 bp, Chicken  19866894245802_2
accaaacagtgagggggctacgttgcaaaatagtgtttggtagctgagaatatgctcagtcaaatagtgttgctgtgctctttgtatctgttgcagtctctgtggaaataaagaggtggtgttactttcagagctacgtacatgcaaagaactgattgcacatgcaggtttgctcagcatgcagtcaggatgtgaccgaaaatgcacagtgtggtaaggaaaggtgctcctccagtccttaaactgcttactcagtttccttgtgtggttctccatytaaagaaccaagaaaaataaaayaaaaagagcaaccttaagtggaacttgaggcttagtattactgatcccacgttttataccaaaatttgtatccaagacttactgaggttgtatagtttaactgccttctacatgggtgttttactgagttaagagtctgctgctttgtgcagttaatttaggtggaatagtggttgcgttgcccttagaagtagaggaaggagtaggctcataaattctgtaaaggttcaggtacaaaatgaaactgatgactgttgttatttgtagaggaagggataaggaagattactgactactcat

SEQ ID NO: 28121 - DNA, 600 bp, Chicken  19866894245805_1
caaggtcatggctgtaagaatacttattattctatcagagacatgattcacccaagttagactccaatttaaaattcaataaatttgggtatcaggattctacttttttgcttcttaaagaaaaagaagaaaaaaatcacttttcatagtgcacctctgatggccagaagctcgaaactttcacactttctaggctcaagcttgcctgaaaatatgtagttgtcaagaccatgaattatctgtagctcccagctttccagactcagtctctttcagcactgtgctatgccactgaaatawaaatgaaaaagggtagtctaatcagaacagcattgactaataaacctgtaacttaacattttgaaatagaaggaatgagttggcaggaacaggacataatttgctaccttgaaaataatatcccaaatatcagtcatgagtaaattaaatgaacaatgtagtagagctgtgcatagtgtcatctacttaacagcagattactgggcaagcaaaaaatgataaacttgccaacattcatctggccctttttagatctcataccaataaagactcttgaactgctaacatctgcacaaacca

SEQ ID NO: 28122 - DNA, 599 bp, Chicken  19866894245809_1
  misc_feature (1)..(41): n is any nucleotide
nnnnnnnnnnnnnnnnnnnnnnnnnnnnnnnnnnnnnnnnntagaaactttttgcagtgccaagaaaaacctgattgtgataaccccatgaacacactgaacagtggagatacagggtgaagttgtagttctcaaaggctttcatttgagtgaagaccaatatctcaacagagaagttctggagaaattccagtatctgtaacaagactcctgttgaaagctaaggactgaactgaaaattgcagtcagacacacagatgacatgctggcagtttagaaagaggtaacaagtacatcagrgattccaattggagccaaatagccaaatgyaaaactttgttgagatataacttccattattatgaaggactacctacttcattaaggaaaaaaaaagaaaaaaggaaaaaaagaaaaaagaaaaacaaaaaaacccctaatccttgcaaaaaacaaagacaacttttccaaaacattacagcattacagttttagaacagtaatcttcagctggtgtggtctagtgaaatttaattaaattgactaggattayagctgcctatatcacacagaaatttcactgtaatatggactttaac

SEQ ID NO: 28123 - DNA, 599 bp, Chicken  19866894245809_2
  misc_feature (1)..(11): n is any nucleotide
nnnnnnnnnnntagaaactttttgcagtgccaagaaaaacctgattgtgataaccccatgaacacactgaacagtggagatacagggtgaagttgtagttctcaaaggctttcatttgagtgaagaccaatatctcaacagagaagttctggagaaattccagtatctgtaacaagactcctgttgaaagctaaggactgaactgaaaattgcagtcagacacacagatgacatgctggcagtttagaaagaggtaacaagtacatcagrgattccaattggagccaaatagccaaatgyaaaactttgttgagatataacttccattattatgaaggactacctacttcattaaggaaaaaaaaagaaaaaaggaaaaaaagaaaaaagaaaaacaaaaaaacccctaatccttgcaaaaaacaaagacaacttttccaaaacattacagcattacagttttagaacagtaatcttcagctggtgtggtctagtgaaatttaattaaattgactaggattayagctgcctatatcacacagaaatttcactgtaatatggactttaactctagatacacaagtataaaactgcaagct

SEQ ID NO: 28124 - DNA, 495 bp, Chicken  19866894245809_3
acagatgacatgctggcagtttagaaagaggtaacaagtacatcagrgattccaattggagccaaatagccaaatgyaaaactttgttgagatataacttccattattatgaaggactacctacttcattaaggaaaaaaaaagaaaaaaggaaaaaaagaaaaaagaaaaacaaaaaaacccctaatccttgcaaaaaacaaagacaacttttccaaaacattacagcattacagttttagaacagtaatcttcagctggtgtggtctagtgaaatttaattaaattgactaggattayagctgcctatatcacacagaaatttcactgtaatatggactttaactctagatacacaagtataaaactgcaagctccctactgaaataggaagagttacagcaatacacagccaatgcaagtgtagttagaactgcatctgaagtcccaactttccttctcttccattgctagttgatgattcttcttattact

SEQ ID NO: 28125 - DNA, 600 bp, Chicken  19866894245814_1
tgtccagcagagcaccgagatacaagcccaatgacgacaaggttgcacacttgattcaggaaacagttaggccgtgggtgaggtatttggtagtcaagacacttcaaaaggttgcattcacccctccacaggaagaaagagaacaaattgaccctcacatcttcaagggagtatgtattattttagtaaaacctgcacatcgtgagtaatgaatctattttctgtctctttgctttcactgcagaataaaagtacagggtgactcagcatagagttgtgagttttctgcatatgagaaaygccgtttttatttctgctttgtacargttgcaggtaagttgctaatttgctattatatgggtggaatagcatacagacttccaaaatgtgtgtacacactgtaagagtgaaaagattctgctataaaaattcaacctgatgtttgattaagctcttgtcatttctacaacttcagattgctctttttagtcataacaacaggtccctctagtgggtgaaaacataaatgaaaaatctatcctcataatttcaagtagaagcttgtagaaatgcgagtgtaaaaaggctggttatcctttg

SEQ ID NO: 28126 - DNA, 600 bp, Chicken  19866894245814_2
cccaatgacgacaaggttgcacacttgattcaggaaacagttaggccgtgggtgaggtatttggtagtcaagacacttcaaaaggttgcattcacccctccacaggaagaaagagaacaaattgaccctcacatcttcaagggagtatgtattattttagtaaaacctgcacatcgtgagtaatgaatctattttctgtctctttgctttcactgcagaataaaagtacagggtgactcagcatagagttgtgagttttctgcatatgagaaaygccgtttttatttctgctttgtacargttgcaggtaagttgctaatttgctattatatgggtggaatagcatacagacttccaaaatgtgtgtacacactgtaagagtgaaaagattctgctataaaaattcaacctgatgtttgattaagctcttgtcatttctacaacttcagattgctctttttagtcataacaacaggtccctctagtgggtgaaaacataaatgaaaaatctatcctcataatttcaagtagaagcttgtagaaatgcgagtgtaaaaaggctggttatcctttgtgcaactttctgaaaacaaagcacag

SEQ ID NO: 28127 - DNA, 600 bp, Chicken  19866894245816_1
agctgaaaaaacacagataatagtatggagtgctggaccactctgttcaaactgctaacaaacctaacggcggtgcaatatcagatatttacaacccgaggttataaaatgaaatcaacttgagctcattatttactatattatttacagaatacaaaaaagttactctggatactttctctaaatcataggtacataagtgggtactaaacacaataggcatggatttatctttgacaacactatgacagttgtagattttggacatatacaatgaaaatggaccacagaataaataartaaaaatcagtctggccactctcctactgccagagaaaaaacacagggatcattggatggaccactacgctaggtctgcaggaagagttctgctgttcttatttcatgacagaagaaagattagtcaagtccttgatagctgagacagtgggagacacattagattcagggaggtctcccaaaatgtaatgcctacagtgtaactgaatggctagaagtaagaatagcattatcagagaggaagtgttcctcttaaacaaatgcaaagagaagtgtgttcacattttgttacttttgatt

SEQ ID NO: 28128 - DNA, 600 bp, Chicken  19866894245816_2
catcaataaggtacaagtgcattacagaggaatgactgtggttccatccacctttatttgataggatcagctagttttggcatcgtatcaaaatatagcccagttatgaatgaaaaacctccccaggaagataagtaaaacttatacaactagacagcatcagctttagtgatttcagatctaccttgtgccaaggccacaccacatacatctgcatatagtgaaataatttcaacatcaagcacccataacttgagttagaaccacagttgaccattttttcatgtagtacgtctcatwgaacatcatgtaactactaacatttttgatcacccatctgggggcaccaaagtatagcattcttgctacaggggtcttagataacttaaaattaggatgccaagtagaaatcacatactgagcatccgagattcaattatagcctgttatatctggcacaacatggaattccacacaaaagatgcattaaaaacgcaggacaggatttagactccttgaacatgaaagcatttctgctcttcctacaatgtctactatttttttttaatacactttcttaaatacactttttttttttaa

SEQ ID NO: 28129 - DNA, 600 bp, Chicken  19866894245822_1
gtttcaattcaaagagtgacttgtttttattaaattccttttctacatctaataaatctaagattatttctgacgagatttgtgtttccattgtgaggtgaaatggtaagaggaacttttaagcgtaagctttctcaattgcccgtctcagaaactcccataaaaacagctctccttaactgacagtttatggaattagaatataccaataattacattctcctcatattttgctgctgaaacttgacacctacaatgatttttaatatttgggatttatatatccatacaagtgatttrtgagtgaaattattcatctatgtattgatatacagatgatggaaaaatctgaacacatatttcttaatgcttcagacatctgtctcaagcttgctacctataaaatatacatataaatatcagtatttatatttctatttgctcacatttattgtagctcatagaatatacagtggtaaatagtctgggcaaaatagacaaacacactttctccatatggaattaaaattatatatcttgggctgtttttgttgaaagctgtagtgaagcattctacttaacatgtaaaaaatgaattga

SEQ ID NO: 28130 - DNA, 599 bp, Chicken  19866894245823_1
  misc_feature (1)..(44): n is any nucleotide
nnnnnnnnnnnnnnnnnnnnnnnnnnnnnnnnnnnnnnnnnnnncagcggggtgctcggccctctgctctgccgtggggggaacacatctgcagcactgcgcccactgcggggctccccaattcagggcagaccctcgcagagctgctgggggcctggagcacctcctgatggggacaggctgagagccccggggcggtgcatctggaggagagaaggctgaggggatctgagcagtgctggtgcggatctgcagggcaggggatgggctgggctctgcttggtggtgcccagtgccagsacaggggcagygggcacagcctgcagcccggggagctccgtgcggccgtgaggaacaactgctgtgctgtgctgtgaggggggcacagccctggcacagagctcaggggctgtggggtctccttcccrgagagacccaaacccaccgggatgctttgtgtgcagctgctgtggggaacgggctgggggtgggactgggggagccccggaggtccctcgcagcccctacagctctgcgactctgtgctgctctcagagccttctgcgggacgtggtgtggcagctcagacgtgaggcacg

SEQ ID NO: 28131 - DNA, 599 bp, Chicken  19866894245823_2
  misc_feature (1)..(33): n is any nucleotide
nnnnnnnnnnnnnnnnnnnnnnnnnnnnnnnnncagcggggtgctcggccctctgctctgccgtggggggaacacatctgcagcactgcgcccactgcggggctccccaattcagggcagaccctcgcagagctgctgggggcctggagcacctcctgatggggacaggctgagagccccggggcggtgcatctggaggagagaaggctgaggggatctgagcagtgctggtgcggatctgcagggcaggggatgggctgggctctgcttggtggtgcccagtgccagsacaggggcagygggcacagcctgcagcccggggagctccgtgcggccgtgaggaacaactgctgtgctgtgctgtgaggggggcacagccctggcacagagctcaggggctgtggggtctccttcccrgagagacccaaacccaccgggatgctttgtgtgcagctgctgtggggaacgggctgggggtgggactgggggagccccggaggtccctcgcagcccctacagctctgcgactctgtgctgctctcagagccttctgcgggacgtggtgtggcagctcagacgtgaggcacgctctgtgagat

SEQ ID NO: 28132 - DNA, 517 bp, Chicken  19866894245823_3
cagaccctcgcagagctgctgggggcctggagcacctcctgatggggacaggctgagagccccggggcggtgcatctggaggagagaaggctgaggggatctgagcagtgctggtgcggatctgcagggcaggggatgggctgggctctgcttggtggtgcccagtgccagsacaggggcagygggcacagcctgcagcccggggagctccgtgcggccgtgaggaacaactgctgtgctgtgctgtgaggggggcacagccctggcacagagctcaggggctgtggggtctccttcccrgagagacccaaacccaccgggatgctttgtgtgcagctgctgtggggaacgggctgggggtgggactgggggagccccggaggtccctcgcagcccctacagctctgcgactctgtgctgctctcagagccttctgcgggacgtggtgtggcagctcagacgtgaggcacgctctgtgagataaccggattactccttcctttaaaagattaatagt

SEQ ID NO: 28133 - DNA, 600 bp, Chicken  19866894245827_1
aagttttgaactcaggaatgtacgtaacaccaactttcctgagggaagaattcacccctgccttatattctgttttaaaacacgggtcttaatttggttggaattcctcattcggatctgtgcggtaggatgactggagaggtccacgcctctcttctgttaagcacaactgaatgacaccctccccacccagacccgtatgttcattaagaaattggagcaggaatacttctcagctgtggaggtactggaactgatttttcttcgagtttaaggtggcagtcattccaagagtgaaargggatgggacccacaraagccatcacaactcccttgtgccttgtcctgcctccaagccaaaagctgacgggtgctggggcagtgtgacacagctgctgagygctgacgtgggttaggggtgttatagggctccctgtacggtgctgcttcatctgcttgttgcatcagttctcatcatccttcgtagtgcccctctgatgtgtttgtgtgaaacctcccgtcgcagtccatgtgcctcacacggggtttgttcctttaagaccgcatcgttaaacgtgtaatggttatcgaaactacaca

SEQ ID NO: 28134 - DNA, 591 bp, Chicken  19866894245827_2
aatgtacgtaacaccaactttcctgagggaagaattcacccctgccttatattctgttttaaaacacgggtcttaatttggttggaattcctcattcggatctgtgcggtaggatgactggagaggtccacgcctctcttctgttaagcacaactgaatgacaccctccccacccagacccgtatgttcattaagaaattggagcaggaatacttctcagctgtggaggtactggaactgatttttcttcgagtttaaggtggcagtcattccaagagtgaaargggatgggacccacaraagccatcacaactcccttgtgccttgtcctgcctccaagccaaaagctgacgggtgctggggcagtgtgacacagctgctgagygctgacgtgggttaggggtgttatagggctccctgtacggtgctgcttcatctgcttgttgcatcagttctcatcatccttcgtagtgcccctctgatgtgtttgtgtgaaacctcccgtcgcagtccatgtgcctcacacggggtttgttcctttaagaccgcatcgttaaacgtgtaatggttatcgaaactacacatctgaat

SEQ ID NO: 28135 - DNA, 506 bp, Chicken  19866894245827_3
aattcctcattcggatctgtgcggtaggatgactggagaggtccacgcctctcttctgttaagcacaactgaatgacaccctccccacccagacccgtatgttcattaagaaattggagcaggaatacttctcagctgtggaggtactggaactgatttttcttcgagtttaaggtggcagtcattccaagagtgaaargggatgggacccacaraagccatcacaactcccttgtgccttgtcctgcctccaagccaaaagctgacgggtgctggggcagtgtgacacagctgctgagygctgacgtgggttaggggtgttatagggctccctgtacggtgctgcttcatctgcttgttgcatcagttctcatcatccttcgtagtgcccctctgatgtgtttgtgtgaaacctcccgtcgcagtccatgtgcctcacacggggtttgttcctttaagaccgcatcgttaaacgtgtaatggttatcgaaactacacatctgaat

SEQ ID NO: 28136 - DNA, 600 bp, Chicken  19866894245828_1
cgtgacagagatctatggcttaagtgaggtctagaacagctgctgatcttacagatgttacagaagaagtataaaatttaggtaatgagattatttttttttttaatcccagatgttgacaatattttagctttaaataagaaagttgcctacaaactaaagctcacaacgaaacatgccaaatgcaggttctgaaaaaaaaaatgccatgttagtaaattatcttaatttcaaagcagtgagggggaaactacatcatccctctgccatcgtgtaaagagtccttgtttgggatcaatsaatagccatgcacagccaaccttcttgcagctgcctgcaggttatgaatttggaagttggtagaaaaattcagattgaacctgaacgttcattcgcatctggacttyaacgtaacrgcctgaagggagygttgctctaaattttaaatcacgstgaacttgatgaagggtttgacatgatctacaggaaaaggtcagaagagctgtaaatgtttatttcaatgagattaaaccaatgtttttgatgtttcttttacacttccatctatctattcacttacagtctccatataacccttct

SEQ ID NO: 28137 - DNA, 600 bp, Chicken  19866894245828_2
cccagatgttgacaatattttagctttaaataagaaagttgcctacaaactaaagctcacaacgaaacatgccaaatgcaggttctgaaaaaaaaaatgccatgttagtaaattatcttaatttcaaagcagtgagggggaaactacatcatccctctgccatcgtgtaaagagtccttgtttgggatcaatsaatagccatgcacagccaaccttcttgcagctgcctgcaggttatgaatttggaagttggtagaaaaattcagattgaacctgaacgttcattcgcatctggacttyaacgtaacrgcctgaagggagygttgctctaaattttaaatcacgstgaacttgatgaagggtttgacatgatctacaggaaaaggtcagaagagctgtaaatgtttatttcaatgagattaaaccaatgtttttgatgtttcttttacacttccatctatctattcacttacagtctccatataacccttctagtgcttctctgtccaaggaaatctttagcatacatgaactgaaagacaatgtacatggcatttagctctgtaagaggctgggatagaggaatctgtgggtaactgc

SEQ ID NO: 28138 - DNA, 600 bp, Chicken  19866894245828_3
tgacaatattttagctttaaataagaaagttgcctacaaactaaagctcacaacgaaacatgccaaatgcaggttctgaaaaaaaaaatgccatgttagtaaattatcttaatttcaaagcagtgagggggaaactacatcatccctctgccatcgtgtaaagagtccttgtttgggatcaatsaatagccatgcacagccaaccttcttgcagctgcctgcaggttatgaatttggaagttggtagaaaaattcagattgaacctgaacgttcattcgcatctggacttyaacgtaacrgcctgaagggagygttgctctaaattttaaatcacgstgaacttgatgaagggtttgacatgatctacaggaaaaggtcagaagagctgtaaatgtttatttcaatgagattaaaccaatgtttttgatgtttcttttacacttccatctatctattcacttacagtctccatataacccttctagtgcttctctgtccaaggaaatctttagcatacatgaactgaaagacaatgtacatggcatttagctctgtaagaggctgggatagaggaatctgtgggtaactgcatcacaatt

SEQ ID NO: 28139 - DNA, 600 bp, Chicken  19866894245828_4
gctttaaataagaaagttgcctacaaactaaagctcacaacgaaacatgccaaatgcaggttctgaaaaaaaaaatgccatgttagtaaattatcttaatttcaaagcagtgagggggaaactacatcatccctctgccatcgtgtaaagagtccttgtttgggatcaatsaatagccatgcacagccaaccttcttgcagctgcctgcaggttatgaatttggaagttggtagaaaaattcagattgaacctgaacgttcattcgcatctggacttyaacgtaacrgcctgaagggagygttgctctaaattttaaatcacgstgaacttgatgaagggtttgacatgatctacaggaaaaggtcagaagagctgtaaatgtttatttcaatgagattaaaccaatgtttttgatgtttcttttacacttccatctatctattcacttacagtctccatataacccttctagtgcttctctgtccaaggaaatctttagcatacatgaactgaaagacaatgtacatggcatttagctctgtaagaggctgggatagaggaatctgtgggtaactgcatcacaattgctaacttggtca

SEQ ID NO: 28140 - DNA, 600 bp, Chicken  19866894245828_5
aaactaaagctcacaacgaaacatgccaaatgcaggttctgaaaaaaaaaatgccatgttagtaaattatcttaatttcaaagcagtgagggggaaactacatcatccctctgccatcgtgtaaagagtccttgtttgggatcaatsaatagccatgcacagccaaccttcttgcagctgcctgcaggttatgaatttggaagttggtagaaaaattcagattgaacctgaacgttcattcgcatctggacttyaacgtaacrgcctgaagggagygttgctctaaattttaaatcacgstgaacttgatgaagggtttgacatgatctacaggaaaaggtcagaagagctgtaaatgtttatttcaatgagattaaaccaatgtttttgatgtttcttttacacttccatctatctattcacttacagtctccatataacccttctagtgcttctctgtccaaggaaatctttagcatacatgaactgaaagacaatgtacatggcatttagctctgtaagaggctgggatagaggaatctgtgggtaactgcatcacaattgctaacttggtcagttcgtcaggagaaaaaacagctg

SEQ ID NO: 28141 - DNA, 599 bp, Chicken  19866894245840_1
  misc_feature (1)..(46): n is any nucleotide
nnnnnnnnnnnnnnnnnnnnnnnnnnnnnnnnnnnnnnnnnnnnnntcaaaatgtcagtccagggtcctcaccagttttagtggtatatgaggatacaagaggattgaagcatctgtcttaacttgtgcatactgtgagatgtgttctcagctgtgaggccatatacagaacgctttctacctaatattaattttctgtttgtcttttgcagcacttttacaggcagtcatagctggtgatctgctgaaggtaagcacagagtactgagtgtccatgttttcacagctacttgaaggttygatatgctgtaaattatatcacacctctgctcaaaacataaacaggctgctgtagggactgctgtcaaatgccattttacagcctttccaggaaaccctgagtattagggagcacatcagtcaggtgaggtgtgaaatttgagtgaataggatctggtgttaggcagcacctttcagccyagggtccatagtgcactgtacagagcactgtgtcaattatcaatagggaaatcagtgtactggcagatgtagcactaggcaacagcatagttctgatgcggtcgtacacagtaaaagat

SEQ ID NO: 28142 - DNA, 600 bp, Chicken  19866894245840_2
cctaatattaattttctgtttgtcttttgcagcacttttacaggcagtcatagctggtgatctgctgaaggtaagcacagagtactgagtgtccatgttttcacagctacttgaaggttygatatgctgtaaattatatcacacctctgctcaaaacataaacaggctgctgtagggactgctgtcaaatgccattttacagcctttccaggaaaccctgagtattagggagcacatcagtcaggtgaggtgtgaaatttgagtgaataggatctggtgttaggcagcacctttcagccyagggtccatagtgcactgtacagagcactgtgtcaattatcaatagggaaatcagtgtactggcagatgtagcactaggcaacagcatagttctgatgcggtcgtacacagtaaaagatgttttattgcagtgatgttggtggccaagcaattagagttatagacattttaacatcttcctaggcaactacaggccaggtagaatgaaactcagtttgatgccttactgtctgatagatatctcaaaaccaatagcggttttggtatggtcaatttttggtaccttgctttggtaggaaa

SEQ ID NO: 28143 - DNA, 599 bp, Chicken  19866894245845_1
  misc_feature (1)..(119): n is any nucleotide
nnnnnnnnnnnnnnnnnnnnnnnnnnnnnnnnnnnnnnnnnnnnnnnnnnnnnnnnnnnnnnnnnnnnnnnnnnnnnnnnnnnnnnnnnnnnnnnnnnnnnnnnnnnnnnnnnnnnnnntcttccaccaatatgaaaacagaaataaaactggcaggtgcatctattgaaatatcctggatcataaaaatgaattgaagtgattggaagtcaaaaagataatctaaatatacgcagctgttctgtgaagtctgctacgttgtagctagattccctaaaagtttgctgtgaggcttgcaakaacatctaaaatcaaatatcacaaaatgagctttgctttgaattctgatgaagtttaacactgtcattttgccttagattgcaactataggagcaaataactgcaaggctagcttaagygaatttgtacttcaytgagcagctgcacagaaacctatrtgtgttcacagcttcccaatagggataaccctcaacaggggttacctaccccttaccaccagtattacagagccatttctgcatttgtttcacgtggactacagaaggagcctaacaagtctgagtatcccactctaattg

SEQ ID NO: 28144 - DNA, 600 bp, Chicken  19866894245845_2
tcttccaccaatatgaaaacagaaataaaactggcaggtgcatctattgaaatatcctggatcataaaaatgaattgaagtgattggaagtcaaaaagataatctaaatatacgcagctgttctgtgaagtctgctacgttgtagctagattccctaaaagtttgctgtgaggcttgcaakaacatctaaaatcaaatatcacaaaatgagctttgctttgaattctgatgaagtttaacactgtcattttgccttagattgcaactataggagcaaataactgcaaggctagcttaagygaatttgtacttcaytgagcagctgcacagaaacctatrtgtgttcacagcttcccaatagggataaccctcaacaggggttacctaccccttaccaccagtattacagagccatttctgcatttgtttcacgtggactacagaaggagcctaacaagtctgagtatcccactctaattgactttaggcttggaaatttctgccttaacagaacagtctcgctgattgcacagtagcaaatggaagattgtcacttgctttaaagcacttgctttttacagtgaagggcatgaagtgcac

SEQ ID NO: 28145 - DNA, 600 bp, Chicken  19866894245845_3
aaaacagaaataaaactggcaggtgcatctattgaaatatcctggatcataaaaatgaattgaagtgattggaagtcaaaaagataatctaaatatacgcagctgttctgtgaagtctgctacgttgtagctagattccctaaaagtttgctgtgaggcttgcaakaacatctaaaatcaaatatcacaaaatgagctttgctttgaattctgatgaagtttaacactgtcattttgccttagattgcaactataggagcaaataactgcaaggctagcttaagygaatttgtacttcaytgagcagctgcacagaaacctatrtgtgttcacagcttcccaatagggataaccctcaacaggggttacctaccccttaccaccagtattacagagccatttctgcatttgtttcacgtggactacagaaggagcctaacaagtctgagtatcccactctaattgactttaggcttggaaatttctgccttaacagaacagtctcgctgattgcacagtagcaaatggaagattgtcacttgctttaaagcacttgctttttacagtgaagggcatgaagtgcaccagcaacgttaacct

SEQ ID NO: 28146 - DNA, 599 bp, Chicken  19866894245845_4
gcatctattgaaatatcctggatcataaaaatgaattgaagtgattggaagtcaaaaagataatctaaatatacgcagctgttctgtgaagtctgctacgttgtagctagattccctaaaagtttgctgtgaggcttgcaakaacatctaaaatcaaatatcacaaaatgagctttgctttgaattctgatgaagtttaacactgtcattttgccttagattgcaactataggagcaaataactgcaaggctagcttaagygaatttgtacttcaytgagcagctgcacagaaacctatrtgtgttcacagcttcccaatagggataaccctcaacaggggttacctaccccttaccaccagtattacagagccatttctgcatttgtttcacgtggactacagaaggagcctaacaagtctgagtatcccactctaattgactttaggcttggaaatttctgccttaacagaacagtctcgctgattgcacagtagcaaatggaagattgtcacttgctttaaagcacttgctttttacagtgaagggcatgaagtgcaccagcaacgttaacctcccggaaacacacaatatttaaa

SEQ ID NO: 28147 - DNA, 600 bp, Chicken  19866894245851_1
agtgaactaaattaactgaattgaagtatttctttaggctctctgaagtcaaggcaacataactcaccctaagacagatgacaaatgcgtgattacataatctttgaagaggctcctgctctctagccccaggtcagccaccactcctgtcctttgtgctgacagtcatgtagcatttcagtaaactacactggaaaatggtaaagattaaaattacctggcaaaggaaaaaaaggttagtttaatcacagctgaattcactgtgtgattgcagaatcccacagcacaacagggagctasactgctttggcatggttgtaatgccatgttacgcttgagttaagctgtaatacgcttagagaaacaggctgtgactgcctctctrtttctctctctagtagtgactgctactgaaactagcttagggaaattaaactaaatgtcatttttagaaaactacagttagaggagttaggcatactacttgttttcctagtctaattacattaaaaaactctaaaacattctaatttcattaaaacatttgatcaaataatgcaacatttctttgaaaaacaaaggatcaaaagcaagtgaaac

SEQ ID NO: 28148 - DNA, 600 bp, Chicken  19866894245851_2
tgcgtgattacataatctttgaagaggctcctgctctctagccccaggtcagccaccactcctgtcctttgtgctgacagtcatgtagcatttcagtaaactacactggaaaatggtaaagattaaaattacctggcaaaggaaaaaaaggttagtttaatcacagctgaattcactgtgtgattgcagaatcccacagcacaacagggagctasactgctttggcatggttgtaatgccatgttacgcttgagttaagctgtaatacgcttagagaaacaggctgtgactgcctctctrtttctctctctagtagtgactgctactgaaactagcttagggaaattaaactaaatgtcatttttagaaaactacagttagaggagttaggcatactacttgttttcctagtctaattacattaaaaaactctaaaacattctaatttcattaaaacatttgatcaaataatgcaacatttctttgaaaaacaaaggatcaaaagcaagtgaaacagtcaactgcgaaaacatcagtaatttctcgttcatggaattcaggctccctctggtgaccagaatgcaactggcatcattcatc

SEQ ID NO: 28149 - DNA, 600 bp, Chicken  19866894245858_1
tctgctgctgtgtgcaggagccagctgtgcccatcccagcctgacaggtgtgtggtggtgtgagcatggaccaggggcctcggaaagcatcgtgctcaaagatccccatagacctttgtatggggtttaaatgctggaatttctggacccccccttgcaggtgatgtggtccctctccaacaatggctgtgcttgcatggtggacacacagacagtggtgtgagtgggagggcccttcaatgcactcattgaaactagcttgccacataggtgatgctaagggctcctttggctgcacayctacatcccctgcgtttcccaaatatggcagtggtgagctgttgtttgtccaaaacctgcttttctggagcagttgggagaggaatttccttcctcacgttgtgctggcagtgcctgcagggagagctctgtgctccgctcctggcactcagtgcttcgctctgtgcccctggggctggaaactccccagtgctgctgcctgaaagcatcagctatttttagtgcaggctgggagcgtggtctgcattgcaaattcagtccatgcttggctctgtgctctgcggtgtcccatattatggg

SEQ ID NO: 28150 - DNA, 600 bp, Chicken  19866894245866_1
tcgttagattctagacagaggggctaaggatgagctcaggacaaccgtggtgcaatctaggagattcggttgagctggtggaagaattttattcttacctaagtctcaagtgcattgttttgctgttcatatttcagttattgctcaataactatcaaaaagaacagaggaatactttcagcttagttttattatattataacagatctgcaactacagcttatttcagccaaaacatttctgtattccaaactcttaaaaaatatctacattaatcatatttttctattcttaaaaatyaaaaaaacatctacctagcataccgctgctgctacagcacttgaagggtgcattacttaaattctactgtaaatgcaatgactctcgcagtcgtcggtcttcctcctctgctgctttgacttcaggtttcaaaaagtttgctaaaagctgttccgacttctgaaaccatgtcagaggcggtcattgaacgtcccagtttttggaaggcctggttgttgcactgcctcgtcagagagcacgctccaaacgcagccacgaggaagggattttgactagaaggaaaacagatcatctataaac

SEQ ID NO: 28151 - DNA, 600 bp, Chicken  19866894245866_2
gactctcgcagtcgtcggtcttcctcctctgctgctttgacttcaggtttcaaaaagtttgctaaaagctgttccgacttctgaaaccatgtcagaggcggtcattgaacgtcccagtttttggaaggcctggttgttgcactgcctcgtcagagagcacgctccaaacgcagccacgaggaagggattttgactagaaggaaaacagatcatctataaaccatagctgaatgttctgttgctaaagcagtcttgtgtaagactgatccagccactgcaagtaaccctatcaaggaccasggagctcygctgtgatggagctggagcaacgccaagcccttatgcagccacaytggtgtaaaagagtgcttaaaaatgggatggctcaggcaaccacccctcayctcagctggcccctaagaaataccgtacttctatttcttgcccttgggtgcarcactggagttcctttccccataaggaacagaggggactctgctctcagagacggtgtttggggtcatggacaaccaggaggcagtcggtgagaagaggtataaataccaactgcacagaaggtcatttcatttcattgaatca

SEQ ID NO: 28152 - DNA, 600 bp, Chicken  19866894245866_3
cagtcgtcggtcttcctcctctgctgctttgacttcaggtttcaaaaagtttgctaaaagctgttccgacttctgaaaccatgtcagaggcggtcattgaacgtcccagtttttggaaggcctggttgttgcactgcctcgtcagagagcacgctccaaacgcagccacgaggaagggattttgactagaaggaaaacagatcatctataaaccatagctgaatgttctgttgctaaagcagtcttgtgtaagactgatccagccactgcaagtaaccctatcaaggaccasggagctcygctgtgatggagctggagcaacgccaagcccttatgcagccacaytggtgtaaaagagtgcttaaaaatgggatggctcaggcaaccacccctcayctcagctggcccctaagaaataccgtacttctatttcttgcccttgggtgcarcactggagttcctttccccataaggaacagaggggactctgctctcagagacggtgtttggggtcatggacaaccaggaggcagtcggtgagaagaggtataaataccaactgcacagaaggtcatttcatttcattgaatcagcttacca

SEQ ID NO: 28153 - DNA, 600 bp, Chicken  19866894245866_4
aaagtttgctaaaagctgttccgacttctgaaaccatgtcagaggcggtcattgaacgtcccagtttttggaaggcctggttgttgcactgcctcgtcagagagcacgctccaaacgcagccacgaggaagggattttgactagaaggaaaacagatcatctataaaccatagctgaatgttctgttgctaaagcagtcttgtgtaagactgatccagccactgcaagtaaccctatcaaggaccasggagctcygctgtgatggagctggagcaacgccaagcccttatgcagccacaytggtgtaaaagagtgcttaaaaatgggatggctcaggcaaccacccctcayctcagctggcccctaagaaataccgtacttctatttcttgcccttgggtgcarcactggagttcctttccccataaggaacagaggggactctgctctcagagacggtgtttggggtcatggacaaccaggaggcagtcggtgagaagaggtataaataccaactgcacagaaggtcatttcatttcattgaatcagcttaccaagagcactgtaacacctgaaggccacaagagaaactctcttgaag

SEQ ID NO: 28154 - DNA, 600 bp, Chicken  19866894245866_5
ttgaacgtcccagtttttggaaggcctggttgttgcactgcctcgtcagagagcacgctccaaacgcagccacgaggaagggattttgactagaaggaaaacagatcatctataaaccatagctgaatgttctgttgctaaagcagtcttgtgtaagactgatccagccactgcaagtaaccctatcaaggaccasggagctcygctgtgatggagctggagcaacgccaagcccttatgcagccacaytggtgtaaaagagtgcttaaaaatgggatggctcaggcaaccacccctcayctcagctggcccctaagaaataccgtacttctatttcttgcccttgggtgcarcactggagttcctttccccataaggaacagaggggactctgctctcagagacggtgtttggggtcatggacaaccaggaggcagtcggtgagaagaggtataaataccaactgcacagaaggtcatttcatttcattgaatcagcttaccaagagcactgtaacacctgaaggccacaagagaaactctcttgaagctccctgtgtggacaagctacctaacagtgtatctgtgcctggtattcaag

SEQ ID NO: 28155 - DNA, 600 bp, Chicken  19866894245866_6
cacgctccaaacgcagccacgaggaagggattttgactagaaggaaaacagatcatctataaaccatagctgaatgttctgttgctaaagcagtcttgtgtaagactgatccagccactgcaagtaaccctatcaaggaccasggagctcygctgtgatggagctggagcaacgccaagcccttatgcagccacaytggtgtaaaagagtgcttaaaaatgggatggctcaggcaaccacccctcayctcagctggcccctaagaaataccgtacttctatttcttgcccttgggtgcarcactggagttcctttccccataaggaacagaggggactctgctctcagagacggtgtttggggtcatggacaaccaggaggcagtcggtgagaagaggtataaataccaactgcacagaaggtcatttcatttcattgaatcagcttaccaagagcactgtaacacctgaaggccacaagagaaactctcttgaagctccctgtgtggacaagctacctaacagtgtatctgtgcctggtattcaagcactgatcctcccctggagaaggcagcacagacatgaggcccagcagcctgca

SEQ ID NO: 28156 - DNA, 599 bp, Chicken  19866894245870_1
  misc_feature (1)..(84): n is any nucleotide
nnnnnnnnnnnnnnnnnnnnnnnnnnnnnnnnnnnnnnnnnnnnnnnnnnnnnnnnnnnnnnnnnnnnnnnnnnnnnnnnnnnncagaagaggtctagattagacataaggagaaactttttctctcagagagtggtcaggcattggaatcgcctgcccaggggggtggtggagtcgctgtccctggcagtgctcaagaggcgtctggatgaggagctacgagatatggtttagtagcttgtggtagcaacggtgatgggaggacagttggactagatgatcttgtagggcctttccaaycttgtgattctatgattgtcttgatttcacggctgtatcgtaactaaactacgaaattcaaagctctcgactcttgttcactgaaataatctgaaactggttgggtatctatcatgtccaaccatgccaaatgcctacagaatagttaacctgaagacaggtaatcacatccaagaaaaaaaaaaaaaacaccttctgatgcacatttgatgacaattaccaacatcagagctctactttcagttaactttagaagagataaggatctaaccgcattgatttcttgttgaagatttcag

SEQ ID NO: 28157 - DNA, 600 bp, Chicken  19866894245870_2
ccaaatgcctacagaatagttaacctgaagacaggtaatcacatccaagaaaaaaaaaaaaaacaccttctgatgcacatttgatgacaattaccaacatcagagctctactttcagttaactttagaagagataaggatctaaccgcattgatttcttgttgaagatttcagaattaaaaaagcaaataaaaagtacttaaaatgctaactgttttcctttcactattttttttcaaagataaacaaatcccctgtcaatgtatttttgatagctggaactgaatcccaaagtatttcsacaagaaccaccrtcccattttccaagatataaaataggcatacgtaatcaaagatgatagttccttggatgagcatttaatccatctgtttgttctaagatgaaatcaggcccagccccaggcactagacaaaacttttcagactctttcctaaccacttctcccacgtgcagggcaggtcaacctatcttacaaacaccatggccatagctcagctgcacaaaggcagcagtgatattttctctgctatctttttcaccttcctcatgaggaggttcaatttttcagaagctgtctca

SEQ ID NO: 28158 - DNA, 600 bp, Chicken  19866894245870_3
gaatagttaacctgaagacaggtaatcacatccaagaaaaaaaaaaaaaacaccttctgatgcacatttgatgacaattaccaacatcagagctctactttcagttaactttagaagagataaggatctaaccgcattgatttcttgttgaagatttcagaattaaaaaagcaaataaaaagtacttaaaatgctaactgttttcctttcactattttttttcaaagataaacaaatcccctgtcaatgtatttttgatagctggaactgaatcccaaagtatttcsacaagaaccaccrtcccattttccaagatataaaataggcatacgtaatcaaagatgatagttccttggatgagcatttaatccatctgtttgttctaagatgaaatcaggcccagccccaggcactagacaaaacttttcagactctttcctaaccacttctcccacgtgcagggcaggtcaacctatcttacaaacaccatggccatagctcagctgcacaaaggcagcagtgatattttctctgctatctttttcaccttcctcatgaggaggttcaatttttcagaagctgtctcatgtcccactgctt

SEQ ID NO: 28159 - DNA, 599 bp, Chicken  19866894245871_1
  misc_feature (1)..(9): n is any nucleotide
nnnnnnnnntatgaataaaatttctcttctactgcacgccaaacagccatggaagcagcatcttttttgcttgtttgtagagttttaaatctcttagggaaaaaaaaaatgtttgacattgattactgggactgtgtaaaagtaaattaaaaaaaaattcaacacgttgataaactggctgtgtgttgttttttgtattgtacaggcctttgaatatatatatatattcaaagttattctgagtcatttttcttttgactctgtattttgttggtgtaatctcagaggattaaagttgakaaaatatagcagtattaaatatattagcataacttcatttctgtgtacaataaaacaaggctcgataattcaaccttgagtccttgtttaactgggctaacttgggtgtaaaaattccaagcaggaaaacccatgaattttcagtagacttttaagtagaacctytgttaatgcaatatgaagcataagaaggcatcgttaaagtaatcttttaaggtgagatgtgatgagatcactgtctgtgcttacataaagtagctcagtacattytgtgttccaaagcacgagctgtgtgtttt

SEQ ID NO: 28160 - DNA, 600 bp, Chicken  19866894245871_2
gttgataaactggctgtgtgttgttttttgtattgtacaggcctttgaatatatatatatattcaaagttattctgagtcatttttcttttgactctgtattttgttggtgtaatctcagaggattaaagttgakaaaatatagcagtattaaatatattagcataacttcatttctgtgtacaataaaacaaggctcgataattcaaccttgagtccttgtttaactgggctaacttgggtgtaaaaattccaagcaggaaaacccatgaattttcagtagacttttaagtagaacctytgttaatgcaatatgaagcataagaaggcatcgttaaagtaatcttttaaggtgagatgtgatgagatcactgtctgtgcttacataaagtagctcagtacattytgtgttccaaagcacgagctgtgtgttttttggaaaatctggacttagcattgtggatgatgtgatgggggatggcttctttgaagagaaactgcrttgggatcttcygtctttctccttttgatgtgagactgtctttaaagtggcattttaagtatgagaaaatagataattcttagaccttaagtacatgtt

SEQ ID NO: 28161 - DNA, 590 bp, Chicken  19866894245871_3
ttggtgtaatctcagaggattaaagttgakaaaatatagcagtattaaatatattagcataacttcatttctgtgtacaataaaacaaggctcgataattcaaccttgagtccttgtttaactgggctaacttgggtgtaaaaattccaagcaggaaaacccatgaattttcagtagacttttaagtagaacctytgttaatgcaatatgaagcataagaaggcatcgttaaagtaatcttttaaggtgagatgtgatgagatcactgtctgtgcttacataaagtagctcagtacattytgtgttccaaagcacgagctgtgtgttttttggaaaatctggacttagcattgtggatgatgtgatgggggatggcttctttgaagagaaactgcrttgggatcttcygtctttctccttttgatgtgagactgtctttaaagtggcattttaagtatgagaaaatagataattcttagaccttaagtacatgttttatgtgagattctaaatgtaggcttttttctgtacttgttcttgaagttcattggtacgacgaaaattgatgcattagataaggtcattacagt

SEQ ID NO: 28162 - DNA, 494 bp, Chicken  19866894245871_4
aattcaaccttgagtccttgtttaactgggctaacttgggtgtaaaaattccaagcaggaaaacccatgaattttcagtagacttttaagtagaacctytgttaatgcaatatgaagcataagaaggcatcgttaaagtaatcttttaaggtgagatgtgatgagatcactgtctgtgcttacataaagtagctcagtacattytgtgttccaaagcacgagctgtgtgttttttggaaaatctggacttagcattgtggatgatgtgatgggggatggcttctttgaagagaaactgcrttgggatcttcygtctttctccttttgatgtgagactgtctttaaagtggcattttaagtatgagaaaatagataattcttagaccttaagtacatgttttatgtgagattctaaatgtaggcttttttctgtacttgttcttgaagttcattggtacgacgaaaattgatgcattagataaggtcattacagt

SEQ ID NO: 28163 - DNA, 482 bp, Chicken  19866894245871_5
agtccttgtttaactgggctaacttgggtgtaaaaattccaagcaggaaaacccatgaattttcagtagacttttaagtagaacctytgttaatgcaatatgaagcataagaaggcatcgttaaagtaatcttttaaggtgagatgtgatgagatcactgtctgtgcttacataaagtagctcagtacattytgtgttccaaagcacgagctgtgtgttttttggaaaatctggacttagcattgtggatgatgtgatgggggatggcttctttgaagagaaactgcrttgggatcttcygtctttctccttttgatgtgagactgtctttaaagtggcattttaagtatgagaaaatagataattcttagaccttaagtacatgttttatgtgagattctaaatgtaggcttttttctgtacttgttcttgaagttcattggtacgacgaaaattgatgcattagataaggtcattacagt

SEQ ID NO: 28164 - DNA, 600 bp, Chicken  19866894245877_1
cactggtgagtaccaggcccagtagggcttcaccttaggtcgatccatttctagtacctggactaggaagttatcctcaacagacttcaggaatctcctggattgtctgccacctgccatgctgctatcccagtagatatccaggcggttgaaatcccccatcaggacaagagcctgggaacacaacacttcctgcagctgaagcaagaaggccccgtcaacaggttccccctgaccagatggcctgtagcagacctcaaccactagatgtcctttactggaccaatccttgattttaayccacracctctcaacctgattgtggctgtttctcagacacagctctttgcaatctayccacttcctaacatagagggcaactcccccacccctcctaccctgtctatcccttctgcaaagcctgtagccctcaatcagagtattccaactctgggattygtcccactgtgtttctgtgatagcaattaggtcatactttcccaattgtgccacagtttttacctcctcctctttatttcccatgctgtgtgcgctggtatagaggcacttcagtttacctgttgggctcattgagttctc

SEQ ID NO: 28165 - DNA, 600 bp, Chicken  19866894245877_2
gtgagtaccaggcccagtagggcttcaccttaggtcgatccatttctagtacctggactaggaagttatcctcaacagacttcaggaatctcctggattgtctgccacctgccatgctgctatcccagtagatatccaggcggttgaaatcccccatcaggacaagagcctgggaacacaacacttcctgcagctgaagcaagaaggccccgtcaacaggttccccctgaccagatggcctgtagcagacctcaaccactagatgtcctttactggaccaatccttgattttaayccacracctctcaacctgattgtggctgtttctcagacacagctctttgcaatctayccacttcctaacatagagggcaactcccccacccctcctaccctgtctatcccttctgcaaagcctgtagccctcaatcagagtattccaactctgggattygtcccactgtgtttctgtgatagcaattaggtcatactttcccaattgtgccacagtttttacctcctcctctttatttcccatgctgtgtgcgctggtatagaggcacttcagtttacctgttgggctcattgagttctcagaga

SEQ ID NO: 28166 - DNA, 600 bp, Chicken  19866894245877_3
ctggactaggaagttatcctcaacagacttcaggaatctcctggattgtctgccacctgccatgctgctatcccagtagatatccaggcggttgaaatcccccatcaggacaagagcctgggaacacaacacttcctgcagctgaagcaagaaggccccgtcaacaggttccccctgaccagatggcctgtagcagacctcaaccactagatgtcctttactggaccaatccttgattttaayccacracctctcaacctgattgtggctgtttctcagacacagctctttgcaatctayccacttcctaacatagagggcaactcccccacccctcctaccctgtctatcccttctgcaaagcctgtagccctcaatcagagtattccaactctgggattygtcccactgtgtttctgtgatagcaattaggtcatactttcccaattgtgccacagtttttacctcctcctctttatttcccatgctgtgtgcgctggtatagaggcacttcagtttacctgttgggctcattgagttctcagagaagacctctctaatacctccaggactagtcagggggggttaagctaactcagt

SEQ ID NO: 28167 - DNA, 575 bp, Chicken  19866894245877_4
catcaggacaagagcctgggaacacaacacttcctgcagctgaagcaagaaggccccgtcaacaggttccccctgaccagatggcctgtagcagacctcaaccactagatgtcctttactggaccaatccttgattttaayccacracctctcaacctgattgtggctgtttctcagacacagctctttgcaatctayccacttcctaacatagagggcaactcccccacccctcctaccctgtctatcccttctgcaaagcctgtagccctcaatcagagtattccaactctgggattygtcccactgtgtttctgtgatagcaattaggtcatactttcccaattgtgccacagtttttacctcctcctctttatttcccatgctgtgtgcgctggtatagaggcacttcagtttacctgttgggctcattgagttctcagagaagacctctctaatacctccaggactagtcagggggggttaagctaactcagtaggaccagccaatgcaagtaaaaatgaatagttctagttataaatgtcagggttgtatagatgaagaattctagtta

SEQ ID NO: 28168 - DNA, 599 bp, Chicken  19866894245883_1
  misc_feature (1)..(186): n is any nucleotide
nnnnnnnnnnnnnnnnnnnnnnnnnnnnnnnnnnnnnnnnnnnnnnnnnnnnnnnnnnnnnnnnnnnnnnnnnnnnnnnnnnnnnnnnnnnnnnnnnnnnnnnnnnnnnnnnnnnnnnnnnnnnnnnnnnnnnnnnnnnnnnnnnnnnnnnnnnnnnnnnnnnnnnnnnnnnnnnnnnnnnnnnnnggctcctggtggtctgtatgtagtggttatggtaggcttcttctgcaaagaattctgatgaattttaaaaattgagagtaaattttcctcttaaatatcatgtgctttgttgtrtaaaggttgatggctaaactgtcattgacttcagtggcagagatcctaaaagacctgaaattatgtgagtttggggagtaatttattttgttcacaaattgtctgcgaggagataggcattttctcatgttgctttgttgctcaaaattatttgcagtgttcttcgtggagtaatgcttgggctgctgactgtttgtattgtaaacagtttgttgtaaatacagtgttgatgagttgcaatggtcatgtgctggtgtttacctttcctcattggctgatggatgtaactggaagcagat

SEQ ID NO: 28169 - DNA, 600 bp, Chicken  19866894245883_2
ttatttgcagtgttcttcgtggagtaatgcttgggctgctgactgtttgtattgtaaacagtttgttgtaaatacagtgttgatgagttgcaatggtcatgtgctggtgtttacctttcctcattggctgatggatgtaactggaagcagatgcctcccctaatactctctagaagagcatctacactaaatagactgaaaactctgctcctccttggggttttgcttgattagcagcaaaccaaataaaataacagtcatctcatgccttcttctgggctctgagtgttcctggcctcrcccggatgggctgcagcctgtgcctatggtggagattctggccctacagcacggggtgggatggtaagctttggtcccctcaagatgaggtggcttctctgctgggacttcagcctcccctctctactgggatctcacaccagctgccctgcagagccctcctaaccccctctgcctgcaggcgagggattacagctggtcttgctgtcagcctgttgcaccagccaggcctttaggaattactgtgcttcaacgttagagctcatatacagctcactgttaatttaacagtctgtgaag

SEQ ID NO: 28170 - DNA, 600 bp, Chicken  19866894245897_1
tgagaaattaaagctattctgactgggctgcaaaatagtcaagagaaaagggattttgccaggagaggtatcaacaccttggcaacccccagtggctgactggctttttttgttggcaatgtaatcactagttgtttcaaatagcagtcaagagtatactctacacagagcaattcataaaaaagtagcttgtaatgaggtgtgcactttgtccttttatgttaagctaattgttccttgaaggataattcaggctatgatcatctgatattagtaaatccttaatgtctggtatcagtrttctcagtcacaaacaaaaatctcttctttatgttggtgtgcaatgcattcaatgagacaatctataaaaaatagccaacagttatgatttaaaagtgccagatgagttttcatgctggaaatgagagcgccttaattatgatgagacttacccattcaaaataaattcaaaataaaaatctacttttgaatcagaaaagggggagcttcatagatgctttcatcaaatttaattttcctttattttggaaataaaaccaaaccttttaatagtgaacaaaactggaactcagcttctta

SEQ ID NO: 28171 - DNA, 600 bp, Chicken  19866894245899_1
tggaaacagactgcagccacagctgagtacaaccaagcaattacatcaagttacctaagccccagtagaaggaaaagagacacgcagcatccaagaaagccaatacccataaaggaagttgcattatccgtggtgaaacaggagtgggtctgtgggacaggggatacaagccaccacccaggtacaaggccccaaataacccagcagtgatgctcacaggatggtagggggctaccagaaggaaattcacacgccttctttgcagacagggattatctgtgggatattatatgcccacascccacagtgtcacctgcttccctccttctgtggtatcatacatactgcctgctctgtgcattttagatacataaacaaatacagacctaggtagcaagtaaaactgctttctctattagcatatcccacagtcacactgcaaatagggttcagaaacctttgcagatacaaatccaactcccaccttaaatcagcattttacttaacaaatgctttcatttgaagaccagctacctgataggaattcacaactagcactgagccctttatctacaaacttttaacatttcttctgtcctg

SEQ ID NO: 28172 - DNA, 600 bp, Chicken  19866894245903_1
ttccacggatctggtgtaaagatcgtacctccttaaagtgacatcataatgatgataagagtgagatacgtaatcttcaaaatatctgtttatcacagtctctcggtagattatgtgagtcatcaggaattcagtatctgtgttactgcaggagtttttcctgcggagttgcagaaggaaaaagtgatagtgagctgaatgcaggaagctggaaactgttacgttctcactgctgactaaacttagttaatggaggttacttagtagaccctgctgaagtggatggaactttattaaaarttcactttaaatcctaattatcagagtctagctgtgttatgactgtcgcactaattacgtttcctgtcatcacacttctttctacagtggttgaaacatgcagatgaacaaggtagaccatactactacagtgctgatggttcccgatcagaatgggagttaccaaaggtgagtgacctgaaaaagaaactttgacaacttgtcttggactgttcccctcctcyctaggaggtgttctatgaggccttcagtgggaattacacaacaagaggacttaggtgttycacttcatcatttctg

SEQ ID NO: 28173 - DNA, 600 bp, Chicken  19866894245903_2
tctcactgctgactaaacttagttaatggaggttacttagtagaccctgctgaagtggatggaactttattaaaarttcactttaaatcctaattatcagagtctagctgtgttatgactgtcgcactaattacgtttcctgtcatcacacttctttctacagtggttgaaacatgcagatgaacaaggtagaccatactactacagtgctgatggttcccgatcagaatgggagttaccaaaggtgagtgacctgaaaaagaaactttgacaacttgtcttggactgttcccctcctcyctaggaggtgttctatgaggccttcagtgggaattacacaacaagaggacttaggtgttycacttcatcatttctgtcattgttgtggaattccaaattgtgaaaaagaaaagcacactgacagacataattaaaaatagatgatgtagctattcaaatatcaaaaaagatgctatatctttgctgaacctaccttttcatgtatggctgcaaagtaatatttgtgattttttttaatgaagtagaaagcatttttagggaagaaagggtaaattttctaaactagagaatgttcctgaa

SEQ ID NO: 28174 - DNA, 600 bp, Chicken  19866894245903_3
ggaactttattaaaarttcactttaaatcctaattatcagagtctagctgtgttatgactgtcgcactaattacgtttcctgtcatcacacttctttctacagtggttgaaacatgcagatgaacaaggtagaccatactactacagtgctgatggttcccgatcagaatgggagttaccaaaggtgagtgacctgaaaaagaaactttgacaacttgtcttggactgttcccctcctcyctaggaggtgttctatgaggccttcagtgggaattacacaacaagaggacttaggtgttycacttcatcatttctgtcattgttgtggaattccaaattgtgaaaaagaaaagcacactgacagacataattaaaaatagatgatgtagctattcaaatatcaaaaaagatgctatatctttgctgaacctaccttttcatgtatggctgcaaagtaatatttgtgattttttttaatgaagtagaaagcatttttagggaagaaagggtaaattttctaaactagagaatgttcctgaagaattgtatgctccaacacgcattatttttgccatgtatttgtacacttgatgattctga

SEQ ID NO: 28175 - DNA, 600 bp, Chicken  19866894245912_1
agtcagcatcacgagtctgcaaccatcagcaatcctagtccagtgtgatacttcaatttgtgttgaattggcttataagcacagacttataagtaacacattaaatcaatagttacttgggaggcccaaagcaccagatcaatgctgacagtagtactaaaatagatttcaagtggattagtcatcaccataagtttgttagttacataatttaaactgtagtcatttacaacctagagaaaatactacttcctagggaagaatgtttccagagagaaagcttaggatcatgcataggcrgaagtgagctttggatctcagtatctactgaaactcaaggcttcctggtatcaatactaaagactctcttaacttttgagtactgcatattaccacagcacagaagtgttactttagaacagctataatccaatcctagggtagagcactactgttaatgtttgattaattgtagaacagataaattgtatattaaacactctaagtagcatccacttaatttgcctgtttcatagtactctaagaaatagaatttcaagattaaatcaaagtcagtaagtacaagcacarcattactgt

SEQ ID NO: 28176 - DNA, 451 bp, Chicken  19866894245912_2
gcataggcrgaagtgagctttggatctcagtatctactgaaactcaaggcttcctggtatcaatactaaagactctcttaacttttgagtactgcatattaccacagcacagaagtgttactttagaacagctataatccaatcctagggtagagcactactgttaatgtttgattaattgtagaacagataaattgtatattaaacactctaagtagcatccacttaatttgcctgtttcatagtactctaagaaatagaatttcaagattaaatcaaagtcagtaagtacaagcacarcattactgtacactttaagtgctctgcattaaaatagtaggtctctaacataaaaccacccttagtttaagaatttgttacaatacagattaggtacgaaaaacatttactaggttatcacttaacacacttcagccttcattatatattt

SEQ ID NO: 28177 - DNA, 600 bp, Chicken  19866894245914_1
aagacaactggcacaggttttgaactctctgtgccccaaaagacaccacgagagaaagactcccaaaattttcagcatgtgctgctgggcagtggagcagaagtttgggagaatcgttattttttctttttttctccccatcacccatcatttagttgcatctttcatagagtgatagaatcgtcaggtctggaaaagaccactaagatcccccaaggcccaaccccaacccacccccccatgcccataaccacatccctcagtgccacatctccacagttctggagcccctccagagarggtgaccccaccactccctgggctggtgttcatgatccatgaagagccaagagagctgaatttcagccctgaagccctacagagcccagaatctcagctcttgggttcacagtccagctcygactgaagccaaaaagacagttcattcctatgcactatgggtcaaattttactgatgtttatatttataaatatataattaatatttctgagggattcattttgggagctcttggagaacaacttcagaagaaaccagacttgaaaagagaaaaaagagtttgagtcaataatggagta

SEQ ID NO: 28178 - DNA, 600 bp, Chicken  19866894245914_2
ttttctttttttctccccatcacccatcatttagttgcatctttcatagagtgatagaatcgtcaggtctggaaaagaccactaagatcccccaaggcccaaccccaacccacccccccatgcccataaccacatccctcagtgccacatctccacagttctggagcccctccagagarggtgaccccaccactccctgggctggtgttcatgatccatgaagagccaagagagctgaatttcagccctgaagccctacagagcccagaatctcagctcttgggttcacagtccagctcygactgaagccaaaaagacagttcattcctatgcactatgggtcaaattttactgatgtttatatttataaatatataattaatatttctgagggattcattttgggagctcttggagaacaacttcagaagaaaccagacttgaaaagagaaaaaagagtttgagtcaataatggagtatctttatcacccatatattgaacaacggcacctttctgtgcagtttttaagagatcaccttcatttgccagctgtgcatttgggaaacacctttacccttcatcctctagaaaaataatta

SEQ ID NO: 28179 - DNA, 600 bp, Chicken  19866894245926_1
aatctgataagagactaaagctcttccaaaagaataataatttataggaaacgtgcttttattccaagaataagaacatctcaagaatgaatgataagctcgttgcttatcacgtcagaagatttcctttcataaaaaaaagtcaaattattcatgtaacattgtttgctggtaagcgaactgctaatttatgaaccctatttgtaaaaataaaacaggaagaagacgactgaattgcatagctcagccctacatagggctgcgtatcacacatgataatttactcatacacaacagcaratgtaactcagcttcaaactgcattgttttggagttctgtccctcacctctgaaagcctttccaaacatctgcttaagtacagattactctttaatggaagtgaggtggcaaggaaaagayaaaagcatacttatgaatagaactattcccacatggagatgacagagcttattaaaaatccaaacaacatctgcagagaaccaaaatggaagaaaacaagtggaggtgcatgttttgggtatcaccaagaatttctttagcagttaaacacattggtataactgcaacctctctataaa

SEQ ID NO: 28180 - DNA, 600 bp, Chicken  19866894245926_2
atttcctttcataaaaaaaagtcaaattattcatgtaacattgtttgctggtaagcgaactgctaatttatgaaccctatttgtaaaaataaaacaggaagaagacgactgaattgcatagctcagccctacatagggctgcgtatcacacatgataatttactcatacacaacagcaratgtaactcagcttcaaactgcattgttttggagttctgtccctcacctctgaaagcctttccaaacatctgcttaagtacagattactctttaatggaagtgaggtggcaaggaaaagayaaaagcatacttatgaatagaactattcccacatggagatgacagagcttattaaaaatccaaacaacatctgcagagaaccaaaatggaagaaaacaagtggaggtgcatgttttgggtatcaccaagaatttctttagcagttaaacacattggtataactgcaacctctctataaagggctttttttatgagtagttgagtctcacaggctagaagtcagcctcccttttggctttacttcactaaagaaataaaaatcctttcccccatcccaccttcatctacagagtgaagaaa

SEQ ID NO: 28181 - DNA, 599 bp, Chicken  19866894245931_1
  misc_feature (1)..(107): n is any nucleotide
nnnnnnnnnnnnnnnnnnnnnnnnnnnnnnnnnnnnnnnnnnnnnnnnnnnnnnnnnnnnnnnnnnnnnnnnnnnnnnnnnnnnnnnnnnnnnnnnnnnnnnnnnnnatgcatgcagtagactgacatggtaaacaaagacaggataagccaggcataaacatcgcagaaacacagcaaacaacagagttgcagttcagctcatgctccatagaaagatttgataaaattgctgctgggtacccccaaaacattctccctgatgagaacacccagccccctccgccttctaaagtgctcrgatctctaaacatcttgatgttcctctgctaatcccactctggttcaccaaaatatctcctggttgtccagtatcctagatgcagctgagtgagtgcagtagtctgctccatcttctgggtatgctcctgttcatgcaggccaggttgctgctggccttagcttccagcacatgctgctagctcatgacttgcttgtgcacaccaggacctcctggtccttctcagcagagcttctctcctrtcagtctacagctttcactgttccaaaggtttcttcattcacaggaatagaactctg

SEQ ID NO: 28182 - DNA, 600 bp, Chicken  19866894245931_2
ccccaaaacattctccctgatgagaacacccagccccctccgccttctaaagtgctcrgatctctaaacatcttgatgttcctctgctaatcccactctggttcaccaaaatatctcctggttgtccagtatcctagatgcagctgagtgagtgcagtagtctgctccatcttctgggtatgctcctgttcatgcaggccaggttgctgctggccttagcttccagcacatgctgctagctcatgacttgcttgtgcacaccaggacctcctggtccttctcagcagagcttctctcctrtcagtctacagctttcactgttccaaaggtttcttcattcacaggaatagaactctgcacttcctgaaggctgatcaggtcactctgaacagaagctctacttatctacagcagtttctcttaaacttcccaccttccttgtcagcagttcaagttctccatggcctcttcatagcttcaagttcttacctgcatcttcaaaaacccctcaagactagtaatacttacaatactttcaaccagctaactttctgcagcatccgtctggccaaattcycccaaccctgcagctgcccagat

SEQ ID NO: 28183 - DNA, 600 bp, Chicken  19866894245931_3
ttctcagcagagcttctctcctrtcagtctacagctttcactgttccaaaggtttcttcattcacaggaatagaactctgcacttcctgaaggctgatcaggtcactctgaacagaagctctacttatctacagcagtttctcttaaacttcccaccttccttgtcagcagttcaagttctccatggcctcttcatagcttcaagttcttacctgcatcttcaaaaacccctcaagactagtaatacttacaatactttcaaccagctaactttctgcagcatccgtctggccaaattcycccaaccctgcagctgcccagatccccacaaaggtcagttttaagaacatcttttcctccaataattagaggtgcctattcttcccacttccccctgttcaacacacaagcaaaacagcactttctatttaatctcaagtttttcctcatccaaattcccacagagatgggagtaaccaaccagagaagcacagagcaaaacggtaaatttccaaaaggactggagtcacctcagagaactccaatcctcttatctattcgagtgctccaaaaccatagaagatatggaaaactcccagc

SEQ ID NO: 28184 - DNA, 600 bp, Chicken  19866894245931_4
tcacatcttcactaccacattaacagtgaaatcttttaatattttaaatttttagaattttgcctcccagcaaacaaattggtttcttaaacaagccaacaaaatacagcaataaaaattaaaaaaaaaaaattaaaacaagtgatccttcaaaaattaggggaagttgtttatgaacaacagcaataaattataacaattcagaaaagccttccttcctgcctcctcatatatcttattaaaacaatagagaaaatttggattccatcttctctgttttataaacattgcaataatttmtctttatgatccgttaccttaaagaaaaacataaaataagggcttttacacactgaacatgttcctaatattaacaagatgattaaaaggatgctagtaaccattagatatcaataataaaaaaaaaaaagctaacttccactcagaaaacgtgacaagtattataaactgggaacctcttctacgttgcaaattacccaaaaagtactgtttaaactttcaaatgaaagatgcaactataatacaggaaaacgtcagtaaataaataaataaataaatgctgtaaacctactcaaaaga

SEQ ID NO: 28185 - DNA, 600 bp, Chicken  19866894245937_1
aatgtgagtgaccacaccccacacactgcagagcagtgcctgtgtctgtagctccacagaagccacagagaaactcaaacacaaggctggtgatatcaattttcttgtagagatgtcgcagcactcacaaggtaatagaaggatgagtcatcctgatgcagccctggtgacttgcattactgcatacagaatagtatcttaatgcataagcaaaacatggcctcactagcagtgcctgggaattaacacagcatcaacaaagcttcctgacaccatatttcattctagaagtctcccctygtctaagttaggaaaaagaataaaaataaaaaataaatagataaaataaaaaggtacttatttattactccttcccagacctattagatattctctgggacaacactgttttttggacgtgttccaggcaaacctggaccactaagtcaacatggacaggtgggaggtaggtcctgcctgtgagtcttcatgccatgtcaccractctaaactgcttcaaccacaaagaaacaagtggtgtgtaacctgactggtgccagaacgtgtcttacactgtaaagagaacggggagaaaaaaca

SEQ ID NO: 28186 - DNA, 600 bp, Chicken  19866894245937_2
gcataagcaaaacatggcctcactagcagtgcctgggaattaacacagcatcaacaaagcttcctgacaccatatttcattctagaagtctcccctygtctaagttaggaaaaagaataaaaataaaaaataaatagataaaataaaaaggtacttatttattactccttcccagacctattagatattctctgggacaacactgttttttggacgtgttccaggcaaacctggaccactaagtcaacatggacaggtgggaggtaggtcctgcctgtgagtcttcatgccatgtcaccractctaaactgcttcaaccacaaagaaacaagtggtgtgtaacctgactggtgccagaacgtgtcttacactgtaaagagaacggggagaaaaaacacagcaacagcaggagtcaaattaatttcagaaagcaatattatttcacagattcatggcccaaagttgtcatctgattaacagaaataagaggggtgccaaataactgccattaacacagttgctttaggagatgtgatatattataagtgtagaggctttgcaggggtcctgcaaaagtaccagttattgtagacacgtaaa

SEQ ID NO: 28187 - DNA, 600 bp, Chicken  19866894245938_1
aatgaatagcatatgacagctataaattttaccagctgaaacattgcttttagtgaaattaatgaaagatggcttacctctacttcctttggtacagaaaaagcaaatgaaaattttattccaacataacactttccttgaacctttaatgataatctatgaaagcagacaactgggtctcagctgctgtctttctaaatttggtattttgttcctggcagaaaccaactactccagatgcttcagggaaagaacaacagtgcttccattaggcatccctctcccttctccccacagttmggttctattctcatcaacaaataactaagagattgatttaggctcttatgaattcgctagcatcaagtatataagttctgaatgctgttgctatcgatgtaaattaccaatttcttttttgatcctgttaaaaaaacgtgtgcctgaaaacacacagtagaaatcacgtatctcaaaaatgttcatgctacctgaaagagcacatctctctgctagttttgcatatctctttatcttggattcacaagaagtgagagtaaagattctcagttcacatacacacattctgcagtacaatta

SEQ ID NO: 28188 - DNA, 600 bp, Chicken  19866894245942_1
ctggtgcacagccatgccacagaacattccacactagaaaataaaatagcccactacatatttccgcaggttcataaatattcctggatgaaaaagtacacaactattcctcagatgagaggaaaacgtgcagaaagtactgaattacacatcagaaagtacacataagacagtgagaagacacagtaagtgttgtaacaatctagcggccgttctcattcaaaagtgagatgtgtccctctctacatccacatttttcagcgttttcttcctgtaaaactaagatgtgccaaaaaagaragtgratattcagatcctaaaggaaatgactgacttgatgtctgtcatttctgatgtccgtaaggsactcttttcatttttcccaacgaagtcaacygtgctttttaaaaatgtaattcaaagacaaaataaaatgaagacgcttcttacatgcttatttggcttctgttggatccatcagatagacaaacctgcaaagaaagagtgggaaaaaggcaaattaaactacaaatattatagaacgcaactacaagtattatagaatgtattatagaagtatatatagaacgcaatcctgca

SEQ ID NO: 28189 - DNA, 600 bp, Chicken  19866894245942_2
gcacagccatgccacagaacattccacactagaaaataaaatagcccactacatatttccgcaggttcataaatattcctggatgaaaaagtacacaactattcctcagatgagaggaaaacgtgcagaaagtactgaattacacatcagaaagtacacataagacagtgagaagacacagtaagtgttgtaacaatctagcggccgttctcattcaaaagtgagatgtgtccctctctacatccacatttttcagcgttttcttcctgtaaaactaagatgtgccaaaaaagaragtgratattcagatcctaaaggaaatgactgacttgatgtctgtcatttctgatgtccgtaaggsactcttttcatttttcccaacgaagtcaacygtgctttttaaaaatgtaattcaaagacaaaataaaatgaagacgcttcttacatgcttatttggcttctgttggatccatcagatagacaaacctgcaaagaaagagtgggaaaaaggcaaattaaactacaaatattatagaacgcaactacaagtattatagaatgtattatagaagtatatatagaacgcaatcctgcattcta

SEQ ID NO: 28190 - DNA, 600 bp, Chicken  19866894245942_3
caggttcataaatattcctggatgaaaaagtacacaactattcctcagatgagaggaaaacgtgcagaaagtactgaattacacatcagaaagtacacataagacagtgagaagacacagtaagtgttgtaacaatctagcggccgttctcattcaaaagtgagatgtgtccctctctacatccacatttttcagcgttttcttcctgtaaaactaagatgtgccaaaaaagaragtgratattcagatcctaaaggaaatgactgacttgatgtctgtcatttctgatgtccgtaaggsactcttttcatttttcccaacgaagtcaacygtgctttttaaaaatgtaattcaaagacaaaataaaatgaagacgcttcttacatgcttatttggcttctgttggatccatcagatagacaaacctgcaaagaaagagtgggaaaaaggcaaattaaactacaaatattatagaacgcaactacaagtattatagaatgtattatagaagtatatatagaacgcaatcctgcattctaataaagaatttgaaactcaaaacacacaaattccattaagggctattggaaattctacaaa

SEQ ID NO: 28191 - DNA, 600 bp, Chicken  19866894245942_4
acacaactattcctcagatgagaggaaaacgtgcagaaagtactgaattacacatcagaaagtacacataagacagtgagaagacacagtaagtgttgtaacaatctagcggccgttctcattcaaaagtgagatgtgtccctctctacatccacatttttcagcgttttcttcctgtaaaactaagatgtgccaaaaaagaragtgratattcagatcctaaaggaaatgactgacttgatgtctgtcatttctgatgtccgtaaggsactcttttcatttttcccaacgaagtcaacygtgctttttaaaaatgtaattcaaagacaaaataaaatgaagacgcttcttacatgcttatttggcttctgttggatccatcagatagacaaacctgcaaagaaagagtgggaaaaaggcaaattaaactacaaatattatagaacgcaactacaagtattatagaatgtattatagaagtatatatagaacgcaatcctgcattctaataaagaatttgaaactcaaaacacacaaattccattaagggctattggaaattctacaaaaatactaccaactcttcagatatgcaattca

SEQ ID NO: 28192 - DNA, 600 bp, Chicken  19866894245957_1
acgtctgtaaagtattttggtcagaagtatcattaagccagattcttggatgaacgaatgcaatggaatgcaatatgcaaacatacactttccctccctcctcagcattactgtgaggctgcttcaggtggggtctttttgaacaacagttgcattttctgaagctcacaacagcagctccttcagatcgctccatctgtctttcagttctggacatacagaaatggagcttcagcagatggttactaacatcagaagtgcaaaaattatcttctggaaagaacatagctctgcaacagytgcctctttcagcgtggaaataaaggtactgcccagatacacgggtgggtaactggagaagtatttaatatgaaggatgagaaaaaggtgctgatattacacaaagaaatgtcagcaagaatgctggcagttagatttaactgaagaggtgaggagaaggaagcacttgtctcgtatcatcttttgactagctctagaacagagtttaatagcacagaatgtaaaaagaatcagtaataaaataatacacattaaatattcttaatacttctgctaataggaacatacatatggagttac

SEQ ID NO: 28193 - DNA, 600 bp, Chicken  19866894245965_1
tagtcttaatagggaagctggacttctctgcatcttcccagtgtgaacaggaaaggaaaaatctcaactagctacatcttgttctcgatcacaggtgcttacaggcacatctctaaacacaagcaccatatatcaaaatccagaatacagaaaaataaccaagaaaagaaaagatagctaagaggctccagtcactgtatttctcaccaggccttatgttctagctccattcagtccttcagcttgtcattttacagcaagcaagaacaacaggtaagctttgaagcactgcctgatacmcacagtggctctgaccagaccagtgcaagaagtcagctcaggatcctgactgagggcattgctcttaaacactgtcttctcccttgaaaatactctctggtgacactaaaacaagcagacaacacagttctgcatgcgccttcagctgcagacccacttactgtgcactgcactaatccaatctagaggtgacaaaagcacagctaatgcggcaagggcaacacatttgtctttgagattagcacagacagctctgtttttcttccttccaagttcactaaagactctttgacattaaat

SEQ ID NO: 28194 - DNA, 600 bp, Chicken  19866894245967_1
ttcatgtcctattcccagaaaatggggcctactgtccgatcctaggaaagttctttcagtaatggacactttcccattcctgagctatggtgtttctcagagatggtctagttaatctccccataaaggtgattggagtctttagccaccaggtttcactaaggtgctctcttgtcttcagagaagggtcgttcagactccctgctatttcagaacaaacacaggcaatgtttccaagagtacatttgtgtccgagatccatcctgcatgagacagttgttaagaccatatcagttcacrtgatagcacagaaggaacaatcctgcctggctgcctcctgtccagaacaatgtgtgttcttgctctctgtatctgtatgcaaaccttccaygctatctgragcccactaaaaacagtgaataatagatttgcctaagaagttaaaaaatgaaagagatcactacaccaaggaaaactcctgggtgtggtgacagtcccttaaactgctattttgtgccagcatggcagcaatgcttttgcagggttgccacagaaatggttttccttctaggtctaaatcacagcctgtagcaatgtttc

SEQ ID NO: 28195 - DNA, 600 bp, Chicken  19866894245967_2
gtttctcagagatggtctagttaatctccccataaaggtgattggagtctttagccaccaggtttcactaaggtgctctcttgtcttcagagaagggtcgttcagactccctgctatttcagaacaaacacaggcaatgtttccaagagtacatttgtgtccgagatccatcctgcatgagacagttgttaagaccatatcagttcacrtgatagcacagaaggaacaatcctgcctggctgcctcctgtccagaacaatgtgtgttcttgctctctgtatctgtatgcaaaccttccaygctatctgragcccactaaaaacagtgaataatagatttgcctaagaagttaaaaaatgaaagagatcactacaccaaggaaaactcctgggtgtggtgacagtcccttaaactgctattttgtgccagcatggcagcaatgcttttgcagggttgccacagaaatggttttccttctaggtctaaatcacagcctgtagcaatgtttcctgataaatgggctgctggagccactgcagccactatgtgttatcctctttgtatatagtcatctagagcacctgctgcaggagaaatttg

SEQ ID NO: 28196 - DNA, 600 bp, Chicken  19866894245967_3
agatggtctagttaatctccccataaaggtgattggagtctttagccaccaggtttcactaaggtgctctcttgtcttcagagaagggtcgttcagactccctgctatttcagaacaaacacaggcaatgtttccaagagtacatttgtgtccgagatccatcctgcatgagacagttgttaagaccatatcagttcacrtgatagcacagaaggaacaatcctgcctggctgcctcctgtccagaacaatgtgtgttcttgctctctgtatctgtatgcaaaccttccaygctatctgragcccactaaaaacagtgaataatagatttgcctaagaagttaaaaaatgaaagagatcactacaccaaggaaaactcctgggtgtggtgacagtcccttaaactgctattttgtgccagcatggcagcaatgcttttgcagggttgccacagaaatggttttccttctaggtctaaatcacagcctgtagcaatgtttcctgataaatgggctgctggagccactgcagccactatgtgttatcctctttgtatatagtcatctagagcacctgctgcaggagaaatttggctgcctcw

SEQ ID NO: 28197 - DNA, 600 bp, Chicken  19866894245967_4
agcccactaaaaacagtgaataatagatttgcctaagaagttaaaaaatgaaagagatcactacaccaaggaaaactcctgggtgtggtgacagtcccttaaactgctattttgtgccagcatggcagcaatgcttttgcagggttgccacagaaatggttttccttctaggtctaaatcacagcctgtagcaatgtttcctgataaatgggctgctggagccactgcagccactatgtgttatcctctttgtatatagtcatctagagcacctgctgcaggagaaatttggctgcctcwctcctgaggaaaggtggtggtgtttagaaagcaatcctacccctgtctgtgctgtacccctcatcctctccccccgggagaaaatggcagagagttttttcaatacctgttttattcttgtaacactgccagttctctgtccaaatacccaaacgtcactttgccctatttttgtgaagcttcaagtgaggagcaggacatgtgtgtctgttatgcatccactcaaatagcacggcgaagtcatcttaaatatttcttccacctggacacaacttctggtttgattaaaacatgtaaatg

SEQ ID NO: 28198 - DNA, 600 bp, Chicken  19866894245974_1
acatgtgaagatgactatgatatttaattaggtatttgcaatcaatttcatgtatttgttgaaggtcttttgtggagttttgagcatcacgccaaatcttcaagacatgtttgtggctttaatgatttaatgttaaagtgataaatcaccaatgactggaaatctaaaatatgtataaaaacaaaatctttttcctgtagaaaaactgtcactgctctgcatttctcagaagatggcctaagtgcacatgaagtatatgtgcatgtattaaatttgtcagaggtctgcacttcatgtttygatttttattgcttttgattgaattcacttttcaagacttaagttttaatttgctacaatggctaagtagcagttcattstgctttagcaagtccttaccatctactacaataacagtgaactggcattgcagtcttactgtgttgacaactaacttaggactatttggaaattggtgaattgttgagataaatattctgcttcccataggcaacccattgaaattcttttcatcacttctaatttatccagtagtaaggctggtctgagttgatgttgcgtgaattagctgtgaaaccc

SEQ ID NO: 28199 - DNA, 600 bp, Chicken  19866894245974_2
tgagcatcacgccaaatcttcaagacatgtttgtggctttaatgatttaatgttaaagtgataaatcaccaatgactggaaatctaaaatatgtataaaaacaaaatctttttcctgtagaaaaactgtcactgctctgcatttctcagaagatggcctaagtgcacatgaagtatatgtgcatgtattaaatttgtcagaggtctgcacttcatgtttygatttttattgcttttgattgaattcacttttcaagacttaagttttaatttgctacaatggctaagtagcagttcattstgctttagcaagtccttaccatctactacaataacagtgaactggcattgcagtcttactgtgttgacaactaacttaggactatttggaaattggtgaattgttgagataaatattctgcttcccataggcaacccattgaaattcttttcatcacttctaatttatccagtagtaaggctggtctgagttgatgttgcgtgaattagctgtgaaacccctgtcggagttgcacagtgctttggggatgtgatggcagggaggtggtcaggtgagcggactgcagccaggtggtagtgc

SEQ ID NO: 28200 - DNA, 600 bp, Chicken  19866894245979_1
aaacaggagtgtcattttatggtcttaattgtatttgtgtaaatgtttattaccaagcattaaggtattctgcttttattagaatctttaggaaaaggatacgctgttgcgtgtgcccaagaaggagaagagaaaaagcaagcatcaggttcatctggcactaggggagctagaaggaagtctgttaatactactcctagaagaaggtctgcacggaacaccaaaaatgagactctgagtcagtctcggagctcacctcggtcaagcagttctgggtgcagtgctcctgatggcaataayccacctctgaataaatcctctacagaatcagagaacgttcttccaaaacgaaaaactaaaagaataggtaaacarcgaacacctttggctaaaaagaaactgagaagttctgcacgttccgaaaaatcatccagtgattcagtggatgatgatgatgatgatgcagagtctgaagtagttctaacaataggtaaagatcagcagtcagataacgaaagcagtagtgcaaaccttccacagaaaaatgatgcagaaacagartctgctaatggattggaaagctgtaacgaacmtgcagaa

SEQ ID NO: 28201 - DNA, 600 bp, Chicken  19866894245979_2
ttattagaatctttaggaaaaggatacgctgttgcgtgtgcccaagaaggagaagagaaaaagcaagcatcaggttcatctggcactaggggagctagaaggaagtctgttaatactactcctagaagaaggtctgcacggaacaccaaaaatgagactctgagtcagtctcggagctcacctcggtcaagcagttctgggtgcagtgctcctgatggcaataayccacctctgaataaatcctctacagaatcagagaacgttcttccaaaacgaaaaactaaaagaataggtaaacarcgaacacctttggctaaaaagaaactgagaagttctgcacgttccgaaaaatcatccagtgattcagtggatgatgatgatgatgatgcagagtctgaagtagttctaacaataggtaaagatcagcagtcagataacgaaagcagtagtgcaaaccttccacagaaaaatgatgcagaaacagartctgctaatggattggaaagctgtaacgaacmtgcagaaattgaggaagctacaagagaatgtgaggaagatacttcaggcagcggagatgtaagtttttctgtccaagaatct

SEQ ID NO: 28202 - DNA, 555 bp, Chicken  19866894245979_3
caggttcatctggcactaggggagctagaaggaagtctgttaatactactcctagaagaaggtctgcacggaacaccaaaaatgagactctgagtcagtctcggagctcacctcggtcaagcagttctgggtgcagtgctcctgatggcaataayccacctctgaataaatcctctacagaatcagagaacgttcttccaaaacgaaaaactaaaagaataggtaaacarcgaacacctttggctaaaaagaaactgagaagttctgcacgttccgaaaaatcatccagtgattcagtgratgatgatgatgatgatgcagagtctgaagtagttctaacaataggtaaagatcagcagtcagataacgaaagcagtagtgcaaaccttccacagaaaaatgatgcagaaacagartctgctaatggattggaaagctgtaacgaacmtgcagaaattgaggaagctacaagagaatgtgaggaagatacttcaggcagcggagatgtaagtttttctgtccaagaatctacagtattgactttaggaggagaag

SEQ ID NO: 28203 - DNA, 554 bp, Chicken  19866894245979_4
aggttcatctggcactaggggagctagaaggaagtctgttaatactactcctagaagaaggtctgcacggaacaccaaaaatgagactctgagtcagtctcggagctcacctcggtcaagcagttctgggtgcagtgctcctgatggcaataayccacctctgaataaatcctctacagaatcagagaacgttcttccaaaacgaaaaactaaaagaataggtaaacarcgaacacctttggctaaaaagaaactgagaagttctgcacgttccgaaaaatcatccagtgattcagtggrtgatgatgatgatgatgcagagtctgaagtagttctaacaataggtaaagatcagcagtcagataacgaaagcagtagtgcaaaccttccacagaaaaatgatgcagaaacagartctgctaatggattggaaagctgtaacgaacmtgcagaaattgaggaagctacaagagaatgtgaggaagatacttcaggcagcggagatgtaagtttttctgtccaagaatctacagtattgactttaggaggagaag

SEQ ID NO: 28204 - DNA, 553 bp, Chicken  19866894245979_5
ggttcatctggcactaggggagctagaaggaagtctgttaatactactcctagaagaaggtctgcacggaacaccaaaaatgagactctgagtcagtctcggagctcacctcggtcaagcagttctgggtgcagtgctcctgatggcaataayccacctctgaataaatcctctacagaatcagagaacgttcttccaaaacgaaaaactaaaagaataggtaaacarcgaacacctttggctaaaaagaaactgagaagttctgcacgttccgaaaaatcatccagtgattcagtggargatgatgatgatgatgcagagtctgaagtagttctaacaataggtaaagatcagcagtcagataacgaaagcagtagtgcaaaccttccacagaaaaatgatgcagaaacagartctgctaatggattggaaagctgtaacgaacmtgcagaaattgaggaagctacaagagaatgtgaggaagatacttcaggcagcggagatgtaagtttttctgtccaagaatctacagtattgactttaggaggagaag

SEQ ID NO: 28205 - DNA, 439 bp, Chicken  19866894245979_6
tcaagcagttctgggtgcagtgctcctgatggcaataayccacctctgaataaatcctctacagaatcagagaacgttcttccaaaacgaaaaactaaaagaataggtaaacarcgaacacctttggctaaaaagaaactgagaagttctgcacgttccgaaaaatcatccagtgattcagtggatgatgatgatgatgatgcagagtctgaagtagttctaacaataggtaaagatcagcagtcagataacgaaagcagtagtgcaaaccttccacagaaaaatgatgcagaaacagartctgctaatggattggaaagctgtaacgaacmtgcagaaattgaggaagctacaagagaatgtgaggaagatacttcaggcagcggagatgtaagtttttctgtccaagaatctacagtattgactttaggaggagaag

SEQ ID NO: 28206 - DNA, 407 bp, Chicken  19866894245979_7
caataayccacctctgaataaatcctctacagaatcagagaacgttcttccaaaacgaaaaactaaaagaataggtaaacarcgaacacctttggctaaaaagaaactgagaagttctgcacgttccgaaaaatcatccagtgattcagtggatgatgatgatgatgatgcagagtctgaagtagttctaacaataggtaaagatcagcagtcagataacgaaagcagtagtgcaaaccttccacagaaaaatgatgcagaaacagartctgctaatggattggaaagctgtaacgaacmtgcagaaattgaggaagctacaagagaatgtgaggaagatacttcaggcagcggagatgtaagtttttctgtccaagaatctacagtattgactttaggaggagaag

SEQ ID NO: 28207 - DNA, 600 bp, Chicken  19866894245988_1
ctcagtctcttccccgaactgtctaaagtaattctggttataattagcaacccttccaaatgtaattattctgatggacaattctgcagtaaagcttcccttcctgtcagatgggttttaatcagagaggtcactctggctagtaatgtctatgaccttttttccccatcctccataaagctgaaagcttgagttaacatatgatgtctttaggggaaaggaacatcctgtcttctatggattgacaagcacactgtaactctgacctatgggaataacttctgggagaaaaagtaaaaygcagtctcctaaagtaagtctttggctttacwcccaaattcctgagaaggctactctgatcacagcatcaaacaaaaggcagatttctttaataagttttgtgcttatctaaagcagagtgctgcttattctttgacatttgctgacttccacccagtttaagcagttccttagctgcctttcagctgactagtgtcaacaataacaacaatacatattttattttctgaactcttgaatctaaatgcaagttagcactgcacatgtatgcatgcacacacaaatgtaagtaatatctga

SEQ ID NO: 28208 - DNA, 600 bp, Chicken  19866894245988_2
tctggttataattagcaacccttccaaatgtaattattctgatggacaattctgcagtaaagcttcccttcctgtcagatgggttttaatcagagaggtcactctggctagtaatgtctatgaccttttttccccatcctccataaagctgaaagcttgagttaacatatgatgtctttaggggaaaggaacatcctgtcttctatggattgacaagcacactgtaactctgacctatgggaataacttctgggagaaaaagtaaaaygcagtctcctaaagtaagtctttggctttacwcccaaattcctgagaaggctactctgatcacagcatcaaacaaaaggcagatttctttaataagttttgtgcttatctaaagcagagtgctgcttattctttgacatttgctgacttccacccagtttaagcagttccttagctgcctttcagctgactagtgtcaacaataacaacaatacatattttattttctgaactcttgaatctaaatgcaagttagcactgcacatgtatgcatgcacacacaaatgtaagtaatatctgaacatttccaaagggcaacaagtccttttggaa

SEQ ID NO: 28209 - DNA, 600 bp, Chicken  19866894245988_3
ccaaattcctgagaaggctactctgatcacagcatcaaacaaaaggcagatttctttaataagttttgtgcttatctaaagcagagtgctgcttattctttgacatttgctgacttccacccagtttaagcagttccttagctgcctttcagctgactagtgtcaacaataacaacaatacatattttattttctgaactcttgaatctaaatgcaagttagcactgcacatgtatgcatgcacacacaaatgtaagtaatatctgaacatttccaaagggcaacaagtccttttggaayagtaatgaatagagaaatcatcttgtgccctgcatgagataggtgcatttcaagattttcctatatagcttccatgaaaattggcccctaagcaagggtgtgagtcattgatgaatacagctctaaggcttcacgctgtgcagcaagagctgtaaaaggcattagaggaacacaggggaggaggaggagagagagagagagagagagagggttaggaggttattaaataaaacctagtaatggttttacatgaacattttctgaacagtgttttgaaaacgtatgtcctaaaccacttgg

SEQ ID NO: 28210 - DNA, 599 bp, Chicken  19866894245992_1
  misc_feature (1)..(32): n is any nucleotide
nnnnnnnnnnnnnnnnnnnnnnnnnnnnnnnngcataaaatgtgagctggtgaactgctcatactgagccgccaatcggctataggaagagagggtttggacagtgcaggctgcctaatgccactgtcagtgtgatggttgctgagccagatttaaaggcatctctgtgtctggggtataccactgtatcatctgaggaataaacaggcgttcatttctctgaatactttgtatgccttattactcttcttttgcagggcttggatgtggccctatggtatactgcaacggttaccatcrcttgccagtattttgasaaacgcacttagtctgatttcaacaggtatgatttttaattgtcattctctctaacttttcagtgctaacacagctaacgttattctgaaaaaacagaacattttatttttctcagttactttctgaagtcaaagcatcagtagcaatgaacagccagcttcagataaattagtcactatatctgcagttgtatagtgtggattatccatatagatgagaaaaggagattcaccaaaatgaaagtagagtatgagtagcttggactgtgtgccatgagtaat

SEQ ID NO: 28211 - DNA, 599 bp, Chicken  19866894245992_2
  misc_feature (1)..(15): n is any nucleotide
nnnnnnnnnnnnnnngcataaaatgtgagctggtgaactgctcatactgagccgccaatcggctataggaagagagggtttggacagtgcaggctgcctaatgccactgtcagtgtgatggttgctgagccagatttaaaggcatctctgtgtctggggtataccactgtatcatctgaggaataaacaggcgttcatttctctgaatactttgtatgccttattactcttcttttgcagggcttggatgtggccctatggtatactgcaacggttaccatcrcttgccagtattttgasaaacgcacttagtctgatttcaacaggtatgatttttaattgtcattctctctaacttttcagtgctaacacagctaacgttattctgaaaaaacagaacattttatttttctcagttactttctgaagtcaaagcatcagtagcaatgaacagccagcttcagataaattagtcactatatctgcagttgtatagtgtggattatccatatagatgagaaaaggagattcaccaaaatgaaagtagagtatgagtagcttggactgtgtgccatgagtaataacctggggaaactttc

SEQ ID NO: 28212 - DNA, 600 bp, Chicken  19866894245992_3
tagtgtggattatccatatagatgagaaaaggagattcaccaaaatgaaagtagagtatgagtagcttggactgtgtgccatgagtaataacctggggaaactttctacacagctctcttctctctccttgtacaaacaagatctccttgtacacaagatctccttgtgtaaacaagattatgcataaaagagactggggatgcaaaatgtaaatgctggattaacataatctcacatcaactatttcctaaaaactagacttaaagcttgggcgtagggtttcttttttgttttttggstttttttggtttgtttgtttgttggttggttggtttctttyttttcccttttcagtataaaaggaagaygaatgtctgaaagattccaaaggctcatcccaactttyatccatgcatgtgaaagggatcttagaaraatgaacctctgataatacaagggaaattcttcaaaggctgctgagcagcctttctcagtctttaggttgtgtgttgytgtactttgtaccaagagaaattaacttaatgaaccaagtagaaatagttaaagaagtgtactgttccacacctgccattctgtgt

SEQ ID NO: 28213 - DNA, 600 bp, Chicken  19866894245992_4
agtgtggattatccatatagatgagaaaaggagattcaccaaaatgaaagtagagtatgagtagcttggactgtgtgccatgagtaataacctggggaaactttctacacagctctcttctctctccttgtacaaacaagatctccttgtacacaagatctccttgtgtaaacaagattatgcataaaagagactggggatgcaaaatgtaaatgctggattaacataatctcacatcaactatttcctaaaaactagacttaaagcttgggcgtagggtttcttttttgttttttggtsttttttggtttgtttgtttgttggttggttggtttctttyttttcccttttcagtataaaaggaagaygaatgtctgaaagattccaaaggctcatcccaactttyatccatgcatgtgaaagggatcttagaaraatgaacctctgataatacaagggaaattcttcaaaggctgctgagcagcctttctcagtctttaggttgtgtgttgytgtactttgtaccaagagaaattaacttaatgaaccaagtagaaatagttaaagaagtgtactgttccacacctgccattctgtgtt

SEQ ID NO: 28214 - DNA, 600 bp, Chicken  19866894245992_5
aaaatgaaagtagagtatgagtagcttggactgtgtgccatgagtaataacctggggaaactttctacacagctctcttctctctccttgtacaaacaagatctccttgtacacaagatctccttgtgtaaacaagattatgcataaaagagactggggatgcaaaatgtaaatgctggattaacataatctcacatcaactatttcctaaaaactagacttaaagcttgggcgtagggtttcttttttgttttttggttttttttggtttgtttgtttgttggttggttggtttctttyttttcccttttcagtataaaaggaagaygaatgtctgaaagattccaaaggctcatcccaactttyatccatgcatgtgaaagggatcttagaaraatgaacctctgataatacaagggaaattcttcaaaggctgctgagcagcctttctcagtctttaggttgtgtgttgytgtactttgtaccaagagaaattaacttaatgaaccaagtagaaatagttaaagaagtgtactgttccacacctgccattctgtgttgcactgtgtctttcctttgatcctttttttcaagcagtgg

SEQ ID NO: 28215 - DNA, 600 bp, Chicken  19866894245992_6
gactgtgtgccatgagtaataacctggggaaactttctacacagctctcttctctctccttgtacaaacaagatctccttgtacacaagatctccttgtgtaaacaagattatgcataaaagagactggggatgcaaaatgtaaatgctggattaacataatctcacatcaactatttcctaaaaactagacttaaagcttgggcgtagggtttcttttttgttttttggttttttttggtttgtttgtttgttggttggttggtttctttyttttcccttttcagtataaaaggaagaygaatgtctgaaagattccaaaggctcatcccaactttyatccatgcatgtgaaagggatcttagaaraatgaacctctgataatacaagggaaattcttcaaaggctgctgagcagcctttctcagtctttaggttgtgtgttgytgtactttgtaccaagagaaattaacttaatgaaccaagtagaaatagttaaagaagtgtactgttccacacctgccattctgtgttgcactgtgtctttcctttgatcctttttttcaagcagtggttagtaaagaggggcctggtcagtaccg

SEQ ID NO: 28216 - DNA, 600 bp, Chicken  19866894245992_7
acacagctctcttctctctccttgtacaaacaagatctccttgtacacaagatctccttgtgtaaacaagattatgcataaaagagactggggatgcaaaatgtaaatgctggattaacataatctcacatcaactatttcctaaaaactagacttaaagcttgggcgtagggtttcttttttgttttttggttttttttggtttgtttgtttgttggttggttggtttctttyttttcccttttcagtataaaaggaagaygaatgtctgaaagattccaaaggctcatcccaactttyatccatgcatgtgaaagggatcttagaaraatgaacctctgataatacaagggaaattcttcaaaggctgctgagcagcctttctcagtctttaggttgtgtgttgytgtactttgtaccaagagaaattaacttaatgaaccaagtagaaatagttaaagaagtgtactgttccacacctgccattctgtgttgcactgtgtctttcctttgatcctttttttcaagcagtggttagtaaagaggggcctggtcagtaccgttaatactacaagttatatatggttgacctgcactggt

SEQ ID NO: 28217 - DNA, 600 bp, Chicken  19866894245992_8
acaagatctccttgtacacaagatctccttgtgtaaacaagattatgcataaaagagactggggatgcaaaatgtaaatgctggattaacataatctcacatcaactatttcctaaaaactagacttaaagcttgggcgtagggtttcttttttgttttttggttttttttggtttgtttgtttgttggttggttggtttctttyttttcccttttcagtataaaaggaagaygaatgtctgaaagattccaaaggctcatcccaactttyatccatgcatgtgaaagggatcttagaaraatgaacctctgataatacaagggaaattcttcaaaggctgctgagcagcctttctcagtctttaggttgtgtgttgytgtactttgtaccaagagaaattaacttaatgaaccaagtagaaatagttaaagaagtgtactgttccacacctgccattctgtgttgcactgtgtctttcctttgatcctttttttcaagcagtggttagtaaagaggggcctggtcagtaccgttaatactacaagttatatatggttgacctgcactggtgtaataaaagggaaccactacttcattgt

SEQ ID NO: 28218 - DNA, 600 bp, Chicken  19866894245992_9
tgctggattaacataatctcacatcaactatttcctaaaaactagacttaaagcttgggcgtagggtttcttttttgttttttggttttttttggtttgtttgtttgttggttggttggtttctttyttttcccttttcagtataaaaggaagaygaatgtctgaaagattccaaaggctcatcccaactttyatccatgcatgtgaaagggatcttagaaraatgaacctctgataatacaagggaaattcttcaaaggctgctgagcagcctttctcagtctttaggttgtgtgttgytgtactttgtaccaagagaaattaacttaatgaaccaagtagaaatagttaaagaagtgtactgttccacacctgccattctgtgttgcactgtgtctttcctttgatcctttttttcaagcagtggttagtaaagaggggcctggtcagtaccgttaatactacaagttatatatggttgacctgcactggtgtaataaaagggaaccactacttcattgtcccctggaaaaatctgtagtgtcttttattagatttgcaggcagttggcagttgatcttattgagcgttagttagttc

SEQ ID NO: 28219 - DNA, 600 bp, Chicken  19866894246001_1
aagtgtgggatgtattttctgtatgcctgagagagtagtttacagtgtttgcaaaaatatcatggtaaaaggtactgaatttcttgtccaagaaggacatggagcccagcatggcttaattgtgttgtgttgagtatcaagggtgagaaatgctcatttaatagcatattgctttgcccactgtggtgtggttgaatggaggatgcagcagatgccatcgatgagacagaggaataaataaatacagtttgtggtcaaaggaaaggaattgagaaattccctggaaccaaacataaacayttaaatgattgcctgatcttgggggggctttgcaaatgtatttctttccttcttttgctggagaaacggttttggcgtggtatttgcaattcgtggagtccagagtgagaagcaattttgggaccctcccatttttcagccatgttcttggatagggctgttgaaggagcggctgggagcgagcagggactacaaaaactcccaggtgtgtgtaggaggggtttctctgtgtgcctccctttgggcagggaggagaatgccaggaaggaggagggtcagctgggatcacgtgcctcccca

SEQ ID NO: 28220 - DNA, 600 bp, Chicken  19866894246006_1
gttcctaaaaacttgtcagaaaaggtagttaccctctggcttcagctctctttaacccatcttgtgacagcccaggaggagaaatgtcagtataccaactttgcctgtcttgttttcacagacaagtgctagcagaggcttgtgccatcaggagggtggttaaattttggccttcctggggtagggaaaagacaaacacctgagtgtccactcagatatgatctcagtgcttcatgtatttcaactagagacagacggatttaaaatgctcctccaaggtgccaacatcttcttacaggkgagtctcattttgcaggattctcccaactggacactctaacagctaaagtctgagaaataagaaacttagaaacagtattgccagaggaaccatcactatgtggatcctcctgatgctcacagccatgatggaccagcaatcagactaacaaagggtgaagggcaactttactgcagaaaaaacagcacagaacatggaagacaaatgggagaacatttggcttcctttcacctctgtcaaatttcaccaactatatttaatgatatttaaagctcttttttttttttcaaattcctcac

SEQ ID NO: 28221 - DNA, 600 bp, Chicken  19866894246011_1
gtatggggtttcaccaagataacccaagcccatgcagtagggcattgttttgtgaggagcacaggcacaaaacacatgcagacactgattgccctgtcaccagagtagggtttaataacgtgcaataaatagggttggaggctgcaattggttttatttagttggcctgcctgttgaagggttttaaagtgggactctgcagaagcattcccttaaatatctgcacacgatgacttattttttaagacttctgctgtgatccaatgatggtggacacagaggcacattcttcatagaggrgcccaatacctctctgtgccttgaaggcattgaaggaaagtttgagttttccccactttagcctttggaagtcactgaaataatataaaaaacttctgcaaagaaaagcctttcaatctgaggcagttaaccactgtgctgagtgttgacccaaatggttaacgtttagcaagacataaatcactgtaagcagccgtattaatgttgcataataaatgatgccgtggcaggaacgtgataaacgaggtatttgtagactattccaaaccttgctctctgccacagtgatagcaatggagg

SEQ ID NO: 28222 - DNA, 600 bp, Chicken  19866894246025_1
cagctgtgctaaacagacttgtatagctgtatttgaaggttcactaacttcctaaatactgcttgcagactggatcctccgtaaggctctttgacttccataatgccacggtgacccaaatatttatcatgtggctttttgaaattccttagtgctggtacatgcttggagggcatctgtttatgcaaaggactacatggtagcaagtaaccaagccttggctttgctgtcaagctgcagtttgtccttgagtaaactaggcatgactagcttaccgttacagttcatgcaacagccagragccgtagtgaatgtctgcagctgctggccagtctgtcacacaatctgtgagctgtggtagctgattttcctgctcgagaactgcttgtaacaactgtaatggtgcaaaaagtatcaccctacgtggccttatgaatctgggaggggtcctggtatttgatagcagcttttttttttttccaatctagtgcacaccgaaagtggacttccctcaggatcaactggaaaagcttacagggagaattcaagaagctggcactgaagttgtcaaagccaaagcaggagcaggttggttcttgg

SEQ ID NO: 28223 - DNA, 600 bp, Chicken  19866894246030_1
gtagcattatgcagtgtcgggggaatgctggaaggaagacttggaacaggggggttttacttgttctgtttgttcctaagagattctatgttgcattagacactttgctctcatcctagaagtaacaaaaaggagtggagcagcctataaatctgcaaaatccaaaggttcctccttgattctttttgtaagtgtaggtaactatgacaacccactgtaagcaactgtgtctcatcatccacagactgcccagtaggaggcatgaagacaagcagaagaacagagaagcaccttttcacrtgctcatctaggtggactttgctcctacccatagaaaaaaaaaaaagagagactgattccctccagagagcatgcccacccactccagcacattgtgtccccaagtgattggagaagttaaaaaagctagcaaaataatgatcagccactggaggatcttgccatatcacctgtgtacagctgtgctcaaggctgtgttcctcacaaagcttctacgcctgtagcttggtcagacacatgtcctctgagctgcaaactggctgtgccctacagataggaaatgccaatttgaacagttat

SEQ ID NO: 28224 - DNA, 599 bp, Chicken  19866894246033_1
  misc_feature (1)..(49): n is any nucleotide
nnnnnnnnnnnnnnnnnnnnnnnnnnnnnnnnnnnnnnnnnnnnnnnnnctgcctgcagggcccggcccattgaccggacaccaccctgaaaagtgaggggagaacttctacttagcaccaaaaaaggtatagggctcacaaatgggaatctcggcctccatccacacgccgagtgcccacagctgccggcagtggcagtctgggtggaaatgcctggcacagccttcggccaacattcctggcgcagagtcaccaggctgcctcgcaaagcttaactctgtcaggacctggggcacacrctgctccctgcagtgtatggcagagcatgggcaccygtgggtcagcgtcctcaaaacaggaatgtgcagggaacgaccctgctgggaagcagggctattcactactcaytctgtctccagtcctgaagtcccaaaaagcgagatattttatcagtgctatgtagacttcagaattaaaattcagcaaaataacatttttttactgcaattagatataattactgcaaaaccagaaacgtctcagcagccttctgtccacctctgcatgacaagttctcccaaaattcctgtttacctaa

SEQ ID NO: 28225 - DNA, 599 bp, Chicken  19866894246033_2
  misc_feature (1)..(13): n is any nucleotide
nnnnnnnnnnnnnctgcctgcagggcccggcccattgaccggacaccaccctgaaaagtgaggggagaacttctacttagcaccaaaaaaggtatagggctcacaaatgggaatctcggcctccatccacacgccgagtgcccacagctgccggcagtggcagtctgggtggaaatgcctggcacagccttcggccaacattcctggcgcagagtcaccaggctgcctcgcaaagcttaactctgtcaggacctggggcacacrctgctccctgcagtgtatggcagagcatgggcaccygtgggtcagcgtcctcaaaacaggaatgtgcagggaacgaccctgctgggaagcagggctattcactactcaytctgtctccagtcctgaagtcccaaaaagcgagatattttatcagtgctatgtagacttcagaattaaaattcagcaaaataacatttttttactgcaattagatataattactgcaaaaccagaaacgtctcagcagccttctgtccacctctgcatgacaagttctcccaaaattcctgtttacctaataattagctttactgaagacaagaaaaggctgattt

SEQ ID NO: 28226 - DNA, 600 bp, Chicken  19866894246033_3
tacttagcaccaaaaaaggtatagggctcacaaatgggaatctcggcctccatccacacgccgagtgcccacagctgccggcagtggcagtctgggtggaaatgcctggcacagccttcggccaacattcctggcgcagagtcaccaggctgcctcgcaaagcttaactctgtcaggacctggggcacacrctgctccctgcagtgtatggcagagcatgggcaccygtgggtcagcgtcctcaaaacaggaatgtgcagggaacgaccctgctgggaagcagggctattcactactcaytctgtctccagtcctgaagtcccaaaaagcgagatattttatcagtgctatgtagacttcagaattaaaattcagcaaaataacatttttttactgcaattagatataattactgcaaaaccagaaacgtctcagcagccttctgtccacctctgcatgacaagttctcccaaaattcctgtttacctaataattagctttactgaagacaagaaaaggctgatttcatatccaatgcagacataaaacccttatctgtgttataaccacatacccctcacagataacgtgagcccagca

SEQ ID NO: 28227 - DNA, 599 bp, Chicken  19866894246034_1
  misc_feature (1)..(202): n is any nucleotide
nnnnnnnnnnnnnnnnnnnnnnnnnnnnnnnnnnnnnnnnnnnnnnnnnnnnnnnnnnnnnnnnnnnnnnnnnnnnnnnnnnnnnnnnnnnnnnnnnnnnnnnnnnnnnnnnnnnnnnnnnnnnnnnnnnnnnnnnnnnnnnnnnnnnnnnnnnnnnnnnnnnnnnnnnnnnnnnnnnnnnnnnnnnnnnnnnnnnnnnnnnttcagggtgcattgattaccagctaagaagtcaccgtgaggagagtgggttcagaggctcccctggggggtcactggccatagtgttgcagcaagcaygatgarcagagagaagttgggtccaactcttggctccagacttggccggcccagggaccaygctggcaccaccatgtcctgctgctggctctgaccctgtgtgctcatgagtagctcagtgctggaaaccctgagggcactcaggcaggagctggttccgggcagtttggtgctggcagggcagcatgtttgtgtacatcgtttgggggagaaaygttggtgccttgggaatgtggccgccgaggttaggtagctgctgagtcaggtcttctgagacctctctgatgtctgtgtgtgct

SEQ ID NO: 28228 - DNA, 599 bp, Chicken  19866894246034_2
  misc_feature (1)..(196): n is any nucleotide
nnnnnnnnnnnnnnnnnnnnnnnnnnnnnnnnnnnnnnnnnnnnnnnnnnnnnnnnnnnnnnnnnnnnnnnnnnnnnnnnnnnnnnnnnnnnnnnnnnnnnnnnnnnnnnnnnnnnnnnnnnnnnnnnnnnnnnnnnnnnnnnnnnnnnnnnnnnnnnnnnnnnnnnnnnnnnnnnnnnnnnnnnnnnnnnnnnnnttcagggtgcattgattaccagctaagaagtcaccgtgaggagagtgggttcagaggctcccctggggggtcactggccatagtgttgcagcaagcaygatgarcagagagaagttgggtccaactcttggctccagacttggccggcccagggaccaygctggcaccaccatgtcctgctgctggctctgaccctgtgtgctcatgagtagctcagtgctggaaaccctgagggcactcaggcaggagctggttccgggcagtttggtgctggcagggcagcatgtttgtgtacatcgtttgggggagaaaygttggtgccttgggaatgtggccgccgaggttaggtagctgctgagtcaggtcttctgagacctctctgatgtctgtgtgtgctcagggc

SEQ ID NO: 28229 - DNA, 599 bp, Chicken  19866894246034_3
  misc_feature (1)..(141): n is any nucleotide
nnnnnnnnnnnnnnnnnnnnnnnnnnnnnnnnnnnnnnnnnnnnnnnnnnnnnnnnnnnnnnnnnnnnnnnnnnnnnnnnnnnnnnnnnnnnnnnnnnnnnnnnnnnnnnnnnnnnnnnnnnnnnnnnnnnnnnnnnnnnnttcagggtgcattgattaccagctaagaagtcaccgtgaggagagtgggttcagaggctcccctggggggtcactggccatagtgttgcagcaagcaygatgarcagagagaagttgggtccaactcttggctccagacttggccggcccagggaccaygctggcaccaccatgtcctgctgctggctctgaccctgtgtgctcatgagtagctcagtgctggaaaccctgagggcactcaggcaggagctggttccgggcagtttggtgctggcagggcagcatgtttgtgtacatcgtttgggggagaaaygttggtgccttgggaatgtggccgccgaggttaggtagctgctgagtcaggtcttctgagacctctctgatgtctgtgtgtgctcagggctccaaatgtcaagtagacacttaaggcctcctgtaaaactagtcccttattctgt

SEQ ID NO: 28230 - DNA, 600 bp, Chicken  19866894246034_4
gattaccagctaagaagtcaccgtgaggagagtgggttcagaggctcccctggggggtcactggccatagtgttgcagcaagcaygatgarcagagagaagttgggtccaactcttggctccagacttggccggcccagggaccaygctggcaccaccatgtcctgctgctggctctgaccctgtgtgctcatgagtagctcagtgctggaaaccctgagggcactcaggcaggagctggttccgggcagtttggtgctggcagggcagcatgtttgtgtacatcgtttgggggagaaaygttggtgccttgggaatgtggccgccgaggttaggtagctgctgagtcaggtcttctgagacctctctgatgtctgtgtgtgctcagggctccaaatgtcaagtagacacttaaggcctcctgtaaaactagtcccttattctgtatgttaccgcagctggttgtgaatagccaggtactagtgtggcctcttcactgggggggctcctccagtggaaatagatgtttacctccttccttgtatatgtatttttttaaagcactttaaattgtgtttagatctgtccatgttaaaggaga

SEQ ID NO: 28231 - DNA, 600 bp, Chicken  19866894246045_1
gtcagggaagtaaagagtggaggttttatgcagggaaataccagagataaagaaatagcatattctcattggagttagtagatggggagtggtgaatacgtggtctgtaagtccatgtcaaattcttttgagggatttgagtagttggaaagttttgccttgctggcggatgcggtggcttatggagaagagtataatgttgagttgaaatggtaatataatgtgataatagtgatagatagaaaacttgaatgctgttatagatggattgtataaaggtagtgatggtgaaggaggcckaggtttgtttacagtcacacaaaaggagtacttctcagttgggtcctgattcattctcacccttacttaaagagtaacgtctacctttttataaaataattattaaaaaattataaaatatataaaatataatgtagcaaaatgtagagcctaagagaacaagttcatgagtgtagtaatgagtatttgtctctgtctcttagcttattattatatgaagaattcttgcttgtatctatatgtgttttttgttgttttaaattatttttatttgttagtttattttaagagtcttccaga

SEQ ID NO: 28232 - DNA, 600 bp, Chicken  19866894246046_1
agtctgttcctacaggctgtatctccggcaccagatggaagatgctgggtgtgctcctggagcgcagctttcagcttagttccattcacaaggaattcaacccatgcactcaagatcaactccataacatgagacaagtgggggagctggggatgcttcaaaagtgcactgaactaaattgctaatgtagatgcatccattagctcagatctacaaatcagcttggatttttattcatgtttcctacctagtgattatgattctgattactaaagtttaatcgttttgtatttgtgcaamctcacacgggtgtataatgcttggtttcaatgaagttgtgcctacatmcaagtaattgttctaacagtcttttccaatgaggtgcagcacaacaaaaattgttcctgcagtgataatttatttagcagcaatattggtaatgatgcagaagaaagaatgaaatgcagtggacttactttagttccacaaaggtaaaaaaatgtgccgtctctaaattcaatagacataccaggatatacaaagtagaaccactatgtaagaaaatagccatttgaatatatccattcctagcagatgaag

SEQ ID NO: 28233 - DNA, 600 bp, Chicken  19866894246046_2
gtgtgctcctggagcgcagctttcagcttagttccattcacaaggaattcaacccatgcactcaagatcaactccataacatgagacaagtgggggagctggggatgcttcaaaagtgcactgaactaaattgctaatgtagatgcatccattagctcagatctacaaatcagcttggatttttattcatgtttcctacctagtgattatgattctgattactaaagtttaatcgttttgtatttgtgcaamctcacacgggtgtataatgcttggtttcaatgaagttgtgcctacatmcaagtaattgttctaacagtcttttccaatgaggtgcagcacaacaaaaattgttcctgcagtgataatttatttagcagcaatattggtaatgatgcagaagaaagaatgaaatgcagtggacttactttagttccacaaaggtaaaaaaatgtgccgtctctaaattcaatagacataccaggatatacaaagtagaaccactatgtaagaaaatagccatttgaatatatccattcctagcagatgaagagccatacatccacttgaaagcattttagcaaaattttcaaaatttgt

SEQ ID NO: 28234 - DNA, 600 bp, Chicken  19866894246046_3
tatttagcagcaatattggtaatgatgcagaagaaagaatgaaatgcagtggacttactttagttccacaaaggtaaaaaaatgtgccgtctctaaattcaatagacataccaggatatacaaagtagaaccactatgtaagaaaatagccatttgaatatatccattcctagcagatgaagagccatacatccacttgaaagcattttagcaaaattttcaaaatttgtttctgatatttcatctacattgtgtggccaagtatatgtatgtagttgtatagaattgtatctacaaaaytgcaatagaaatttatcccgatatatttgtgataagctacttgcatgggttcagagtaacctttggacagtaggagggtcttctgttcattagcagagttgttggtttggcagaatgataaaactgcaagaattaggattttatttgcttttcctctataaattcatamaggagatattggaaacaaaccccccaaatgtcatgtataagatctcaatggggatgtctaagatctctgaatctgattcagagatgaatggaagattctccagtcatctaactttttaaaaatcacaccac

SEQ ID NO: 28235 - DNA, 525 bp, Chicken  19866894246046_4
ctagcagatgaagagccatacatccacttgaaagcattttagcaaaattttcaaaatttgtttctgatatttcatctacattgtgtggccaagtatatgtatgtagttgtatagaattgtatctacaaaaytgcaatagaaatttatcccgatatatttgtgataagctacttgcatgggttcagagtaacctttggacagtaggagggtcttctgttcattagcagagttgttggtttggcagaatgataaaactgcaagaattaggattttatttgcttttcctctataaattcatamaggagatattggaaacaaaccccccaaatgtcatgtataagatctcaatggggatgtctaagatctctgaatctgattcagagatgaatggaagattctccagtcatctaactttttaaaaatcacaccactgtttctccactcctgttaagcatttctatattcctattcctctgaaagtatactgaaaataaggtctgtcttttaaagtgttaagaaaaagtc

SEQ ID NO: 28236 - DNA, 600 bp, Chicken  19866894246048_1
gatcaccctataagagcactattggcagggtaggtggtcttgagagatgtgtgaacgtggttgtgtcacttgggtgaaaagtgaaaaacgacccagtctccataagagaaaggttggcaggtactttacctgaccaaggttgttttgttcctgttgagagcagttgttgatgcaaggagggttggagcctgaagagaagtggtgaacaactcagttctttctgtcctcgaaggccataccttctgccaactcctttctcctctcttggccttctaggatttgattgatgacttgaagtcrgagctgagtgggaattttgagagggtgatcatagggatgatgactcccaccaccatgtatgacgtgcacgaactaaggagggctgtgaaggtttggaaatcttccttttgtattgcttaagttctggccaaggacttactgctttgttatgtatgtctatttatttactattaactcttaaagaaacctggttgcacgtcacaagcagttgctggtatcttaaatcttggcaattccctagggagcgggaacagatgaaggttgcctgattgaaattctggcttctcgcaccaacgaaga

SEQ ID NO: 28237 - DNA, 600 bp, Chicken  19866894246048_2
gggtgtgcatgagtgctgtgggctcttctttaaatgtcccagtaaagtgggaagcccaaagcacatctgagctgtttcactgtgtttgttagctagtgttggctttgaaggactccattatccatctccagaagctgttcctgaatggggaattctcaggagttgtttccagtagattctctggtgagctgagtcttctatccttgtgtctttgcagggaaacagagatgagggaacgtatgtggatgatgcccttgctcagcaagatgcccaggtgtgtagtaacgtgcttccctgcargagcaatctgtgtctgtgtgatgcgtggtgaagagaagccaacctgtgaaatgggaataatggttctggtcttgtttgtgagtctctaatgagaggtctctagacaggctggttacttggcaggggcaatgacatttcgattgtgggttgccatgcctggttggtgcttgttggaaaacatccatgatctagacaagtacaggccagcagtgctctagctccaaggaattaaagatctgcacatccagtcttctccatgagccttactttgtcatccatawtgtctttaagtgcctgtac

SEQ ID NO: 28238 - DNA, 600 bp, Chicken  19866894246048_3
gtaacgtgcttccctgcargagcaatctgtgtctgtgtgatgcgtggtgaagagaagccaacctgtgaaatgggaataatggttctggtcttgtttgtgagtctctaatgagaggtctctagacaggctggttacttggcaggggcaatgacatttcgattgtgggttgccatgcctggttggtgcttgttggaaaacatccatgatctagacaagtacaggccagcagtgctctagctccaaggaattaaagatctgcacatccagtcttctccatgagccttactttgtcatccatawtgtctttaagtgcctgtacgaagcgggggagaagaaatggggaacagatgaggtgcagtttatgtccatcctctgtacacggaacaggtatcacctcctgagaggtaggacccctctgccatgccctgggtttttctttccttccttgtttgtgtgtgatgcttttgtgggagcttcattggtgttcagtaagtgcaaactcttctgagacatcagatgtcctcaagagagccccattgcatccgttccactcgggttgttttattccctcctgagactgaaagggacttcagaaaccta

SEQ ID NO: 28239 - DNA, 599 bp, Chicken  19866894246056_1
  misc_feature (1)..(45): n is any nucleotide
nnnnnnnnnnnnnnnnnnnnnnnnnnnnnnnnnnnnnnnnnnnnnaacaaaagtctttctagtgcactttcaaagccttggccaactggaagcaggctgtataggaaagtgctgtagaatccatttggaagctgactctagcacaattcaaataaatgaatttggcatctaaaaagaggtttagtggagtcaacgctttctaagcagggtacagagagagatttggcaaggcttgtgcatatgttatcaacattttacaaaggggtaatcccagatcttctaaatctctaacattgctcrgwttgcaggtggatggcttgaacagtgctgtctagattaggccacagyctttgtgtgggcagacraatgttagagaccatcagaatmtacacacatgcaaaaaaacttatcacttttctctaagccgtgcttttctgcactccctccagcccccaaactgaagagaaagcttttatgtgaacaactgtcagacaattagcatgggaatgttgagaaaaggaataattatgcctgcttcaggttattcaagctaaaacagttttttaaagtaatttttgggaaattgaaatcaacggcgg

SEQ ID NO: 28240 - DNA, 599 bp, Chicken  19866894246056_2
  misc_feature (1)..(43): n is any nucleotide
nnnnnnnnnnnnnnnnnnnnnnnnnnnnnnnnnnnnnnnnnnnaacaaaagtctttctagtgcactttcaaagccttggccaactggaagcaggctgtataggaaagtgctgtagaatccatttggaagctgactctagcacaattcaaataaatgaatttggcatctaaaaagaggtttagtggagtcaacgctttctaagcagggtacagagagagatttggcaaggcttgtgcatatgttatcaacattttacaaaggggtaatcccagatcttctaaatctctaacattgctcrgwttgcaggtggatggcttgaacagtgctgtctagattaggccacagyctttgtgtgggcagacraatgttagagaccatcagaatmtacacacatgcaaaaaaacttatcacttttctctaagccgtgcttttctgcactccctccagcccccaaactgaagagaaagcttttatgtgaacaactgtcagacaattagcatgggaatgttgagaaaaggaataattatgcctgcttcaggttattcaagctaaaacagttttttaaagtaatttttgggaaattgaaatcaacggcggtt

SEQ ID NO: 28241 - DNA, 600 bp, Chicken  19866894246056_3
aaaagtctttctagtgcactttcaaagccttggccaactggaagcaggctgtataggaaagtgctgtagaatccatttggaagctgactctagcacaattcaaataaatgaatttggcatctaaaaagaggtttagtggagtcaacgctttctaagcagggtacagagagagatttggcaaggcttgtgcatatgttatcaacattttacaaaggggtaatcccagatcttctaaatctctaacattgctcrgwttgcaggtggatggcttgaacagtgctgtctagattaggccacagyctttgtgtgggcagacraatgttagagaccatcagaatmtacacacatgcaaaaaaacttatcacttttctctaagccgtgcttttctgcactccctccagcccccaaactgaagagaaagcttttatgtgaacaactgtcagacaattagcatgggaatgttgagaaaaggaataattatgcctgcttcaggttattcaagctaaaacagttttttaaagtaatttttgggaaattgaaatcaacggcggttggcatcatgctcagaacattgccttgggacaatgaagcacataaatg

SEQ ID NO: 28242 - DNA, 600 bp, Chicken  19866894246056_4
actttcaaagccttggccaactggaagcaggctgtataggaaagtgctgtagaatccatttggaagctgactctagcacaattcaaataaatgaatttggcatctaaaaagaggtttagtggagtcaacgctttctaagcagggtacagagagagatttggcaaggcttgtgcatatgttatcaacattttacaaaggggtaatcccagatcttctaaatctctaacattgctcrgwttgcaggtggatggcttgaacagtgctgtctagattaggccacagyctttgtgtgggcagacraatgttagagaccatcagaatmtacacacatgcaaaaaaacttatcacttttctctaagccgtgcttttctgcactccctccagcccccaaactgaagagaaagcttttatgtgaacaactgtcagacaattagcatgggaatgttgagaaaaggaataattatgcctgcttcaggttattcaagctaaaacagttttttaaagtaatttttgggaaattgaaatcaacggcggttggcatcatgctcagaacattgccttgggacaatgaagcacataaatgctttgctgatattttgg

SEQ ID NO: 28243 - DNA, 600 bp, Chicken  19866894246056_5
ggaagcaggctgtataggaaagtgctgtagaatccatttggaagctgactctagcacaattcaaataaatgaatttggcatctaaaaagaggtttagtggagtcaacgctttctaagcagggtacagagagagatttggcaaggcttgtgcatatgttatcaacattttacaaaggggtaatcccagatcttctaaatctctaacattgctcrgwttgcaggtggatggcttgaacagtgctgtctagattaggccacagyctttgtgtgggcagacraatgttagagaccatcagaatmtacacacatgcaaaaaaacttatcacttttctctaagccgtgcttttctgcactccctccagcccccaaactgaagagaaagcttttatgtgaacaactgtcagacaattagcatgggaatgttgagaaaaggaataattatgcctgcttcaggttattcaagctaaaacagttttttaaagtaatttttgggaaattgaaatcaacggcggttggcatcatgctcagaacattgccttgggacaatgaagcacataaatgctttgctgatattttggatgcagcacaggagaattttcc

SEQ ID NO: 28244 - DNA, 600 bp, Chicken  19866894246056_6
tataggaaagtgctgtagaatccatttggaagctgactctagcacaattcaaataaatgaatttggcatctaaaaagaggtttagtggagtcaacgctttctaagcagggtacagagagagatttggcaaggcttgtgcatatgttatcaacattttacaaaggggtaatcccagatcttctaaatctctaacattgctcrgwttgcaggtggatggcttgaacagtgctgtctagattaggccacagyctttgtgtgggcagacraatgttagagaccatcagaatmtacacacatgcmaaaaaacttatcacttttctctaagccgtgcttttctgcactccctccagcccccaaactgaagagaaagcttttatgtgaacaactgtcagacaattagcatgggaatgttgagaaaaggaataattatgcctgcttcaggttattcaagctaaaacagttttttaaagtaatttttgggaaattgaaatcaacggcggttggcatcatgctcagaacattgccttgggacaatgaagcacataaatgctttgctgatattttggatgcagcacaggagaattttccaagtgattttcc

SEQ ID NO: 28245 - DNA, 600 bp, Chicken  19866894246058_1
ccaggtatagagagggagtaaaaccaatatgtgtaatgacagctcactagagatgttatttatgctgtgccaaaggatttcagatgctgaatttaaaatagccaaccaccaaggaagtatgtagtaagaacaattcattagaagactcgagacttcttgagacttttaattcattttccaggcatattgcttctatgaaattactgttttagtggcaacaaaattcaataggtgtttgatctttaagaatctctcttaacctctatatgatcgaatgtagagttcaaccagggcttagcrtatgagccagaaaacaagattttgagtggctcctgcctcactgtcattacttgcctatatatgactaagggtgagatttcagtcccagattcaaaaaacatcacaatttcagatgctttcattgaaatggtcagacccaatttcagaaaccttttctctgaatgtgggagacaagtctcatgaaaatgaaagaacttccatcaacactagtgagtatttaatcagaacctaaaggaaactaactttacacattagcttcttcttaagttacacacttctgacagtaaaatcatgcaatct

SEQ ID NO: 28246 - DNA, 600 bp, Chicken  19866894246058_2
atgagccagaaaacaagattttgagtggctcctgcctcactgtcattacttgcctatatatgactaagggtgagatttcagtcccagattcaaaaaacatcacaatttcagatgctttcattgaaatggtcagacccaatttcagaaaccttttctctgaatgtgggagacaagtctcatgaaaatgaaagaacttccatcaacactagtgagtatttaatcagaacctaaaggaaactaactttacacattagcttcttcttaagttacacacttctgacagtaaaatcatgcaatctsttactgactttcttctaacatactctgtatttcatttgcttacactttgggatgccttttgatattagagagctaatgatttcccaggacttacagtcaaaaattttcaaaagcctgtctgcttcacagagaactacttaaatttgttagtgtttaccaaatgtttctgaatcctctgaaggaaagctttagataaggtgactgtattgttgttcttcagctctgataacttaacttgggatttgccttgatgatgaacagaacattcagcataaagatgtaaagcttccagacttagga

SEQ ID NO: 28247 - DNA, 600 bp, Chicken  19866894246062_1
gctgagatgggcatgtttgtccgttccatactctagcactaatggtgctgtagttgcccctttctgagtacaatttttacattaaagctactctgacaaatatatttagttttacaaaattgtaatagctatatttgtctccataatgcaagctgctatggcaacttcatgttcacgcttggagcaggtcttatcactgagtcatgactgctcttttggatgagatgcggtgtagtgattctgttctcagctcctttggcatctttccccactctctgctcttgctagaagacattcatyctcacagtgcggtgttcctgacgttaaggcaaatgtatgctttgattatgtgccaggttttcaaatatggtttccttgagcagtattagagtagccaacaggaagctgccagtgtcacaagtggctgtcaaggccgggcctttatggcctgtcatcctgtacctgtgacagtgcttgtgagacttctttgaacagcacatttacattggctgcattcttctcatattgtggactgcaaagcagcttccataatttgtttgaacagtggtttctttcgaagatttttgctctagcttgctt

SEQ ID NO: 28248 - DNA, 600 bp, Chicken  19866894246066_1
tgctctcccactttctcctctgctaggccaggccagaacagaggggaattagagcagaatttcatcttgccagcatatgtcaagctgcctttcagtatcggaagcagcaacatcctctctctctttgtcttcagctaaatgatagctctggccttggccgcagagggaaggagcagccacagcctatggcttctctacattggggtacttacatctaatgtgggttcttgttagaggaccaggaggagagtaaccagcacccttacagagttcagctgaacagcgtaggacctaaaaaamtgcttctgctgtatctattgttaaatatacttcctaatgtacttggtaattgttgtatcactggatgatttttagagaatttcagaaaatattatgcatcagggaataaaagtgatatacagattttttgcaagatctcggaatcttagaattattgtttgaagtcagtgggacataagcaacactatcttctttgggaaagttaccttttatacaactgaggtctttataagggtccttactatatctagaaatgtgtcagaactctggaatcataatttccttttttttttttccccc

SEQ ID NO: 28249 - DNA, 600 bp, Chicken  19866894246070_1
ctgcggggagccagcctgccttccaccaggatacgctcaccacgatgttaaatctggctccccttgagctcaccggggctgattttaaagaaaatagttctaggtgccattcagattcaacatgaccaactctcgaacatttaatcaaatgtattaactgctacaaatgattacagtgaaaagtaaagacgttctttgatttctacacagacttttgacatgacattgctcaagttgccggtgaggacttggctatccagcatgcactacagaatccaagctttgaaatagttttctgcwgctctctgttttccatacttytccttactgaatccccccacaaagaccacaggcagtcactgacacacttgaaacctctgtcctgccaaagagtccccaccgcagcctcatcccatggctccaggagctccaggctctgctgcccaagggaagcgctcagccccaatggaagctgcgatggagcacaggcatctgaaacactgcaggagagagtagctgcagcctttcatgttagggaattgggtcaaaaatcttccagaaaatctatttcaataatgaaagctgacttttctcctcctt

SEQ ID NO: 28250 - DNA, 600 bp, Chicken  19866894246070_2
tccaccaggatacgctcaccacgatgttaaatctggctccccttgagctcaccggggctgattttaaagaaaatagttctaggtgccattcagattcaacatgaccaactctcgaacatttaatcaaatgtattaactgctacaaatgattacagtgaaaagtaaagacgttctttgatttctacacagacttttgacatgacattgctcaagttgccggtgaggacttggctatccagcatgcactacagaatccaagctttgaaatagttttctgcwgctctctgttttccatacttytccttactgaatccccccacaaagaccacaggcagtcactgacacacttgaaacctctgtcctgccaaagagtccccaccgcagcctcatcccatggctccaggagctccaggctctgctgcccaagggaagcgctcagccccaatggaagctgcgatggagcacaggcatctgaaacactgcaggagagagtagctgcagcctttcatgttagggaattgggtcaaaaatcttccagaaaatctatttcaataatgaaagctgacttttctcctcctttttttttttttttttttttcc

SEQ ID NO: 28251 - DNA, 600 bp, Chicken  19866894246072_1
ttaatgtttgccttaatatggggtgtctcaggggggcagaagtggggtccagcactgagagggcttacatggaggctttccacatccctcagtctcacagaggaagaaggaaggcacgttctatgcacagatttcaatacatccttgactcagaagtaaccccttgagttttgaagcccacttcctacagggtgaaggtttgtaaccagcaaacgcactctgagaaggactgcttcaaccattcaaagaggcactgagcagagcaccgagggctgtacgtgatctacatgacagcagcargtacatttccttttcctcttttatacatacaycattccstgacactcatatctacatttccaaaacctgagaagtcaatcactgcaaacagatcgagatgttgatgcacgtatacattaagaatgtttatatatacaaatacttacaaaaacatggatactcttgcagtgatcagaactcacatcccaatacagattcagaaatgctaattattgttttgaaaataaagcagaaccagaagacaaacacagcagacacgctttttatgttttattttatgtgtacgcactgctccagtct

SEQ ID NO: 28252 - DNA, 600 bp, Chicken  19866894246072_2
ggggcagaagtggggtccagcactgagagggcttacatggaggctttccacatccctcagtctcacagaggaagaaggaaggcacgttctatgcacagatttcaatacatccttgactcagaagtaaccccttgagttttgaagcccacttcctacagggtgaaggtttgtaaccagcaaacgcactctgagaaggactgcttcaaccattcaaagaggcactgagcagagcaccgagggctgtacgtgatctacatgacagcagcargtacatttccttttcctcttttatacatacaycattccstgacactcatatctacatttccaaaacctgagaagtcaatcactgcaaacagatcgagatgttgatgcacgtatacattaagaatgtttatatatacaaatacttacaaaaacatggatactcttgcagtgatcagaactcacatcccaatacagattcagaaatgctaattattgttttgaaaataaagcagaaccagaagacaaacacagcagacacgctttttatgttttattttatgtgtacgcactgctccagtctcctaaacacataattgaacctttacgttgtct

SEQ ID NO: 28253 - DNA, 600 bp, Chicken  19866894246072_3
aagtggggtccagcactgagagggcttacatggaggctttccacatccctcagtctcacagaggaagaaggaaggcacgttctatgcacagatttcaatacatccttgactcagaagtaaccccttgagttttgaagcccacttcctacagggtgaaggtttgtaaccagcaaacgcactctgagaaggactgcttcaaccattcaaagaggcactgagcagagcaccgagggctgtacgtgatctacatgacagcagcargtacatttccttttcctcttttatacatacaycattccstgacactcatatctacatttccaaaacctgagaagtcaatcactgcaaacagatcgagatgttgatgcacgtatacattaagaatgtttatatatacaaatacttacaaaaacatggatactcttgcagtgatcagaactcacatcccaatacagattcagaaatgctaattattgttttgaaaataaagcagaaccagaagacaaacacagcagacacgctttttatgttttattttatgtgtacgcactgctccagtctcctaaacacataattgaacctttacgttgtctatgcata

SEQ ID NO: 28254 - DNA, 599 bp, Chicken  19866894246083_1
  misc_feature (1)..(8): n is any nucleotide
nnnnnnnntcccctgagggatgagggatggagagctgccttctcttggaaagaccacctggaggatgccaggagcattctagagctgcgcactggtgaggttcaggtgatggagggaagggcccgaagtgatccaacagcacagccagctttcattaaggctgacttcgggtttggctttcatgcacttctcaggtgcaggctgcccatgataaggacagttctcaccccagtaaacaccatggttaaacttacatcagggcttcaggcttgaggctgttttgctgctgtatgggtagcraattcagatttacttatggattttgraggtgtctgaaatctgcacccaatgctgcttcagagcccggacccacctcttcattcattctgctgctcctcttttcctgcagaagaagcactctctctcctgacctcagtgctctcagctttccacttatcccagaagagaatttcttctccccatcggagcaccttgcagggagcatcctggcagcctgcaggacaaaaaccctcagctgtgaggatcgcagcgctgcctggaagcaggcagattgctctcctggaaccgccaccgycagc

SEQ ID NO: 28255 - DNA, 600 bp, Chicken  19866894246083_2
atggagagctgccttctcttggaaagaccacctggaggatgccaggagcattctagagctgcgcactggtgaggttcaggtgatggagggaagggcccgaagtgatccaacagcacagccagctttcattaaggctgacttcgggtttggctttcatgcacttctcaggtgcaggctgcccatgataaggacagttctcaccccagtaaacaccatggttaaacttacatcagggcttcaggcttgaggctgttttgctgctgtatgggtagcraattcagatttacttatggattttgraggtgtctgaaatctgcacccaatgctgcttcagagcccggacccacctcttcattcattctgctgctcctcttttcctgcagaagaagcactctctctcctgacctcagtgctctcagctttccacttatcccagaagagaatttcttctccccatcggagcaccttgcagggagcatcctggcagcctgcaggacaaaaaccctcagctgtgaggatcgcagcgctgcctggaagcaggcagattgctctcctggaaccgccaccgycagcgagcttcacctccatttcctccaggac

SEQ ID NO: 28256 - DNA, 600 bp, Chicken  19866894246083_3
tagcraattcagatttacttatggattttgraggtgtctgaaatctgcacccaatgctgcttcagagcccggacccacctcttcattcattctgctgctcctcttttcctgcagaagaagcactctctctcctgacctcagtgctctcagctttccacttatcccagaagagaatttcttctccccatcggagcaccttgcagggagcatcctggcagcctgcaggacaaaaaccctcagctgtgaggatcgcagcgctgcctggaagcaggcagattgctctcctggaaccgccaccgycagcgagcttcacctccatttcctccaggactctgggaccttcgtcattccaaagcccttttaaaatgtcatcacttcaggagaggcttgagccagggctggcctgctgggtgacggagagatcaggctttgaactttgagtctgggaagccgggagaagccagagcaggagctgacatcaccctcactcgcggcgagcagcgcagattctccttgagcctgcacattgtagccactgtcggacggtgacgggaagccaggatgatgaacgcatgagtcaccgcggctcggcgctctcct

SEQ ID NO: 28257 - DNA, 600 bp, Chicken  19866894246084_1
cagattttatcagaataataaaacacatatcagttccacggaaagaaaaagttattatgatcaaaataaaagattcacagaactataaagtatacttcaaaattttgcttgtcagattaaacatctggcactttgattcttttgcaagtagcaaaatattttctttacttgcaaaacctttctagcttcttcccctaaaggaattttgttttctctttttcccttaaataatagatatgaattgtccatttatagaaccattgagtcttttgagttgaaaggacctttaaaggctgcctygtccagctcccctgcaatgaacaggaacacctacagctacatcaggttgctcagagccccatccagcctgagcttgagtgtctccagggatggggcatccaccacctctctgggcaacatgtgcttcttttgatgcagcctaggatacggttgtttcagggctgygagagcacattgctggcacgtgtccagcttgccatccaccagtaccctctagtctctagtatcctctagagtgggggcccacttctggagcctgtctaggtctctctggatggcatcctgtccctcaagtgtgtc

SEQ ID NO: 28258 - DNA, 578 bp, Chicken  19866894246084_2
tacttgcaaaacctttctagcttcttcccctaaaggaattttgttttctctttttcccttaaataatagatatgaattgtccatttatagaaccattgagtcttttgagttgaaaggacctttaaaggctgcctygtccagctcccctgcaatgaacaggaacacctacagctacatcaggttgctcagagccccatccagcctgagcttgagtgtctccagggatggggcatccaccacctctctgggcaacatgtgcttcttttgatgcagcctaggatacggttgtttcagggctgygagagcacattgctggcacgtgtccagcttgccatccaccagtaccctctagtctctagtatcctctagagtgggggcccacttctggagcctgtctaggtctctctggatggcatcctgtccctcaagtgtgtcatctgcaaacttgctgaaggtgcacttgatcctactgtcactgtcatcaatgaaaatgttaaagagcatcagccccagtactgacccctgtgggacaccacttgtcaccagtctccatccaaacatcgagccattgaccacca

SEQ ID NO: 28259 - DNA, 600 bp, Chicken  19866894246085_1
tcttgaggtgctgtggggttggttggacgccgtccgcctttgggatgcagtgggaaggagcgaagagatgctgtgctgctgccatcccacaccgctgctccacgcagtaccgttttacccccaaagcggtcacgttttggacacgttgtccatcatcctgaaagcccgctgtggttctgtctcgcggtgcagcagagatcccccttcaccccaaagcgctgtgcgttatcgctgtgccgcccggctcactgcggctctcctttcccttccagcggattcctgcggggggagcagagcgcsgagccgcagctcatcgccttccacccctgcttccagaagggagcgctgctgaccgtggtgagtgcagcttcggctcccgggggtctttgctgcaccccggcgaaattgtgcccgcagtgcccccgtggtgcagagagggcagggaaggcaacggcggcgcactgctctgtgggatggcggtgccccgtgctgatcatggcgccgttgtcctctccagtgctggtccacggggaccatcagccacatccccttcttcttcctgagcacccacgtgccctacggcagccctggccgcagccc

SEQ ID NO: 28260 - DNA, 600 bp, Chicken  19866894246091_1
agcttagatccactagggaagaactgtggctatcttttttttccagaaagcagcattactctgcaatactggataaaatatgctgccagctcctggtatgagtcaggagtcaaaattttcagctgttaccttagaatgcatgttcaagagcacccatccacaaatcaaagcttttatctcgacaacaatcaaagcctctacctagacaacagaaaaaaaagtggctcgattttaaactgagacaagaacacagggcaaagttttcttacaaagtagggtgcaactctaacaagaaaaatrttggggcagatgagttctcctgaaaatgtggctccacaaaaagattactgtctcaaactttaagtacttaaagctaaaatatgcttgcacacatatcaaatctgtctcagatacgtgtaggcagttacacataacagacacttmattcctcctactaccatcaaaagagatgcctccattctttgttttacacctaagtacagttttcaaagctcctcagccaactgaggtctaggaaatatcaaggccaaattgtgtccacaattataggcacattttttttcaaaagagaaatgtcca

SEQ ID NO: 28261 - DNA, 596 bp, Chicken  19866894246091_2
caagagcacccatccacaaatcaaagcttttatctcgacaacaatcaaagcctctacctagacaacagaaaaaaaagtggctcgattttaaactgagacaagaacacagggcaaagttttcttacaaagtagggtgcaactctaacaagaaaaatrttggggcagatgagttctcctgaaaatgtggctccacaaaaagattactgtctcaaactttaagtacttaaagctaaaatatgcttgcacacatatcaaatctgtctcagatacgtgtaggcagttacacataacagacacttmattcctcctactaccatcaaaagagatgcctccattctttgttttacacctaagtacagttttcaaagctcctcagccaactgaggtctaggaaatatcaaggccaaattgtgtccacaattataggcacattttttttcaaaagagaaatgtccatcaatttatagctgattttggttgaacataacagttctcaaaatacattccattggctgttagctgtctggaggatctgtcatgtagcctatgctttgttcttttctttccaacaatgaaatgctttactaaaaagttgt

SEQ ID NO: 28262 - DNA, 600 bp, Chicken  19866894246105_1
cataaaatgatataatgactctggttggaagagacctttaagatcatctatttccaacaccctgctataagcagggacaccacctttagaccatttttaaccactttctgccatttgaagaacttttaagtgtctcaaaattgttgaaaagagcaattcttagttctgctgcaagacatagattcatagtactcatcactaaatctgctgctgatacatgctgtaacagggcagtgttaacaacatgctctcttaagaaaacttagagagctttaatacaacagataaattatcatggtktttactattataactgttatccctcacaataagaatttcccgttctgtatcagagaaaattgcagccactcagagttttgcaataaaaatcaggaaagcatgccagccttgaaagttttctactgaaagtacacagagggtgagcaccctcctaggataatcagtgttctgagcatgttccttccctttgatgtgggatcaggcaaggaagcagcagtctgtatttctctcttcccagctgagtaccacaaccttcaggctcttcatggttcctgtctttggcactatgcagaaattcta

SEQ ID NO: 28263 - DNA, 600 bp, Chicken  19866894246107_1
aaccgaaaatcacgcgttttctcttagcaaatcccctgtttaagcgaaaatcatgcgttttctctttgcaaatcccccatttaacccgaaaatcacgcgttttctcttcgcaaatcccccatttaaccgaaaatcacgcgttttctcttcgcaaatcccccatttaagcgaaaatcacgcgttttgtcttgaagaatcccccatttaacccaaaaatcacgcgttttctcttcgcaaatcccccatttaacccgaaaatcacgcattttctcttagagaatccagcatttaacccgaaartcacgcattttctgttagcaaatcccccatttaacccgaaaatcacgcgttttctctttgcaaatcccccatttaacccgaaaatcacgcgttttctcttcgagaattccccatttaaccgaaaatcacgtgctttctcttcgcaaatcccccatttaagcgaaaatcacgcgttttctcttcgcaaatcccccatttaagctgaaaatcacgcgttttctcttagccaatcccccatttaacccgaaaatcacgcattttctgtacaagaatcccccatttaaccaaaaatcacgcatt

SEQ ID NO: 28264 - DNA, 599 bp, Chicken  19866894246117_1
  misc_feature (1)..(38): n is any nucleotide
nnnnnnnnnnnnnnnnnnnnnnnnnnnnnnnnnnnnnnctgtgttctcctggaatgctacctgctgatcttccttccatttgtatctgaaacgcatgcccctttgcctgggttgttcaaatatttcaatgtagggctctgagataccttaaaacaaaacaaaacctttttaatttagagcttaaaaagaagcagaaggcaggctatgtggttaggtgctatatgaaaactgtaaggtctagactctttgattgatattattcatctttcacttgatttgccttctcagatgataaacttkttttaaaacatgaatgcacatgatgggggtaagaggtgttaatagacactaaataaatctctgggtatcaatgccatattagtaattagcagaggactccttcccctccatctcacctagaattttagattcttttagcttttagagtatgtatctgatgaaacaatattttatacaacagaaaacactgtttcaagggaatgattaatattcttcgttataatacagttgtctcctcaaagttcaggtaccatcagtattgtgtttgcatgaatgccctctgaaagtgaagatcttgt

SEQ ID NO: 28265 - DNA, 600 bp, Chicken  19866894246124_1
cttcaaaaagttttacaagtttgttaaattttgcggcattgtgttaagataactctttgctgagtcagttggagagtgcctgaagcatgggactttgagaggacctatggtagtgttaatagttgttgattttccaaatggagaagcctactatttgaaaaaaattaaaataaaaaacatctcttcaactttttcttttgtattttctccctttgatactgtctcatcttttctttgtgccattagaccagccagtagttcaagtggtgcctgtagttattgtctcgctgttcataaccycatgtatgcagaaaagtatatggcattatggtatgtgacgctagtttggccagtgcaaagtcacaccaagttttcatgctctgtgttgctaaggagaatctgtactgtatgggaacactttcacagagagtagaaaagaaattctgacttaatgtggggtgacgagatacagatgaaagttcctttgtatgctgaaattcaaacatgatggagaatataaagactttctttaccaaccttgggaaacagaaatagtttcacttggagagtaatttaatattttactagaatttattgaga

SEQ ID NO: 28266 - DNA, 600 bp, Chicken  19866894246124_2
aatctgtactgtatgggaacactttcacagagagtagaaaagaaattctgacttaatgtggggtgacgagatacagatgaaagttcctttgtatgctgaaattcaaacatgatggagaatataaagactttctttaccaaccttgggaaacagaaatagtttcacttggagagtaatttaatattttactagaatttattgagagaattttaaaataaaaaagattcccaccattttttttgccctgatctacactcatagtgactgaatactgcatatcaatcattgccttttgttccyaacagcactatgattctttaattttcagtttcctactgcttctgtgtagagtacttcatgtaccagaaactgtgattaattgaggatgtctatgccatcttagagatcaaattgactttcagttataactccctgcttttgtgtatcccagctctcttatagaaatctctttgattccaaattcattttttgcaaaagtgtgttttgtttggtctctgaaattctgatcttggtatctaggcttgtcttgcatcacgtgactgataaatacagcgtttgctagtctggctcaggataaca

SEQ ID NO: 28267 - DNA, 599 bp, Chicken  19866894246126_1
  misc_feature (1)..(126): n is any nucleotide
nnnnnnnnnnnnnnnnnnnnnnnnnnnnnnnnnnnnnnnnnnnnnnnnnnnnnnnnnnnnnnnnnnnnnnnnnnnnnnnnnnnnnnnnnnnnnnnnnnnnnnnnnnnnnnnnnnnnnnnnnnnnnnatgtaagcaccatggagatgggatccacttctaacagactgtactcagcctgctggtttcattcaacgaaaaacaaatttaccaaaattttcataaatgcttggatcagaaaccaagaattctttaattgcttttcagacaacaaccttctaaccttggaaactacataatacrtattasatgcattcacgtggacaacatacatcacggctggttcacttcactgcatttggaccggctgtctccccatgtgaaatcaatgcctgatctctcacaaagtctgacgggagcaagatcagttctgctatctgtcacatcagtaactgctacatgcattaaaaattaacaatctattttgaaggactgaagctttattgggttaaaagcaacacttccagtaagaaacatggtttatsttttgctaaatccactgcttcccattaccactaaaatgagatctctctcccatctgc

SEQ ID NO: 28268 - DNA, 599 bp, Chicken  19866894246126_2
  misc_feature (1)..(120): n is any nucleotide
nnnnnnnnnnnnnnnnnnnnnnnnnnnnnnnnnnnnnnnnnnnnnnnnnnnnnnnnnnnnnnnnnnnnnnnnnnnnnnnnnnnnnnnnnnnnnnnnnnnnnnnnnnnnnnnnnnnnnnnnatgtaagcaccatggagatgggatccacttctaacagactgtactcagcctgctggtttcattcaacgaaaaacaaatttaccaaaattttcataaatgcttggatcagaaaccaagaattctttaattgcttttcagacaacaaccttctaaccttggaaactacataatacrtattasatgcattcacgtggacaacatacatcacggctggttcacttcactgcatttggaccggctgtctccccatgtgaaatcaatgcctgatctctcacaaagtctgacgggagcaagatcagttctgctatctgtcacatcagtaactgctacatgcattaaaaattaacaatctattttgaaggactgaagctttattgggttaaaagcaacacttccagtaagaaacatggtttatsttttgctaaatccactgcttcccattaccactaaaatgagatctctctcccatctgcaatata

SEQ ID NO: 28269 - DNA, 600 bp, Chicken  19866894246126_3
gaattctttaattgcttttcagacaacaaccttctaaccttggaaactacataatacrtattasatgcattcacgtggacaacatacatcacggctggttcacttcactgcatttggaccggctgtctccccatgtgaaatcaatgcctgatctctcacaaagtctgacgggagcaagatcagttctgctatctgtcacatcagtaactgctacatgcattaaaaattaacaatctattttgaaggactgaagctttattgggttaaaagcaacacttccagtaagaaacatggtttatsttttgctaaatccactgcttcccattaccactaaaatgagatctctctcccatctgcaatatatcatctaccaagtccctgatccaatgatatactctcagaatttaaagtttagactgatgttttgcttgagataatacaaagctttccattcccatcagtagaaattcatgccctgtcaacacaaaattgactgttaacgtactcaaataatttagttgggagaaaagacaactaatgcaattatccctgaacggtttagatattaatgtctctagagcatactaagtgcccaagaag

SEQ ID NO: 28270 - DNA, 600 bp, Chicken  19866894246127_1
taaagttgactatttaaaaatgctacctttgtatgaaatagatttcagcaatttcttttgtgtatatatgtgtatacacagacttatgcgatacaaacataattcggcaatgagctctactgtttaagcaatagctatctataaaggttcacacttcgtaaaaggctttcatagtcccaaatgtcccattagaccaagcaaaataatcacagcagtgcttaggcaaaagcttttctgaacacatatatccagaaaaaggctgcacaactggaagcttatctgaaatacagagagagaacrggctccaggactctgagtatggctcactaccacccttgaaaatgaattaccactttacaattcatgtatgagttgaaatccagaaatgaagccaaagcatcttctaacttcaaagctgttaacagctggaacaccatgtttggtaagctatttgctgtttactttaataatttttcagttctattaaaataaatacaatgcatccttttaggagcatgtgggcagctggaattttgtgatggaaaatgtatggcataacattttgagtagatagattggcccttccccaagagaaaatta

SEQ ID NO: 28271 - DNA, 599 bp, Chicken  19866894246130_1
  misc_feature (1)..(50): n is any nucleotide
nnnnnnnnnnnnnnnnnnnnnnnnnnnnnnnnnnnnnnnnnnnnnnnnnnggacagggactccaccatctccccggggcagctgtgccagcacatcaccactcttttaaaaataaatttttcccaatatccaacctgaacctcccctggtacaacttgaggccattacctcacgtgctatagacctaacctcccaaatcatgggcctctgctatagggaatctgctgagcctgtcaggatcaataaggctgcttgccttgaagaagtgcaagtagtcttagccccacttcactagaactraaggtggcagacaagcacccaaaatgctcaggatggcctgctgagaagaccacactgcccaacaagaagcgcattttcaccrgttatgcctcaccactggtgcaggatcactgccctcttaacggggacagctgaggcagcgcctgaggcaacagagcagcacttacataagaaccatctattccactcaaagaaagttcatagcacttcccagagccacattccagaggcagtacaaacattccccagacrtggcattttcatctgctccaaggtcctgagtcagcrcttgcaaatat

SEQ ID NO: 28272 - DNA, 600 bp, Chicken  19866894246130_2
tgtgccagcacatcaccactcttttaaaaataaatttttcccaatatccaacctgaacctcccctggtacaacttgaggccattacctcacgtgctatagacctaacctcccaaatcatgggcctctgctatagggaatctgctgagcctgtcaggatcaataaggctgcttgccttgaagaagtgcaagtagtcttagccccacttcactagaactraaggtggcagacaagcacccaaaatgctcaggatggcctgctgagaagaccacactgcccaacaagaagcgcattttcaccrgttatgcctcaccactggtgcaggatcactgccctcttaacggggacagctgaggcagcgcctgaggcaacagagcagcacttacataagaaccatctattccactcaaagaaagttcatagcacttcccagagccacattccagaggcagtacaaacattccccagacrtggcattttcatctgctccaaggtcctgagtcagcrcttgcaaatataccaccttataatgtacagctgagagcacagccattctagatgagtaaggactgaatcttttgcagaaatgttcttttatcca

SEQ ID NO: 28273 - DNA, 600 bp, Chicken  19866894246130_3
ttgccttgaagaagtgcaagtagtcttagccccacttcactagaactraaggtggcagacaagcacccaaaatgctcaggatggcctgctgagaagaccacactgcccaacaagaagcgcattttcaccrgttatgcctcaccactggtgcaggatcactgccctcttaacggggacagctgaggcagcgcctgaggcaacagagcagcacttacataagaaccatctattccactcaaagaaagttcatagcacttcccagagccacattccagaggcagtacaaacattccccagacrtggcattttcatctgctccaaggtcctgagtcagcrcttgcaaatataccaccttataatgtacagctgagagcacagccattctagatgagtaaggactgaatcttttgcagaaatgttcttttatccaagtacgctttgccttccacatgcatatactgaactactgttgggatggtggtactaatttagagacggggcttctgaatacaacgtggtccatgtttgctcaaaaaaaagcagcatgctaatcctggagtacctcactcctacagatatactctcacaatgcattaatga

SEQ ID NO: 28274 - DNA, 600 bp, Chicken  19866894246130_4
tcactagaactraaggtggcagacaagcacccaaaatgctcaggatggcctgctgagaagaccacactgcccaacaagaagcgcattttcaccrgttatgcctcaccactggtgcaggatcactgccctcttaacggggacagctgaggcagcgcctgaggcaacagagcagcacttacataagaaccatctattccactcaaagaaagttcatagcacttcccagagccacattccagaggcagtacaaacattccccagacrtggcattttcatctgctccaaggtcctgagtcagcrcttgcaaatataccaccttataatgtacagctgagagcacagccattctagatgagtaaggactgaatcttttgcagaaatgttcttttatccaagtacgctttgccttccacatgcatatactgaactactgttgggatggtggtactaatttagagacggggcttctgaatacaacgtggtccatgtttgctcaaaaaaaagcagcatgctaatcctggagtacctcactcctacagatatactctcacaatgcattaatgatagtttgaaaacattcctttcccagccttctcacat

SEQ ID NO: 28275 - DNA, 600 bp, Chicken  19866894246130_5
tcctggagtacctcactcctacagatatactctcacaatgcattaatgatagtttgaaaacattcctttcccagccttctcacatcactgcactatccttagagaaacacacacatcacagattagctagtttggagagagcctttagagtgtgtgtgcaaagtgcatggcatccatttagttatgcaagactagattctgagaattcaactcctcttcaaccctctgaccagagagaagcaaacaagagaagtgaagggagggtaggagggatatctacagctgcatgggtttgtgtgycactgcctcaagatttaatcctcaaggatgcagttctggrtcataaagtgactcctcaagtgcagccctttgcttttttgcttgctgtccaggtccagctctgcctctgactatctggagaacaaaatgtctcagtgcaggagagtgtgcartaacacaggaggaaataaaagttatatacacaaataatgcttttgggtatagggayaagcttgcttctgttcttcttcctaagagtatccttcaaaacaaaacaaacaaacaaaaaaaaaggcccatgtaggaaaaagtaagtgggga

SEQ ID NO: 28276 - DNA, 600 bp, Chicken  19866894246130_6
cattaatgatagtttgaaaacattcctttcccagccttctcacatcactgcactatccttagagaaacacacacatcacagattagctagtttggagagagcctttagagtgtgtgtgcaaagtgcatggcatccatttagttatgcaagactagattctgagaattcaactcctcttcaaccctctgaccagagagaagcaaacaagagaagtgaagggagggtaggagggatatctacagctgcatgggtttgtgtgycactgcctcaagatttaatcctcaaggatgcagttctggrtcataaagtgactcctcaagtgcagccctttgcttttttgcttgctgtccaggtccagctctgcctctgactatctggagaacaaaatgtctcagtgcaggagagtgtgcartaacacaggaggaaataaaagttatatacacaaataatgcttttgggtatagggayaagcttgcttctgttcttcttcctaagagtatccttcaaaacaaaacaaacaaacaaaaaaaaaggcccatgtaggaaaaagtaagtggggaacactaatagtttcccttttgtaacttttaagagcatgca

SEQ ID NO: 28277 - DNA, 600 bp, Chicken  19866894246130_7
tgtgtgcaaagtgcatggcatccatttagttatgcaagactagattctgagaattcaactcctcttcaaccctctgaccagagagaagcaaacaagagaagtgaagggagggtaggagggatatctacagctgcatgggtttgtgtgycactgcctcaagatttaatcctcaaggatgcagttctggrtcataaagtgactcctcaagtgcagccctttgcttttttgcttgctgtccaggtccagctctgcctctgactatctggagaacaaaatgtctcagtgcaggagagtgtgcartaacacaggaggaaataaaagttatatacacaaataatgcttttgggtatagggayaagcttgcttctgttcttcttcctaagagtatccttcaaaacaaaacaaacaaacaaaaaaaaaggcccatgtaggaaaaagtaagtggggaacactaatagtttcccttttgtaacttttaagagcatgcaaagaaaatgtgttctggaagggttttcagaggacatttctatctctccatttcagtaattgtcagagttaaaagcttttctctggtggattccagaaggcaataaacaaagc

SEQ ID NO: 28278 - DNA, 600 bp, Chicken  19866894246130_8
aactcctcttcaaccctctgaccagagagaagcaaacaagagaagtgaagggagggtaggagggatatctacagctgcatgggtttgtgtgycactgcctcaagatttaatcctcaaggatgcagttctggrtcataaagtgactcctcaagtgcagccctttgcttttttgcttgctgtccaggtccagctctgcctctgactatctggagaacaaaatgtctcagtgcaggagagtgtgcartaacacaggaggaaataaaagttatatacacaaataatgcttttgggtatagggayaagcttgcttctgttcttcttcctaagagtatccttcaaaacaaaacaaacaaacaaaaaaaaaggcccatgtaggaaaaagtaagtggggaacactaatagtttcccttttgtaacttttaagagcatgcaaagaaaatgtgttctggaagggttttcagaggacatttctatctctccatttcagtaattgtcagagttaaaagcttttctctggtggattccagaaggcaataaacaaagccctgtaagtaaaacaggatggaacaaacagccttactaaagtgagagtgaatatca

SEQ ID NO: 28279 - DNA, 599 bp, Chicken  19866894246133_1
  misc_feature (1)..(17): n is any nucleotide
nnnnnnnnnnnnnnnnnagaaaataaagagaattttaaaaataaaaaaaaacccaccacactacctcagctgctatatctcagtcatcaccaggctttacagaaaatggggggggaagataaacagctgacaatacaatgcttagaggctctttagtcaacataactagaaaaaaaatctacagtcataaaccacctcataactttagtagtgcagagttctaatgacagcattttacatgaggaattttacactctgaatttaaaacttaaacaaatggcatgttcagtgccacgctgsatgtgcctagaatgtactccctaaagaagttctgtatattgaaattactagaaaaataaattttccagaactgctgaaggttggcctgtttttgtctatacaatttggaactcactcatgctatttaaattacttgaattaaagtattagaaattggcttaaccattccctactttaattaacagcggtaattcacttcaktgggatcagagttcagatgtgtaacgtcttctgtgatcccaaacttactttttcatttgatatataattatgtctggattacatcgtctagcagtagt

SEQ ID NO: 28280 - DNA, 600 bp, Chicken  19866894246133_2
actttagtagtgcagagttctaatgacagcattttacatgaggaattttacactctgaatttaaaacttaaacaaatggcatgttcagtgccacgctgsatgtgcctagaatgtactccctaaagaagttctgtatattgaaattactagaaaaataaattttccagaactgctgaaggttggcctgtttttgtctatacaatttggaactcactcatgctatttaaattacttgaattaaagtattagaaattggcttaaccattccctactttaattaacagcggtaattcacttcaktgggatcagagttcagatgtgtaacgtcttctgtgatcccaaacttactttttcatttgatatataattatgtctggattacatcgtctagcagtagtcagtattagcatcactttcagcacttgatttttctttcycccttcattaaactaaaccatgctaatactgttgactggctgcaaagaaacatttattcttcggtgcaaatggaaaaatctcatagataattgttagcctgatgtaaagcagcttgttgaaacatcaacctggaaatgcagcgaacatcccatgaaggattac

SEQ ID NO: 28281 - DNA, 600 bp, Chicken  19866894246133_3
ttgaaattactagaaaaataaattttccagaactgctgaaggttggcctgtttttgtctatacaatttggaactcactcatgctatttaaattacttgaattaaagtattagaaattggcttaaccattccctactttaattaacagcggtaattcacttcaktgggatcagagttcagatgtgtaacgtcttctgtgatcccaaacttactttttcatttgatatataattatgtctggattacatcgtctagcagtagtcagtattagcatcactttcagcacttgatttttctttcycccttcattaaactaaaccatgctaatactgttgactggctgcaaagaaacatttattcttcggtgcaaatggaaaaatctcatagataattgttagcctgatgtaaagcagcttgttgaaacatcaacctggaaatgcagcgaacatcccatgaaggattacttaaaatttacttcaacaaataacgtctaatgatggcttacacagtttaataaaagcaccttaacacctctcaaatttagaacaaaartttactacaaactaacaacagaccacccaacatctttgcctgaaagcct

SEQ ID NO: 28282 - DNA, 486 bp, Chicken  19866894246133_4
tagcagtagtcagtattagcatcactttcagcacttgatttttctttcycccttcattaaactaaaccatgctaatactgttgactggctgcaaagaaacatttattcttcggtgcaaatggaaaaatctcatagataattgttagcctgatgtaaagcagcttgttgaaacatcaacctggaaatgcagcgaacatcccatgaaggattacttaaaatttacttcaacaaataacgtctaatgatggcttacacagtttaataaaagcaccttaacacctctcaaatttagaacaaaartttactacaaactaacaacagaccacccaacatctttgcctgaaagcctcagtaatctcaccttttgagatagtgtacatactctcagtattattaatatttaattgcatttagattattatcttatgttccagcaaaaacctatggcatttaatgaagcaattaaaataacatggagttaaacca

SEQ ID NO: 28283 - DNA, 600 bp, Chicken  19866894246135_1
tcctacacgatggtttcctccagcttactgattcattttcctcagaaaaataatcacagtcatttccagaacctctaatcagttttttcagggcatcctgcgtatccagctgattaattgtttctgagatgaagtaaacaggtcagcaggttgctgcatcaagcagagtgcaagttccatcctggccaaggtccatctctttgctttgtttttttactgtatgatgaacctccttttggtaataagaaaattttaatgcttttttatttccttgttaggaataaggagagaaacatcttrggttgtggatcactgctgtggaactgaaagtgcttggatctccagaggggtgattctcattaatatttaggggtctgatggagacaaatggaccattgttcatgtcaaggataatttggaggtttaagatattggaaagctttcttctagattttacaaggcatctaggaggaaaatgaaagctgttgaagtagatgtagtacctggctaaatgcagttctcaagaaaatgaagatcactgagctatggatacagcggaggttttctgtggattaaaactgaggctggagaaaacaatgc

SEQ ID NO: 28284 - DNA, 600 bp, Chicken  19866894246138_1
tttgttcaacatgtcctagccactttatgaacttcaatcaggattagtttggctatgtgaaaaataaatgttatcatgaaaagaaaaatataagtaatgtttttgttacttgcagtaacacaatttccttagcattggtaggattggggtatggttattgctctttcctcttgaatgtaaaaatgctatcataacagtgacatggttttagcattatactaaagaatatccctgctttcaatatacggcactgttatatgttttttggaggaaaatcttttgcaagaactaatcgttctyatgtgtgacagatctygcttttctagtttaacttgkaataatttaacaaaaatgaaaaagaatcagtaagaatgtggcaaagctgtagccatggggcacttaaaatttacacttggaatgcaaaatacagaaatatgcttataggaacaaaaagtaacagttgaatatttttatttattaaattttaaaattttgcttatacatattttagggtccagcrggattatcaattcttacctattttattattttattttgttgctatgttcttgtccaaatttttcatcagaatgtttctat

SEQ ID NO: 28285 - DNA, 600 bp, Chicken  19866894246138_2
tagccactttatgaacttcaatcaggattagtttggctatgtgaaaaataaatgttatcatgaaaagaaaaatataagtaatgtttttgttacttgcagtaacacaatttccttagcattggtaggattggggtatggttattgctctttcctcttgaatgtaaaaatgctatcataacagtgacatggttttagcattatactaaagaatatccctgctttcaatatacggcactgttatatgttttttggaggaaaatcttttgcaagaactaatcgttctyatgtgtgacagatctygcttttctagtttaacttgkaataatttaacaaaaatgaaaaagaatcagtaagaatgtggcaaagctgtagccatggggcacttaaaatttacacttggaatgcaaaatacagaaatatgcttataggaacaaaaagtaacagttgaatatttttatttattaaattttaaaattttgcttatacatattttagggtccagcrggattatcaattcttacctattttattattttattttgttgctatgttcttgtccaaatttttcatcagaatgtttctatttcaacaggggtaaag

SEQ ID NO: 28286 - DNA, 600 bp, Chicken  19866894246138_3
atcaggattagtttggctatgtgaaaaataaatgttatcatgaaaagaaaaatataagtaatgtttttgttacttgcagtaacacaatttccttagcattggtaggattggggtatggttattgctctttcctcttgaatgtaaaaatgctatcataacagtgacatggttttagcattatactaaagaatatccctgctttcaatatacggcactgttatatgttttttggaggaaaatcttttgcaagaactaatcgttctyatgtgtgacagatctygcttttctagtttaacttgkaataatttaacaaaaatgaaaaagaatcagtaagaatgtggcaaagctgtagccatggggcacttaaaatttacacttggaatgcaaaatacagaaatatgcttataggaacaaaaagtaacagttgaatatttttatttattaaattttaaaattttgcttatacatattttagggtccagcrggattatcaattcttacctattttattattttattttgttgctatgttcttgtccaaatttttcatcagaatgtttctatttcaacaggggtaaagctgagatcttagagcccaaa

SEQ ID NO: 28287 - DNA, 600 bp, Chicken  19866894246138_4
aaagaatatccctgctttcaatatacggcactgttatatgttttttggaggaaaatcttttgcaagaactaatcgttctyatgtgtgacagatctygcttttctagtttaacttgkaataatttaacaaaaatgaaaaagaatcagtaagaatgtggcaaagctgtagccatggggcacttaaaatttacacttggaatgcaaaatacagaaatatgcttataggaacaaaaagtaacagttgaatatttttatttattaaattttaaaattttgcttatacatattttagggtccagcrggattatcaattcttacctattttattattttattttgttgctatgttcttgtccaaatttttcatcagaatgtttctatttcaacaggggtaaagctgagatcttagagcccaaacttagctaaggtttggactagatgataaggatttgtaaatgtatgcaggttcgagatatattagatagaagagtaataagtcctcagaagacagtagtaattttatggaaaattattcagtaaaaatatctgagaaaactgtaggggaaagaagattcaaacaaaaacattgaagagtctgttg

SEQ ID NO: 28288 - DNA, 600 bp, Chicken  19866894246138_5
ttatggaaaattattcagtaaaaatatctgagaaaactgtaggggaaagaagattcaaacaaaaacattgaagagtctgttgtcatggtaggaacccctgttgctatgatgatgagatacaggatggtggtagacactgatgttttgtcagttgagacatttaaagcagtggtattgaaagaattgctctgatgacagactgcattcctgttgtgcagaaagtgttcctgtcctccaagtatgaattagtaactttatttgaaaaatatacctgtagtgaaatagttatatgcataaatyattacttaccraaatagaggaataattactgtcaggattttaacacatgtgacactgctctccattctgttttagctgttttcagctaggggtacaaaacagtataaagctccaaggtttttctgtattagatttagagcaaagttgattaagagatcaaaaaggtttttccaactcagagccattttttaaagrcagatcagtttgtgcctggctcattggtttgctctgtttcatttcccccctcctctactgaactcatcagtctcaggctttctcacattaatgttcttttgtaat

SEQ ID NO: 28289 - DNA, 600 bp, Chicken  19866894246138_6
tattcagtaaaaatatctgagaaaactgtaggggaaagaagattcaaacaaaaacattgaagagtctgttgtcatggtaggaacccctgttgctatgatgatgagatacaggatggtggtagacactgatgttttgtcagttgagacatttaaagcagtggtattgaaagaattgctctgatgacagactgcattcctgttgtgcagaaagtgttcctgtcctccaagtatgaattagtaactttatttgaaaaatatacctgtagtgaaatagttatatgcataaatyattacttaccraaatagaggaataattactgtcaggattttaacacatgtgacactgctctccattctgttttagctgttttcagctaggggtacaaaacagtataaagctccaaggtttttctgtattagatttagagcaaagttgattaagagatcaaaaaggtttttccaactcagagccattttttaaagrcagatcagtttgtgcctggctcattggtttgctctgtttcatttcccccctcctctactgaactcatcagtctcaggctttctcacattaatgttcttttgtaatagaaatgatgg

SEQ ID NO: 28290 - DNA, 600 bp, Chicken  19866894246138_7
cagactgcattcctgttgtgcagaaagtgttcctgtcctccaagtatgaattagtaactttatttgaaaaatatacctgtagtgaaatagttatatgcataaatyattacttaccraaatagaggaataattactgtcaggattttaacacatgtgacactgctctccattctgttttagctgttttcagctaggggtacaaaacagtataaagctccaaggtttttctgtattagatttagagcaaagttgattaagagatcaaaaaggtttttccaactcagagccattttttaaagrcagatcagtttgtgcctggctcattggtttgctctgtttcatttcccccctcctctactgaactcatcagtctcaggctttctcacattaatgttcttttgtaatagaaatgatggctgattcaaggtcagaattttarggcccagtagctttatttaaagatatacaagcaacaccgggtgttctctatggaagcaactttccaatggaagccccactgtgcatagatgaaatgttgtcactgtgctttgtgctttctaccaaaatcacagcatctctctctaccagcaaaaaaaaaac

SEQ ID NO: 28291 - DNA, 563 bp, Chicken  19866894246138_8
ggattttaacacatgtgacactgctctccattctgttttagctgttttcagctaggggtacaaaacagtataaagctccaaggtttttctgtattagatttagagcaaagttgattaagagatcaaaaaggtttttccaactcagagccattttttaaagrcagatcagtttgtgcctggctcattggtttgctctgtttcatttcccccctcctctactgaactcatcagtctcaggctttctcacattaatgttcttttgtaatagaaatgatggctgattcaaggtcagaattttarggcccagtagctttatttaaagatatacaagcaacaccgggtgttctctatggaagcaactttccaatggaagccccactgtgcatagatgaaatgttgtcactgtgctttgtgctttctaccaaaatcacagcatctctctctaccagcaaaaaaaaaacccaaacaaacgaacaaaaaaaacacatcagcagtagtcttgtgtgatccactgtgtaaatttaatctgcagtattcatatagcactcatatgtttgtgtaaa

SEQ ID NO: 28292 - DNA, 600 bp, Chicken  19866894246140_1
tttactagacaagcccacatccaattgcctgaattcatgcctttcttctttggctgagtgcaaatacccgaaagccactgctcctctctctctctctcccctacactccaccaacttcaaccctccattaatttcaaagcattgatgtcactcaaagactaaagaactacttccacagtgcatctacttttacgggtattggatgtgaccaaactaagccaaaactacctctcaaatagaagaaatacgtacccaagactgactactccacaaagatcacagttatagacataaaaggcmtgtgtaaatacaaggaaattaaaacctcacacctaatgttctcagctgtttggagcacactgtcatactgcatgagcaatgagccaagtggaaacatgttaacatacgcatacatccttccttgcttgcatccacactgtcacaaccaaagtaagattatcagatcaaaacaaaattaggctgcagtacacacgcagatgaatatcaatattactgcacagccaaataaaacagaagaatataaacctcttttgaaagactgaaaatactgcagtatacagaatgggttttagcattagt

SEQ ID NO: 28293 - DNA, 599 bp, Chicken  19866894246142_1
  misc_feature (1)..(10): n is any nucleotide
nnnnnnnnnnccagcatgaggtaggaggctgtgtagccagcagtaaagagagaaggacaaaaaactgaagaaatagctggatcctccccccttttcagcatcaatgaactctcccacatcccatggaatcgtatcttctgatgtagtatttaaaagatcagattttgggcaaacctttgggtaaagaagacagaagagaaactgcaaggaacaaggtagctgctcttagtatcttctacccaaaatttgaaaggaggtacagctgaggcaaggcatagtggagtctttttctcatttttrttggcttgctgtgtatagtttgggtgagcagatgtgtttagataatactctgttttcatgaagaagctgtttccaaatcactcaaatcagcagttgatcccagagaaagagaagaatggcaaagccaaatgcagttgggtcattcatattctatgggtgaaaaatggttctgcaacacgggaacaccttctgattggtagggctgtacacttctagctacaarggagttaaaagcagactcctgtcacagaatcatagctattaattactttatctttgaaggggaaacaaatacactt

SEQ ID NO: 28294 - DNA, 600 bp, Chicken  19866894246142_2
caaaaaactgaagaaatagctggatcctccccccttttcagcatcaatgaactctcccacatcccatggaatcgtatcttctgatgtagtatttaaaagatcagattttgggcaaacctttgggtaaagaagacagaagagaaactgcaaggaacaaggtagctgctcttagtatcttctacccaaaatttgaaaggaggtacagctgaggcaaggcatagtggagtctttttctcatttttrttggcttgctgtgtatagtttgggtgagcagatgtgtttagataatactctgttttratgaagaagctgtttccaaatcactcaaatcagcagttgatcccagagaaagagaagaatggcaaagccaaatgcagttgggtcattcatattctatgggtgaaaaatggttctgcaacacgggaacaccttctgattggtagggctgtacacttctagctacaarggagttaaaagcagactcctgtcacagaatcatagctattaattactttatctttgaaggggaaacaaatacacttatttatgtcttcattttcatggtccaatggatccacagagggagttccacagtgaaag

SEQ ID NO: 28295 - DNA, 600 bp, Chicken  19866894246142_3
aaaaaactgaagaaatagctggatcctccccccttttcagcatcaatgaactctcccacatcccatggaatcgtatcttctgatgtagtatttaaaagatcagattttgggcaaacctttgggtaaagaagacagaagagaaactgcaaggaacaaggtagctgctcttagtatcttctacccaaaatttgaaaggaggtacagctgaggcaaggcatagtggagtctttttctcatttttrttggcttgctgtgtatagtttgggtgagcagatgtgtttagataatactctgttttcrtgaagaagctgtttccaaatcactcaaatcagcagttgatcccagagaaagagaagaatggcaaagccaaatgcagttgggtcattcatattctatgggtgaaaaatggttctgcaacacgggaacaccttctgattggtagggctgtacacttctagctacaarggagttaaaagcagactcctgtcacagaatcatagctattaattactttatctttgaaggggaaacaaatacacttatttatgtcttcattttcatggtccaatggatccacagagggagttccacagtgaaagt

SEQ ID NO: 28296 - DNA, 600 bp, Chicken  19866894246142_4; identical to SEQ ID NO: 28295

SEQ ID NO: 28297 - DNA, 600 bp, Chicken  19866894246142_5
tcttagtatcttctacccaaaatttgaaaggaggtacagctgaggcaaggcatagtggagtctttttctcatttttrttggcttgctgtgtatagtttgggtgagcagatgtgtttagataatactctgttttcatgaagaagctgtttccaaatcactcaaatcagcagttgatcccagagaaagagaagaatggcaaagccaaatgcagttgggtcattcatattctatgggtgaaaaatggttctgcaacacgggaacaccttctgattggtagggctgtacacttctagctacaarggagttaaaagcagactcctgtcacagaatcatagctattaattactttatctttgaaggggaaacaaatacacttatttatgtcttcattttcatggtccaatggatccacagagggagttccacagtgaaagtcttcagcaagtggtcagagcaaagatgtgcccaaatgctacagtcctgaaactatgggggcactgatctgtgggacattaccatcactccttcaagttctctattttctatgtcacttcttccattttagagatgcttttatgctgagcaaaatttctgaacgca

SEQ ID NO: 28298 - DNA, 600 bp, Chicken  19866894246143_1
agtgaagaattgcacaaagcagactaatctgttaaagtttttggagaaaaaatgtctttttgtgttaaattacacggcttgattgtatgcaggtcactctgaatgtaatgcctcctatctatttctatagaaactacaacagatacaaagagcacgataacaccatttgatagagcaaattctcagctaaaaaacactacttttcaacacagtcaccaccatttgctgtgccttttagccagtgataaacaagagcctgcatgccacgcttgtggaaacctgcaccagtgcaggtgaccyactgtcaccactgctggaatgcaccgcccaccacctcactgagctcacatccactgtttggtctatagctyagcaagcatcgatgaatgtcagtggctgctattcttttgcatggaggaattcattgtcacgcctttccttcacrcgcacttccatgtcaggtgccatttgtctgactgctgctgtctgtggcaacaaaattattctggcaacagaattttggcaggaaggttcaacctctactgccgtagcactgatgtccaccctctgatgtcgtgggccaacatcataaaataggag

SEQ ID NO: 28299 - DNA, 600 bp, Chicken  19866894246143_2
acacggcttgattgtatgcaggtcactctgaatgtaatgcctcctatctatttctatagaaactacaacagatacaaagagcacgataacaccatttgatagagcaaattctcagctaaaaaacactacttttcaacacagtcaccaccatttgctgtgccttttagccagtgataaacaagagcctgcatgccacgcttgtggaaacctgcaccagtgcaggtgaccyactgtcaccactgctggaatgcaccgcccaccacctcactgagctcacatccactgtttggtctatagctyagcaagcatcgatgaatgtcagtggctgctattcttttgcatggaggaattcattgtcacgcctttccttcacrcgcacttccatgtcaggtgccatttgtctgactgctgctgtctgtggcaacaaaattattctggcaacagaattttggcaggaaggttcaacctctactgccgtagcactgatgtccaccctctgatgtcgtgggccaacatcataaaataggaggcattacttttggagcagccttcatatatgaatgatttccgctgtacatagtttatgtaccttgccaaatt

SEQ ID NO: 28300 - DNA, 600 bp, Chicken  19866894246143_3
caaagagcacgataacaccatttgatagagcaaattctcagctaaaaaacactacttttcaacacagtcaccaccatttgctgtgccttttagccagtgataaacaagagcctgcatgccacgcttgtggaaacctgcaccagtgcaggtgaccyactgtcaccactgctggaatgcaccgcccaccacctcactgagctcacatccactgtttggtctatagctyagcaagcatcgatgaatgtcagtggctgctattcttttgcatggaggaattcattgtcacgcctttccttcacrcgcacttccatgtcaggtgccatttgtctgactgctgctgtctgtggcaacaaaattattctggcaacagaattttggcaggaaggttcaacctctactgccgtagcactgatgtccaccctctgatgtcgtgggccaacatcataaaataggaggcattacttttggagcagccttcatatatgaatgatttccgctgtacatagtttatgtaccttgccaaattaagctcgggtgcttttttgttctttgttccattccttttattcttctgtatatttttccagtgcgataagggaa

SEQ ID NO: 28301 - DNA, 599 bp, Chicken  19866894246144_1
  misc_feature (1)..(244): n is any nucleotide
nnnnnnnnnnnnnnnnnnnnnnnnnnnnnnnnnnnnnnnnnnnnnnnnnnnnnnnnnnnnnnnnnnnnnnnnnnnnnnnnnnnnnnnnnnnnnnnnnnnnnnnnnnnnnnnnnnnnnnnnnnnnnnnnnnnnnnnnnnnnnnnnnnnnnnnnnnnnnnnnnnnnnnnnnnnnnnnnnnnnnnnnnnnnnnnnnnnnnnnnnnnnnnnnnnnnnnnnnnnnnnnnnnnnnnnnnnnnnnnnnnnnctttcaccccagcatatgtagctctgtttccaagacattccccgaactctatctcrtatgtcctttttgctgttagttcatcttttcctttttcttctctttcactttcctttttgtcttgtcacatttattctattcacattctgggccaacttctctgatgctctctgcattccctcatttttttcttgggcttatgtggacagacctgtcacatcgttaaatatttattgaactgctgtctactgggaccaagctggtaatttacagtgtgcaagaatgcttgctgcaattatttatctgaaatgaaagaacccagaaatgagcctctctaaaaagttttctttaatttggg

SEQ ID NO: 28302 - DNA, 398 bp, Chicken  19866894246144_2
agaaatgagcctctctaaaaagttttctttaatttgggtcatttcaacatgttcacagcgcagccccacgagcaagacagaatgggacagggggtggatatagtagggtagagtgagggcctctagaagctttcaggtgggaaaactccttaggaaaggagcatcaatgtctgcaactgacttggccgtgcaagcaggtagcatcagtgcctttcatgcctgctgcagtgcttaattaacataatgacagggcaaattctgctgtgtcgccgtgatgtcaatgccttttagtccaagccrgctcactggtgtgagttacagtcaaagaaatccagaaaaccatgaatcagcagcatcccatccttctaaccacgaggctggtcaaaagaaaggtacca

SEQ ID NO: 28303 - DNA, 600 bp, Chicken  19866894246146_1
ttcccaaggcaacttgctcagccctgttgcatctgagcactccatagagcagctctggcacagcgaggagagtcccgctgggcgcgcatgggctgggctgccgttgctgtgggaaccacaacactgtgctctgagtcccagccattatgctgtgttttacatttaacagatttctcatctcacagctatgcctgaactaatgtggtttgctggtggctatctcacactgacaaagttcagctccgttcggctgagcggtttgcaggctgtgtgcggtggcagagcacatcccagtcccartgcacctcccagacactcaggtctcagattctacccaccccactktgagctccggacctcagggcagggaggtgctggcacagcttcccagagaagccctggatggaatgccccatccctggaggcattcaaggccaggttggatggggccctgggcagcctgatgtggtggggggcaaccggttcacggcagggattgaaactgtgcaatcttcaaggtcccatccaacccaagccattctgtgatcccatgatcttggtacccagagccacctaacagtacatacccagagacatctg

SEQ ID NO: 28304 - DNA, 600 bp, Chicken  19866894246146_2
agagcagctctggcacagcgaggagagtcccgctgggcgcgcatgggctgggctgccgttgctgtgggaaccacaacactgtgctctgagtcccagccattatgctgtgttttacatttaacagatttctcatctcacagctatgcctgaactaatgtggtttgctggtggctatctcacactgacaaagttcagctccgttcggctgagcggtttgcaggctgtgtgcggtggcagagcacatcccagtcccartgcacctcccagacactcaggtctcagattctacccaccccactktgagctccggacctcagggcagggaggtgctggcacagcttcccagagaagccctggatggaatgccccatccctggaggcattcaaggccaggttggatggggccctgggcagcctgatgtggtggggggcaaccggttcacggcagggattgaaactgtgcaatcttcaaggtcccatccaacccaagccattctgtgatcccatgatcttggtacccagagccacctaacagtacatacccagagacatctgtctggcaaggttcactgtgagacaaggttcacactctaccccaaa

SEQ ID NO: 28305 - DNA, 599 bp, Chicken  19866894246148_1
  misc_feature (1)..(60): n is any nucleotide
nnnnnnnnnnnnnnnnnnnnnnnnnnnnnnnnnnnnnnnnnnnnnnnnnnnnnnnnnnnnaaacgcaaatcttgttgacctgaatacatctgagtgtgccatacttctttactcaccaagcagctaacgacatgctaaaacagagtacaatgcaatgaatccctgctgctgctaacacatggtttcagtgagtgttcaggatggagggagaacaaactccttaaaacacctctggactgttcactgggcacacaaccactcctccagtatttgctgccagggcctcgcctccttcccagygctgcctcccagggctggcasgctcagcttggmcagatgcagccacacaggtgcccagtgccaaggtcaccaccagcacaagcgagcactccatgctctctgcttcaacattccatcctggatcacccggagcaagacagggaacgcctcacaaaggctgagtgagccagggagcaaacattcagctcttccacagtactgcaaatgtgcaccaagcctgccagctgtaaggaaaacagtaattgggctttcacaagccctaacagatctgaaattaaggtaaaagaaatgtagtattt

SEQ ID NO: 28306 - DNA, 599 bp, Chicken  19866894246148_2
  misc_feature (1)..(39): n is any nucleotide
nnnnnnnnnnnnnnnnnnnnnnnnnnnnnnnnnnnnnnnaaacgcaaatcttgttgacctgaatacatctgagtgtgccatacttctttactcaccaagcagctaacgacatgctaaaacagagtacaatgcaatgaatccctgctgctgctaacacatggtttcagtgagtgttcaggatggagggagaacaaactccttaaaacacctctggactgttcactgggcacacaaccactcctccagtatttgctgccagggcctcgcctccttcccagygctgcctcccagggctggcasgctcagcttggmcagatgcagccacacaggtgcccagtgccaaggtcaccaccagcacaagcgagcactccatgctctctgcttcaacattccatcctggatcacccggagcaagacagggaacgcctcacaaaggctgagtgagccagggagcaaacattcagctcttccacagtactgcaaatgtgcaccaagcctgccagctgtaaggaaaacagtaattgggctttcacaagccctaacagatctgaaattaaggtaaaagaaatgtagtattttagatttaaatagaaaaggtg

SEQ ID NO: 28307 - DNA, 599 bp, Chicken  19866894246148_3
  misc_feature (1)..(27): n is any nucleotide
nnnnnnnnnnnnnnnnnnnnnnnnnnnaaacgcaaatcttgttgacctgaatacatctgagtgtgccatacttctttactcaccaagcagctaacgacatgctaaaacagagtacaatgcaatgaatccctgctgctgctaacacatggtttcagtgagtgttcaggatggagggagaacaaactccttaaaacacctctggactgttcactgggcacacaaccactcctccagtatttgctgccagggcctcgcctccttcccagygctgcctcccagggctggcasgctcagcttggmcagatgcagccacacaggtgcccagtgccaaggtcaccaccagcacaagcgagcactccatgctctctgcttcaacattccatcctggatcacccggagcaagacagggaacgcctcacaaaggctgagtgagccagggagcaaacattcagctcttccacagtactgcaaatgtgcaccaagcctgccagctgtaaggaaaacagtaattgggctttcacaagccctaacagatctgaaattaaggtaaaagaaatgtagtattttagatttaaatagaaaaggtgcacaccaaatac

SEQ ID NO: 28308 - DNA, 523 bp, Chicken  19866894246149_1
gctcagaacatttggatttgcaaatccaaacaatgatgatgtagcctactcagtgctgcctatacaattttatccctcatctcactctattttctctttgggcctcaacagcctctagtttttcccaaacaggcaacagaaaatcttgaaaacattatccaagtgcatagaaacattccaaaactgtctggcaactaaagaaggaaggaaaacttctgttgttaaaatccctccatttttaatgccatctcctgactttttaatgcttctgcccgtgagctttgagccggtagcccagargaggagaaccaaacagatgaagggcaggaggttcaagggtcagcttactgaaagcatgactgctgctcctcgccagctctgttagcatgggcttcagctaaggtaatcgctggagctacactgaagccccagaactaagctatttacatcaggtaaaatccagccatagctgcttacatgcctgtccacaatgttacgggtccctcagctcaccctgtctgag

SEQ ID NO: 28309 - DNA, 599 bp, Chicken  19866894246150_1
  misc_feature (1)..(230): n is any nucleotide
nnnnnnnnnnnnnnnnnnnnnnnnnnnnnnnnnnnnnnnnnnnnnnnnnnnnnnnnnnnnnnnnnnnnnnnnnnnnnnnnnnnnnnnnnnnnnnnnnnnnnnnnnnnnnnnnnnnnnnnnnnnnnnnnnnnnnnnnnnnnnnnnnnnnnnnnnnnnnnnnnnnnnnnnnnnnnnnnnnnnnnnnnnnnnnnnnnnnnnnnnnnnnnnnnnnnnnnnnnnnnnnnnnnnnncctaagaactgttacaggcaaaaatgagaaccataagcagcactattagtcaggaattatgctttctgtrttattattttcaaaactgtaagccaaagtgcagtgttttcttcattcagttaggcaaactaatgctgaatggaaggcagagctcagaccctgctggcagactgtcccagcagcaagagctgcagagctgctgctgcctgccaggtgtgactgggctccgggattagcagggctgccagctgcacaattcagctctaattggggtttggcttctggctcctcaggcacacctggaagcaataaactctgggtggagtcagctctcctgagcttctggtcctttctgctgtggaagtttga

SEQ ID NO: 28310 - DNA, 600 bp, Chicken  19866894246154_1
acaccaatacattataatgtgcaaagggccacgtttaataaaagatgggccaaagcctgatttgtatgaaaacaatcatggaaataaatggatgctagcagtttttcacttaaccttgctccaggcctgcccatgtacttacagtggcatggtaactttattttatttcttttatagatgtcacttatagcagcttttagctcattgttactccttttggagtgaaaaaagagatgcatctaacctcataaacctctgccccgtaaggccctttcctataggaagacatctgcctcattytgaagtaacaaaaccacagaatggatgataggcaagagaattaacaattccagctccgggaataatgaaaggaaattaattgggccactcagtcataaaatttgacrttrgcaaacttggccaaacccatttctgtgttctggacccrcttcatcttactgctttttgagaatccaggaaaggatctacaaaccatggcagcaccacaggactgtggaacatcctgacatgatcttcctcaaaaacatgaaatagcagaaccaatctctgaagctttctgtgagcagtagaatgtttgat

SEQ ID NO: 28311 - DNA, 600 bp, Chicken  19866894246154_2
acttaaccttgctccaggcctgcccatgtacttacagtggcatggtaactttattttatttcttttatagatgtcacttatagcagcttttagctcattgttactccttttggagtgaaaaaagagatgcatctaacctcataaacctctgccccgtaaggccctttcctataggaagacatctgcctcattytgaagtaacaaaaccacagaatggatgataggcaagagaattaacaattccagctccgggaataatgaaaggaaattaattgggccactcagtcataaaatttgacrttrgcaaacttggccaaacccatttctgtgttctggacccrcttcatcttactgctttttgagaatccaggaaaggatctacaaaccatggcagcaccacaggactgtggaacatcctgacatgatcttcctcaaaaacatgaaatagcagaaccaatctctgaagctttctgtgagcagtagaatgtttgatttgagagaaacggggtgaaattaaatatcaaatgtaataagaatattttctttgtgtttcttatgacatttctttagttaattgtatcatgmatctattcaatatgt

SEQ ID NO: 28312 - DNA, 600 bp, Chicken  19866894246154_3
taaccttgctccaggcctgcccatgtacttacagtggcatggtaactttattttatttcttttatagatgtcacttatagcagcttttagctcattgttactccttttggagtgaaaaaagagatgcatctaacctcataaacctctgccccgtaaggccctttcctataggaagacatctgcctcattytgaagtaacaaaaccacagaatggatgataggcaagagaattaacaattccagctccgggaataatgaaaggaaattaattgggccactcagtcataaaatttgacrttrgcaaacttggccaaacccatttctgtgttctggacccrcttcatcttactgctttttgagaatccaggaaaggatctacaaaccatggcagcaccacaggactgtggaacatcctgacatgatcttcctcaaaaacatgaaatagcagaaccaatctctgaagctttctgtgagcagtagaatgtttgatttgagagaaacggggtgaaattaaatatcaaatgtaataagaatattttctttgtgtttcttatgacatttctttagttaattgtatcatgmatctattcaatatgtgaa

SEQ ID NO: 28313 - DNA, 600 bp, Chicken  19866894246154_4
atggtaactttattttatttcttttatagatgtcacttatagcagcttttagctcattgttactccttttggagtgaaaaaagagatgcatctaacctcataaacctctgccccgtaaggccctttcctataggaagacatctgcctcattytgaagtaacaaaaccacagaatggatgataggcaagagaattaacaattccagctccgggaataatgaaaggaaattaattgggccactcagtcataaaatttgacrttrgcaaacttggccaaacccatttctgtgttctggacccrcttcatcttactgctttttgagaatccaggaaaggatctacaaaccatggcagcaccacaggactgtggaacatcctgacatgatcttcctcaaaaacatgaaatagcagaaccaatctctgaagctttctgtgagcagtagaatgtttgatttgagagaaacggggtgaaattaaatatcaaatgtaataagaatattttctttgtgtttcttatgacatttctttagttaattgtatcatgmatctattcaatatgtgaaatgtgatgctaaaaatattccacttttaaaattaataa

SEQ ID NO: 28314 - DNA, 600 bp, Chicken  19866894246154_5
tcataaaatttgacrttrgcaaacttggccaaacccatttctgtgttctggacccrcttcatcttactgctttttgagaatccaggaaaggatctacaaaccatggcagcaccacaggactgtggaacatcctgacatgatcttcctcaaaaacatgaaatagcagaaccaatctctgaagctttctgtgagcagtagaatgtttgatttgagagaaacggggtgaaattaaatatcaaatgtaataagaatattttctttgtgtttcttatgacatttctttagttaattgtatcatgmatctattcaatatgtgaaatgtgatgctaaaaatattccacttttaaaattaataaaaacatgcaggaaaactagatgtgttatgaataatactaacagtgttagaaagaatgacgactatggagccaatggatctactcccacaagtaaaaattagcaggcatgaataagaattgctggatgacaaccatagtactttacatctttgaaacacttcacacactttcaccaaagaaaaggagagatgcaggacctgatcctgtgctgttacaacaaaaggacctttgccaatgacttcag

SEQ ID NO: 28315 - DNA, 600 bp, Chicken  19866894246154_6
agtacagctagacagctaagaagggcaggatctgccctgaggtctcagcttgcagtttgtcctcttcctgctgtagcatctttcagttgggcggacagtctgctggtgtgttcacctcaggatagcatttgctatgtaagacaacgacttgatgccaacagtgcgctcgctttttgcccacgcctgcacatgggtaagtcccactgatgttgctgatgcttgtttgtgaaaaggccaagtaaagcactgtcaacatttcggtctgaactaatggctgtatttatgagagcagatcaaatytgattgaagtctttccacagacattacagggctttgggttgggccctaacaaagaacagatttttaaacttattaccacactgcaacaatgttctacattattttcttattgttgcataatagttgattttggaaacttactttgctgcctatattaaaataagagaactggaaaattgtggttttttgaacaagtccgataaaaaatgggtgatatattgtaactttctggatgagaaaatattctaccaaaaaaacagaacattagacagtcacagaagatttgtcaagaagcaaagc

SEQ ID NO: 28316 - DNA, 578 bp, Chicken  19866894246161_1
agtcagtaggtgtcttatatatgctgtatcatgtataagagcttatggtatgaagatggtatagcactagatgagagacaaatagtatgtattgttgtgtgatctgaagccacctctggagagctctgcagagaaggacctgggtgtcctggtggccaacaggttggccatgagccatgtggtgtgccatgtggccaagaagaccaatggtgttctggggtgcattgcacagattgtggccagcagggcaagggaggtgatcctccccctgtggtctgccctggggaggccacacgtggwgcactgtgtgccattctggggtcctcagttcaagaacgacagggaactgctggagagagtccaggggaggggtgcaaagatgatgaagggcctggagcatcccctggatgagggaaggctgacagacctggggctgttcagcctggagaagactgagaggaggtcttactccttactccttactgatgcttgtgaatttctaaagggctggaatcaagtggatggggccaggctcctttcagcagtgctcagcaacagaataaggggtaaaaggcgca

SEQ ID NO: 28317 - DNA, 600 bp, Chicken  19866894246163_1
tcatactcatttaaatagcaattacactttgtgtagttcggcttactttctgtatcagcagttgattaagtattttggaatgaaactcttgtgtatctgtaacgtaaatagagcatcattaggggtatttagctgatgtgctgtttgaccaacccttaaggtatacttagtgcagtatttcaataagttgttgtctttacgtttctcagcaagaattcctcactgcattccttccccttagaacagtcagagctgaaattaaatattttgaattctctcatcttatctgtgctttccacrttgaccttcgttttaggctgattgtaagaggcgttcacttggagaaaatacagtcaacagagcaacaacagaaaaatctgtctgtcagttgggartaatgctgtgtgtttggcaggctcctgtacagtaacttcaattgctcgtttcttgtgcagctttttggaaagacttttgaaggttctgattttttggactcacatctgaccattgtaggtttccaaactgctgcggtgttcctgtttgagtggtcacacgtggaaagcccggcactgagctgtcagtgagcacgttctttgtaag

SEQ ID NO: 28318 - DNA, 600 bp, Chicken  19866894246163_2
tctgtaacgtaaatagagcatcattaggggtatttagctgatgtgctgtttgaccaacccttaaggtatacttagtgcagtatttcaataagttgttgtctttacgtttctcagcaagaattcctcactgcattccttccccttagaacagtcagagctgaaattaaatattttgaattctctcatcttatctgtgctttccacrttgaccttcgttttaggctgattgtaagaggcgttcacttggagaaaatacagtcaacagagcaacaacagaaaaatctgtctgtcagttgggartaatgctgtgtgtttggcaggctcctgtacagtaacttcaattgctcgtttcttgtgcagctttttggaaagacttttgaaggttctgattttttggactcacatctgaccattgtaggtttccaaactgctgcggtgttcctgtttgagtggtcacacgtggaaagcccggcactgagctgtcagtgagcacgttctttgtaagtgctgttctgctggtaactggttacacgctttcacatagcaaacagacctcattcctttaccttcctcatttttgggccacaaacgttgcagcgt

SEQ ID NO: 28319 - DNA, 600 bp, Chicken  19866894246168_1
atagctgtcgttgatagccatgagataggtgcatgcagctctaagataggtgtatgcaatgagttgtattttagatttgattatatttaggcaatgtacccccagcaagatgctatttcaagtcataattgcgacatgccatggttcctttttaatgccttgcagcaacaatagataaactgtgcctctgggaagcaagtaagatgcaataacaatcccagcattattgaatgctatacttttggacaagagaaaatgtacagccatccatattctacactaaattgtatcatttaaaayggataaatgggagaaaatggatctgaaacctctggtacgggactgacagaggcttaaaacagttattagctaatcagaaagaaagctgagcagctaaatgtgggtggcagcccctcagtggccyggtgcccctcccagccgggctgggtgcttgtcacccatgaatatctttgaagtatttggcagcggtgagctaatgggactggctgagtgagaagcattcaaagggcagaactaaatggcacaattccaaagcagcaattaaaaggggtaatgcttgcaaaagaacaataaaagagg

SEQ ID NO: 28320 - DNA, 600 bp, Chicken  19866894246168_2
ataattgcgacatgccatggttcctttttaatgccttgcagcaacaatagataaactgtgcctctgggaagcaagtaagatgcaataacaatcccagcattattgaatgctatacttttggacaagagaaaatgtacagccatccatattctacactaaattgtatcatttaaaayggataaatgggagaaaatggatctgaaacctctggtacgggactgacagaggcttaaaacagttattagctaatcagaaagaaagctgagcagctaaatgtgggtggcagcccctcagtggccyggtgcccctcccagccgggctgggtgcttgtcacccatgaatatctttgaagtatttggcagcggtgagctaatgggactggctgagtgagaagcattcaaagggcagaactaaatggcacaattccaaagcagcaattaaaaggggtaatgcttgcaaaagaacaataaaagaggttaattygtatcggtgcctggatatctgtacaggaaatcctgtgattccgtattgcacatccccattgtccaccgcttggtgttatggcagtgtataacacagcactcctttacgtgccacggc

SEQ ID NO: 28321 - DNA, 430 bp, Chicken  19866894246168_3
tgggagaaaatggatctgaaacctctggtacgggactgacagaggcttaaaacagttattagctaatcagaaagaaagctgagcagctaaatgtgggtggcagcccctcagtggccyggtgcccctcccagccgggctgggtgcttgtcacccatgaatatctttgaagtatttggcagcggtgagctaatgggactggctgagtgagaagcattcaaagggcagaactaaatggcacaattccaaagcagcaattaaaaggggtaatgcttgcaaaagaacaataaaagaggttaattygtatcggtgcctggatatctgtacaggaaatcctgtgattccgtattgcacatccccattgtccaccgcttggtgttatggcagtgtataacacagcactcctttacgtgccacggctgaaaaaaagcag

SEQ ID NO: 28322 - DNA, 600 bp, Chicken  19866894246172_1
tttttaggagagagaggttatccatgataggtgacccagaagcacaagggcaacttgcttgttcattcttccctgcttgtggaccattatacaagccaaaatcaagctgagtttccatacttgtgtctctacaaaatttcatactcttccactgtgtgcatttttttctatagatgtatgatatctatgaatattactttcctgtgcctgtatttcacagactcacctacaaaaagaatttgtctgtaaggccagaaacccaaacttcaactattaaccagtgctctgctgagcctgctytgtcagaagtccccatgctgtacagctgagcatttcccagccgctgaatagagcttattccacagggccacttcgccgtgaacacagaggaaactccattagccaacayggaaaaatgctcatttccagcagacwtatgacagctagcatcgcaccccagtccatctgtcccaggcgtgggtagctgctgttccttattgcctaaccagcaccaatctgcatcgatccaaagtagtacactggtactgcagtgctggcaatcaaactcgctccatccaggaggccacagggctttggtac

SEQ ID NO: 28323 - DNA, 497 bp, Chicken  19866894246172_2
agtttccatacttgtgtctctacaaaatttcatactcttccactgtgtgcatttttttctatagatgtatgatatctatgaatattactttcctgtgcctgtatttcacagactcacctacaaaaagaatttgtctgtaaggccagaaacccaaacttcaactattaaccagtgctctgctgagcctgctytgtcagaagtccccatgctgtacagctgagcatttcccagccgctgaatagagcttattccacagggccacttcgccgtgaacacagaggaaactccattagccaacayggaaaaatgctcatttccagcagacwtatgacagctagcatcgcaccccagtccatctgtcccaggcgtgggtagctgctgttccttattgcctaaccagcaccaatctgcatcgatccaaagtagtacactggtactgcagtgctggcaatcaaactcgctccatccaggaggccacagggctttggtacggagca

SEQ ID NO: 28324 - DNA, 471 bp, Chicken  19866894246172_3
atttcatactcttccactgtgtgcatttttttctatagatgtatgatatctatgaatattactttcctgtgcctgtatttcacagactcacctacaaaaagaatttgtctgtaaggccagaaacccaaacttcaactattaaccagtgctctgctgagcctgctytgtcagaagtccccatgctgtacagctgagcatttcccagccgctgaatagagcttattccacagggccacttcgccgtgaacacagaggaaactccattagccaacayggaaaaatgctcatttccagcagacwtatgacagctagcatcgcaccccagtccatctgtcccaggcgtgggtagctgctgttccttattgcctaaccagcaccaatctgcatcgatccaaagtagtacactggtactgcagtgctggcaatcaaactcgctccatccaggaggccacagggctttggtacggagca

SEQ ID NO: 28325 - DNA, 600 bp, Chicken  19866894246174_1
tttattcaagggaagcacaggtgcaaatgtgaaatgagacactgcaaaggtattagacagctgaacagattgtaagtgctctggacaatcttgagattacagcccttgtgagctttgcttctctgccgggtaaattggattaaataattatgaataggtatgaaacacctaagtggccatactatggtagaaaaaaaaaacacatttttttccattatagaaaatgcaagattttccacaaaaatgaattaaaaaaaaatgtttctgaagaagttatctgtaggaacctgtgaaaaaagstatttgtcatggaggaagagaaagttattgcagaaacatagcragacagataaggaaatatcacacaaggaggctgtttttaactgggcagagaacactgggctggtcctgaggctaagtaccagtattcagtgattaaaataattcagartctgtaaaagaacaagcagtaaggtgagaacatttgaaatatgacaaaattatttgggctacttaacacaggaagagactgatgagctctactgaggcaactaagctaggtcacctagcatcagatgaaagtggtgctgggtatcacat

SEQ ID NO: 28326 - DNA, 600 bp, Chicken  19866894246174_2
gcaaaggtattagacagctgaacagattgtaagtgctctggacaatcttgagattacagcccttgtgagctttgcttctctgccgggtaaattggattaaataattatgaataggtatgaaacacctaagtggccatactatggtagaaaaaaaaaacacatttttttccattatagaaaatgcaagattttccacaaaaatgaattaaaaaaaaatgtttctgaagaagttatctgtaggaacctgtgaaaaaagstatttgtcatggaggaagagaaagttattgcagaaacatagcragacagataaggaaatatcacacaaggaggctgtttttaactgggcagagaacactgggctggtcctgaggctaagtaccagtattcagtgattaaaataattcagartctgtaaaagaacaagcagtaaggtgagaacatttgaaatatgacaaaattatttgggctacttaacacaggaagagactgatgagctctactgaggcaactaagctaggtcacctagcatcagatgaaagtggtgctgggtatcacattttggaagaattgcctaaactgcttayacagatgtcagagctc

SEQ ID NO: 28327 - DNA, 600 bp, Chicken  19866894246174_3
gaataggtatgaaacacctaagtggccatactatggtagaaaaaaaaaacacatttttttccattatagaaaatgcaagattttccacaaaaatgaattaaaaaaaaatgtttctgaagaagttatctgtaggaacctgtgaaaaaagstatttgtcatggaggaagagaaagttattgcagaaacatagcragacagataaggaaatatcacacaaggaggctgtttttaactgggcagagaacactgggctggtcctgaggctaagtaccagtattcagtgattaaaataattcagartctgtaaaagaacaagcagtaaggtgagaacatttgaaatatgacaaaattatttgggctacttaacacaggaagagactgatgagctctactgaggcaactaagctaggtcacctagcatcagatgaaagtggtgctgggtatcacattttggaagaattgcctaaactgcttayacagatgtcagagctcaaagttaatcagtaaaaatgaagttttgagtgaacacttaattgcagatctaggagtaacatggaagaaggtatggayttacatgctgaataaatctgtggtactttt

SEQ ID NO: 28328 - DNA, 600 bp, Chicken  19866894246174_4
ttgcagaaacatagcragacagataaggaaatatcacacaaggaggctgtttttaactgggcagagaacactgggctggtcctgaggctaagtaccagtattcagtgattaaaataattcagartctgtaaaagaacaagcagtaaggtgagaacatttgaaatatgacaaaattatttgggctacttaacacaggaagagactgatgagctctactgaggcaactaagctaggtcacctagcatcagatgaaagtggtgctgggtatcacattttggaagaattgcctaaactgcttayacagatgtcagagctcaaagttaatcagtaaaaatgaagttttgagtgaacacttaattgcagatctaggagtaacatggaagaaggtatggayttacatgctgaataaatctgtggtacttttatttggaaaattttagctctggttattatatgaaaaagaacgaatagcagaaaagaatttagaagcaactggaaagagtgacgtggaaaattttctccttaaacttgaagctaggagtatctagataggtagtgcatagataactagcggcctgtaactagcggtgttccccaggg

SEQ ID NO: 28329 - DNA, 545 bp, Chicken  19866894246174_5
ccagtattcagtgattaaaataattcagartctgtaaaagaacaagcagtaaggtgagaacatttgaaatatgacaaaattatttgggctacttaacacaggaagagactgatgagctctactgaggcaactaagctaggtcacctagcatcagatgaaagtggtgctgggtatcacattttggaagaattgcctaaactgcttayacagatgtcagagctcaaagttaatcagtaaaaatgaagttttgagtgaacacttaattgcagatctaggagtaacatggaagaaggtatggayttacatgctgaataaatctgtggtacttttatttggaaaattttagctctggttattatatgaaaaagaacgaatagcagaaaagaatttagaagcaactggaaagagtgacgtggaaaattttctccttaaacttgaagctaggagtatctagataggtagtgcatagataactagcggcctgtaactagcggtgttccccagggattggtgcggctcggtctttttcaacatcttcatcaaca

SEQ ID NO: 28330 - DNA, 600 bp, Chicken  19866894246175_1
atattagcctagtgccagatgaaggcttaggaagttttttttaatgcacattctttattagccttaaaacttccattattgaaataattatgttacaacatacatgtgtgaaatacattttaaaaagtcatctcaaaaaaagcaaggtttctaatatttttctcagtcactttggcttacagttcacctgagccactatttgggaaaatacaaaccccagcacagagagacaaaaaaaaaagagggggtggagcatattgacaatactgcatgttgggcattactgagaacaaagcattygttggaagaaatgataagttgaaaatttgggcattttggatcaaggactatatagaaggctaaactccctgattaagccaactcctcacagactactcctgcggttcctctatggagcgttggaacaagcctctacaattcaaacagtttccgtgccagcctgtgctgttcaggctgtagtttgtaggtgcttgcatcttccccagttgtgccagctggctggtgttgctgttcagaaggatgccagacggctagcgctttaaccagcctggtttccaagcgacccattttttttagctg

SEQ ID NO: 28331 - DNA, 453 bp, Chicken  19866894246179_1
  misc_feature (1)..(65): n is any nucleotide
nnnnnnnnnnnnnnnnnnnnnnnnnnnnnnnnnnnnnnnnnnnnnnnnnnnnnnnnnnnnnnnnngaccgtgactcagtttcccttttccctccgcagcgctcgcaagcgtcccatcccctactaccgccccagcccctcgtcctccagctcgctgagcacctactcgtacagccgcagccgcagccgcagctatgacacctacagcaccagccgcagccgcagccggactcgcagcccccccagccgctcgcgcagcccccccagccgcagccccagctacaacagccgcagcagctcygagagcgccggcttctgagccccccccgccccaaccaggagcctccatcccaccccgggagcaggggattgccaaggatggaccgagcgggggggtgaccctgagcctgtggggtatctgggggttgggagatggggtgggggggtgtcttat

SEQ ID NO: 28332 - DNA, 600 bp, Chicken  19866894246187_1
tcttgtgatcagatgcttcttcagatcctaagaagcatgttgtgcctgaagccttgttgcccaactcccaaggtaatatcagttgttctaataaaatatatttcttcacaaatcttgtcttgcttaagtccttataccaatccaactacacaagaagcgccagtaagcaccgttggcaagtttgcatttcaaaatctgttacaggtgaaaatatcgtgtctcttttaaatgtgcagcaatgctgagccatatttcctttcataaaaggaaaataaccttttaatgtctaatctacttctsttttgctgctctttatataacatttctgtacacaggcagcaatgacaaacagcttttccctgtggcaacgcttagcctatatgagatatgatatatcatgattgttattgtatcactactcagttttattttcagattgtacaacttcagaactctgatttttattattattattattattattattatttagaatttctgcaaacatcctccatgctgctgtgtgaatgctcttcagattggatcatatctctgttgtcagactgcagtgatccaaattggcacaatacccactcagga

SEQ ID NO: 28333 - DNA, 600 bp, Chicken  19866894246197_1
attaatttggtagctatgcagttttttgattcctgttttttgttgttgttgctgttgtattagcataatatgctatgaatctgcacctttttgaaacctttagtggtagcttaaaacctactgcattcaagaaaatctttcacaaatattcagtaatagttttggtggtagtagcaggagtttacaaccataataccgtcttatcatctggctgaaacagcatctttaagaatggtaggtccctactttgtaaagaaaatactacttcagaatattaaaaggtaaggcttatacattttyctttctgttaaccctttgcagtagtttcaaatgtctttactacttcccaaacaatctttagggtaagcccatatcctcagctactaggtacggtagctacaaaaggtgacacaacacatcagcttctatgaaaaggtcaaaaagcaaattactcacatcttaaaatagcaaaatatttcacatttctaaaagtgctttggagaggtaagtgggaggataatagaactgttactttttttgttctcttacgtcttgaaaagatttgtgaagggaggaagtagcatctctctaagcctgtgg

SEQ ID NO: 28334 - DNA, 600 bp, Chicken  19866894246197_2
ttaatttggtagctatgcagttttttgattcctgttttttgttgttgttgctgttgtattagcataatatgctatgaatctgcacctttttgaaacctttagtggtagcttaaaacctactgcattcaagaaaatctttcacaaatattcagtaatagttttggtggtagtagcaggagtttacaaccataataccgtcttatcatctggctgaaacagcatctttaagaatggtaggtccctactttgtaaagaaaatactacttcagaatattaaaaggtaaggcttatacattttyytttctgttaaccctttgcagtagtttcaaatgtctttactacttcccaaacaatctttagggtaagcccatatcctcagctactaggtacggtagctacaaaaggtgacacaacacatcagcttctatgaaaaggtcaaaaagcaaattactcacatcttaaaatagcaaaatatttcacatttctaaaagtgctttggagaggtaagtgggaggataatagaactgttactttttttgttctcttacgtcttgaaaagatttgtgaagggaggaagtagcatctctctaagcctgtgga

SEQ ID NO: 28335 - DNA, 600 bp, Chicken  19866894246199_1
aattgcagtgaagaaagactatgtctctctgtatttatcaaaagagagttttgctgttctttttccacaaccccaaggctatagtaaatagtgagtggcattctaaagaattttttcttcctgaatttgtatagataatattgaggagagtatggagagctttgaaaattcacatgcatgtacatgcacgtacacaaacctttccacacacaccaatgcaatgagtccatctaccgtcatttggaacagtttgagtacttgaaatatataattcatccatggttccccgatatcagtgtsatgttctattgatgtgccactgtcctgtaactcacagcgtcaagaagaaaacaggaaaaacaggaaaccaaaagtatgcctatttattttcttgtcttaacagaaaaacaagagagaatgtctgattcacatatacctttaatataaaagaaagttcttatttccaagtctttgataatttttatttgtatataaaatatctcttgcacttttcatactgaggaaaagcaacacccagtccattcctttagtggatctgattcttgttgcatgcagcctttgtctgaattgtgatggcct

SEQ ID NO: 28336 - DNA, 499 bp, Chicken  19866894246199_2
ctttgccaagactgagaccttaagcatttagagctttaaaaggcagcatttactgatatgaattatgccatttaacagcaaaagttccagagtgctactcacatgagtaagaattgcagttcatccatcattaggaaagccatcaataaataaatgttaaaatatcaatacatattcttaaagctgcaaagtaaacatttttaaagtgtactaataatttaacctgccaagaattgagcttaatgaaacccttcagactagtgctggaagaattttgcttgatacaagtggaaaagttgygcatattaagttgatgagggggtcactcaaggcaatgtgcttgcatatacatgtcatagactctttatataaagaagaaataacagtaaaattaaatatcatgaagaaaaaaaaaggagaaaaaatgtttaaacaagttagtataatattaagataattatttttaaggtttttttttttttttttttttttttttttt

SEQ ID NO: 28337 - DNA, 599 bp, Chicken  19866894246201_1
  misc_feature (1)..(93): n is any nucleotide
nnnnnnnnnnnnnnnnnnnnnnnnnnnnnnnnnnnnnnnnnnnnnnnnnnnnnnnnnnnnnnnnnnnnnnnnnnnnnnnnnnnnnnnnnnnnnctccagctttcaccatgtaagttcttttgagaaatagtcctacctcactgctgatggcagcagaagcttaataggattctgtttctaactcaggtacccccaaccaccaagcttttgacccagtcagtgacatggttctctctacatacacatattaagaaaatgggattacagtgggtcacactaagagtggtggagagccaagamattttcagtgcttctactacgctgtactgctttctggagacttgcatagaaaagaaataacagaaaataaataaggttgcatagtcattgctccagggctgccaacttttgctgttttattgaggcttgtgatatttacttatttccttaaagtcacagttccctgagtctggtgactatacgtcagttttattttcatttctcaagaatgtttctatmtttttatggttggagaagaaagcttgaagcttgaaaaatatgaagacaaataaaaaaggaagccaagaatactgtggaag

SEQ ID NO: 28338 - DNA, 585 bp, Chicken  19866894246201_2
gtgacatggttctctctacatacacatattaagaaaatgggattacagtgggtcacactaagagtggtggagagccaagamattttcagtgcttctactacgctgtactgctttctggagacttgcatagaaaagaaataacagaaaataaataaggttgcatagtcattgctccagggctgccaacttttgctgttttattgaggcttgtgatatttacttatttccttaaagtcacagttccctgagtctggtgactatacgtcagttttattttcatttctcaagaatgtttctatmtttttatggttggagaagaaagcttgaagcttgaaaaatatgaagacaaataaaaaaggaagccaagaatactgtggaaggtgggaggatgaattaactgggttttcagttttctgacagtcttacgctttttatctcattcatttggaagggctctatgaacgtcagattttgtatgtgcagaatggcactaataggcagaggactgcttcatggccttttcctagctgggtcaaaaactgagcatatggtttaaaagaaagaaagagctgtgcagtctttctg

SEQ ID NO: 28339 - DNA, 599 bp, Chicken  19866894246206_1
  misc_feature (1)..(49): n is any nucleotide
nnnnnnnnnnnnnnnnnnnnnnnnnnnnnnnnnnnnnnnnnnnnnnnnnctttgaacatgaaaagctctgttcccggctcaccaagaagtggatctgctggctgatggtcagtgtgagcgcgcatcccactgtgaacaaagtcacggtgaatttcagcatgtgcctggctgtcaagcttcctcacccagtaatggatctacaaatccagccactgggaggagattgtcttcatggcactgtcgcagaactctctgcttcttcctcaggttcagaaacatacctgtctttctggagtcttscatccacgaggagacagacacaacattttctgcaaattgtccttttttgggtcacaaatgaacagattttgtttctctctcctacagctgctctccttgctcggccctggacgggttcagctcctgctccaggagctgtgctggggctttccctacagaaatagccccgttctcccactgcttccctttgcwctgatagctgctgttgcagacatgttcaggttactcagtgttgtgtatattccagcctgtgtggttgggctccttatgacctgcttcaagtattaccctattgcagt

SEQ ID NO: 28340 - DNA, 600 bp, Chicken  19866894246206_2
tggatctacaaatccagccactgggaggagattgtcttcatggcactgtcgcagaactctctgcttcttcctcaggttcagaaacatacctgtctttctggagtcttscatccacgaggagacagacacaacattttctgcaaattgtccttttttgggtcacaaatgaacagattttgtttctctctcctacagctgctctccttgctcggccctggacgggttcagctcctgctccaggagctgtgctggggctttccctacagaaatagccccgttctcccactgcttccctttgcwctgatagctgctgttgcagacatgttcaggttactcagtgttgtgtatattccagcctgtgtggttgggctccttatgacctgcttcaagtattaccctattgcagtgatggtgcattaatgttatcaggcagctaatcagacatgaactctttgattgacctgcctgcctccctgcttgccttttgtgaacttcatgtttgcttttccaaagtaatggggcaacccttctaccagcagcaggaatacttaagtgaaaacggagacctggtgtatctcagttcaagaagcaccttctgaa

SEQ ID NO: 28341 - DNA, 600 bp, Chicken  19866894246212_1
cacagtgcattcctcttcagtcgcgtctcatcacttcagcattttccctcagagagatcctactgtttgagacctttgccagcatttaactggccattaacccaatgagccaggctccgatctcatttacttctgcaaatttaatggagttcctctggacttgcactgatgtacatgagaacagatcctgtcccatttaatttgccctactgcatatttgctaagtgctaactgcacggttggctcagtgcagcatgcagaggacaaaaggacttgtgcataacaggggctgttatcttmcagatgctgctgtgttggctgttggcacagagctctatgtttgcggcagtggcccctcccacagtgctcctacastactcctaaattactgagagttttttttcccttaaacagcttgttaactctaggtgtcttgctggcttgtgtgcaatctgatttaaatgtcaacatgatgttaatgtttaacaactatcactaggaggttctcatagctcttccttcagagttacaaaaaagcccaacatctacctgctccttaagtcctactgtcagttcaaagcaggttcaggcgatatgctg

SEQ ID NO: 28342 - DNA, 600 bp, Chicken  19866894246212_2
ttgccagcatttaactggccattaacccaatgagccaggctccgatctcatttacttctgcaaatttaatggagttcctctggacttgcactgatgtacatgagaacagatcctgtcccatttaatttgccctactgcatatttgctaagtgctaactgcacggttggctcagtgcagcatgcagaggacaaaaggacttgtgcataacaggggctgttatcttmcagatgctgctgtgttggctgttggcacagagctctatgtttgcggcagtggcccctcccacagtgctcctacastactcctaaattactgagagttttttttcccttaaacagcttgttaactctaggtgtcttgctggcttgtgtgcaatctgatttaaatgtcaacatgatgttaatgtttaacaactatcactaggaggttctcatagctcttccttcagagttacaaaaaagcccaacatctacctgctccttaagtcctactgtcagttcaaagcaggttcaggcgatatgctggacctttatcagttatcccctgcagtagtccttggcacacgattgccctgaaatatgctttccctgggcaccttc

SEQ ID NO: 28343 - DNA, 513 bp, Chicken  19866894246212_3
agctcttccttcagagttacaaaaaagcccaacatctacctgctccttaagtcctactgtcagttcaaagcaggttcaggcgatatgctggacctttatcagttatcccctgcagtagtccttggcacacgattgccctgaaatatgctttccctgggcaccttccaagtttctccatttgcaatcttctcataagctacagagaacacgtattttgcaaaacaagaaatagaaaaacaaaaactaggaggattaaaacacagcccaactgatttaattttaattccaaaaatgcatggkgcccctgacatttcccacacacagctcctttccctgcagcacggagaggatatattttaaacggtaatgttaatggaattatatgttgctgctggataatggtctgctgtgaagagataattgttgaggcaaagctgaggtatttattggagataaacactgaggcaaagccgagatgttattttctaagcaccagactgtaatgcaggcaaa

SEQ ID NO: 28344 - DNA, 416 bp, Chicken  19866894246213_1
tgggggccctgagagctggtgaaagactgatttgttttcggtttatggatggcttggtactgcaaaaggactgggtggtttgtgagatggcttcaatgcaatgtgcaaaggtgccagaagaatgacaacttgcaacactgttgttgggggctttcaagtggtaaactgaatatgctaatattcctttgacctcaggaatgttggttgctgttctaatctaaacatgttgaaagtgtcatacagatgttaatgaagcttcacaacacctgtaaattgcaatgttcaacattatcacactcwgggagagagaaagttgagatcytccatctcactgctgtagtccttgatttctcctgcactcgctagttgtctgcttctagttatctgcacggaagagactgctaaatcaagacccc

SEQ ID NO: 28345 - DNA, 394 bp, Chicken  19866894246213_2
aagactgatttgttttcggtttatggatggcttggtactgcaaaaggactgggtggtttgtgagatggcttcaatgcaatgtgcaaaggtgccagaagaatgacaacttgcaacactgttgttgggggctttcaagtggtaaactgaatatgctaatattcctttgacctcaggaatgttggttgctgttctaatctaaacatgttgaaagtgtcatacagatgttaatgaagcttcacaacacctgtaaattgcaatgttcaacattatcacactcwgggagagagaaagttgagatcytccatctcactgctgtagtccttgatttctcctgcactcgctagttgtctgcttctagttatctgcacggaagagactgctaaatcaagacccc

SEQ ID NO: 28346 - DNA, 600 bp, Chicken  19866894246215_1
ccccgaattgttcctcccattacgaagacccaaaggaagacatctcagcttgctcaccgcagtgtcattcactctggatggcagccaggttctccaccagtctgtgccttgtttgggtctgtgtgccctcagtcagcttaagttcttctgtagccttcaagacctctaaatatctcttcagtttctcactgtgtacagattcaattaatctggaatttggtggtgctgtggaaaagaatggtcctgcaaaggacctgtatcctgcaagtatcatttattaggtaccaaatgttctactaycattataccaaaaactcaggaattctgatttcctttttattgctttctcagccgtgatatgattgacagtgtatctccctgcctgccagacaggatgccagtctgtcagaattatttccttctttatttgtttactacataaagaccactgatgtaatatccatttgtgcatcttcgatgatccagggcaaaaaaaaaaaaaagcacacaagtcccctgggagtatcaacagagctgtctgaatgaaaggggcatttattgccttttgcttctcttgcaagctgattggtatgggaaaac

SEQ ID NO: 28347 - DNA, 530 bp, Chicken  19866894246227_1
gcaataaggagcccaaggaacaaggataattgttttcctataacattaaaaagccaagggatgcctggagaacagagacaactcctgtatttgaaggaacaatctcaaaattagacccagcaagcccttgtctgggtaatccacctgctcatgacccacagcacttccagatgaacaggtttccaaatggaacgagtggcagttctgattcaagcagccaacagctctgagaaacattcacacatggcaaacacgaaactaccagttggatgctgaatgtcagtggtagaaaagccttcrttttaagccatgccataattaactgctatgcagactgtaagacagaaatcacatcccttgtaacttccattccttgaactactgcccagcacattcagcatccctacacagaaaaggacatttctgcagcacaactgcagactatgcctgatggtcacatttctaattaaaataccctgtaagtctggtggatgaaaacaatgcacagctgctacagctttataggatga

SEQ ID NO: 28348 - DNA, 600 bp, Chicken  19866894246229_1
tatataagatttttcctttctattcccagggatgctggatgcaacaaagcagaaaaactttgctttgtaacaggcaccagttcaacaaaaaccatacagccagcttcctccttccttcccttcctctcccagccctgggaaaagccacgaaatatgagttactgctgcagtaggcaaacattaatagcgactgaaaccactccaccacctgacctattctcctttcccttcccctcatttttattttaagaaaacccacacaatgccctacagaagggtcccggcatgtcagaatgttcyctgcttcgctaagctgaataaagacctaatttaggattaagagaaactcactgttttaaggcataaatatcccagattaagatgaactgatggactcagcctgcaggacttcacaatctgagcagtgccacatattttactgtagagaaaacacaattrttccctttaactgctccaaacacaagggtagcagcaaggagctgagtacagagcactcggtggggactattcctgcacattttcagtggcacgccaaacacttcaaatttcacgagaaaaacccaccccgtcttctgtaac

SEQ ID NO: 28349 - DNA, 600 bp, Chicken  19866894246229_2
tactgctgcagtaggcaaacattaatagcgactgaaaccactccaccacctgacctattctcctttcccttcccctcatttttattttaagaaaacccacacaatgccctacagaagggtcccggcatgtcagaatgttcyctgcttcgctaagctgaataaagacctaatttaggattaagagaaactcactgttttaaggcataaatatcccagattaagatgaactgatggactcagcctgcaggacttcacaatctgagcagtgccacatattttactgtagagaaaacacaattrttccctttaactgctccaaacacaagggtagcagcaaggagctgagtacagagcactcggtggggactattcctgcacattttcagtggcacgccaaacacttcaaatttcacgagaaaaacccaccccgtcttctgtaactcagctctactccatttcgcttcgttcaaagtgtgaccaacattaggaggcctgatcaaattcctggctttatccacgcttgaattaaggccttggctcagcaagggaaaagcagactgagttacatgaacttttcttctttcagagcacgtcagctgt

SEQ ID NO: 28350 - DNA, 600 bp, Chicken  19866894246232_1
gcaacctagttcaattgaaaacctccctgtgaatcatttttcttcatataattctattattgcactgacacagcatttgcatttctatgtgggagagaaagtgttttttcataccatctctttttcatttcacacaaaaaatgaacacagaatacttaggcgcccagatgagttcccaaatctgtctgctgttctgtttgagcatccctctgacgttctttcctttacaagaatgctgtctgtcttttggtagtgttttcctgttaaatacatattcgagtgtattttttttcttttctktcttctgggaatgatttacctagcagaatactgacaaacaactatcattattgcctttgtttaatgaaccattctcaattcaccaggtcttctgactgagcttgcacgcatatattttcactgtgtaaatttcccttgatcaaacttggcttccttcagctggggagtatggccatatctgtgcgcaccactggccaactgtacagcagaaacacaaaaaatcagctcattcctctgacttcctcagctaattgtcatgaacagagacttaacgttagcagaggaagagagttttctagt

SEQ ID NO: 28351 - DNA, 404 bp, Chicken  19866894246240_1
tttgcaaaagatagtggaatagcatcatgggtgatgtttcatcagctgttccaccagctttatctcctgattgcgtctgtcctgctaatctccaggctgaagaaaagcagaaggttacctcagtttgggactgttatgaacaaagaggaagaggatagataattggcaatagggactgtagccttaatcctgcctctcctttctacagtgctaggagatctcattgaagagctttttgtggccagcctgatacctctgggttacatgcagtcttaacaaggttacagtttgtcactagaygagctgcaagttacatatgtacaaagtaaaagcaaaaggctgggtcctgctttccagatcacacagactagaataaaaataaataaataaatagcagccaagaa

SEQ ID NO: 28352 - DNA, 600 bp, Chicken  19866894246246_1
ctgtcccatgtcagacaggagatgctaacatccccgtaacagtgactgtgtgtggtttttggtgttggttgttaagaaagcttcttatgttactggaataaaaaggcctccgttttcaacatcagtacttgggatttggcagttgaatcttaaatcatcggatgcgttaaggctgaaacatggaagtcttagtaaacatacatacatacattcttgtgctactgaacactcctctttaggtacttatatgaaaataagtatgtgctttgtttccttaatttcagactttaagaaactctrtatcaatgtaccttgagaagtgggcccaaatgatgatcaacaagtgttgcacttgggctggggcaatccctaacatgagtacacactgggagaacaactccttgaaagcagccctgaaggacttgggggggtagatggtctatctatctatctgacttaacgaggctgctggtatcccgggctgcgtcaaaagaggggtggccagcagggagagggagaggatttaccccctctactctgccctcatgaaacctcatctagagtactgcatccaggcgcggggcccccagcacaaagagg

SEQ ID NO: 28353 - DNA, 599 bp, Chicken  19866894246248_1
  misc_feature (1)..(11): n is any nucleotide
nnnnnnnnnnntgtacgttcacataggccatataatgcaaacttttgccaagataggactgacataaacacctgatttctaaaccccttcacaattcaatgtcagctgttattacatagtagccctttataatctacaactctttataaactcttttatgaagaaccatacttttctcctaaagaatcatttttgacattacaagcaaaacagtttcttgcaaagagtttcaaaaaaaaaaaaaaggtttttacattaaaagtttgtttggaaaataactcatctttacaaagattgatyagatgaggatggagagtgaaggctctgggcactctaaagcctaaaatcaagtgtagtaatgtagtagtaagactaaaatactgaatgctctgttttcagaaagattgcttttagggacaactactcacattgtgagacagtcacattttcagcaatatttttaaattactgccatatgaactgctggcaacaaactcacatatgatgattgcctataagcttggcaaacttggtttacaagctctagagggttttgttgctggcatatacttctcttagcagcaaaaccaactagtccc

SEQ ID NO: 28354 - DNA, 600 bp, Chicken  19866894246253_1
ctaagaaaagaaagttacaaacacactggagcttatctttatgtatttattgcagtacagaacacgggtggtaactgcttcccaatggaacaagcagtgagctgcaaacacccacccctatctcagagacattccagccccccgaactgctgccaaagcagcacacagaggcgcccataccgccccaggaatggccattccccattcagcaccatggcacgtgctggaacagcacaagaaagcccttttagaagactgatagtaaaaggagatgcactccatgaccttcctacttcatcragtgcccttttcccagcagtcagtgttaacatcgtgctgcagccttggagatgctgctgctgaggaacaasaagcaagatgaggaagctgcattcaacagcactgctgtagagctatagctttgcaaactgaggctgtcggggagctctggcagaagaggacacagccagctgcttccaagggggtttcaccaagcaggttcatctcacaaagcagcacttgtaagcaccaacaaagggacagagatgtattacacacctggcacagtcagcaacagctctggaatgaaataggtgcagc

SEQ ID NO: 28355 - DNA, 600 bp, Chicken  19866894246253_2
taactgcttcccaatggaacaagcagtgagctgcaaacacccacccctatctcagagacattccagccccccgaactgctgccaaagcagcacacagaggcgcccataccgccccaggaatggccattccccattcagcaccatggcacgtgctggaacagcacaagaaagcccttttagaagactgatagtaaaaggagatgcactccatgaccttcctacttcatcragtgcccttttcccagcagtcagtgttaacatcgtgctgcagccttggagatgctgctgctgaggaacaasaagcaagatgaggaagctgcattcaacagcactgctgtagagctatagctttgcaaactgaggctgtcggggagctctggcagaagaggacacagccagctgcttccaagggggtttcaccaagcaggttcatctcacaaagcagcacttgtaagcaccaacaaagggacagagatgtattacacacctggcacagtcagcaacagctctggaatgaaataggtgcagcagcagacacagatacaaaccccgcacgccgtgtggctgccgtttggaagccacaaattcctgcctctcaat

SEQ ID NO: 28356 - DNA, 600 bp, Chicken  19866894246280_1
agcgattgcgttttttgcagagtcatgcaagtgtgcgtgtattggtttccactcttctttattcaaagtgaagctcttggaagctgtcccaaaggatgcatgtggtcagactctcaggggaggatacttatgagagcaaaatgtttaggaagctgagaatctgacaatttttggccatctttttaaagaagttgtctgctttacttagcagcagctacagtgggctgtgcatggagttatgttcagacccttcaacaagctcaacttatttccaaatgcactgtaaaatctccattactragggcatgctctatgttaagtggggctctccctggccagtgatgttcaggtggttgctaggatgacagctaagaacttctgcatgaacagtkatttagaatgtataataatcatctacactattaggagcagtgccataggatcagagaaaaacaaccrtacctctcctatggtgcattgctgtgtctgttctgcttagcagggcatgaagttctgcttccatacctccacaaacagctttcaggaatcctgttttaggaacagctggccttcctggatgggagcattagaactctggag

SEQ ID NO: 28357 - DNA, 600 bp, Chicken  19866894246280_2
aggatgcatgtggtcagactctcaggggaggatacttatgagagcaaaatgtttaggaagctgagaatctgacaatttttggccatctttttaaagaagttgtctgctttacttagcagcagctacagtgggctgtgcatggagttatgttcagacccttcaacaagctcaacttatttccaaatgcactgtaaaatctccattactragggcatgctctatgttaagtggggctctccctggccagtgatgttcaggtggttgctaggatgacagctaagaacttctgcatgaacagtkatttagaatgtataataatcatctacactattaggagcagtgccataggatcagagaaaaacaaccrtacctctcctatggtgcattgctgtgtctgttctgcttagcagggcatgaagttctgcttccatacctccacaaacagctttcaggaatcctgttttaggaacagctggccttcctggatgggagcattagaactctggagctgtttttgggtatcagtgcaataawtggcagtttgagtcaaaaacactcaagcggaagatgactctttttgtgcaacagaatackttacat

SEQ ID NO: 28358 - DNA, 600 bp, Chicken  19866894246280_3
tctgacaatttttggccatctttttaaagaagttgtctgctttacttagcagcagctacagtgggctgtgcatggagttatgttcagacccttcaacaagctcaacttatttccaaatgcactgtaaaatctccattactragggcatgctctatgttaagtggggctctccctggccagtgatgttcaggtggttgctaggatgacagctaagaacttctgcatgaacagtkatttagaatgtataataatcatctacactattaggagcagtgccataggatcagagaaaaacaaccrtacctctcctatggtgcattgctgtgtctgttctgcttagcagggcatgaagttctgcttccatacctccacaaacagctttcaggaatcctgttttaggaacagctggccttcctggatgggagcattagaactctggagctgtttttgggtatcagtgcaataawtggcagtttgagtcaaaaacactcaagcggaagatgactctttttgtgcaacagaatackttacatcatcactcattttggagctataaggagaaaagaaaatgcagttgtatggtggatatgcagtcactga

SEQ ID NO: 28359 - DNA, 533 bp, Chicken  19866894246280_4
tctccctggccagtgatgttcaggtggttgctaggatgacagctaagaacttctgcatgaacagtkatttagaatgtataataatcatctacactattaggagcagtgccataggatcagagaaaaacaaccrtacctctcctatggtgcattgctgtgtctgttctgcttagcagggcatgaagttctgcttccatacctccacaaacagctttcaggaatcctgttttaggaacagctggccttcctggatgggagcattagaactctggagctgtttttgggtatcagtgcaataawtggcagtttgagtcaaaaacactcaagcggaagatgactctttttgtgcaacagaatackttacatcatcactcattttggagctataaggagaaaagaaaatgcagttgtatggtggatatgcagtcactgaaaccatcttgatgcagcacagaactttgggagcttgacttcgtttggaaggagccctgagggtcttatagcagatggcagcccaggacctgcacggcatt

SEQ ID NO: 28360 - DNA, 473 bp, Chicken  19866894246280_5
acagtkatttagaatgtataataatcatctacactattaggagcagtgccataggatcagagaaaaacaaccrtacctctcctatggtgcattgctgtgtctgttctgcttagcagggcatgaagttctgcttccatacctccacaaacagctttcaggaatcctgttttaggaacagctggccttcctggatgggagcattagaactctggagctgtttttgggtatcagtgcaataawtggcagtttgagtcaaaaacactcaagcggaagatgactctttttgtgcaacagaatackttacatcatcactcattttggagctataaggagaaaagaaaatgcagttgtatggtggatatgcagtcactgaaaccatcttgatgcagcacagaactttgggagcttgacttcgtttggaaggagccctgagggtcttatagcagatggcagcccaggacctgcacggcatt

SEQ ID NO: 28361 - DNA, 599 bp, Chicken  19866894246283_1
  misc_feature (1)..(121): n is any nucleotide
nnnnnnnnnnnnnnnnnnnnnnnnnnnnnnnnnnnnnnnnnnnnnnnnnnnnnnnnnnnnnnnnnnnnnnnnnnnnnnnnnnnnnnnnnnnnnnnnnnnnnnnnnnnnnnnnnnnnnnnnncctccttgtgtagtgaaagtcccattttgtataagtacttggagggcctagctcctaattctgtcaaatgatcctaagaaggccgttttaaaggagattttgctagttccattaagcagatgaagagatttgcagatacttctcttcactaacataggtctgcactctgttactatcgrattttttaatctgggttgattgcaaatcacagtgaatgcattcttaaaaaccacaacagatgtattaactactctagtatctctgctgatgaacttttatttgatctcacagtagatcttagttgagctggaagaaaaagctgatttttwgtattgtgcaattttgcacgggagtgaattttcctctttataaatcttactgttttcttctgaggaggggaagaggaaggggaacaatttgtcaggaatcagttgttttgacttaagagaatgggagaaaayggcatcttccgataaat

SEQ ID NO: 28362 - DNA, 600 bp, Chicken  19866894246283_2
tataagtacttggagggcctagctcctaattctgtcaaatgatcctaagaaggccgttttaaaggagattttgctagttccattaagcagatgaagagatttgcagatacttctcttcactaacataggtctgcactctgttactatcgrattttttaatctgggttgattgcaaatcacagtgaatgcattcttaaaaaccacaacagatgtattaactactctagtatctctgctgatgaacttttatttgatctcacagtagatcttagttgagctggaagaaaaagctgatttttwgtattgtgcaattttgcacgggagtgaattttcctctttataaatcttactgttttcttctgaggaggggaagaggaaggggaacaatttgtcaggaatcagttgttttgacttaagagaatgggagaaaayggcatcttccgataaatgtatatttttattaaaatctgatactgtgacaaatattttagacttagaacttcatttttggtatgtaagcagagcaacctcactgagatttgtgtgcactgtgaagattaatgaaatatactttataaagacaggcaatgattcactgag

SEQ ID NO: 28363 - DNA, 600 bp, Chicken  19866894246283_3
gcactctgttactatcgrattttttaatctgggttgattgcaaatcacagtgaatgcattcttaaaaaccacaacagatgtattaactactctagtatctctgctgatgaacttttatttgatctcacagtagatcttagttgagctggaagaaaaagctgatttttwgtattgtgcaattttgcacgggagtgaattttcctctttataaatcttactgttttcttctgaggaggggaagaggaaggggaacaatttgtcaggaatcagttgttttgacttaagagaatgggagaaaayggcatcttccgataaatgtatatttttattaaaatctgatactgtgacaaatattttagacttagaacttcatttttggtatgtaagcagagcaacctcactgagatttgtgtgcactgtgaagattaatgaaatatactttataaagacaggcaatgattcactgagtaaaaataggcagcatctaaaaagggcttataaacacagctattaattttaggactaaaatcttatattctttttttgtcttagtctgagaaaaatgccactgatctctgtggcactgtttggtgggtacaa

SEQ ID NO: 28364 - DNA, 470 bp, Chicken  19866894246288_1
tagcgtataccatctgcataaaatgtttgtctcatcactgaaagcatcctgttttccttcacatcttccttccagtatggtgcagttcacgacacatttatcttgtatgctcatcgaagtgctgaagtattttctgggtggttgacttaaattttccaaataccaatccggaacactgcatcctcacaaaccttttacagacaagtgctttttctcttctgatatggagagctgttgacgttaaatgctactcatgctctgggtgatgaattttcagcaatgcctgagcaatgctggtgygtaagtcccctgaaagtcggaaggatttgcattcctatwttctttccaggtttctgaaaatcctgtgggatctcagcatgaagaagaaagatgcagctggtggggagatgcctcttatgtctgaatttctgacagcaaaggggaaaagttctccccattcagtaaggcag

SEQ ID NO: 28365 - DNA, 431 bp, Chicken  19866894246288_2
gaaagcatcctgttttccttcacatcttccttccagtatggtgcagttcacgacacatttatcttgtatgctcatcgaagtgctgaagtattttctgggtggttgacttaaattttccaaataccaatccggaacactgcatcctcacaaaccttttacagacaagtgctttttctcttctgatatggagagctgttgacgttaaatgctactcatgctctgggtgatgaattttcagcaatgcctgagcaatgctggtgygtaagtcccctgaaagtcggaaggatttgcattcctatwttctttccaggtttctgaaaatcctgtgggatctcagcatgaagaagaaagatgcagctggtggggagatgcctcttatgtctgaatttctgacagcaaaggggaaaagttctccccattcagtaaggcag

SEQ ID NO: 28366 - DNA, 600 bp, Chicken  19866894246291_1
caggggtaggcttttcttcagggaagttgaactgctggtggctaacctggtccgatggggttttatttgcaggttgcagcccataatggctacttaggacagtggctgggtacagagcttcttacagtgcagctacatggcagagctccatgtaagatgaggcagtggctgctgcagtagaatagctccgtgcccccaccccgctgggtgtagtgagcagagcttatagcagagctgtgcaagtgctgtacctgagatacgggttgtagctttaggtgcttcacccccacttgttccacrtggcatttccactggtggagtttttttttcttcatattaaacaaygttgctttgttccacagaaacatcatccatggcagcgactctgtagaaagcgcccagaaggagatcagcctttggttcaaaccagcagagctcatcgactacagatcrtgtgcacatgactgggtctatgagtgatgctggcttccacgatgaattgtgccttctgaacgtgtcatctcactccagctaatgatctgggagcaattagcacagcggttatcttgacagtttttcagaacagtcaaataaacggat

SEQ ID NO: 28367 - DNA, 600 bp, Chicken  19866894246291_2
cctggtccgatggggttttatttgcaggttgcagcccataatggctacttaggacagtggctgggtacagagcttcttacagtgcagctacatggcagagctccatgtaagatgaggcagtggctgctgcagtagaatagctccgtgcccccaccccgctgggtgtagtgagcagagcttatagcagagctgtgcaagtgctgtacctgagatacgggttgtagctttaggtgcttcacccccacttgttccacrtggcatttccactggtggagtttttttttcttcatattaaacaaygttgctttgttccacagaaacatcatccatggcagcgactctgtagaaagcgcccagaaggagatcagcctttggttcaaaccagcagagctcatcgactacagatcrtgtgcacatgactgggtctatgagtgatgctggcttccacgatgaattgtgccttctgaacgtgtcatctcactccagctaatgatctgggagcaattagcacagcggttatcttgacagtttttcagaacagtcaaataaacggatgatataaactaactgcttacagtgcattcattatagtacagactt

SEQ ID NO: 28368 - DNA, 600 bp, Chicken  19866894246291_3
aagatgaggcagtggctgctgcagtagaatagctccgtgcccccaccccgctgggtgtagtgagcagagcttatagcagagctgtgcaagtgctgtacctgagatacgggttgtagctttaggtgcttcacccccacttgttccacrtggcatttccactggtggagtttttttttcttcatattaaacaaygttgctttgttccacagaaacatcatccatggcagcgactctgtagaaagcgcccagaaggagatcagcctttggttcaaaccagcagagctcatcgactacagatcrtgtgcacatgactgggtctatgagtgatgctggcttccacgatgaattgtgccttctgaacgtgtcatctcactccagctaatgatctgggagcaattagcacagcggttatcttgacagtttttcagaacagtcaaataaacggatgatataaactaactgcttacagtgcattcattatagtacagacttgtgctgaactgggtgaggtatgaggagcactcttttccttgcaggaggagctgtgctccaatacaggcttccccacctgggtgagtggggagggaagggatgctgatc

SEQ ID NO: 28369 - DNA, 600 bp, Chicken  19866894246291_4
cgggccggagctgatgcccgcgtgtataaatggctgtggctttgttttaaatatgaaaattaaaaggaagaaaaattcagtttaaatcacagtttttaaaaatcccttcccaataaaggattgttaccaaatatattagcaccattgtacaaatattgacaggagagggtattcacatcacataaaacaacaagaagaacaaacaaacactgaaacccgtgttagtatccgtagaacaaagagttgataaccgcctttgcttcctcgggtgcagcaaggaaagggtttgagctgtgctcsaatgacaaaactcaaagaccaccaggagggttccagcaatagaggggagctgcagacaggcgcagcatcctgctctgcccagtgctgacagtctgaccccactgaaagctccgcattggacactgctctgctttctgcccagcgaggcggctcagagcgaagccaacggcacccagaagcacactgctgatggatgcttcccatgcacagcaaagcctgcgccgtgggtaccagaagggacctgtaacccatggctgaagagacatcctctaaacaccacgtgggatttgctcaggtttc

SEQ ID NO: 28370 - DNA, 600 bp, Chicken  19866894246295_1
agtcagagacctgctactccaactggactgccacaagtccatgggaccggatgagattcacccgagagtgctgagggaactggcggaggtgatagccgagctgctttccatcatctatcagcactccttgttgacgggtgaggtcccagaagactggaggcttgccaatgtgactcccatctacaagaagggctgcagggtggatccgaggaactacaggcctgttagcctgacctcggtgctggggaagattatggagcaattgtcctgagggagatcacgcggcacgtgcaggacaamcgggggatatgcctagccagcatgggttcacgaagggcaggtcctgcttgaccaacctgatctccttctatgatctagtgacccgtctggtggatgagggaaaggctgttgatgtggtctccctagatttcagcaaagcctttgacactgtctcccacagtattctcctgcagaagctggcagtccgtggcttggagagatacactcttggctgggtaaggaagtggcttggaaggcccggcccagagagtggtggtgaatggagttaaatccagctggcaaccggtcacgagtggtgtt

SEQ ID NO: 28371 - DNA, 599 bp, Chicken  19866894246303_1
  misc_feature (1)..(189): n is any nucleotide
nnnnnnnnnnnnnnnnnnnnnnnnnnnnnnnnnnnnnnnnnnnnnnnnnnnnnnnnnnnnnnnnnnnnnnnnnnnnnnnnnnnnnnnnnnnnnnnnnnnnnnnnnnnnnnnnnnnnnnnnnnnnnnnnnnnnnnnnnnnnnnnnnnnnnnnnnnnnnnnnnnnnnnnnnnnnnnnnnnnnnnnnnnnnnttgatggctctgagacacagatacaggagatgactaatcccttactgtaaggaacagcatgaggtctgaatggatggtcagagctgagtcactgcactgcagtggtgcccmcttccaaatgcattcatttcttattaatcagtgcacggtgtgcagctcacagcctcacagggtatttttagtgaaaccagtcgtgcaytgggacagagtgtctcagctcactgctttctaccatccccgactgctttcggctccgtgcagcactgggctggttttggcactgcagcgttcagcctgtgagcctgtgttcctttccaccctcaaacctttcctctttagcaaagaataccgtctggtggatctgggagaagggaagggaggttttcctgccagctgcgtgttggcagaag

SEQ ID NO: 28372 - DNA, 599 bp, Chicken  19866894246303_2
  misc_feature (1)..(101): n is any nucleotide
nnnnnnnnnnnnnnnnnnnnnnnnnnnnnnnnnnnnnnnnnnnnnnnnnnnnnnnnnnnnnnnnnnnnnnnnnnnnnnnnnnnnnnnnnnnnnnnnnnnnnttgatggctctgagacacagatacaggagatgactaatcccttactgtaaggaacagcatgaggtctgaatggatggtcagagctgagtcactgcactgcagtggtgcccmcttccaaatgcattcatttcttattaatcagtgcacggtgtgcagctcacagcctcacagggtatttttagtgaaaccagtcgtgcaytgggacagagtgtctcagctcactgctttctaccatccccgactgctttcggctccgtgcagcactgggctggttttggcactgcagcgttcagcctgtgagcctgtgttcctttccaccctcaaacctttcctctttagcaaagaataccgtctggtggatctgggagaagggaagggaggttttcctgccagctgcgtgttggcagaagggctgccgtcgtggagcgactgtaaatacgccgttagtcgaatgtcatggctgatgtttgagttctttttttttttttttgcatttat

SEQ ID NO: 28373 - DNA, 600 bp, Chicken  19866894246312_1
acccactgacatttggtgatgcttgctgaatgtcgatggagaccaaaccagtgaatgtgagcacagtgaggtggtgggtggtgtatttcagttgtggtaacagtgacagtgggtcacctctgctggtgcagatttttacaagcatgacatgcaggctcttgtttgttgctagtgaaaatacattgatagtggtcatgactatgttgaaaagcactgttttgtagatgataatttgctttatgaaatagtgttattctgctctttttatctgtcgtagtttccatgcaaataaataggagrcattacttttggagcaacctatgtagattgttccctatctattgtactacagaaaggaggaatataggaagaaaaacaatcagcagtaggctaaaagtagatgtgagctaaggtactgtagaagagagagatgaaacagaataaataatagcaggaaagtataaattagcatacctacactgttcctcagtttacacccacttattaatgttcttttcctgctacgcctcggtgctggccacttggcatttattataccacatttgactgtctagtactaaatgaacaaaattcagaggt

SEQ ID NO: 28374 - DNA, 600 bp, Chicken  19866894246316_1
ttacagatgggagtcggcagctttctgcttctatgtttattgccctgcctaaaaaaaacagatgcagcgatgccccggtgcaaccaatgcaggcacaacgcacacctcagggcacaggctgggcttcgtgggctaccagctctctcttttctttccccacttttgcagcagtttatgcgacggtggacaaagtagggcaggttcctaagctttgccatgcagtcattaccacagcaccacagaatggctgaggttggaggggaccttaaagaccatccaatcccaacccctgccatgggytggttgccccccaccagcccaggttccccagggctcatccttgagcacctccagcaatggggcaccacagctctgtgggcagctgtgccggggcctcactgccctccgagcaaaggattttctcctcaaatccaatctaaatctcccctcttttagctttaaaccaccccctgtcgtcctatcgccgttatcctccctgatcactgaaaaacacctcatctgggaaagtttcctgttacctggaccgtaaatcccactcctaccccccagtatcaaagcggcacacaaacccggccctac

SEQ ID NO: 28375 - DNA, 600 bp, Chicken  19866894246319_1
tctgaaaatgaaattgatttatccacaactgccttgaagaaagtcacctagaaggtgctatacagatcaatatgaaaataagatctttgcctgttgaggcagaagaaaacctgtgtaatatttcagatgtatttcttggatgcagttgtgaatccctgccacgggagactttttgaagagctcatccttcagctcaccattaaaagactttgctagaagtgccacagctggagcctcaagatgctgagtgcaccctgtgatgctcaggtggttaagtgagatctgagcctgcctgaaaaygtggcaacaacagcagcacacgtggaacgctttcagcctgagacgtgcacatcttgctgcaattctgcaccgtgttccctgacagcagcacataagcacatcagagcacagcctgggtatccaaggagctaaccatacaggggaaggaatccgttcttccacacgcacccacagctcacacctccgttaccaggaagtccatcatctctgcttaaaaaactaaggggagaatgcagatctaccaacctcatgaaaactcctttggtaacaaatactgtacggtgctgacaccgactgcag

SEQ ID NO: 28376 - DNA, 600 bp, Chicken  19866894246326_1
aatatagaactaattcccctgaagtagacctggtttttaagaggttttgcatctactcaatccagaagctttcttttagttactgcaaagctctagtgatgcccaatgggctgtgccagtggatccctactccatcaggctgcaacccaacaccacgttaattccagaatgcggtgcttgaaaaaagtgaagcaggaagcaatgctggccaaggtgaagaatagggcatagctcaaggcatggtagatgtctccatgctcccaggcagatgtctccatgttccacctctgaagccatcaytggtacyccaaggggcccctcagccaactgcatccttgaatgagggccatacagaggaagggatgaaagagagaggcagttctytgctgttggaagaggctgagcactgctcctgtcctacctgcaggctctgctttaaarcagttcttcagcatgcacaaggagcttgaagagagtaattgggaggctccaggtttgctgagtcctccaggccctactggaggacaatggactgactttttattctcattatttttgtttcctcatgagcaatgaatccctcgaactgcacaaccttcc

SEQ ID NO: 28377 - DNA, 600 bp, Chicken  19866894246326_2
aactaattcccctgaagtagacctggtttttaagaggttttgcatctactcaatccagaagctttcttttagttactgcaaagctctagtgatgcccaatgggctgtgccagtggatccctactccatcaggctgcaacccaacaccacgttaattccagaatgcggtgcttgaaaaaagtgaagcaggaagcaatgctggccaaggtgaagaatagggcatagctcaaggcatggtagatgtctccatgctcccaggcagatgtctccatgttccacctctgaagccatcaytggtacyccaaggggcccctcagccaactgcatccttgaatgagggccatacagaggaagggatgaaagagagaggcagttctytgctgttggaagaggctgagcactgctcctgtcctacctgcaggctctgctttaaarcagttcttcagcatgcacaaggagcttgaagagagtaattgggaggctccaggtttgctgagtcctccaggccctactggaggacaatggactgactttttattctcattatttttgtttcctcatgagcaatgaatccctcgaactgcacaaccttccctcttcc

SEQ ID NO: 28378 - DNA, 555 bp, Chicken  19866894246326_3
gcaaagctctagtgatgcccaatgggctgtgccagtggatccctactccatcaggctgcaacccaacaccacgttaattccagaatgcggtgcttgaaaaaagtgaagcaggaagcaatgctggccaaggtgaagaatagggcatagctcaaggcatggtagatgtctccatgctcccaggcagatgtctccatgttccacctctgaagccatcaytggtacyccaaggggcccctcagccaactgcatccttgaatgagggccatacagaggaagggatgaaagagagaggcagttctytgctgttggaagaggctgagcactgctcctgtcctacctgcaggctctgctttaaarcagttcttcagcatgcacaaggagcttgaagagagtaattgggaggctccaggtttgctgagtcctccaggccctactggaggacaatggactgactttttattctcattatttttgtttcctcatgagcaatgaatccctcgaactgcacaaccttccctcttcccagtaaagttggctatgacaaaaggatggggg

SEQ ID NO: 28379 - DNA, 498 bp, Chicken  19866894246326_4
gcaacccaacaccacgttaattccagaatgcggtgcttgaaaaaagtgaagcaggaagcaatgctggccaaggtgaagaatagggcatagctcaaggcatggtagatgtctccatgctcccaggcagatgtctccatgttccacctctgaagccatcaytggtacyccaaggggcccctcagccaactgcatccttgaatgagggccatacagaggaagggatgaaagagagaggcagttctytgctgttggaagaggctgagcactgctcctgtcctacctgcaggctctgctttaaarcagttcttcagcatgcacaaggagcttgaagagagtaattgggaggctccaggtttgctgagtcctccaggccctactggaggacaatggactgactttttattctcattatttttgtttcctcatgagcaatgaatccctcgaactgcacaaccttccctcttcccagtaaagttggctatgacaaaaggatggggg

SEQ ID NO: 28380 - DNA, 600 bp, Chicken  19866894246329_1
tgacagtggatcaccttgctggtgaagatttttacatgtgacatgcaggatcctgttcattgctggcaaaaaatacataactaaggttgatgactatgttgaaaaatagtgttttgtagctgaaaatttgctctatcaaatagtattatcatgctctttgtatttgttataatttccctggaaataaataggagacattacttttggagcaagttacatatatactgattaggttcaagttggattagcatcctctcccaatgatactagtaaatggaaattttctcttgtttcgcatgrcactttaagttcagacagcagattcatctgcaactgtacagtcattcatcttgtgaattgaacattattttgggtgatgtctattcggtatttctaaaagtgtctgtggcactgttaatgctaactatgctagttgtagaatcacagaatagttgctacacttggtcttagccaaaaggctaaaaagtgaagttatctagctcagtacaaaattcaaatattcaaaggaatttcctctaaggtattttgaaattatgatttgtgaataatgtcgtattttttctgtgtctcattcaattg

SEQ ID NO: 28381 - DNA, 600 bp, Chicken  19866894246330_1
ctcaaagaccttccaagaaacagaaaaactcttaagtttcagatggtaaataacaggaatggctttgctaatcacatgttgatcattccttaaaaagattcaataaaaatagcttctgattagaaatgccattttcttcttttgttgagccttttcttccataaaagattgctctgaaaatctgaaaaaaagaccaattctattctttattttaaaatgtattctgttatgtttattgaaaaggtcatcattattaattttatgggaaatactacacaatgaatttatagtccagtgatraatttaacttaaaactgaaagttcacatatttgaaaaactccttgaagataaatttagattaatgactgtggccttcttagcaattttttttcttgcaattataataccatcaatgttttatcattatttttctagatctgagaaaattgaaagaaatcrcattatgttgtgatgtagtagacacaaaggaagttcttgctgctcagatcccttagaaatttttcagctggtatttcttactgctgtgccagctactaagaaaaaaatcaatagacttcacagacaggaaaggacaagct

SEQ ID NO: 28382 - DNA, 600 bp, Chicken  19866894246330_2
ataaaagattgctctgaaaatctgaaaaaaagaccaattctattctttattttaaaatgtattctgttatgtttattgaaaaggtcatcattattaattttatgggaaatactacacaatgaatttatagtccagtgatraatttaacttaaaactgaaagttcacatatttgaaaaactccttgaagataaatttagattaatgactgtggccttcttagcaattttttttcttgcaattataataccatcaatgttttatcattatttttctagatctgagaaaattgaaagaaatcrcattatgttgtgatgtagtagacacaaaggaagttcttgctgctcagatcccttagaaatttttcagctggtatttcttactgctgtgccagctactaagaaaaaaatcaatagacttcacagacaggaaaggacaagctcatccatgcctctgatcctgcagaatcacaattttcgctagcaattctactttcattccactgactgtcacatccagaaaatcatttaaaaaaaaaaaagtgatgagcacaatctgatatatgaaacatcaatgagatgcagatatgttatctgaataat

SEQ ID NO: 28383 - DNA, 600 bp, Chicken  19866894246344_1
tcttttgccagctggtttcacacccccagttggcaatccgcaaaggtttagagggggaattaaatccacttttcagcagaaataactatttttgtgattatcatatagattccatgagctacactttggtcctatcaagacaggcaggcagctgcatgagaggtggaaagagagaaaatgattgagatgaaatcaccaccaacaactattgcaggcagcaaagcagcattggattccagccaccatacttctgcaaccaggtgtgaatgagcctgatgggatgttattatggatcctacmctgaaaaaggtatgtgaaaagctgtctgacatgggctctatttcaaagaaaaaatacagattccatccacaytttaattgctttcattttacttcttttgctcttgggrctaagattgccttgaataaaacgagattaaaaaagtagagtgaaataacactctcaaacagagacaaatgaaggggctcagagaagaaagggtttgtcctagtatcagtctttaaacaagctgaaaggcctgaacagaatgggcgactgaagttccttgttgctgtttgaggtacagttctattcttacat

SEQ ID NO: 28384 - DNA, 600 bp, Chicken  19866894246344_2
tcagcagaaataactatttttgtgattatcatatagattccatgagctacactttggtcctatcaagacaggcaggcagctgcatgagaggtggaaagagagaaaatgattgagatgaaatcaccaccaacaactattgcaggcagcaaagcagcattggattccagccaccatacttctgcaaccaggtgtgaatgagcctgatgggatgttattatggatcctacmctgaaaaaggtatgtgaaaagctgtctgacatgggctctatttcaaagaaaaaatacagattccatccacaytttaattgctttcattttacttcttttgctcttgggrctaagattgccttgaataaaacgagattaaaaaagtagagtgaaataacactctcaaacagagacaaatgaaggggctcagagaagaaagggtttgtcctagtatcagtctttaaacaagctgaaaggcctgaacagaatgggcgactgaagttccttgttgctgtttgaggtacagttctattcttacatgtttttcccaaaagccacttgccttcaaattccacgaagctttattagagcggaagcggagcagtatctgat

SEQ ID NO: 28385 - DNA, 600 bp, Chicken  19866894246344_3
ttccatgagctacactttggtcctatcaagacaggcaggcagctgcatgagaggtggaaagagagaaaatgattgagatgaaatcaccaccaacaactattgcaggcagcaaagcagcattggattccagccaccatacttctgcaaccaggtgtgaatgagcctgatgggatgttattatggatcctacmctgaaaaaggtatgtgaaaagctgtctgacatgggctctatttcaaagaaaaaatacagattccatccacaytttaattgctttcattttacttcttttgctcttgggrctaagattgccttgaataaaacgagattaaaaaagtagagtgaaataacactctcaaacagagacaaatgaaggggctcagagaagaaagggtttgtcctagtatcagtctttaaacaagctgaaaggcctgaacagaatgggcgactgaagttccttgttgctgtttgaggtacagttctattcttacatgtttttcccaaaagccacttgccttcaaattccacgaagctttattagagcggaagcggagcagtatctgattttggttgggagactgctgcttgagtccaaaagagat

SEQ ID NO: 28386 - DNA, 599 bp, Chicken  19866894246348_1
  misc_feature (1)..(18): n is any nucleotide
nnnnnnnnnnnnnnnnnnctgagctttccctgctggactgatgccgggacacaaagacaggtcttgagtcggttatctcctcacttcctctctgtaataagcttcagaattgcagaatctgcagaattgagacaagcaaatactgctgcaaggtcaatcacattttgattccagattttagtctaaaaataaacatggtgatgattaaacaaagctgtacatcctgtaaagaacacaactacttttaatatgatttctttatggtgaacaccaagttttcatgataaaactgagtttaaytgaggtgtttctaatggaacagctatttcacagatcctagacagaactccattgttaaaacctcaggtaaatgggttctttgcccatgaaccctaagactcactaggcacrttatcaggaaccttctgaagtgaaacagtcacagtacaaacaatggaacaaaagggaggtgccacccacaccaaggcaccctgctgctgaaggaggaaatctgcaatacctcactctgataaggccggatcggggcgagatctcatttctgaaggagtttccaatctgagcagcagcaaaagggagct

SEQ ID NO: 28387 - DNA, 600 bp, Chicken  19866894246348_2
gcagaatctgcagaattgagacaagcaaatactgctgcaaggtcaatcacattttgattccagattttagtctaaaaataaacatggtgatgattaaacaaagctgtacatcctgtaaagaacacaactacttttaatatgatttctttatggtgaacaccaagttttcatgataaaactgagtttaaytgaggtgtttctaatggaacagctatttcacagatcctagacagaactccattgttaaaacctcaggtaaatgggttctttgcccatgaaccctaagactcactaggcacrttatcaggaaccttctgaagtgaaacagtcacagtacaaacaatggaacaaaagggaggtgccacccacaccaaggcaccctgctgctgaaggaggaaatctgcaatacctcactctgataaggccggatcggggcgagatctcatttctgaaggagtttccaatctgagcagcagcaaaagggagcttgccttggttgaactcaagaagacgtttgaaattgaggaatattccctgtgctgtttctggcctcagatagctggaaggagacgggggacaggagtgagcaggaatcagggt

SEQ ID NO: 28388 - DNA, 600 bp, Chicken  19866894246349_1
aggctgtagctagccacagaactgccaaaaaatcagctcagcgaggctgaggccacgggacatgtggactgtctgaacagcaaggtatccttggagacacctggattgtggtttctgcctctgatttctcctatggcaggcatagggatgggtgagctccatggggatggagcagcttcctggtcaccacggccacgtccgtgaggtgagtggtgcagagccctctcagatgtttccataaagcacatggacagctctgcctggcagtttgctcaacagcaaagccatcttcacctccastttcttcccttagaccccmgcaggttcttggagctctccagggatgaggctcccctgcaccctgtgctgtcttttggccaaccttattcataggaagctttccctgagcatctaactcaacttggctgcacttcaagcctattacatcttgtccaatcagccaccaattgatcaccatcatctttataactgccctttccattctggatgaatgttacacactgtctcgctctcaggctcagtcctggagcacaaacccggctccatcagtccatcttcctggagcatgtttttccaaac

SEQ ID NO: 28389 - DNA, 600 bp, Chicken  19866894246349_2
aactgccaaaaaatcagctcagcgaggctgaggccacgggacatgtggactgtctgaacagcaaggtatccttggagacacctggattgtggtttctgcctctgatttctcctatggcaggcatagggatgggtgagctccatggggatggagcagcttcctggtcaccacggccacgtccgtgaggtgagtggtgcagagccctctcagatgtttccataaagcacatggacagctctgcctggcagtttgctcaacagcaaagccatcttcacctccastttcttcccttagaccccmgcaggttcttggagctctccagggatgaggctcccctgcaccctgtgctgtcttttggccaaccttattcataggaagctttccctgagcatctaactcaacttggctgcacttcaagcctattacatcttgtccaatcagccaccaattgatcaccatcatctttataactgccctttccattctggatgaatgttacacactgtctcgctctcaggctcagtcctggagcacaaacccggctccatcagtccatcttcctggagcatgtttttccaaacaccccgaactctctcaatt

SEQ ID NO: 28390 - DNA, 599 bp, Chicken  19866894246350_1
  misc_feature (1)..(125): n is any nucleotide
nnnnnnnnnnnnnnnnnnnnnnnnnnnnnnnnnnnnnnnnnnnnnnnnnnnnnnnnnnnnnnnnnnnnnnnnnnnnnnnnnnnnnnnnnnnnnnnnnnnnnnnnnnnnnnnnnnnnnnnnnnnnnttgtgcccctcattcattagtataagtaaatgccatctcttcattttgtcctgtgactttcatccctgaatgttagctgcctaaacgtgaactttagaagataccacctgagcctgaaccctgacctgaatgaaagcccttgcatgttttcttttaaagagatccctctttttcyttaaaaatgggggcacgcagcttttatataaaagtgtgtgtatgaagtcctgccctgagaggagaagtttgggtttcagttccctgctctgtcccctctcctattctgactatacttgctgaggacgcagcctgcatatctgttcacctgcatttggtggaggatgatgagcacataactttcagtttcatggctcctttactgactctgagatgtgtttcaccascatttctcccagtgatggagactcctgtgagtatctccttgttcacatgggggctgtttcaggcattcttctg

SEQ ID NO: 28391 - DNA, 600 bp, Chicken  19866894246350_2
taccacctgagcctgaaccctgacctgaatgaaagcccttgcatgttttcttttaaagagatccctctttttcyttaaaaatgggggcacgcagcttttatataaaagtgtgtgtatgaagtcctgccctgagaggagaagtttgggtttcagttccctgctctgtcccctctcctattctgactatacttgctgaggacgcagcctgcatatctgttcacctgcatttggtggaggatgatgagcacataactttcagtttcatggctcctttactgactctgagatgtgtttcaccascatttctcccagtgatggagactcctgtgagtatctccttgttcacatgggggctgtttcaggcattcttctgaggtgctgaacttctcccaggtatgacagaacaggagcctgcagtgaccaggttgtgctcctggagccaatgagcttctgaatcctttcctgggtacaaagtgctttttgccatcttgccatacccatcagcaaaagtcctaaagattgcactgggctgctcaggttctccttcagctttatgtatatatacgtgtatatatatacacacaacatttatttccaaca

SEQ ID NO: 28392 - DNA, 600 bp, Chicken  19866894246351_1
ccttcttaaggtgaatgtcagatatggttcatcaagagttactaaaaacacacccaacacggcgcttagtgatgtacaagatactttgaagaaaatccaaataccagagagattttactgttctcgtgaaataagcacttccatctgtacatggaaacacactatgaaaataattaatttgtcagcagcaactggtaacttcagtaggaataagagatgtgaccaaagaaagctttccttcagatctctaagatatatcttgaccactcactgcagataagtacactgggagcaatacartatcacattaatcgaagtggtagarwacagcaaaccagtctagaaatgtgttaatatttctaatgctgttaaygaaatcctgtgactgactagtgaagcttaagatttagaacataagttaaccaatttcaaaagaataaacactaaaaaatctggaatttagggaaccatattttctgcctaaaggaatcagcttttgattaagcaattgacttttgtagtaaataaaattaaaataaagaactttaatttcatcaatattataacattaaaacacaaaaaccactaactgccacagac

SEQ ID NO: 28393 - DNA, 600 bp, Chicken  19866894246351_2
ggttcatcaagagttactaaaaacacacccaacacggcgcttagtgatgtacaagatactttgaagaaaatccaaataccagagagattttactgttctcgtgaaataagcacttccatctgtacatggaaacacactatgaaaataattaatttgtcagcagcaactggtaacttcagtaggaataagagatgtgaccaaagaaagctttccttcagatctctaagatatatcttgaccactcactgcagataagtacactgggagcaatacartatcacattaatcgaagtggtagarwacagcaaaccagtctagaaatgtgttaatatttctaatgctgttaaygaaatcctgtgactgactagtgaagcttaagatttagaacataagttaaccaatttcaaaagaataaacactaaaaaatctggaatttagggaaccatattttctgcctaaaggaatcagcttttgattaagcaattgacttttgtagtaaataaaattaaaataaagaactttaatttcatcaatattataacattaaaacacaaaaaccactaactgccacagacaaatgttttccattaaatttaaaga

SEQ ID NO: 28394 - DNA, 600 bp, Chicken  19866894246351_3
gttcatcaagagttactaaaaacacacccaacacggcgcttagtgatgtacaagatactttgaagaaaatccaaataccagagagattttactgttctcgtgaaataagcacttccatctgtacatggaaacacactatgaaaataattaatttgtcagcagcaactggtaacttcagtaggaataagagatgtgaccaaagaaagctttccttcagatctctaagatatatcttgaccactcactgcagataagtacactgggagcaatacartatcacattaatcgaagtggtagarwacagcaaaccagtctagaaatgtgttaatatttctaatgctgttaaygaaatcctgtgactgactagtgaagcttaagatttagaacataagttaaccaatttcaaaagaataaacactaaaaaatctggaatttagggaaccatattttctgcctaaaggaatcagcttttgattaagcaattgacttttgtagtaaataaaattaaaataaagaactttaatttcatcaatattataacattaaaacacaaaaaccactaactgccacagacaaatgttttccattaaatttaaagag

SEQ ID NO: 28395 - DNA, 600 bp, Chicken  19866894246351_4
gtacaagatactttgaagaaaatccaaataccagagagattttactgttctcgtgaaataagcacttccatctgtacatggaaacacactatgaaaataattaatttgtcagcagcaactggtaacttcagtaggaataagagatgtgaccaaagaaagctttccttcagatctctaagatatatcttgaccactcactgcagataagtacactgggagcaatacartatcacattaatcgaagtggtagarwacagcaaaccagtctagaaatgtgttaatatttctaatgctgttaaygaaatcctgtgactgactagtgaagcttaagatttagaacataagttaaccaatttcaaaagaataaacactaaaaaatctggaatttagggaaccatattttctgcctaaaggaatcagcttttgattaagcaattgacttttgtagtaaataaaattaaaataaagaactttaatttcatcaatattataacattaaaacacaaaaaccactaactgccacagacaaatgttttccattaaatttaaagagaataagggatgggttctgtgggaacttgacatttatcattcaaggga

SEQ ID NO: 28396 - DNA, 600 bp, Chicken  19866894246354_1
catgtgctcatccctgcagcacagggtgggaggagagcttcctgcatcccagcggcacgagccacggcggggaggagtgagcctgtggctatgggagctgttatttttagttgtgctgtaaagtcaattagaactaaagcagatctgtatagaaagttaattcatattaagaatagcactgcatcagctcccgcatggtggcacagccatttcttggggctgctctccgggtttcgctgctctgtcagcttgggctgtggccacgtctcagacttgtattgcaggcagaattcccattcstctccctcygtcaagagcaaacatttgcaggcaaagtaactctacggcaagaaccaggtaacgcacttcaaatgtgtgacctaattcttgggatgatgttgtataaaacattatttcctcatkactcttcgtgcgctgatcttcagggctctcccttaaaaataacagcggtgacttgaattaattggttgggaaagatctttcctctaagccgtggtccacagcaaagccagaaaatgtggcctccgttgcacacagaggctcgacgcctgcacgttgctctgcagacrgacgcacgca

SEQ ID NO: 28397 - DNA, 600 bp, Chicken  19866894246354_2
atccctgcagcacagggtgggaggagagcttcctgcatcccagcggcacgagccacggcggggaggagtgagcctgtggctatgggagctgttatttttagttgtgctgtaaagtcaattagaactaaagcagatctgtatagaaagttaattcatattaagaatagcactgcatcagctcccgcatggtggcacagccatttcttggggctgctctccgggtttcgctgctctgtcagcttgggctgtggccacgtctcagacttgtattgcaggcagaattcccattcstctccctcygtcaagagcaaacatttgcaggcaaagtaactctacggcaagaaccaggtaacgcacttcaaatgtgtgacctaattcttgggatgatgttgtataaaacattatttcctcatkactcttcgtgcgctgatcttcagggctctcccttaaaaataacagcggtgacttgaattaattggttgggaaagatctttcctctaagccgtggtccacagcaaagccagaaaatgtggcctccgttgcacacagaggctcgacgcctgcacgttgctctgcagacrgacgcacgcatccgtggct

SEQ ID NO: 28398 - DNA, 600 bp, Chicken  19866894246354_3
tcaattagaactaaagcagatctgtatagaaagttaattcatattaagaatagcactgcatcagctcccgcatggtggcacagccatttcttggggctgctctccgggtttcgctgctctgtcagcttgggctgtggccacgtctcagacttgtattgcaggcagaattcccattcstctccctcygtcaagagcaaacatttgcaggcaaagtaactctacggcaagaaccaggtaacgcacttcaaatgtgtgacctaattcttgggatgatgttgtataaaacattatttcctcatkactcttcgtgcgctgatcttcagggctctcccttaaaaataacagcggtgacttgaattaattggttgggaaagatctttcctctaagccgtggtccacagcaaagccagaaaatgtggcctccgttgcacacagaggctcgacgcctgcacgttgctctgcagacrgacgcacgcatccgtggctctgctgtgaccgccttgctttcacaggaagaaaagccagccaggctgcagggctcccaaacagttgctcgccagatcctgatttatttgacagcctccgtaataaagtaactat

SEQ ID NO: 28399 - DNA, 600 bp, Chicken  19866894246354_4
ttcccattcstctccctcygtcaagagcaaacatttgcaggcaaagtaactctacggcaagaaccaggtaacgcacttcaaatgtgtgacctaattcttgggatgatgttgtataaaacattatttcctcatkactcttcgtgcgctgatcttcagggctctcccttaaaaataacagcggtgacttgaattaattggttgggaaagatctttcctctaagccgtggtccacagcaaagccagaaaatgtggcctccgttgcacacagaggctcgacgcctgcacgttgctctgcagacrgacgcacgcatccgtggctctgctgtgaccgccttgctttcacaggaagaaaagccagccaggctgcagggctcccaaacagttgctcgccagatcctgatttatttgacagcctccgtaataaagtaactatttgtctaactcttcctgattagtctgaagaggtctgccaagccggagaggattgactagtcaggaaaccactggtattttggctgctttttttttttttttccttaagggttgcgatattatttgcaataatttctcctttattaagtttggcatttcaaaataatt

SEQ ID NO: 28400 - DNA, 600 bp, Chicken  19866894246355_1
agtggaacaaaatgttgaaagttattaattaatatgttgaagtattgttttaagagaatgttgaatttgatgaaagaagggggatttttaactgagctattgaaatatgactcaagtggtcagtaaaaagaattcataatataccaaaaattttggtatattttttcagatttttatttaacccaagggtgttactgttcatcagcagtcaatctggagaaaaaatgtgagtgctattgtaaaatctgttggaattaaactagtcagtctgtttggaagtaccaggttttcttttccttrttttagtggatctgacaacttgtcagccctgcaggcttttagagagaggaggtattggcaaaggtggccgtgtacacacatctccaccatgctcctttctagccagtgtgtatggtttgctagagaaaaaataaggcaaaaatatgatgagcagaggggccttcagagaaaaggagtgcagaattagagggttatgtcttcagaaatacagaactcctcccatgccaatccatggatgctcttgctaatgaagaagtaccgctgtagagtggaaacacaatattaggtctttggtctcag

SEQ ID NO: 28401 - DNA, 600 bp, Chicken  19866894246361_1
tgtgttctgtgaaagctttgtctttctgactttcagttacctggaagccataacaaataaataaatagaaaatacctcttcctttttgtctgctgatggtgtttaaactcagttactgcacagcagctagttagcaagtcctctcctccttgatgcaatagccatcctgcatgacagaaattagcaacgatgaggctgacagtgtaatgtgggaagaaggtaacggtgctcaaggttcatactcacctgtggctctttactgtgactcctgtgccccaaatttctgccacaagcaaagcyattaattgatattttaaacacctgatgtggaattttctgaagccacttagagaagcccaattagcttgcttggaagagcttcctaatgacaatttttcattgtactgtgcacccaagttctctaccgtgaccttgtcttaatcctatacagagctcatgcagacagaaatgcatcatgtccgcaccctgaagataatgaacgacgtatacagtgcagggatgttacaggagctgcagtacgatcagcaagttgtggacaagatctttccctgcctggagaacttgctgcacatacacagt

SEQ ID NO: 28402 - DNA, 600 bp, Chicken  19866894246361_2
gagagaatgaagaagacatatggcaaattctgcgggcatcacaatgaggcagtaaattacttcaaagatctgtactcaaaggacaagcgttttcaggcttttgtcaaggtaggaccaggtgaaagagaagcagtcaatgggggaaaaaaatatttcctttctgtgctccattgagcgttttgctacaaaattgaaattttcatctttgtttcttagaaaaaaatgagctcctccttggtgagacgtcttgggatttctgaatgtatcttgttggtaacacagagaatcacaaagtacccrgtcctgttacagaggatactgcagtacacagcaggtaggggccagttcttttgttagcgtgtatttgctcatccattgtgcttttccaggacctcttttttcttagattttcttagaattggcacacttaatccagtcattgtctcacactggtataatgggataaccaggtttcatctctctgtttagtggtagttgatcaggtaccttggtttcattgatgtagtctatctctagctaattacagagccagcatgctcagactccagagtcttccagcttactttgttttataatggc

SEQ ID NO: 28403 - DNA, 559 bp, Chicken  19866894246361_3
tcacactggtataatgggataaccaggtttcatctctctgtttagtggtagttgatcaggtaccttggtttcattgatgtagtctatctctagctaattacagagccagcatgctcagactccagagtcttccagcttactttgttttataatggctaaaatatgtggttagtttgctcgtttcatatctgctgtctccaagtatattggaacagctcccagcctcaaccctttatgtgaaaggttttgtgaagctctccttaggagggaaagatgcagcctgtcttgggagtatatgaraaagttgtaatgcaggaatctgagagggagaagaggaagggagtaaagggaaaacagggatgtccacgaggatgaagtgaaatggaaatctttctctttctgttcaaagaaaatgaagtggaacatgaagacttgactcagtcattaaaccttgttaaagacgtgattgccgcagtcaatagcaaagtcagtaactatgaaaagaaaacacgcctcgatgagatttacaaccggacagacaacaagtccatcatgagga

SEQ ID NO: 28404 - DNA, 600 bp, Chicken  19866894246372_1
gcacctgagagctgcatttttttccctacggacttcatctatgcttagagatgaacaggaggcaggcagcattcagacccaccaccaaatcctaccaagtcctgacatttttccaaattccacttgagaaacaatatttacatgcagaattactctaaccctctgttctgcatcacttactgctctgatgtggtagtccagcatacatatctcatcatcaagagacgcatcacatcgtgtacaatcactgctgatgtatcctaatagaactgttctgtggtgaaatgttttgacacttcraacgaggtaggaagagcagcacgcagcgtactaattagagggccagaggttttcagtatattaaataatgattttaaactaacacaaagctgttgtgtcaaagtatttcattaaaacacaaagaagaaagactttgatctggaaaataagatgtttcaatcaaagctaagctaaagtcattcagaatgatataaaacaaatacagtgatttaaataaaagcagaagagccagactcctctgccccagcatgagtccaatgcgtactgcacagtactgctgctcacacatcttgagtgaca

SEQ ID NO: 28405 - DNA, 599 bp, Chicken  19866894246378_1
  misc_feature (1)..(65): n is any nucleotide
nnnnnnnnnnnnnnnnnnnnnnnnnnnnnnnnnnnnnnnnnnnnnnnnnnnnnnnnnnnnnnnnncaaactatacatctttttaaaatatacagtttagagtaacaaaaaagaattaaaaggataacactattctgagttgcctggataacaacattaatatacactaattatacaattagttgtaacattaaattctagttatagcagagtgattacttggcaattataagaagtatataattactcaataattaggagaagtatgtaattacataaccattttattcagctcaaaaaygaacttgcagatttacaatgagctagacaacacagcaattcacaatttttcattgcttctgagaaaaacctgaggagcacttccaagtttcccaaatcaaatgttacacagacaaaaggtatttccattgccagccgagcaacttagtgctactggcaagtgaaatattagaacatttttaaaatgcaggtcttgctggggatgacttgcaatatgcagttttgccacttctcactgcttaaacttcactttcagtgggctggaaaatgcagacacataggttcagcctgacagaaagt

SEQ ID NO: 28406 - DNA, 600 bp, Chicken  19866894246379_1
attacagaaaagaaacattgtggacagcgttgaagtctaactggactaaggagaagcgtgcagattaaagccaggtgtggatttagactgtgcttttgtcttccgatgtgctcttgctcattgataaaagcttcagcttttcactttttctattcagagtggctgggaatgagaagttgtaaattcactgcagcacgattgacatcttgaaagcaaaatgcctcccaaattggttcagttgctgggaactgtgaaatacttgcagcatttaattcaaccctgaattcagtaaaataattytgaaaaaaaygagtgtaaaattttgggcttccttttggtttttggaatgcagaaaatgaggaaaaaaaaaaaaaggtttggatgaaggcagggtgagcagaaataaggctttaaaatggagggggagaaagaatggttcaggatccttttggtgttattctacctgcaaagtgattctttccatcagtaacctgttacatagaaaacagttttcaaactgtgatatacaaaagcactctcagggcatcagcaggctggagcagctcaggagcaagcagtacaaagcatgtgagttctgca

SEQ ID NO: 28407 - DNA, 600 bp, Chicken  19866894246379_2
agaaacattgtggacagcgttgaagtctaactggactaaggagaagcgtgcagattaaagccaggtgtggatttagactgtgcttttgtcttccgatgtgctcttgctcattgataaaagcttcagcttttcactttttctattcagagtggctgggaatgagaagttgtaaattcactgcagcacgattgacatcttgaaagcaaaatgcctcccaaattggttcagttgctgggaactgtgaaatacttgcagcatttaattcaaccctgaattcagtaaaataattytgaaaaaaaygagtgtaaaattttgggcttccttttggtttttggaatgcagaaaatgaggaaaaaaaaaaaaaggtttggatgaaggcagggtgagcagaaataaggctttaaaatggagggggagaaagaatggttcaggatccttttggtgttattctacctgcaaagtgattctttccatcagtaacctgttacatagaaaacagttttcaaactgtgatatacaaaagcactctcagggcatcagcaggctggagcagctcaggagcaagcagtacaaagcatgtgagttctgcatctgtgcggt

SEQ ID NO: 28408 - DNA, 599 bp, Chicken  19866894246385_1
  misc_feature (1)..(91): n is any nucleotide
nnnnnnnnnnnnnnnnnnnnnnnnnnnnnnnnnnnnnnnnnnnnnnnnnnnnnnnnnnnnnnnnnnnnnnnnnnnnnnnnnnnnnnnnnnntccacttcagcatgaaactgaagatgtgaatagccaaatttttacaaaagcgtataaatttgggtttaactgaagaggtcatgtcctgacatttaaatgcaccgtttgcaccatgtgaaccagaaatgagcaattcccttaattacatacagaaaattaatactgcaagaagcacactttgcagacagattggctatgctaataaataygccaaaagcagcatttattactgaaaattaatacataagatatacatttcctttcaagaacttgtgttctcccagctgagaactgggtcatcatccccgttgagaactacaggttacaaaatattgaaaagacagatttccaaatatttcactaaatattacatgcacaccactacttacatcatgaaccacagttcttttagctggtgaaggaaaccagttatcagctgtttcctcttacartgtatcataaatcaataggcctaaattatttccagtccttccaattattcctttaa

SEQ ID NO: 28409 - DNA, 600 bp, Chicken  19866894246385_2
aaaattaatactgcaagaagcacactttgcagacagattggctatgctaataaataygccaaaagcagcatttattactgaaaattaatacataagatatacatttcctttcaagaacttgtgttctcccagctgagaactgggtcatcatccccgttgagaactacaggttacaaaatattgaaaagacagatttccaaatatttcactaaatattacatgcacaccactacttacatcatgaaccacagttcttttagctggtgaaggaaaccagttatcagctgtttcctcttacartgtatcataaatcaataggcctaaattatttccagtccttccaattattcctttaattagcagttggggctaaagcaacacagtgactagttttttaatatacacttacaggaatatgtacagaatacgtaggaatgactgcctgccaaaaataggaagtgctttggatgttgcagaatttcaattcaaagtcagggtgttggtgtagttagttttaatagttcatttgatcttactgtcagagctttcatgaatataacttttaaacaagtatgttagagatatgtatttagccgtgta

SEQ ID NO: 28410 - DNA, 600 bp, Chicken  19866894246395_1
gcaatgggatcaagcaccaacgtcccccatcctcgccccaagtagattttgggcatctctgcagagctccagagaaatccagacctcgccagcactgggagattgcatgggagagaggggggagatcttgcctcattttataccagtgtgtcaaggtgcaaacctgattgcaaaagaaagaaattagtgacaattataatcatcgtgccgggctgcagctctctaatagaaatctgtcattttggcaggataaatgctgctagaagagctccgtcaggcaaacacggctgtgtgcaaacrtgcaagtgagtggatgtgccagagtccactcttttagcacagagccaaacatcaaactgcaccgcaggggagcagaggcatgggtgaaggagcacagaagagggctggaaaagtcattgctgtgtgcacttgaggggtcctggaactggaaatccaaggacaaagcctccaaccccctcctgtttcactgacctcctcttgacactgtgtctaattgggctggggcaggagcaacaccacagcgatgggctcagagaagggacccaaagaccttggatgcgtcagtgagtgtgtcacgtg

SEQ ID NO: 28411 - DNA, 600 bp, Chicken  19866894246396_1
tcgcctggccccgccaggccctgccaggcccagccttgcttctcctcgccccgccccgcctcacctcgcctgccacgcctcgcctcaccccgcctcgccccactttgtctcatcacgccccaccccgcctcgcctcagcccgcctcgcctcacctcaccccgcctcgcttcccctcaccccggctttccccgcctcgtttgccacgcctcacctcgccccgcctcgtcccacctaaccccgccacgcctagcctcgcccagcctcgccccgccacgccctgcctcgtccaaccttgcccygcctcgctccacttcgcttcctctcgccccgccccaccccgcctcgcctcgcctcgccccgcctcgcctcgccccgccccaccttgcctcgcctgccacgccttgttttgccccgcctcgccccaccttgccctgccactcccgtcctgcaacgcatagccccaccccgcctcaccccgtctcttgtcgcctcatctcgcctcgccccgccttgcctcgcctcgccttgcccagccccgccttgcattgcctcgcctcgccttgcctcgccatgcctcgccctaccacgcctctccccac

SEQ ID NO: 28412 - DNA, 600 bp, Chicken  19866894246398_1
ggatgttctattgaaatagagggaatttgttaagctgatgagggaaagctgcagtggagaagcacaatagcatagtgggattaggcctggagtaagtgtctgtgctttggaggattaatgagaaaactgcaatggattttacacggtgaaaaggattcactgactgctttaggtgaaatgaaattagtcccactcatgctctctgagccctcgagcaagagataccggagcctgcccgtcacatgtaccaaccagatcccctccagctgctctccttatggaaaattccagcaccacaaygtgtgtctcctctgggcaacatctcmtaatggccatgggatggtgccaaaggggtacccctagtctgggcaggtctcagtatctctgacctcagaaagtctagatgccccaaatgctgcatgataaaaaggcaaggaagggcaggcgtgggaagaagaagaaaagggaagaaccagggaatcattcccattgaagaagagctctcacatccccaagcccaacccgtcccaccatgcccactgaccgtggcccttcagtgccacatctccacagccctggaacacctccagggatggtgac

SEQ ID NO: 28413 - DNA, 600 bp, Chicken  19866894246398_2
ttgttaagctgatgagggaaagctgcagtggagaagcacaatagcatagtgggattaggcctggagtaagtgtctgtgctttggaggattaatgagaaaactgcaatggattttacacggtgaaaaggattcactgactgctttaggtgaaatgaaattagtcccactcatgctctctgagccctcgagcaagagataccggagcctgcccgtcacatgtaccaaccagatcccctccagctgctctccttatggaaaattccagcaccacaaygtgtgtctcctctgggcaacatctcmtaatggccatgggatggtgccaaaggggtacccctagtctgggcaggtctcagtatctctgacctcagaaagtctagatgccccaaatgctgcatgataaaaaggcaaggaagggcaggcgtgggaagaagaagaaaagggaagaaccagggaatcattcccattgaagaagagctctcacatccccaagcccaacccgtcccaccatgcccactgaccgtggcccttcagtgccacatctccacagccctggaacacctccagggatggtgacgcctccctgggcagctgtgccagtgc

SEQ ID NO: 28414 - DNA, 600 bp, Chicken  19866894246403_1
gtactttatctttctgccctcactctgctctgaagatacaaatacctgaattcctgtcataaaccgttccttcctttatggaaagtgatctgaaaagttagaggagaggagaaaaaatgtcttgttcttgggtgtaaacctctatgctgtatcttaaaagaaagttatcgctatggaaacaagttgttgcttcaaaatggccctcacctgtctcaatcgctaccaccaatctacattactcacaactgcctttggtgagtctctgcgtcatttctcatggagcttgtcacaaagaaacamaatgattgacatctcttgttctggaaaagatgtgacctgttccatctaaaggcagagtgaaccgcaaagtggaactgaaacgcttgaagaactccacagaacactccgaagtttcactgtcagctcattttgtttggcaagccatgatcactgcttgtatattatgagaaaaagaaaaaaaaaagcctgatagttatcacatgccatcagacttcttgatgtgacaacccatctgtgtgctcatcccatcgttttgtggctcagaatcaaagacttgacagttcagagtctagagcagca

SEQ ID NO: 28415 - DNA, 600 bp, Chicken  19866894246403_2
ttggtggcaggtccccaaaatgagatggaactgatgcaaaacatatatccagtaggggaatactacatactaggcctcctccttgtcaatcttgaggactcctattatttatttttcgatttattttacttcagttgagctgtccacaaaccttggattactggaagatcagctactgcgcatcttagtaaaatctctgccatagtcaagacctcaaaaatagcattttcagtgcatcgattgcagatcccctgtcaaaccatgctgtactttcaagcaagtttgtacaagcaatgaagmaatctatatctagtaaaaaataattgaatggttctgtactgctactggacaatctgcaaggcctctcaaatcaaaggattttggaaacccccttctccagaaaagaaatttagaaagataaactactatagtgctgtaaaagtaggcaccaaacacagctgagaatcatttttccctttatgctgttctcgctggtgattcacaggcttaatcctccctctactctttaaaaacatgcatgccagcttagttggtacacaggtccatagccatcaaayacatatttctacagcttagagc

SEQ ID NO: 28416 - DNA, 565 bp, Chicken  19866894246403_3
aagtttgtacaagcaatgaagmaatctatatctagtaaaaaataattgaatggttctgtactgctactggacaatctgcaaggcctctcaaatcaaaggattttggaaacccccttctccagaaaagaaatttagaaagataaactactatagtgctgtaaaagtaggcaccaaacacagctgagaatcatttttccctttatgctgttctcgctggtgattcacaggcttaatcctccctctactctttaaaaacatgcatgccagcttagttggtacacaggtccatagccatcaaayacatatttctacagcttagagctctcaagtggatatgtcatagacagctgaagtgttatgaagtatttgggtactggtgaaggaggggatagtttaatttattgtttgctacagtagctgccacactttttagcagcttttttaaacaccttgctgcttgtagagcatagaagcgtagaatcaaaatgctttggcttgaaagggaccttaaagaccatctagttccgacccctgctataggcagggacacctccctttagaccag

SEQ ID NO: 28417 - DNA, 600 bp, Chicken  19866894246404_1
aatctctatatattttcatagactcttcatcccagtagcacttcttgatatcaaacccataaatgttatatcacctctaaacttcctgttcaatatagcccagtctctgtttcaacacattataagatggccatctgtgtatatgtcagcatcaatcacagcacagtgattcctcaaatggttttaatagttggcagaacccagtaaagaaagctgcaagagcaaagcagctcagtgatagctaaataaaaaacataatggatttcatttaaattatattcttaaaaaatttgaattcaratactgatttctgtgttcttgcttttaaattaacagttcataatcaattccattttgattctcctgtattagcactataaaatcaactaagatggatatataagtttatatgatttttcctctctatctttcagttgtttcatcaagcatattcacataggattttttattattattctttatttgattaaaatattatttagaataataattttagactgcagcagcaaggacaatgaacttctgaaatctgattctaaggtaaggtcatcaggtgcaacacttcagttttcagattat

SEQ ID NO: 28418 - DNA, 436 bp, Chicken  19866894246404_2
tgattctcctgtattagcactataaaatcaactaagatggatatataagtttatatgatttttcctctctatctttcagttgtttcatcaagcatattcacataggattttttattattattctttatttgattaaaatattatttagaataataattttagactgcagcagcaaggacaatgaacttctgaaatctgattctaaggtaaggtcatcaggtgcaacacttcagttttcagattatattttaaaatagcacactccaatttagatattgttcatttaagaacatcaatttmattgcttacttaataataattgaatataaaattggaaacctgaaaattattaaggaggtatgcaaatgaatgtttgtgatggtaaggatttattttaaaagttcctaatgatgccatacaaaatacaaggttttaa

SEQ ID NO: 28419 - DNA, 600 bp, Chicken  19866894246406_1
taccacagaaaagattgtactctaaaccctggaaagttggcacggcagcacagcatgttccccaccccccttcccatttctgtgttacagaatttgtgcctttttgttgcattgttccactttttttctcttttttcttttttcttttcttttctttttcttttttttttttttctgtttgggtttctggctcttatggctgcttggctggagagaggcctgccaaggtttagatgacaaatcgtcctgcagcatctgctagcaactgataagacagagcctgataaagccccatgtgcygctcctgctggacaggaggaagacaccgttggctggggaggggggaccttcccagcccttcccacccttggaatccagaagccccgcattgaggagccaaggctgggctccagccaagtgccccaaattggaaaatcaggcccagggcttgggagcctcgttcagcctctgcctttgagtgtggtgttttctttccaggctgttgactatttcacaaggttaaacacatatgtaaagcaaaccacaatcccaaccagtcattctgccttgaataagtatctgcagttttttggaagagat

SEQ ID NO: 28420 - DNA, 600 bp, Chicken  19866894246406_2
ggaaaatcaggcccagggcttgggagcctcgttcagcctctgcctttgagtgtggtgttttctttccaggctgttgactatttcacaaggttaaacacatatgtaaagcaaaccacaatcccaaccagtcattctgccttgaataagtatctgcagttttttggaagagataacaatgctgtctttgtttcctccttgctttcctccctccctacctctcttttttcattccctctctccaagcacgttggccatgctagcaacagcatttcatcccacaaacaatcagggaaacggggytgagcacgtgggtagggtggcaggaaggcagaaaccagtttcaaccamaaaggagggagccgtgtgctgagcacagggtgccaccatccccattgctgaagtgtggtgcacagggatggggtgagagctgctgtgctgtggggctttggggcacgtgggaagccccaggtgtgtggaagcagatggtagtggtactaaagtgaattactggattacataccaaatggagttgcagggaatggaagtgtagcgtgagcaggataaggaaatgtgccactttgttctgagggctccctctca

SEQ ID NO: 28421 - DNA, 600 bp, Chicken  19866894246406_3
agtgtggtgttttctttccaggctgttgactatttcacaaggttaaacacatatgtaaagcaaaccacaatcccaaccagtcattctgccttgaataagtatctgcagttttttggaagagataacaatgctgtctttgtttcctccttgctttcctccctccctacctctcttttttcattccctctctccaagcacgttggccatgctagcaacagcatttcatcccacaaacaatcagggaaacggggytgagcacgtgggtagggtggcaggaaggcagaaaccagtttcaaccamaaaggagggagccgtgtgctgagcacagggtgccaccatccccattgctgaagtgtggtgcacagggatggggtgagagctgctgtgctgtggggctttggggcacgtgggaagccccaggtgtgtggaagcagatggtagtggtactaaagtgaattactggattacataccaaatggagttgcagggaatggaagtgtagcgtgagcaggataaggaaatgtgccactttgttctgagggctccctctcacaccgtagcacaaatcaccaggttgggccaacccagcactgagccacc

SEQ ID NO: 28422 - DNA, 600 bp, Chicken  19866894246408_1
gagagtggctggagaagcatggagcatcattactcctctaccagagcaaagacaccatctgcagttgttatgtggacagctgccatctcctgctgtcctcagtgcttcctgtgttactcatggctcttggactttgcagagatggtgtaattttctctcaatggctcatgtcagtttaatcatctctcctgaagggggctgttctcagtgcttgtttctgtctgcctcggatccctcaccttttttgcatttgttggtacagaagaactgacctacagctccataaccagtcactcaagsatctgctycagcatcctctggaactcagaaagcttcagktccctcagtgaaaggcctgggaaatgctgtagcatgtagctttggagagaacctcctctgcggggaagaagtttgctattgcctactcctagggtctgctttatgtcctgcaaccaaagcaggagcgggagattaattccattaaaataaaatacaaacttcattattacttgctttgttttgttttccatacacatttccatttgcttttaattcatgagactcctggcctcatgcctctgatgagaagcgccttcacca

SEQ ID NO: 28423 - DNA, 600 bp, Chicken  19866894246408_2
ctggagaagcatggagcatcattactcctctaccagagcaaagacaccatctgcagttgttatgtggacagctgccatctcctgctgtcctcagtgcttcctgtgttactcatggctcttggactttgcagagatggtgtaattttctctcaatggctcatgtcagtttaatcatctctcctgaagggggctgttctcagtgcttgtttctgtctgcctcggatccctcaccttttttgcatttgttggtacagaagaactgacctacagctccataaccagtcactcaagsatctgctycagcatcctctggaactcagaaagcttcagktccctcagtgaaaggcctgggaaatgctgtagcatgtagctttggagagaacctcctctgcggggaagaagtttgctattgcctactcctagggtctgctttatgtcctgcaaccaaagcaggagcgggagattaattccattaaaataaaatacaaacttcattattacttgctttgttttgttttccatacacatttccatttgcttttaattcatgagactcctggcctcatgcctctgatgagaagcgccttcaccaggcaattg

SEQ ID NO: 28424 - DNA, 600 bp, Chicken  19866894246408_3
accagagcaaagacaccatctgcagttgttatgtggacagctgccatctcctgctgtcctcagtgcttcctgtgttactcatggctcttggactttgcagagatggtgtaattttctctcaatggctcatgtcagtttaatcatctctcctgaagggggctgttctcagtgcttgtttctgtctgcctcggatccctcaccttttttgcatttgttggtacagaagaactgacctacagctccataaccagtcactcaagsatctgctycagcatcctctggaactcagaaagcttcagktccctcagtgaaaggcctgggaaatgctgtagcatgtagctttggagagaacctcctctgcggggaagaagtttgctattgcctactcctagggtctgctttatgtcctgcaaccaaagcaggagcgggagattaattccattaaaataaaatacaaacttcattattacttgctttgttttgttttccatacacatttccatttgcttttaattcatgagactcctggcctcatgcctctgatgagaagcgccttcaccaggcaattgcatgctgtgggaaaggactgctgtccgccgt

SEQ ID NO: 28425 - DNA, 600 bp, Chicken  19866894246409_1
aaaaagcaaaccaaagctattcttagtcttcaggttttgcatttaatccacaatgcaaaacataaatctcttttgtcattaatgcgtgcagcatcacagttctgtcatattggcccatggtcttggacctcatcttcgtcgtacttctccttctagatccttacctccaagttgtatttaaggggagcagtcatttcaccttaatttagctgtctgaggtgtgggcaaccaatctgggttacgtgcctacgtgccagctgtggtaagtagggaaacaggcttattggttgtaccaatagrtggggcctggtgacccgacctgaagttaggcatctaccctctagacctctgcatatgaattcagtgatcacaagctaagacccatgtatttctcatcagaatcaagtttttaccatgcgtgttaactgtggaaattgctaattagktagccttgacaaatgctgttttctrcactccttttgataacgaatgctgaacgcaggattgttcctggttgtcacttaaaatatatatacttttatgactactccttctttggcatcaaatatatgctgcagttgtttttcaggaccttcatga

SEQ ID NO: 28426 - DNA, 600 bp, Chicken  19866894246409_2
ctccttctagatccttacctccaagttgtatttaaggggagcagtcatttcaccttaatttagctgtctgaggtgtgggcaaccaatctgggttacgtgcctacgtgccagctgtggtaagtagggaaacaggcttattggttgtaccaatagrtggggcctggtgacccgacctgaagttaggcatctaccctctagacctctgcatatgaattcagtgatcacaagctaagacccatgtatttctcatcagaatcaagtttttaccatgcgtgttaactgtggaaattgctaattagktagccttgacaaatgctgttttctrcactccttttgataacgaatgctgaacgcaggattgttcctggttgtcacttaaaatatatatacttttatgactactccttctttggcatcaaatatatgctgcagttgtttttcaggaccttcatgatctatgtctgccctccatcattcatgactgtttgttaaaaaacgaattcctgtcagtaaggccatggtaccagcagcagcctttactgttcacttctcaaatgtgtgttttcacattttaacctgtgctgctgctcttctctgggg

SEQ ID NO: 28427 - DNA, 600 bp, Chicken  19866894246409_3
ttgtatttaaggggagcagtcatttcaccttaatttagctgtctgaggtgtgggcaaccaatctgggttacgtgcctacgtgccagctgtggtaagtagggaaacaggcttattggttgtaccaatagrtggggcctggtgacccgacctgaagttaggcatctaccctctagacctctgcatatgaattcagtgatcacaagctaagacccatgtatttctcatcagaatcaagtttttaccatgcgtgttaactgtggaaattgctaattagktagccttgacaaatgctgttttctrcactccttttgataacgaatgctgaacgcaggattgttcctggttgtcacttaaaatatatatacttttatgactactccttctttggcatcaaatatatgctgcagttgtttttcaggaccttcatgatctatgtctgccctccatcattcatgactgtttgttaaaaaacgaattcctgtcagtaaggccatggtaccagcagcagcctttactgttcacttctcaaatgtgtgttttcacattttaacctgtgctgctgctcttctctgggggtagtgcgagatgtttaaatacctc

SEQ ID NO: 28428 - DNA, 446 bp, Chicken  19866894246409_4
caaatagctagaattttgtccctcttttggtctaaatgccaaagaaagttaagactatgacatgtttttcttcatagcactgagatgtacacttaactgagactcacaagcaaatgtgaaaaaaagtacagaaaatcgacttgaactgagtactagagacctgcagaccaatgaaggacatcactgaagtgtcttaaagaagtcagtttattccccaccatatactaacagctcaatactgatttaccttatgaattgaaatgacccaaggtttgttgcattgtcatcccaggttgcacmtatgcagcttttgagggtatagaagtcctcagtctgttatagaagcagcaactttcaaaactaaatgtctgagtatagcttatcttggtcaaaactaaacatccactgaggatggcttatcttggtaaatggactcatcaatgaag

SEQ ID NO: 28429 - DNA, 599 bp, Chicken  19866894246416_1
  misc_feature (1)..(104): n is any nucleotide
nnnnnnnnnnnnnnnnnnnnnnnnnnnnnnnnnnnnnnnnnnnnnnnnnnnnnnnnnnnnnnnnnnnnnnnnnnnnnnnnnnnnnnnnnnnnnnnnnnnnnnnnaaacaagatgaaggcaattttgcattcaagatacaaaatgcacccaagatattatggaaatatgctggccctctactggattcactctacactgcaaattgtagttactatattcaaacaccagtgacagctataaagatgttctttccacagaagtggaaagttacggtaataccgtgccataaaatagaggtgwgatgcaagaaggaattagtagactaagtatgagcagctgaactatgaagctgaaaaataaatttaaaaatagaagtagaaacgtgacacagaaagatagttggaaggtattttaaagaaggcagtggcttatttgaaagcctggaaraatggaccttctraaactatacrtatgcacagaaacaactacttcaaatacgctttcctcttacctgaaagatttccatcaatttcatctggctgtagactcgaaacactggtggaatccattccttgctggagatccaaaattttccttcg

SEQ ID NO: 28430 - DNA, 600 bp, Chicken  19866894246416_2
ccaagatattatggaaatatgctggccctctactggattcactctacactgcaaattgtagttactatattcaaacaccagtgacagctataaagatgttctttccacagaagtggaaagttacggtaataccgtgccataaaatagaggtgwgatgcaagaaggaattagtagactaagtatgagcagctgaactatgaagctgaaaaataaatttaaaaatagaagtagaaacgtgacacagaaagatagttggaaggtattttaaagaaggcagtggcttatttgaaagcctggaaraatggaccttctraaactatacrtatgcacagaaacaactacttcaaatacgctttcctcttacctgaaagatttccatcaatttcatctggctgtagactcgaaacactggtggaatccattccttgctggagatccaaaattttccttcgtagctgttctatgtcactctctttactatccagctgcatctgtagctcattcctgtatgttgattcttctgctagttgctgtatttgtatacatatacattgtcaccatggtataaaaaatatgggagcaaagtatttaaaaacaaca

SEQ ID NO: 28431 - DNA, 600 bp, Chicken  19866894246416_3
gaaatatgctggccctctactggattcactctacactgcaaattgtagttactatattcaaacaccagtgacagctataaagatgttctttccacagaagtggaaagttacggtaataccgtgccataaaatagaggtgwgatgcaagaaggaattagtagactaagtatgagcagctgaactatgaagctgaaaaataaatttaaaaatagaagtagaaacgtgacacagaaagatagttggaaggtattttaaagaaggcagtggcttatttgaaagcctggaaraatggaccttctraaactatacrtatgcacagaaacaactacttcaaatacgctttcctcttacctgaaagatttccatcaatttcatctggctgtagactcgaaacactggtggaatccattccttgctggagatccaaaattttccttcgtagctgttctatgtcactctctttactatccagctgcatctgtagctcattcctgtatgttgattcttctgctagttgctgtatttgtatacatatacattgtcaccatggtataaaaaatatgggagcaaagtatttaaaaacaacaccttactacttct

SEQ ID NO: 28432 - DNA, 600 bp, Chicken  19866894246416_4
ggccctctactggattcactctacactgcaaattgtagttactatattcaaacaccagtgacagctataaagatgttctttccacagaagtggaaagttacggtaataccgtgccataaaatagaggtgwgatgcaagaaggaattagtagactaagtatgagcagctgaactatgaagctgaaaaataaatttaaaaatagaagtagaaacgtgacacagaaagatagttggaaggtattttaaagaaggcagtggcttatttgaaagcctggaaraatggaccttctraaactatacrtatgcacagaaacaactacttcaaatacgctttcctcttacctgaaagatttccatcaatttcatctggctgtagactcgaaacactggtggaatccattccttgctggagatccaaaattttccttcgtagctgttctatgtcactctctttactatccagctgcatctgtagctcattcctgtatgttgattcttctgctagttgctgtatttgtatacatatacattgtcaccatggtataaaaaatatgggagcaaagtatttaaaaacaacaccttactacttcttttttcccaa

SEQ ID NO: 28433 - DNA, 600 bp, Chicken  19866894246417_1
tctgagtgaagggtaaggttaagatgtggaaatggtactctttcatgtggaaagagtcacatgaaaatctgtaccaacattaatgtatcactatttatcagactacagaaatagtaaattcggagttagtaaaatgtatgcctgtattgacatctggcttctacacacacattttatctatggtagctatttgtttgtatattttacacatacataaataggtagacatacttaagtagtctggaattaaaaaaaaaaaacataattacttaagattctagtgaagaaatatctgtgggytgtcggaagaaactggttgtattttacattcaggagaatatttctgagaaaaaagaaaagaaaagaaaagaaaaaaaaccaaagcacaattttccatccttaacttcccctgtaaacagctgagaaaaaaaaggaaaaaaagaagacttatttaattattttcttgctcttttttatatgctcccatgcagacatacataaataactttagaaagctctttaattacaatatgcaggaatgaggtattgtattcctgttgtttatatcaatctaatcagagactaagtataccagtttta

SEQ ID NO: 28434 - DNA, 600 bp, Chicken  19866894246417_2
aaaagaaaaaaaaccaaagcacaattttccatccttaacttcccctgtaaacagctgagaaaaaaaaggaaaaaaagaagacttatttaattattttcttgctcttttttatatgctcccatgcagacatacataaataactttagaaagctctttaattacaatatgcaggaatgaggtattgtattcctgttgtttatatcaatctaatcagagactaagtataccagttttattgatatcctgatatattaaatcagacaacaaccatttgtactaataaggtagtaaaagtatttrccaatttatgtactgcagcagaattatatattaaagtaaaatggagacttaacaaccttttttctaacctttttttctccccctttccttccttcaaccttyctgacagtttctgaacaatcccctgctctgcccagcagaaaaacaataattaaataattgtattttctaatctttcttctacagatgtaagatagcacaaggtatgccaaacacgtaatggcagatttattctacagatatagatgcacaatgtgagatctcttccagcactctcagctgtgtttacacatttctact

SEQ ID NO: 28435 - DNA, 600 bp, Chicken  19866894246417_3
gaaaaaaagaagacttatttaattattttcttgctcttttttatatgctcccatgcagacatacataaataactttagaaagctctttaattacaatatgcaggaatgaggtattgtattcctgttgtttatatcaatctaatcagagactaagtataccagttttattgatatcctgatatattaaatcagacaacaaccatttgtactaataaggtagtaaaagtatttrccaatttatgtactgcagcagaattatatattaaagtaaaatggagacttaacaaccttttttctaarctttttttctccccctttccttccttcaaccttyctgacagtttctgaacaatcccctgctctgcccagcagaaaaacaataattaaataattgtattttctaatctttcttctacagatgtaagatagcacaaggtatgccaaacacgtaatggcagatttattctacagatatagatgcacaatgtgagatctcttccagcactctcagctgtgtttacacatttctacttactatcctggaaatacttctgtattgtcaaaaaagactgtcttgtggatggcttctctctcctgttc

SEQ ID NO: 28436 - DNA, 600 bp, Chicken  19866894246417_4
tcttttttatatgctcccatgcagacatacataaataactttagaaagctctttaattacaatatgcaggaatgaggtattgtattcctgttgtttatatcaatctaatcagagactaagtataccagttttattgatatcctgatatattaaatcagacaacaaccatttgtactaataaggtagtaaaagtatttrccaatttatgtactgcagcagaattatatattaaagtaaaatggagacttaacaaccttttttctaacctttttttctccccctttccttccttcaaccttyctgacagtttctgaacaatcccctgctctgcccagcagaaaaacaataattaaataattgtattttctaatctttcttctacagatgtaagatagcacaaggtatgccaaacacgtaatggcagatttattctacagatatagatgcacaatgtgagatctcttccagcactctcagctgtgtttacacatttctacttactatcctggaaatacttctgtattgtcaaaaaagactgtcttgtggatggcttctctctcctgttcccaaaatatttttgtcatatattccttatggcaa

SEQ ID NO: 28437 - DNA, 600 bp, Chicken  19866894246417_5
atatcatcaattgtgaaatttgtttgtgattttaatcttgatatttcaacagctacaattttgctcccaccaccttgacaaatattatttatttttcctttgttttttctttgcttttctttcttttttatttatttttatttttatttaaattattattattttttcaagggggagtggtttaaaggtgagacaggggaggtttagattagatactaggaacacatttttcacacaaagggtggtgacacactggaacaggttgcccaaggaggttgtggatgccccatccctggaggyattcaaggccaggctggatgtggctctgggctgcctggtctggtggttggcgaacctacacatggcaggggggttgaaactggatgatcattgtggtccttttcaatccaggccattctatgattctctagtactttataagatgagttattgctaggtattcttcccatcaaggataaaataactgacatataaactctctgtgtgaaggaagagaaataaaggtggtagcatttctctgttgtaacactttaataactttaatatcttataaatgtgagtataatttaaagaatggct

SEQ ID NO: 28438 - DNA, 600 bp, Chicken  19866894246434_1
tataagttaaggtaactatatagttatactcagcagctatatgaataagctgttctacagatctattaactgagattctgtcaaacgcctttcaaaccagagctctgctgcataccaacagctgaagcatttaagatgtgagggcagcaagtcagcacccccaagctgtactgagagcccaaagccaagagagcaacacgacagacagcattaccatcacaggttcatgcacggagccaaatgccattacattcctcacacccgaaacatgcacagttcagatgggtgactgaacaagcyttccatcaacagctttcacccaagcagggaaagagctgaatgcatgacttgggaaaccagaagcaaaaaaaagccccacaaaggtagagtaatgctgggttagattaggtgtcctctaactcaggccttacaagtcttgtgcatgggaggtgagaacacagcatctgacccaggaayccagatcaaggatgcaagctgggcaccccaacatcctcagaactgactacatcagcaagatacagggaattactcaatgatttcataaagtacatttaattataacgtatcagctcctggagt

SEQ ID NO: 28439 - DNA, 600 bp, Chicken  19866894246434_2
cccaaagccaagagagcaacacgacagacagcattaccatcacaggttcatgcacggagccaaatgccattacattcctcacacccgaaacatgcacagttcagatgggtgactgaacaagcyttccatcaacagctttcacccaagcagggaaagagctgaatgcatgacttgggaaaccagaagcaaaaaaaagccccacaaaggtagagtaatgctgggttagattaggtgtcctctaactcaggccttacaagtcttgtgcatgggaggtgagaacacagcatctgacccaggaayccagatcaaggatgcaagctgggcaccccaacatcctcagaactgactacatcagcaagatacagggaattactcaatgatttcataaagtacatttaattataacgtatcagctcctggagtctgtgcaacagcagaattttgctgctcctgaaacatgttatactgaaaggctcggagaacagattgctctgatcactcaaccaagagttacacagcagaagcagtgctggctccatgcacacttgctgtcaccacgattccactgtgaaggaggcagcccaccacccagagacagga

SEQ ID NO: 28440 - DNA, 565 bp, Chicken  19866894246435_1
cccaatccagccagcttttttgcctttctaagcagttggtggagacacacagttcttctgaagggtgattcggtcgctccagagatggatgagatgagtcgctttctaaaagtgctttcccccattgactagagagggggaggctagacgcttggctcacactaaatacctgactgctctgcagctaaaattaggtgagatggatcttatctggtagaactaagatattggtagataactagatattggatatctactacagaccaatatttttagagcagtcatgtaggaaagctacaycaaggggcccttaagagctgcctccatagacctttggactgcctgtgctgaacttattgcaagccttggtgtacagaggagctcctgaaggccaggaaaaggatagcatgttgataaaaaggcaaataggacagcccgggtaactgtaggcatgatatcagtcccatgcaagagtggaaatttctacatacaattcattccatatggaattaaatgagaagaatacaatcaatgtcagtcaagttgaatttgatagaaaaacagt

SEQ ID NO: 28441 - DNA, 599 bp, Chicken  19866894246439_1
  misc_feature (1)..(206): n is any nucleotide
nnnnnnnnnnnnnnnnnnnnnnnnnnnnnnnnnnnnnnnnnnnnnnnnnnnnnnnnnnnnnnnnnnnnnnnnnnnnnnnnnnnnnnnnnnnnnnnnnnnnnnnnnnnnnnnnnnnnnnnnnnnnnnnnnnnnnnnnnnnnnnnnnnnnnnnnnnnnnnnnnnnnnnnnnnnnnnnnnnnnnnnnnnnnnnnnnnnnnnnnnnnnnncagaacagactggggagccacaacctttctggctgacttgtcccacaagcagacctcctgatgtgcaaaagagctgtccagacccctggttgtrgggaacttcacaatctgggagrtccccaggggcctgaggaaagaggggagtgtaggtgcaagggtcctcmtgtctattgactttctgagcaggtagccatgttgcatgaggaaatcaccaggcagcttggtattcaggaactgggggggagagatgcatagcactgtgcagtgacatgggcagaccaacagccctgacttaagtccttgcaaggaggagaagctaagctatctcccacccctgaggagacrgagcacagtaacacacaagatgaaggggatggcacactsgtctctgga

SEQ ID NO: 28442 - DNA, 599 bp, Chicken  19866894246439_2
  misc_feature (1)..(184): n is any nucleotide
nnnnnnnnnnnnnnnnnnnnnnnnnnnnnnnnnnnnnnnnnnnnnnnnnnnnnnnnnnnnnnnnnnnnnnnnnnnnnnnnnnnnnnnnnnnnnnnnnnnnnnnnnnnnnnnnnnnnnnnnnnnnnnnnnnnnnnnnnnnnnnnnnnnnnnnnnnnnnnnnnnnnnnnnnnnnnnnnnnnnnnnncagaacagactggggagccacaacctttctggctgacttgtcccacaagcagacctcctgatgtgcaaaagagctgtccagacccctggttgtrgggaacttcacaatctgggagrtccccaggggcctgaggaaagaggggagtgtaggtgcaagggtcctcmtgtctattgactttctgagcaggtagccatgttgcatgaggaaatcaccaggcagcttggtattcaggaactgggggggagagatgcatagcactgtgcagtgacatgggcagaccaacagccctgacttaagtccttgcaaggaggagaagctaagctatctcccacccctgaggagacrgagcacagtaacacacaagatgaaggggatggcacactsgtctctggaagaggaggatcctcccccttgt

SEQ ID NO: 28443 - DNA, 599 bp, Chicken  19866894246439_3
  misc_feature (1)..(136): n is any nucleotide
nnnnnnnnnnnnnnnnnnnnnnnnnnnnnnnnnnnnnnnnnnnnnnnnnnnnnnnnnnnnnnnnnnnnnnnnnnnnnnnnnnnnnnnnnnnnnnnnnnnnnnnnnnnnnnnnnnnnnnnnnnnnnnnnnnnnnnnncagaacagactggggagccacaacctttctggctgacttgtcccacaagcagacctcctgatgtgcaaaagagctgtccagacccctggttgtrgggaacttcacaatctgggagrtccccaggggcctgaggaaagaggggagtgtaggtgcaagggtcctcmtgtctattgactttctgagcaggtagccatgttgcatgaggaaatcaccaggcagcttggtattcaggaactgggggggagagatgcatagcactgtgcagtgacatgggcagaccaacagccctgacttaagtccttgcaaggaggagaagctaagctatctcccacccctgaggagacrgagcacagtaacacacaagatgaaggggatggcacactsgtctctggaagaggaggatcctcccccttgtctctgaagtccccataagcagctgttcagaggctctggggatggaaag

SEQ ID NO: 28444 - DNA, 600 bp, Chicken  19866894246439_4
caagcagacctcctgatgtgcaaaagagctgtccagacccctggttgtrgggaacttcacaatctgggagrtccccaggggcctgaggaaagaggggagtgtaggtgcaagggtcctcmtgtctattgactttctgagcaggtagccatgttgcatgaggaaatcaccaggcagcttggtattcaggaactgggggggagagatgcatagcactgtgcagtgacatgggcagaccaacagccctgacttaagtccttgcaaggaggagaagctaagctatctcccacccctgaggagacrgagcacagtaacacacaagatgaaggggatggcacactsgtctctggaagaggaggatcctcccccttgtctctgaagtccccataagcagctgttcagaggctctggggatggaaagagaagaaagtgtagataatggtttggatgcagaaacaggcacattaggatagtccaatcagggacacaagtcagaaccagtgccaccaaaaaaagtcagagtcttagtcactggggactcagtgcacagaggggcactgaggcacccatttgctgcctgtatagtctctctagagaagtttg

SEQ ID NO: 28445 - DNA, 600 bp, Chicken  19866894246439_5
cctggttgtrgggaacttcacaatctgggagrtccccaggggcctgaggaaagaggggagtgtaggtgcaagggtcctcmtgtctattgactttctgagcaggtagccatgttgcatgaggaaatcaccaggcagcttggtattcaggaactgggggggagagatgcatagcactgtgcagtgacatgggcagaccaacagccctgacttaagtccttgcaaggaggagaagctaagctatctcccacccctgaggagacrgagcacagtaacacacaagatgaaggggatggcacactsgtctctggaagaggaggatcctcccccttgtctctgaagtccccataagcagctgttcagaggctctggggatggaaagagaagaaagtgtagataatggtttggatgcagaaacaggcacattaggatagtccaatcagggacacaagtcagaaccagtgccaccaaaaaaagtcagagtcttagtcactggggactcagtgcacagaggggcactgaggcacccatttgctgcctgtatagtctctctagagaagtttgctgcctgccagaggcccacacttcagacaccgggaagaa

SEQ ID NO: 28446 - DNA, 600 bp, Chicken  19866894246449_1
caacgatctcctgagtagattttccagctggttttgcacttgatttagaggagcttaacttagatgcctttctccacctcatttataggaatgtcatacgaggtggtgtcaaaagctttatggaaatccctgcaagtggcatcttccctgtgatgctgagatggtgctcggaggcgaccgctgcatgctccggatctacaaggtcaggagctgtccaaccccaaacccaactcatccaaagaccttcaatctattccttcctcccatcatctccttgaagatttcacacttccatccccrgagctcgcgggagtaattccctttttagcaaaggcaaaaagcaaagggagcctcgtgctcgtgactgtcgcctcccaacaccgtttcagcactaccgccctccatctgttgtcagcagttgttggggcctctgaggctgtggctcacgcggaggggccctcaggctttgtccatcattccttgagttcctcttaaccatccaacccaaaccccgtgcagcacttttcccttctgccctatgtttcaactccatacagacttggtgttgaaaaattggtgtccacactggcatccacggtg

SEQ ID NO: 28447 - DNA, 600 bp, Chicken  19866894246450_1
tttacagggtagataatggcaggacaagaggaaatggttttaagttgaaggagggaagatttatgttggatatcagggggaagttctttactatgaaagtggtgaggtgctggaacaggctgtccagagaggttgtggatgccccgtccctggaggtgttcaaggccaggttggatgggaccctgggcagcatggtctactattagatacagaggttggggtaggggagttggagcttgataatccttgtggtcccttccaacccaagccactctatgattctatgattaatacagaagwttatatttggtaactgccatgtggcactaatgaagaaacacaagtgataaatttagtcgtgatctgtttttcatttggggtaaaactacatgaatcaaattcctggaagatgtagattagtgatgataatagaaaaaccgttggcagtgctgagcagctacgtcactgtcattattacataatagagcagagtggcagaccttgaaaggagcagawagtacagatgctgtttacttagaagataacaatattgaagtctttatgtttagtcatttgctgtggatgtaggtctccacaatt

SEQ ID NO: 28448 - DNA, 600 bp, Chicken  19866894246450_2
tggggtaggggagttggagcttgataatccttgtggtcccttccaacccaagccactctatgattctatgattaatacagaagwttatatttggtaactgccatgtggcactaatgaagaaacacaagtgataaatttagtcgtgatctgtttttcatttggggtaaaactacatgaatcaaattcctggaagatgtagattagtgatgataatagaaaaaccgttggcagtgctgagcagctacgtcactgtcattattacataatagagcagagtggcagaccttgaaaggagcagawagtacagatgctgtttacttagaagataacaatattgaagtctttatgtttagtcatttgctgtggatgtaggtctccacaattcatattcttagatgcatttgagctagatctcctttgcatcactaacatacattcttattttaactagttacctataaaggcatccagaaggaaaacagtgagtttgtctacacttaaaatatcactttctttattgtagagctagtaggaaatccaagcaaaggaagacaagaaactccccasctaaccctcagttattaggtgtagaaatgttgt

SEQ ID NO: 28449 - DNA, 600 bp, Chicken  19866894246450_3
agagcagagtggcagaccttgaaaggagcagawagtacagatgctgtttacttagaagataacaatattgaagtctttatgtttagtcatttgctgtggatgtaggtctccacaattcatattcttagatgcatttgagctagatctcctttgcatcactaacatacattcttattttaactagttacctataaaggcatccagaaggaaaacagtgagtttgtctacacttaaaatatcactttctttattgtagagctagtaggaaatccaagcaaaggaagacaagaaactccccasctaaccctcagttattaggtgtagaaatgttgtccagcattaaacagtttattaagagacattttcctatgtcataagtatttccctaagaaatggatgtactgtttttcattggtttctcctcaaatgctggatctgttgttatgaaagactgtaatggaagccctgagaggttacgtcctgtaacaaaaccccaaagctgcatagatataaagccccaaatatataattgagaacactaaacaattcatgtgtagactggctacaccagtatcattaaatactcagtaagatgaggca

SEQ ID NO: 28450 - DNA, 599 bp, Chicken  19866894246459_1
  misc_feature (1)..(40): n is any nucleotide
nnnnnnnnnnnnnnnnnnnnnnnnnnnnnnnnnnnnnnnnctttccttattatattccgatcttcccatttgcaaggtgggagaatgtgagttctgtgtctaaacaaggaccaggagccagaacagaggtgctccatcccacagcaataatgactggaagtcagagatgtgtcatctttcctacttgtgcctcagtctctcatataacccagggaatcactctgttaaacaccagcaacaaatatggcaacgatggccatgttataccataaaaaaataaatagaaataaataaaattcmcaatgcccatttgtgattaggaaaacagaagccttggtttacacagtgggtattaaaagtgtgataaactcagtctacaggcatataggaaatctgtggaagagcaaggccctgagagcatctctgcccaatgtcccacttacattttctgccctggttgatttttcattactggagtagttacctactaatctaatgacagtaactctgctcaccaggggcgtgtaaagaccaattcattccagattggaaagttctttgagaaaccctgaatggaaggtgctatagaagtgcaatgt

SEQ ID NO: 28451 - DNA, 600 bp, Chicken  19866894246463_1
aggcaggagcagaatgcagcagcagcactgagcacacctcggtgtaaccaggaggttcttcttcaccgttacttttgtctttttgtcttttccagccccaacaagtctatgattcctatcattttcagcttctcatttctccctaggaaggacgccctgcatccactctggcaggtttatgcctcaagaaaaacctatccaaaatgcaaaacccaaatatcttcttaccctcgtcctaacattgggtacaatcacccgtccatgaaggcacagatcctttggcaccatccaggcaattcycttgctctcttctgctcatcatcacaacttgtaagccgtacagagctgcaggaaagcgcagcagaaagagggaacttctcaaatctatggtctgcacagtgcagaacagcccaagttatcccaagtcaagacgggttaaatattaacaaacttcagcagagaggggagtgcatccacccctggccgggccattagcattctgctcataaacctgcgagcgaaaaataggctggaaagggacagtgggtgctgggaagcaaaaggtgaaagctgacagataaaatgcagggatggcaagca

SEQ ID NO: 28452 - DNA, 600 bp, Chicken  19866894246479_1
aagtagtggggctgtgtgacagatgtccgactcttgttgaggcaggctgaagatgactattacaagttgagagcagctcaagaaatgcgttgtgattgtcactgaaattcagagagaacaagttccagggctgacattttggagatggtattaggatgttcctttaacctgcttgtgttttcatgctttgagagagaaggccacgagctgcatgttgatctgtcttaatgaggtgggttcttctgtaacggtgcctctaggtcaagagcttccttcccagatcacattttgtagacccckcagtgcttatttacttggaagaggagtgtctggtcacccacctcagtttcaggtcccaggaaacaagcttctcactttccagtgagggcctcgttaaatatctcctgtctgtagaaccaaaattcttcgaggtttaaacacggtttttccattgaataactcactttctgtcggttctaaatttatttcttacagcacattgagtgagagatctctgtgatgaccgatagcagaggtgacctttcatgtagcatcctgatgtcctaagagcagatgcaggttctagttatcagtcccatc

SEQ ID NO: 28453 - DNA, 599 bp, Chicken  19866894246481_1
  misc_feature (1)..(98): n is any nucleotide
nnnnnnnnnnnnnnnnnnnnnnnnnnnnnnnnnnnnnnnnnnnnnnnnnnnnnnnnnnnnnnnnnnnnnnnnnnnnnnnnnnnnnnnnnnnnnnnnnnaaaatgcagcaaatagaacagcactagcatgtgtttgtgccagtacttttgagatttgtttgtctcagaagctgaaatgtacactctcatatttttctacgtagaaatagctagtcaatcaagagaatttaatcagaagaaaaagctttatgagcctaaattttagggacaacactaagatggagcatgctaacatgctcayagagtagaagatcaagaaatctgacaatataaagttcagaggaaaatctgaaacaaaatgaacctggtgaaggaaaaagacaaatctgtttatctgtatatcttctacatatagttgccaagaaacatactgtaggctaataactgtgcagagcaatcacaaaactgcaattcttcttaagtaaaaacagatggaaggacagattcagctgtgaaaggcactatgtgtacatggcctacatccatcttgytaccttcatatttgctaggacctcagtgccactcccactcctctttccc

SEQ ID NO: 28454 - DNA, 600 bp, Chicken  19866894246481_2
agcctaaattttagggacaacactaagatggagcatgctaacatgctcayagagtagaagatcaagaaatctgacaatataaagttcagaggaaaatctgaaacaaaatgaacctggtgaaggaaaaagacaaatctgtttatctgtatatcttctacatatagttgccaagaaacatactgtaggctaataactgtgcagagcaatcacaaaactgcaattcttcttaagtaaaaacagatggaaggacagattcagctgtgaaaggcactatgtgtacatggcctacatccatcttgytaccttcatatttgctaggacctcagtgccactcccactcctctttcccatgatttactactccaattgtaaagctattagatgtaaatgtaaaaacttcaaatgttgtgctcagcttcaagamattttcaagaagtttcatgtagtgacaaagagatatctatttgcctatttccaataaaccctacacggaggcatgtgtagttaaaatacatcttgtgattcagtctggtttagtgtcatatactcatcttaatgccatgtatttccacagaacttcttttttagctgattcatatg

SEQ ID NO: 28455 - DNA, 600 bp, Chicken  19866894246481_3
aaaagacaaatctgtttatctgtatatcttctacatatagttgccaagaaacatactgtaggctaataactgtgcagagcaatcacaaaactgcaattcttcttaagtaaaaacagatggaaggacagattcagctgtgaaaggcactatgtgtacatggcctacatccatcttgytaccttcatatttgctaggacctcagtgccactcccactcctctttcccatgatttactactccaattgtaaagctattagatgtaaatgtaaaaacttcaaatgttgtgctcagcttcaagamattttcaagaagtttcatgtagtgacaaagagatatctatttgcctatttccaataaaccctacacggaggcatgtgtagttaaaatacatcttgtgattcagtctggtttagtgtcatatactcatcttaatgccatgtatttccacagaacttcttttttagctgattcatatgcaaaactttgattaaaaaaaaaaaagaaaagctttgatgaagtgtaaagttccttcttacgccagtttttctcatggatgtagtgtatttctagtatttaaggtctaaataaacaactttgttt

SEQ ID NO: 28456 - DNA, 600 bp, Chicken  19866894246481_4
aatataagattatatcgttatatcttgatttgaacactgtacatcaggttaaaggactactttccccaaatagatgatcttccagagtgttttaggctctagaaagttatcaagggaagacatggcagttaagttcacactgataaaacggaggatttttggctagcaacataaaatgcacctcagtcattttctttctatccctataagaaaggtcaacttcctctccccttccctcatgtctctccaaagagacatttttaagagcaaggaagtagctgtagtttctctttttcattmggtagaccaaacacggaagttctccaagattttacaagacaaagacacacatgcaccattactaaatgagacattttaaattctttacttgattgacattaaagagaaaatcaagcaaagaaaaggcagattggtatcaaaattatgtgaaaaattcttttgcataatggttagagcttgacagaattaattaccttcatggccaagcacaatcactgtaagatctcaaaacatttttttctgtatgtgcaaagaggtaatgctgtttcagcacagtatatctatcctaacttgtatttt

SEQ ID NO: 28457 - DNA, 600 bp, Chicken  19866894246487_1
ttcaggacaggagccaggccaggatggggatgctgggtgcaagcagcgcgccggcagctctctgagcatgagcgagtagtacaaagatgagggaacctggggctgaggaaggtcctgggcttggtgggcctggatgctcagttctgacaactcttccaactccttgcagccccttgtgttccctctgtgatgttgttgtggtaaggaaatagctggagataggtagagagggagcagagctgggcaaagataggctgaaaagccgtcctgctccataggagactgccctctccctccccrctgccagaaccctggcacagcctttgcagaggtgwtaggggtccccaaaccaaggtgcagagcagctcttcccagggacacattcaaggagcccagagctgctcttgcagcaaygtactctgaaagctcctgtttgtgagaccatagaatcacagcacggctcgggttggaagggaccttcaggatcacctagttccatccccctgctgtgcagaaagcagctccgsagagacacgagctacagagagctgtaatggaaagcatttaaaagagtcatgctccagcagcctggctgcccag

SEQ ID NO: 28458 - DNA, 600 bp, Chicken  19866894246487_2
ggtgcaagcagcgcgccggcagctctctgagcatgagcgagtagtacaaagatgagggaacctggggctgaggaaggtcctgggcttggtgggcctggatgctcagttctgacaactcttccaactccttgcagccccttgtgttccctctgtgatgttgttgtggtaaggaaatagctggagataggtagagagggagcagagctgggcaaagataggctgaaaagccgtcctgctccataggagactgccctctccctccccrctgccagaaccctggcacagcctttgcagaggtgwtaggggtccccaaaccaaggtgcagagcagctcttcccagggacacattcaaggagcccagagctgctcttgcagcaaygtactctgaaagctcctgtttgtgagaccatagaatcacagcacggctcgggttggaagggaccttcaggatcacctagttccatccccctgctgtgcagaaagcagctccgsagagacacgagctacagagagctgtaatggaaagcatttaaaagagtcatgctccagcagcctggctgcccagcagcctcagctcactcctgctgcgagggctccatc

SEQ ID NO: 28459 - DNA, 600 bp, Chicken  19866894246487_3
ctgggcttggtgggcctggatgctcagttctgacaactcttccaactccttgcagccccttgtgttccctctgtgatgttgttgtggtaaggaaatagctggagataggtagagagggagcagagctgggcaaagataggctgaaaagccgtcctgctccataggagactgccctctccctccccrctgccagaaccctggcacagcctttgcagaggtgwtaggggtccccaaaccaaggtgcagagcagctcttcccagggacacattcaaggagcccagagctgctcttgcagcaaygtactctgaaagctcctgtttgtgagaccatagaatcacagcacggctcgggttggaagggaccttcaggatcacctagttccatccccctgctgtgcagaaagcagctccgsagagacacgagctacagagagctgtaatggaaagcatttaaaagagtcatgctccagcagcctggctgcccagcagcctcagctcactcctgctgcgagggctccatcacccctgaaccaaactggactgatgagggagaaacactccatctcagggctggaaacgtactctgcagctgccaggagc

SEQ ID NO: 28460 - DNA, 600 bp, Chicken  19866894246487_4
gagggagcagagctgggcaaagataggctgaaaagccgtcctgctccataggagactgccctctccctccccrctgccagaaccctggcacagcctttgcagaggtgwtaggggtccccaaaccaaggtgcagagcagctcttcccagggacacattcaaggagcccagagctgctcttgcagcaaygtactctgaaagctcctgtttgtgagaccatagaatcacagcacggctcgggttggaagggaccttcaggatcacctagttccatccccctgctgtgcagaaagcagctccgsagagacacgagctacagagagctgtaatggaaagcatttaaaagagtcatgctccagcagcctggctgcccagcagcctcagctcactcctgctgcgagggctccatcacccctgaaccaaactggactgatgagggagaaacactccatctcagggctggaaacgtactctgcagctgccaggagccraccgctggggacagggtgagcagcaggcacccgggggcaccgctgctgtgccctgggccatacagcaacgcctccagccagcggcatcgagtctcaagagctttgtgcatc

SEQ ID NO: 28461 - DNA, 600 bp, Chicken  19866894246487_5
actctgaaagctcctgtttgtgagaccatagaatcacagcacggctcgggttggaagggaccttcaggatcacctagttccatccccctgctgtgcagaaagcagctccgsagagacacgagctacagagagctgtaatggaaagcatttaaaagagtcatgctccagcagcctggctgcccagcagcctcagctcactcctgctgcgagggctccatcacccctgaaccaaactggactgatgagggagaaacactccatctcagggctggaaacgtactctgcagctgccaggagccraccgctggggacagggtgagcagcaggcacccgggggcaccgctgctgtgccctgggccatacagcaacgcctccagccagcggcatcgagtctcaagagctttgtgcatcctcttgctgtagcgctttagctctccatctccactgctccggatccrgacccagactgagctctacgtcttgggagcaccggtgaacgctcactggcacctgcaggcagggggcaatttgtttaccccctctcaaaagcatctcaacaagcaaagcatctctgtgcttcctcacccaatgaaccgacag

SEQ ID NO: 28462 - DNA, 600 bp, Chicken  19866894246487_6
catgctccagcagcctggctgcccagcagcctcagctcactcctgctgcgagggctccatcacccctgaaccaaactggactgatgagggagaaacactccatctcagggctggaaacgtactctgcagctgccaggagccraccgctggggacagggtgagcagcaggcacccgggggcaccgctgctgtgccctgggccatacagcaacgcctccagccagcggcatcgagtctcaagagctttgtgcatcctcttgctgtagcgctttagctctccatctccactgctccggatccrgacccagactgagctctacgtcttgggagcaccggtgaacgctcactggcacctgcaggcagggggcaatttgtttaccccctctcaaaagcatctcaacaagcaaagcatctctgtgcttcctcacccaatgaaccgacagagcaccagagcaaggtcagggcgctgagcaaactggtgtgagtaagcaatggtgatggctttttgctgggtgtggaatggagacgaaggtctggggaaggtctagaaagaccagggcaagcaggaaggtcatgcacccagcaaaattttgtgcttgtc

SEQ ID NO: 28463 - DNA, 600 bp, Chicken  19866894246487_7
taagcaatggtgatggctttttgctgggtgtggaatggagacgaaggtctggggaaggtctagaaagaccagggcaagcaggaaggtcatgcacccagcaaaattttgtgcttgtctcttcatcagaacttgctgcctcagcctgagcactcttaccatctagatggaggaatatcccaccctaccttctggaacccttcccacctcttccctatcaacagccgagtacagcccttactgctgtcacaccccgatacccatttctttgcatggctccaagggagtgctgatcccaccccsccccatcacaccccagctgctcgctgctgcagagcacagccaggcaaacagctcttcaagaacaaagctctttcctgagtgggtttggctgcctcgcctgcaactaaatattcagaggcaccgtgtgctagccctttgatcagcaatttatctctccacgccacaagtttcctgcagcctggcgtttcctccccgtgctcagcccagctcccaggagcctgggagacaggtgtgagaaattagctatagggactaacgctctgacaggaaccagcaccaaaagcaaaggacggagcgtaa

SEQ ID NO: 28464 - DNA, 600 bp, Chicken  19866894246487_8
aggtgtgagaaattagctatagggactaacgctctgacaggaaccagcaccaaaagcaaaggacggagcgtaatgtttattacacttgaagcaaagcaaacatgtggcctacttatgtatctacagagaattaattggggagctccacaaagcagcagattataaattagaatcattttcaccaacttcagcccattcatcttatttcacaccagggctgtcagcgctgcctgacgcggccccggactgctggctgctgccatggagggtctgccagcagggagccccatgggcacagcrtgcctgatcccacagggagaggatggagtcaagccaaggcgtttccttggacagaaagcaaagtcagagccttgagagcggttgtagaggtgctgagtgccacagctctcacctacagcgctatgcagtgctctgcaccccgttagcatcagctctggttggaccaaggcccagtaagtgccccacaggcgtttcaggcattctggtctggattcaaaacacccagagcagcccctgacctccagatggtgacaccttgccagcacatcacaaaacaaagggttagaataactcagattt

SEQ ID NO: 28465 - DNA, 600 bp, Chicken  19866894246490_1
ccgttgtgtgaaggattgggctgtggctcggtgggaagctgagctgccccgttcttttccagctccgaaccccggcggcagtcgtggagcgtattgcagctcacgcgtcagcggggggccgtgggccctgcagggcttgggctgtgcgtcggggacacaatcgccctcagtgcggcctcaatggttggccctcagcctcaccaattcatgcagctctgagcgcggccgcccgccccgatgaatcgccccattgatgtggggccgggctttggcgtggccgtggggttgggtgacgcggcrccccggctctgcccgttgtgctgcggacgtcagagggaaaaggacccggcgtgggcgctccgtgcggagggtgagctcagttcccccgttgggagggggtctgttggctttgtgttgtgcctcaccccggcgaggggcggcccggccccactccctgcgccctttggggtcacccgtggggctggagctgcgtcctcagctcaacctcacgtgtgatgcgatgagagatctccgcttccttccgcgcagcccctgactcgtggctcccgttcgtaggacggtatgcgccccgatgttgtg

SEQ ID NO: 28466 - DNA, 600 bp, Chicken  19866894246494_1
ccctgtctcagtttaagaccattcccccttgtcctatcactatccaccctcataaacagccattccccctcctgtttatatgttcccttcaagtactggaaagccacaatgaggtctccctggagccttctcttctccaggctaaacaagcccagttccctcaacctttcctcacaggagaggtgctccagccctctgatcatcttagttagcataggtgggagaatgcagagcctctttcattggcacttcaagtcatgtaggctgatgatgttctccaggagtggagttggatgtacrtttgatcctgtctcggtgtggtaggctggaccacatgatgttcttaaggtcccggctggttttaccttgctgcaattgctgtgattcgacatggtcaaaccaatctgacttccatataatccagctgtcttttcttcaccccactaaaattactcccgtctgaaacagatgagataccaagaaatgagtacatttcatgtaagcaaacttttctaaatgcctgttaggtttggttttttactcagtctcttacaggagattattaaggaacaaacttgtcactgggtaagagataaagct

SEQ ID NO: 28467 - DNA, 599 bp, Chicken  19866894246499_1
  misc_feature (1)..(92): n is any nucleotide
nnnnnnnnnnnnnnnnnnnnnnnnnnnnnnnnnnnnnnnnnnnnnnnnnnnnnnnnnnnnnnnnnnnnnnnnnnnnnnnnnnnnnnnnnnnntataccatttgagtcaaagtcagtattttaagctctctgtttttttatgagactggaggtctgtctcttctggaaagattagcttccattttttcccaaaaatggaactgacagataggaggggagaaaaaaaaaaagaaaaaaaaagacaagtttgacttccagtcagtacttacatctaaagtcaataaaatcatgaaaatctctrttttttttaaatgtactttccctctgttgaaaagggaaaacctctccctctttttcctccagcacattttcactccatcatttctgtccctcactccctctgcttccctgctattttgccatgagtgcagctttccacaagacctgctgcttggctgcagtgaattgttctctctctcaccaccacaccagtgctttattgtggaagcttctgacagtgaaatagcaactgaattcatatctcctcaygtgaccaaagctgtgagcacagagtagattaaaatgtaaatgtagagctaa

SEQ ID NO: 28468 - DNA, 600 bp, Chicken  19866894246499_2
gacttccagtcagtacttacatctaaagtcaataaaatcatgaaaatctcttttttttttaaatgtactttccctctgttgaaaagggaaaacctctccctctttttcctccagcacattttcactccatcatttctgtccctcactccctctgcttccctgctattttgccatgagtgcagctttccacaagacctgctgcttggctgcagtgaattgttctctctctcaccaccacaccagtgctttattgtggaagcttctgacagtgaaatagcaactgaattcatatctcctcaygtgaccaaagctgtgagcacagagtagattaaaatgtaaatgtagagctaaaccaaatttcactgtgatactcaatccaagttcaatttgtgtctgtgagtgtaaatagcactagatgctcaggagaaggtgtcccatgcagtgacaagagacactgcatagacctgtagagagtacgttcctggaacagaaatcagatttatattcagtatttgcattcctgctcttcacttacttttgaacactgtaagtctgcatgatagcacttttgttgcctctagaaaatgtataatctcagcc

SEQ ID NO: 28469 - DNA, 600 bp, Chicken  19866894246502_1
aataaatcagagtaaatatgaatcccagtgaatgtgaaataatcacagatatgacaggcccatattttattatcagtttcttccaaaccctcttccatttgaatgaaataatcacagagagattacgatcagtttattgtcatgtaatctgcagacagagaattatatcattctgaatgcaaacagtgatttaagggactaaggaccaatttctgccctggcattttgcataaacaattgtcattgttgagtttgtgcccagatctaaaaataaaattcggtccagcttctggcaaatgwtgcccatgagcaattgaaaaggataaagaatggatgccagatctgtttttgtgttctctgttctaaacagtcctggccacttttatttttcatgttggatgttgtactcacgttctatttttgatgagggccagtttggtccagaaggaagcatgtaaaacttagagctaactgtgagattcgagatagaagtgccattaaaaatcagagaaaatacatgattctgtctttgagactgaaaactctttataacataggcctcttttacagtatgtgtttatggtgtcctgtgtgttagga

SEQ ID NO: 28470 - DNA, 600 bp, Chicken  19866894246502_2
gctatgaaaatcagcagtaattttgagaccacctggcaacttcaatctcactagttttggatactaattctacctgtcctagatttatttgttatatgctacacttgtacattctttttcataaaaaattctgctgcaataaactgttatctattaaaaaaaaaattcctaggtaaatccaggcaagtgaaatttaactatatttttaagattactcatttatttgaatatctttccctttctttgcacttatttgaacattattattttcctttaccactgaaactttattttaatcartttctctagttctttataactattcctgtatttctaacccaaagtaagcggagtagtgttttcctttggcaaataaaaaattggccccagaaatcagacagagaaatgtgagattatgtggcaaaaaacatccttgctcaaaaatgtatatttttgcttagtgctcttgagtggcatgtagcagataataacataatccactctccatcatttatgatctattacagtagtctccatttcaaatctgcttaacatcatactgcaagagaaagaagtgatttggaaaagaagctctgatct

SEQ ID NO: 28471 - DNA, 600 bp, Chicken  19866894246504_1
taccctggtgtgagattaagaaacaatggtccagatgttgctccgaccaattttattacgaattcttaataagggagatggggaaggggaggatggacactactatggattggggtgatgcggaagggaaggcgagtgatagaaaagataggaagaagcaagaattgcgtaaagcagagatagtcaccaccaggatccagcagtagtcctgttgcatgatgttccaatggtccagggcagaattgtgggggaagagcagcagcagcatggctggtcctgggcaatgagaaggtgcaggtwctgagtasgtccaggaagaattctgggcagaagcagcaggtctggtggcaggccctggagagtctgtcagcatgtaggcctctcatagtgagggatctgatggcagacaccttcttggggggggggagcagcagaagaggggccatccttaggcagcaagcaggtagagcacagagcaaatctgttgtcagaaacctgccttcatggttgttgggtcctcttttatcctcctccttccctgcctacatgacattcttgggtgtttgggtaagagacatgtgaacaccccctgagatggct

SEQ ID NO: 28472 - DNA, 600 bp, Chicken  19866894246504_2
tgtgagattaagaaacaatggtccagatgttgctccgaccaattttattacgaattcttaataagggagatggggaaggggaggatggacactactatggattggggtgatgcggaagggaaggcgagtgatagaaaagataggaagaagcaagaattgcgtaaagcagagatagtcaccaccaggatccagcagtagtcctgttgcatgatgttccaatggtccagggcagaattgtgggggaagagcagcagcagcatggctggtcctgggcaatgagaaggtgcaggtwctgagtasgtccaggaagaattctgggcagaagcagcaggtctggtggcaggccctggagagtctgtcagcatgtaggcctctcatagtgagggatctgatggcagacaccttcttggggggggggagcagcagaagaggggccatccttaggcagcaagcaggtagagcacagagcaaatctgttgtcagaaacctgccttcatggttgttgggtcctcttttatcctcctccttccctgcctacatgacattcttgggtgtttgggtaagagacatgtgaacaccccctgagatggctgtctccct

SEQ ID NO: 28473 - DNA, 600 bp, Chicken  19866894246508_1
cattatgttttgttcctgtgtgacagatggcagcagagcggcagactgacaaaatggcatctggacatggaagtgcttatgaagcaaaggtgtgtcactgaattcctccatgcagaggaaatgacacccactgacatccatcgatacttgatgaacctttatggagaccaaactgcggatgtaggcacagtgaggcagtgggtggtgcatttcaacagcaggaaaatagacggtcacttctactggtgcagatatttatgagcacagcatacaggctcttgtccattgttggcaaaaatrcatagctaatgatagtaactgggttgaaaaacagtgttttgtagctgagaatttcctctatcaaacagaattattgtcctctctgaatcctagtttycactgaaataagtagaaggcattattttcagagcaatagtaatttccccatggtatctactcattttgttcaaatgatcaaaatgtatagatttgtgtacagactgtgcatacatttgtatgtgtgtgtgaaagggtgcacaagggagtagtaaattatagagaatatgtaataagacgagtaattcttcctctctccaaaga

SEQ ID NO: 28474 - DNA, 600 bp, Chicken  19866894246508_2
ctgaattcctccatgcagaggaaatgacacccactgacatccatcgatacttgatgaacctttatggagaccaaactgcggatgtaggcacagtgaggcagtgggtggtgcatttcaacagcaggaaaatagacggtcacttctactggtgcagatatttatgagcacagcatacaggctcttgtccattgttggcaaaaatrcatagctaatgatagtaactgggttgaaaaacagtgttttgtagctgagaatttcctctatcaaacagaattattgtcctctctgaatcctagtttycactgaaataagtagaaggcattattttcagagcaatagtaatttccccatggtatctactcattttgttcaaatgatcaaaatgtatagatttgtgtacagactgtgcatacatttgtatgtgtgtgtgaaagggtgcacaagggagtagtaaattatagagaatatgtaataagacgagtaattcttcctctctccaaagatagcgtaatgataatcactgatgcaaagtggtgaagttccatatttactttgcataaagtacttgatgtcagctgagatgtcagctgaaattccccc

SEQ ID NO: 28475 - DNA, 600 bp, Chicken  19866894246523_1
ttttacaatgtagacttaatgacttctactgaagaggggatgattaggaagagcactccttccagcataaatatggagtactgtcacattaaaaagtgatgggagaataagcaaaatattgataagatactattaatttacacagagaaaatgaagtgtttttttctcaactaaatgacttctttgaaacttaactaaaaatggcaggaaaacagggacaaaagagaatttcatgtgtttcctaccatgcagtatattagatagagtgaaaaaaacaccaccaccaacaaaacaaaacarcaaaaaagaacaaccaaaaagactttagagaattcttcaagagacatatagctcacttactgattcatgtcatttgtataatacataacttttactgttattgttggattttttttctatggagaaaaaaattgaagaaaatttgagtaagaaaaagcatagctccattctttattaccatcagacatctgacttcatcatgttcaggcatgtgaaagatcttgaatatagttgggcaagtatcaacaagccacctgtgaatgagtcaagactcagttcagcttgtgttgacccaaagct

SEQ ID NO: 28476 - DNA, 600 bp, Chicken  19866894246540_1
ctcacattgtaaaaacctgccagcaactaccgaaagcaaatctcatcaaagcagcaaggcaatgaaagaaactcacaaatgaaaggctaatgacctaaaaataaaatcccaacctgaatatatatcagaagatattccctaaaaagctatggcagaaaactgcaagttgttcagctaatcccagataacaaaatttgtgtttcttgttcccatatgtcctctgcttctgcatctggtaatgcctataacattgtaaaatggcaagaggttgcatatgaagtgtgtttatgtgcaaattcyctttttaagtgattcttcaggtaaaacagaagaggcatggatgattctgactgaagtggaaaggttatcttaacattatacagtcttctgccagttcctgcagtgactgaagttttattcagcccatttaaaacaaataactgaaagaaattgatgttgttcacttccagagtgaacagaatttttttcacttaatgtccatgtcactcgtttaattacacttcagtaagtacaaaaaatctgagcattgctttcagttcaaatggcctcatggtatgtcctgtttttgcacagagtgcc

SEQ ID NO: 28477 - DNA, 600 bp, Chicken  19866894246543_1
tgagagtgtgatcaaacagtgagtgaatcaggaggcactagactcttttttgcagttcattgacctacacgcacataaacaggtagtaagctttgtctttaagagccactagtataaatcaagaggcagctgtagattttttacaagactgagctcagaaaactccccaaattattgcatcaggatagagcattgaaacaacagagcagcatccttaggccctcaatgttcagcaatctctggctgtttttacttggacatactctgaaactgacagacataaacatctgagaacacctstttggtagctctgcaaagcccttgtggctttgtggaaggagacaaattttttctgtcccttctcactcaacagcagttgtaaagctactgaagtcacacagagctggattaatctgtatgcacccttggaggacctatcagttagaaggagtctagctgacaagcttagactaaacagctatagtttggatagttgaagctaagtgacgtgaacacagtctaggatttgtcttcaaaattccctaatattggataatactataagccagtctctggcctaagttagccttccaagaggac

SEQ ID NO: 28478 - DNA, 600 bp, Chicken  19866894246545_1
aagaggcaggaaactggcatgacttaacaaggacctgctggtcaaacagagagaaaaaaaggacatgtacagacagtggaagcaaggaagtgtgacccagaaaattacagggaggctgtctggatgtgcagaaataggatcaggaaagccaaggcgcacatggaactgaacttgacgatggatgtgaaaaataataagaaagagttctacaggtacactggtccgaatagaaaggccaaggagcgtgtaccttctctgataaattagaagggagaaatggctacaacagacatggagaaygctgatgtattcaagaagctcttaacttcagtcttcactggcagtcaggcttcccacatctcacatccttgaacctctagatggagactgggggagcaaaatccctcccactgtaagcaaagagcaagttcgagaccacctgatgggactgaatgtgtccaagtccgtggggcttgatgatatgcacttcagtatcctgaaggaactggctgatgtagttgtcatgttactttccatcatactcaaaaagttgtgtctgtcaggcaaggcacccagtaactgcaaaaaagtaaaaaccaa

SEQ ID NO: 28479 - DNA, 578 bp, Chicken  19866894246548_1
gtccagagacctacaaattatacagacctcgtaatactagttacaattacagtgtggcttatggagcatggataagtatgaattacatgacaaatatcttcaatttataaggtagttagaaagttatttgtagtgtattactaaagcaaaactaaatgactactaaaatctttctaacattttatgtatatatgtatagatgtatatatgtacatacaaacacagtcctccattttggtgtaacttgctatataaaggattttccaacagtaattgaattaaaagcaaaaacagaagtargagtacaagttatggcttattattcgtggaaaagtacataccaggtctcatctcctcttcacaaccaggcataaaaacctgcttttacagtgcaatatggaaacaggctaccatttttcttaatctttggttctgtttactgtaactgctgagcagctgctcagatcgttgaatttgcatttcagaaagcacctcagatgcaaagcaagtagagataggctaataatctgttaactcatgttatttgtttctacaagtcattacaacaacttttcata

SEQ ID NO: 28480 - DNA, 599 bp, Chicken  19866894246558_1
  misc_feature (1)..(59): n is any nucleotide
nnnnnnnnnnnnnnnnnnnnnnnnnnnnnnnnnnnnnnnnnnnnnnnnnnnnnnnnnnntgaaatttctaaggctaaagtgtgcttgatgagtctgattccctttcatgattagatgacatgcaagagtggagggaagtgagaactctttactttcaacagctaaatttctctaacaatgaaatgacggagtccacgactgaaacaaaaagaaaaattaaaaccagttaaactaaacagtggagtatttctctaaagctttctccaagccaaaattgtcccctactccctactcaaaatmattttctgtgatcaaggtcctaaatctgagacactctccacttcctccccccactcctttactccccccagaccagtttttcaccaggtttaaatacggtgttctctgtatttatttacttatttttaactactaaagttacagggtggcgttactatgtctgaagtccacagcctctggacgtgattgagtttacacctgatgttactagaacaatttacttttttatggtgatagatttttatttacagttcaggggggaaaatatcattcgaattgcagggtttgaggaaatgatt

SEQ ID NO: 28481 - DNA, 600 bp, Chicken  19866894246562_1
tatcccttcccttgaggcagcccccagcagcctgcacaagcacatggatcatttcatcatcacaggacagaccgcatctgtttggaaaggggcaaatgggcactcataaaaggggagggaggacttgagaggcctggatttactccttgcctgtgccactgactgtagggtcgtataagcagctgagatccaggaaaggaacctccttacgggctgcctttcacaacaaggataacgcccagaggtgcaccatcagacagtgcgtccaggagagcagcacactgcagctggagggcacargtcctgcaagctcggtgccccgctcccaccttcccctcctttccraggagcagagccacactcacttcccgatgtcgttggggagactctgcagggatacatcattcagggccaagtggcccaggctgcgcagctgcgtgaaaccttcaggaagcctgcaaacacagaacaaaataccgtcagtgctgcgcacaaacccagcgctgaactctttgctcacaatcccagcagccagtcctaccccaactggtatagcaggtgtgagggggagaagcaggaaccagccctgacccacgacat

SEQ ID NO: 28482 - DNA, 600 bp, Chicken  19866894246562_2
ggatcatttcatcatcacaggacagaccgcatctgtttggaaaggggcaaatgggcactcataaaaggggagggaggacttgagaggcctggatttactccttgcctgtgccactgactgtagggtcgtataagcagctgagatccaggaaaggaacctccttacgggctgcctttcacaacaaggataacgcccagaggtgcaccatcagacagtgcgtccaggagagcagcacactgcagctggagggcacargtcctgcaagctcggtgccccgctcccaccttcccctcctttccraggagcagagccacactcacttcccgatgtcgttggggagactctgcagggatacatcattcagggccaagtggcccaggctgcgcagctgcgtgaaaccttcaggaagcctgcaaacacagaacaaaataccgtcagtgctgcgcacaaacccagcgctgaactctttgctcacaatcccagcagccagtcctaccccaactggtatagcaggtgtgagggggagaagcaggaaccagccctgacccacgacatgctccgtttccaaagtgacatcactcccttgcaccaaagtcgctg

SEQ ID NO: 28483 - DNA, 600 bp, Chicken  19866894246566_1
atctcagtcccacaaaggtcaaagaagatgccatttgagcattcctgcccacttcacggcgtgagctcacagcaagggaagggccacatctttaaaccagattccaggaaccgaaacgagaagaaaaaataaacacaactggccatctcctagtctcttagctaactgggctaagtccatctctgatgtcactctagtgactcaaatcaaagaggaatttgacctgagatgcctcttatcgtgatgtgctgtttaaaagaggatgatgtgcttggagcagaggtggtcctgaagcatttyattacttaattggactgtactgttgcattcaaagaatgcctccaggctacccaaaaatcttgaagtcaaggtacccagagctttaatcaaacctgccaaarttccagaacaaatgcactcatgctcattctcaaaagactcggcttggggatgtttctcggctggtcataggttgcattgctagaccaagtgcagcctggctgtggggcatgggcaggagctgagagggtcacttcaarcctggcgtctcagggtcccttggagccctgcatcttcttggtcctgcagatgaactgcctt

SEQ ID NO: 28484 - DNA, 600 bp, Chicken  19866894246566_2
ttccaggaaccgaaacgagaagaaaaaataaacacaactggccatctcctagtctcttagctaactgggctaagtccatctctgatgtcactctagtgactcaaatcaaagaggaatttgacctgagatgcctcttatcgtgatgtgctgtttaaaagaggatgatgtgcttggagcagaggtggtcctgaagcatttyattacttaattggactgtactgttgcattcaaagaatgcctccaggctacccaaaaatcttgaagtcaaggtacccagagctttaatcaaacctgccaaarttccagaacaaatgcactcatgctcattctcaaaagactcggcttggggatgtttctcggctggtcataggttgcattgctagaccaagtgcagcctggctgtggggcatgggcaggagctgagagggtcacttcaarcctggcgtctcagggtcccttggagccctgcatcttcttggtcctgcagatgaactgccttgtctgctgggctgtgggacaagctctggtcaggggagatagggatggctgtgactgtcctgcacagagatctgcactactttgattgaaagtatgaaaaaa

SEQ ID NO: 28485 - DNA, 503 bp, Chicken  19866894246566_3
cgtgatgtgctgtttaaaagaggatgatgtgcttggagcagaggtggtcctgaagcatttyattacttaattggactgtactgttgcattcaaagaatgcctccaggctacccaaaaatcttgaagtcaaggtacccagagctttaatcaaacctgccaaarttccagaacaaatgcactcatgctcattctcaaaagactcggcttggggatgtttctcggctggtcataggttgcattgctagaccaagtgcagcctggctgtggggcatgggcaggagctgagagggtcacttcaarcctggcgtctcagggtcccttggagccctgcatcttcttggtcctgcagatgaactgccttgtctgctgggctgtgggacaagctctggtcaggggagatagggatggctgtgactgtcctgcacagagatctgcactactttgattgaaagtatgaaaaaaagtggagatctgctgagttagtgtttctagaaaacagtatt

SEQ ID NO: 28486 - DNA, 600 bp, Chicken  19866894246567_1
agaacaaggtaaattcatgatttctttctctacatacgcacatgcatgcacatttaaaaatacatcaaacctcactgtttctaaaatagggcaggttatctgttgatttttagcaaaattcatagaaggaagagcagtatgtcatgaaagtaatttctaaagcatctgcttagcaagacttaaaacttcacagttcattgttttgattatcctatcttaaatgaaaaaaaaataatcctttatcttatagagccatactttctatcatgttctcgagaaaatgcatatgcaaagtatgcrtacaagaaaactgaatatgtaggaagagcagctagcttactaataacaaataacattccaagattcttgtcttctccatawaaaagatataaataagtagtttgataaaaccacaacaaatgaaattttcctgtatgtgtgtgcatgcttacttgtagcaacatttacttcctcggagaaatacgtcataccttactcaatctcttgaatgttactttccacaatcataacttgaagtgtctacaagtctgaaatattttatgctgtggtgtcaatacaccgctctatatgcagacagtg

SEQ ID NO: 28487 - DNA, 600 bp, Chicken  19866894246567_2
taaaatagggcaggttatctgttgatttttagcaaaattcatagaaggaagagcagtatgtcatgaaagtaatttctaaagcatctgcttagcaagacttaaaacttcacagttcattgttttgattatcctatcttaaatgaaaaaaaaataatcctttatcttatagagccatactttctatcatgttctcgagaaaatgcatatgcaaagtatgcrtacaagaaaactgaatatgtaggaagagcagctagcttactaataacaaataacattccaagattcttgtcttctccatawaaaagatataaataagtagtttgataaaaccacaacaaatgaaattttcctgtatgtgtgtgcatgcttacttgtagcaacatttacttcctcggagaaatacgtcataccttactcaatctcttgaatgttactttccacaatcataacttgaagtgtctacaagtctgaaatattttatgctgtggtgtcaatacaccgctctatatgcagacagtgaataaagttgctcatgaaagagtggcatatgttgttatggttgacttcattcccatttctgcttctgtttctttttgtttg

SEQ ID NO: 28488 - DNA, 600 bp, Chicken  19866894246568_1
ctgtatggcagaaaggaatttttttagttcaagattatgtaatttctgtgcactgtaacctgacctgagctggccaaaatgaaatctttcctatcttttcctggtgcccagaagcaaacactgatacatgcttttcactggtaatgcaattacagattagatcatctttgggaagatctagctaatggcattgtcaaggctttcctctctttgcccttcagagctgaggatgtgataaaaagtagaaattatctaggaaaatcactgctttgattaactctttatccagcatcattttgrggctataaaagtagcattgcttcatttttgtttgcttaatgttttgttaggtttaatccattagatggattaaatcacrcgtctttcttttaatttcttctcctcgtcctcctgtcttctctgttaatgggatcagagccaatagccagatgttaagtttaattttttccacagtgaacgcagcaccaagagcaaaaaaagaacagttctcctgtcatgcttgtttccttgatcaggtctgatggcaacagggctgagcagtcctggctttttttgtgatctttacaactaacgtttaac

SEQ ID NO: 28489 - DNA, 600 bp, Chicken  19866894246568_2
tgaaatctttcctatcttttcctggtgcccagaagcaaacactgatacatgcttttcactggtaatgcaattacagattagatcatctttgggaagatctagctaatggcattgtcaaggctttcctctctttgcccttcagagctgaggatgtgataaaaagtagaaattatctaggaaaatcactgctttgattaactctttatccagcatcattttgrggctataaaagtagcattgcttcatttttgtttgcttaatgttttgttaggtttaatccattagatggattaaatcacrcgtctttcttttaatttcttctcctcgtcctcctgtcttctctgttaatgggatcagagccaatagccagatgttaagtttaattttttccacagtgaacgcagcaccaagagcaaaaaaagaacagttctcctgtcatgcttgtttccttgatcaggtctgatggcaacagggctgagcagtcctggctttttttgtgatctttacaactaacgtttaacatacaagatggtgctgaaaccaatgattggtaatattagcttgttatcataaccgaggttatctttctgctcgttttag

SEQ ID NO: 28490 - DNA, 599 bp, Chicken  19866894246583_1
  misc_feature (1)..(49): n is any nucleotide
nnnnnnnnnnnnnnnnnnnnnnnnnnnnnnnnnnnnnnnnnnnnnnnnnaacctcagccttttctttatcctccaatggtcacattcccagtgaccactgggaagagtaaaggatggagattctccttagccttcctcttactgttaatacatttgtataaaaggtttcttgttctcttttaccccagagggccaagttgagttcagactgggcttttgcttctctaattttctccctgcaagacaaatgtgagacaagaagaaaaatgagagtgacttcatgagatagcctagggaacytagttgctctcttctgcagaaacataaagtccaattttctttatttctttcaaagtctttcagagcttcaagcaccacaggatgcagaaaatcataatgtaacattgtcaaagaacacagtggggttggtttatcacctatatgtaactcagggctgcgtctcttctgtgtttcaggggaggcagtgtccctggtggtgctacagtcttayacagaggtggctgatcacctgaaaggtaaggtgccacaggtctgagtgcttgtacagctggtttgcatttgccctcacagtacacacc

SEQ ID NO: 28491 - DNA, 600 bp, Chicken  19866894246583_2
ggcttttgcttctctaattttctccctgcaagacaaatgtgagacaagaagaaaaatgagagtgacttcatgagatagcctagggaacytagttgctctcttctgcagaaacataaagtccaattttctttatttctttcaaagtctttcagagcttcaagcaccacaggatgcagaaaatcataatgtaacattgtcaaagaacacagtggggttggtttatcacctatatgtaactcagggctgcgtctcttctgtgtttcaggggaggcagtgtccctggtggtgctacagtcttayacagaggtggctgatcacctgaaaggtaaggtgccacaggtctgagtgcttgtacagctggtttgcatttgccctcacagtacacaccaaaaactgggaagatattggtggtgtcttgctcactcacccagaatatactcatttatagttcccaaactcttaagaaaggcattcccatgttaaattgcttaggaagagaatttgtttctgtagcaatatttgcagtccctttgtgcttctataaagtcatgggactggcagtgcaaccttgtrcagtcacctggtgctgttggtgtaaac

SEQ ID NO: 28492 - DNA, 600 bp, Chicken  19866894246583_3
gtgtccctggtggtgctacagtcttayacagaggtggctgatcacctgaaaggtaaggtgccacaggtctgagtgcttgtacagctggtttgcatttgccctcacagtacacaccaaaaactgggaagatattggtggtgtcttgctcactcacccagaatatactcatttatagttcccaaactcttaagaaaggcattcccatgttaaattgcttaggaagagaatttgtttctgtagcaatatttgcagtccctttgtgcttctataaagtcatgggactggcagtgcaaccttgtrcagtcacctggtgctgttggtgtaaactggtacacaccagctgcccagacagcccttcagctgagactgtgatgttcatgggcacagtcatttcatcaccagaagcagtgagcagcacaggcttgaaggtagagggtccagcagcagtcactatagccttcatcagagaaataggatcctgttggtgcccctcggtactaggtccagtcagagtaaagatgcactgtatgaggcttgagagccaaatcagtgtttgccagggaggggtggtacatcaagtctcctgcttttggaaatcac

SEQ ID NO: 28493 - DNA, 600 bp, Chicken  19866894246590_1
ttaaatcaatttttactatacacagctgtgaatgcagcaccagtaaattgcacagtagatgagttcaaaaaaattaaatgcaatctatgtcaaattaggctctggataaacatactatactcattaagttcacacttataacaggttcggaaatgaagaccaccagtccaaggcagacactgcctgtgagctcctgctaatgagcagcagcacgatggctctgctaacagctctgcaaacactcgggggccgcagccaggcagccacacactgcaccctgagcctcatcccagggcaacstaacctgctcctattctttgtgtttccataactgtactcagcagtgcaaagggtatttctgtcttccccagcccacacccaggtcacagcagctccagcgcctgtgtgtcactttcctttgtgtttaacaagccgagctcaacaagtttgaatctgcctatcagaatcattatttaatatccattttggatatggtgaaattgatctcaagtgctcgaatatggcttatttacataaatgggtctttacatcttcattttaaaatcaataagtagcactatccaggagaggagagcttaa

SEQ ID NO: 28494 - DNA, 600 bp, Chicken  19866894246599_1
acatttgggtggaaagtttcccgtctcattcagagaggctgatatcagtgcacaagaggtgggtaactccacactcacaactccagctgctcagtaagcacatctcagtaagcaagagaaagcactgcaagccctccattctcacacgcctctcactctgcagggtgtcagtgcactcctgctgcacctcataaggaggaacaaaacagagacatttgcaacacatgggaatattacaagtttaggaatactgcagcgagttcaaagtgacgatcagacccagaacaggaaacggcagcmagggctatgctgatggcagctctcacaccaaaggctgtcactaagctgctgcagggtgggtgtacagccacagyggtgagcacccagcccttcctgctgcagccagtcatgtgtaggtgtctcctctgtcacacatgcatcacagaatatcatacaccgagcacgtgttccaggcttttgccccgttcatgtggttccctggattaagatccacccctggcctgctcaggttctactaagtgcttcaggacaccragggcagagcacagaatagacctttgcttaccctccgtccggtac

SEQ ID NO: 28495 - DNA, 600 bp, Chicken  19866894246599_2
tcacaactccagctgctcagtaagcacatctcagtaagcaagagaaagcactgcaagccctccattctcacacgcctctcactctgcagggtgtcagtgcactcctgctgcacctcataaggaggaacaaaacagagacatttgcaacacatgggaatattacaagtttaggaatactgcagcgagttcaaagtgacgatcagacccagaacaggaaacggcagcmagggctatgctgatggcagctctcacaccaaaggctgtcactaagctgctgcagggtgggtgtacagccacagyggtgagcacccagcccttcctgctgcagccagtcatgtgtaggtgtctcctctgtcacacatgcatcacagaatatcatacaccgagcacgtgttccaggcttttgccccgttcatgtggttccctggattaagatccacccctggcctgctcaggttctactaagtgcttcaggacaccragggcagagcacagaatagacctttgcttaccctccgtccggtacccttatgtaccaccggcacccgctcctcgcccgtgagtgcactaatgtccaatttgctggggtccttgcagcgc

SEQ ID NO: 28496 - DNA, 600 bp, Chicken  19866894246599_3
gcgagttcaaagtgacgatcagacccagaacaggaaacggcagcmagggctatgctgatggcagctctcacaccaaaggctgtcactaagctgctgcagggtgggtgtacagccacagyggtgagcacccagcccttcctgctgcagccagtcatgtgtaggtgtctcctctgtcacacatgcatcacagaatatcatacaccgagcacgtgttccaggcttttgccccgttcatgtggttccctggattaagatccacccctggcctgctcaggttctactaagtgcttcaggacaccragggcagagcacagaatagacctttgcttaccctccgtccggtacccttatgtaccaccggcacccgctcctcgcccgtgagtgcactaatgtccaatttgctggggtccttgcagcgctgcctcctctgcttgggcttgtctgaaaaattctggagtgcaaacaacacaacgttaatgagagcagacagcttaatgagcctggctggctggcagccctgtgggaggatgacacagatgagcacccgagggatgggggatgtccccgcagccctgggcagaagcactgcgagcagcacgc

SEQ ID NO: 28497 - DNA, 600 bp, Chicken  19866894246600_1
agcccaagcccttgggaagtctgacccacctgacactgaactcaggtctcccctttatgccaccaaccactatgtatcaggtaatgtgtctaagagcttatcatagggctggtatccctaaacctatcagcttactacagcttctgagatgggtgtgtaatttacttattttctcagtgaggtagctgttgagcagtactttcttacatgattttataggtaattaaacagccatttatgaatgatagagtattgagttttctcttccagaactaagttccaagaaaagaccaggcaacyggaagtcataccaatattgtcccccaccgtaaggggcaaggatcctagatgattctccatgcacacgcacatactggttctttaacatcatacattctaagttcttatttagacatataacaaagaaaacagctgtgctttcaccgaccagtttcaaataaaaggccactaacctaagcaaagtgagctgcagtgttctggcataatcatcttcaccatatgtgcaagtgatcagaactccaaagtctggcaaagcactcaaacasagtcatgaaamtggtgtggcctgaccacctactt

SEQ ID NO: 28498 - DNA, 454 bp, Chicken  19866894246600_2
ccagaactaagttccaagaaaagaccaggcaacyggaagtcataccaatattgtcccccaccgtaaggggcaaggatcctagatgattctccatgcacacgcacatactggttctttaacatcatacattctaagttcttatttagacatataacaaagaaaacagctgtgctttcaccgaccagtttcaaataaaaggccactaacctaagcaaagtgagctgcagtgttctggcataatcatcttcaccatatgtgcaagtgatcagaactccaaagtctggcaaagcactcaaacasagtcatgaaamtggtgtggcctgaccacctacttactgttacatttacttcctgaacatcagatatatcaacatctgcttttctagtgtactctatttcatcataatttccatttttaggaaactaagaacctctgtacttccttcaaaaaggg

SEQ ID NO: 28499 - DNA, 443 bp, Chicken  19866894246600_3
ttccaagaaaagaccaggcaacyggaagtcataccaatattgtcccccaccgtaaggggcaaggatcctagatgattctccatgcacacgcacatactggttctttaacatcatacattctaagttcttatttagacatataacaaagaaaacagctgtgctttcaccgaccagtttcaaataaaaggccactaacctaagcaaagtgagctgcagtgttctggcataatcatcttcaccatatgtgcaagtgatcagaactccaaagtctggcaaagcactcaaacasagtcatgaaamtggtgtggcctgaccacctacttactgttacatttacttcctgaacatcagatatatcaacatctgcttttctagtgtactctatttcatcataatttccatttttaggaaactaagaacctctgtacttccttcaaaaaggg

SEQ ID NO: 28500 - DNA, 600 bp, Chicken  19866894246601_1
tctttctatatgcttgaaattcacattctctcctatctgaacctaaactcacctcattaattatcctttgtttctcacttgtgtagtaaaccttctcttttcactttccagtcttttttctagaaaaaagaaatccaatttataactcatagtttataagcagcaaagttttaatgtaagtaactttttaattagtgtagctttgtatttaatgttagcatctttggagaatgactagccaaatttcttctgtattcctgatttaccaagatctaaaatataatttatttttcctttgarctgcagcaagcttctttgtatgcctctgagaagtggagtttgcctttgcaataaattctgcctctctttgattttagtcagtattgttttaataagaaagcaatagtgattttgcttctgcagatctacggcaatgatattaaggaactaaacagactttctggagccaattagtattttataacacattggtttcgtgttagttgccttatctataagagagggacaagtgactttgttacttttgaacttctctgctccgtggggcatggcaaattcagagaaataaattgcatatct

SEQ ID NO: 28501 - DNA, 600 bp, Chicken  19866894246603_1
gctctttggcgcctgaggcagaggtattgattgtaaagcaaccgaaacagcctaagccattcttgccttctatatgtttgaacacttgtaattgtgcaataggtaatgaaacaacccagaatgacgcacaaagtacagtacaaatgagagacaaaaggagttgaattgtttaaataaggcaaggctgtgaaattgagattcagatgggattttcttttagatgtttcacaaaaaaggggaaaaatcattaacttgttgagtgcttttgtcttaactgtcagttcatatagcaactggatrctgtgtaaataaataaagttttgttttgttttgttttaaacaagaagagtcagtgcgcattacacgggcccattaacctgtctgttacaaaactgacttatgccagatccaaaaggatgttagggagaaaatgcaaaagatctattgtaatagygtttgtctcttttgtgctccttagggccagtgtgagtcatcttgtgcagtgtggcatgactctgagggttcaaagaaggacttggcgatttcagaggctctaaaaataaggttaataaacaggtgctctgcagagggtcattgtat

SEQ ID NO: 28502 - DNA, 600 bp, Chicken  19866894246603_2
aaggagttgaattgtttaaataaggcaaggctgtgaaattgagattcagatgggattttcttttagatgtttcacaaaaaaggggaaaaatcattaacttgttgagtgcttttgtcttaactgtcagttcatatagcaactggatrctgtgtaaataaataaagttttgttttgttttgttttaaacaagaagagtcagtgcgcattacacgggcccattaacctgtctgttacaaaactgacttatgccagatccaaaaggatgttagggagaaaatgcaaaagatctattgtaatagygtttgtctcttttgtgctccttagggccagtgtgagtcatcttgtgcagtgtggcatgactctgagggttcaaagaaggacttggcgatttcagaggctctaaaaataaggttaataaacaggtgctctgcagagggtcattgtatatcccacaaggtatgattcaaggtcatttgcagacttatttgcagttaaaatttgtattgtctgtgttgtctagccctaatggatttgtacggttttgcctctgtttgcctgtgcaccaacttaactgttgcagcacgtatctactccactcat

SEQ ID NO: 28503 - DNA, 600 bp, Chicken  19866894246607_1
tggctttgattttttttcctagaacatgcttctttttttaggtatgaatggcctcagctttccttcagtgtaacttctgcatttgttttttaattccttgccagaagcaggaagatagataatgtactgtagcatacctccaagagtaagtgttttacatcccaaaggaccctatggtccatgaggacagagttacttccatgggttgattcacataacaaaaagagaaacatctatgaaattcagttttcccctagtgtgcatcatctgaacactaaagcaggggtctttgggctgcartgtggacctgcacatatcagttcctgatgcttttccagaataatccctatcctacttgtcagtcaagaaaaataatatccatgtggtcatctgatatatactatcaagagctcacgcatactccaagaatacacaatcctctaaaacatcatctgtcactacctgctgctgaagagaagctatcacagctagctttctatactctgtggtatcaagaaccctagcagttattaaaaggtcagcagcaaactcctgaaagacttgtttattgctgcttagatacccattaagagttttatt

SEQ ID NO: 28504 - DNA, 600 bp, Chicken  19866894246609_1
tataaaacatctgtgtgacatacacagaaatattagcagaaaatacatcagccacacgctgttgttcatctggaagatggtgcgaccattcatttcctttaacagtactataattttattttatgttttctgtgcagaatacaagtactggttacacagtgtaaaacttcaattgtagtagtctaacaggcatttcaaagtagaaaaaaaatgtcatactgtgccatatttgcatgttaataaggtggaaataaagtattttttcaaactaatcagtgttcctgtttcaggcttggctcyctatattcacatgaatcagcattcatttaactctagattcttgtgtaacatacgctggagctgagaggaaacacttcaaacattatcttacatggaaggaggcaaagggaatcacccagtgttaaatatataattttacaatctgtgaaagtacgcccaaaaagaaaaatcatttctgttcaggctatgcacgtgtcttacaaaattaacacagctttcatttagaatctcctttccccactatgctaaccctctactactgtgtaaagcagttcctgccattacccgttttactctgct

SEQ ID NO: 28505 - DNA, 600 bp, Chicken  19866894246611_1
gtcatactactcttgtgtgctcttccatactgtatctagtatgtcttatatacatatctaatagagatttagacatggctttactgactggcacctatcaatctcattgccagttgaaagatggttaattgttcttttggcatacgaagtgtcttttcctgtagttcactcgtgcctcttctaaagggttatcctttactagtaaaaataaaggaaatcagtctgttagcatgcataagaaatactaatgctattaatggcctttaaagtgttctttggttttatgaaaaacagtttaaractatcttctccacaattatccaatttttgtgttatgcgaggtgaatattgaagttaaattagaaaatattctctgacaatatctgtattcctaaagttgtggtatttcatggccaattagatgtcaatgataaaagaattacttcataaaaaaagtaagtaatcctctagcatctagttgaaagcatttttttttggtgatatcaagtaataatctatgtacaatagtaactaccatgttttcattttcacgaggggaatgacagaagggaaagaaggaaacaaaacacttctcccgct

SEQ ID NO: 28506 - DNA, 600 bp, Chicken  19866894246611_2
ttatcctttactagtaaaaataaaggaaatcagtctgttagcatgcataagaaatactaatgctattaatggcctttaaagtgttctttggttttatgaaaaacagtttaaractatcttctccacaattatccaatttttgtgttatgcgaggtgaatattgaagttaaattagaaaatattctctgacaatatctgtattcctaaagttgtggtatttcatggccaattagatgtcaatgataaaagaattacttcataaaaaaagtaagtaatcctctagcatctagttgaaagcarttttttttggtgatatcaagtaataatctatgtacaatagtaactaccatgttttcattttcacgaggggaatgacagaagggaaagaaggaaacaaaacacttctcccgctgccacccctccaagtgacctgtgatgaatagaacttctgtgctttcagagtgtgcagactgctcaggaatgtttcagttgtgttcctgtgcttctgcaactggaaattcattgaggatataaaataatgctgatctgtaagcctggattatgaaactcttggagcttagaaaacaaaaatcaacatgc

SEQ ID NO: 28507 - DNA, 600 bp, Chicken  19866894246611_3
ttgagattttctttaaaaataaaacaataaaacaacatcaaaaaacatggcaatttcccttggcccaaagtagtgtttatacataggtgtaggggaactgttagggcttaaactggtgattgagcacctggtgaagggctgtgggttgcagagggagcacaggcaaattatttgcacctgttctccccacgtaactagaaggggtggagccagcctgggctcatacatataagggcaatccactgaagagaagacatttattggacctaggctgcttcctgcgaaggagagctgtagagmcagagggcctcttcaccaacggggtgtattccattcttctttatgtgaccattggcctacctgtgaatagtttgcctggtattgcttagaatccataagaagcaaaattgcttcttcataagcagaatataagttactctgaaagtagtgcctcctatttatttccatggaaactacaacagatacaaagagcacagtaacactgtttgatagagcatgttctcagctacaaaacactgttatgcaacactgtcaccactattagctatgtgtttttgctagcgataaataagagcctgc

SEQ ID NO: 28508 - DNA, 600 bp, Chicken  19866894246611_4
caacggggtgtattccattcttctttatgtgaccattggcctacctgtgaatagtttgcctggtattgcttagaatccataagaagcaaaattgcttcttcataagcagaatataagttactctgaaagtagtgcctcctatttatttccatggaaactacaacagatacaaagagcacagtaacactgtttgatagagcatgttctcagctacaaaacactgttatgcaacactgtcaccactattagctatgtgtttttgctagcgataaataagagcctgcatgatgtactcatacwraatctgtaccagtggaggtgacccactgtttcacagctgttgtgacagtgtccttattaggaaaatgttgcgcatgtactccatctttcatcagtctaaacaagtagaagtcagaaggtgccaactgtggaccgtgtggacatcaaaatggaattattcttgtcatttcaatttcccaatcctgaccccaaaaaatggggtagtatcacttgtcttgtgggtgtcttccacttctttgaagttttgtcagttattcagctcgaactgcctctttcactggcgtgaaatgcctgctcctg

SEQ ID NO: 28509 - DNA, 600 bp, Chicken  19866894246611_5
aacggggtgtattccattcttctttatgtgaccattggcctacctgtgaatagtttgcctggtattgcttagaatccataagaagcaaaattgcttcttcataagcagaatataagttactctgaaagtagtgcctcctatttatttccatggaaactacaacagatacaaagagcacagtaacactgtttgatagagcatgttctcagctacaaaacactgttatgcaacactgtcaccactattagctatgtgtttttgctagcgataaataagagcctgcatgatgtactcatacwraatctgtaccagtggaggtgacccactgtttcacagctgttgtgacagtgtccttattaggaaaatgttgcgcatgtactccatctttcatcagtctaaacaagtagaagtcagaaggtgccaactgtggaccgtgtggacatcaaaatggaattattcttgtcatttcaatttcccaatcctgaccccaaaaaatggggtagtatcacttgtcttgtgggtgtcttccacttctttgaagttttgtcagttattcagctcgaactgcctctttcactggcgtgaaatgcctgctcctgt

SEQ ID NO: 28510 - DNA, 599 bp, Chicken  19866894246615_1
  misc_feature (1)..(112): n is any nucleotide
nnnnnnnnnnnnnnnnnnnnnnnnnnnnnnnnnnnnnnnnnnnnnnnnnnnnnnnnnnnnnnnnnnnnnnnnnnnnnnnnnnnnnnnnnnnnnnnnnnnnnnnnnnnnnnnngcttgatgaactataaaacacttgttattttatagatgttaattagaggaaaagaacaggaaagcattggatctcaaggtgaagttcgggttcagaatccagactcaagtttcccggctaactcaactccaggctgaattaaactaaaagctgagtcccctgcttccagtctcagaagattctctgcrtcccaataaaagcaaacaacaacaacaaaaaaawgtatacattggtttctaaaagaaatggaaacaagacccaaaggtgataacaacaacacttgcataaccagacatattttttaatatatttaacacaaattgatgccccaaatttaaaccatcttgcttaataaagccattaatgcttttaatatccctttcttctttgaaagaggattttttttttcccaggtggtctgagaaacaaaacagaccgcaagcatcctcacttcacttctgactttgttttgtatattgtggatata

SEQ ID NO: 28511 - DNA, 599 bp, Chicken  19866894246615_2
  misc_feature (1)..(78): n is any nucleotide
nnnnnnnnnnnnnnnnnnnnnnnnnnnnnnnnnnnnnnnnnnnnnnnnnnnnnnnnnnnnnnnnnnnnnnnnnnnnnngcttgatgaactataaaacacttgttattttatagatgttaattagaggaaaagaacaggaaagcattggatctcaaggtgaagttcgggttcagaatccagactcaagtttcccggctaactcaactccaggctgaattaaactaaaagctgagtcccctgcttccagtctcagaagattctctgcrtcccaataaaagcaaacaacaacaacaaaaaaawgtatacattggtttctaaaagaaatggaaacaagacccaaaggtgataacaacaacacttgcataaccagacatattttttaatatatttaacacaaattgatgccccaaatttaaaccatcttgcttaataaagccattaatgcttttaatatccctttcttctttgaaagaggattttttttttcccaggtggtctgagaaacaaaacagaccgcaagcatcctcacttcacttctgactttgttttgtatattgtggatatactgtaacatcccaataaccttctttgtgtcacac

SEQ ID NO: 28512 - DNA, 600 bp, Chicken  19866894246617_1
caaattttataagggtgtgtacttagcagctttttgaagatcaagtcccccttgagatggctgaagttaataatttaaaagacaaaaaacaaacaaacaaaaaaaaagcgtattcatttttaacataaaatatagttttgatgacaagcatggtgtacaatttacatgggttttatgggttttatccattattttgagtacaaagtatttcccagactttattttcttccccttacactgacagcactcacaatatacctctcttcctttcttttaaaaatagaaatgacagatttattwaaaaaaaaaaaaagtacctcaggatctcaggatttagatagcatttcccaatcwctattacttgaaagcaagagttttcactctcaaagaggcataatgtccaaaaagaaacaatrctctgaacaaagatgaaaaattgtagattactttcacaggctctcattctacaatggggaaaatatccacactcaagctaggcttctttgcaaagaatattttccttttatacagagataaaaagcaaagctttcaggtcagaggctataggggaaaagagctaatgtctctctgtgctttgat

SEQ ID NO: 28513 - DNA, 600 bp, Chicken  19866894246617_2; identical to SEQ ID NO: 28512

SEQ ID NO: 28514 - DNA, 600 bp, Chicken  19866894246617_3
agatggctgaagttaataatttaaaagacaaaaaacaaacaaacaaaaaaaaagcgtattcatttttaacataaaatatagttttgatgacaagcatggtgtacaatttacatgggttttatgggttttatccattattttgagtacaaagtatttcccagactttattttcttccccttacactgacagcactcacaatatacctctcttcctttcttttaaaaatagaaatgacagatttattaaaaaaaaaaaaaagtacctcaggatctcaggatttagatagcatttcccaatcwctattacttgaaagcaagagttttcactctcaaagaggcataatgtccaaaaagaaacaatrctctgaacaaagatgaaaaattgtagattactttcacaggctctcattctacaatggggaaaatatccacactcaagctaggcttctttgcaaagaatattttccttttatacagagataaaaagcaaagctttcaggtcagaggctataggggaaaagagctaatgtctctctgtgctttgatgttacaagtagtccctcgttacagaagtgtattaaagccactagtaaactgagc

SEQ ID NO: 28515 - DNA, 600 bp, Chicken  19866894246617_4
tttttaacataaaatatagttttgatgacaagcatggtgtacaatttacatgggttttatgggttttatccattattttgagtacaaagtatttcccagactttattttcttccccttacactgacagcactcacaatatacctctcttcctttcttttaaaaatagaaatgacagatttattaaaaaaaaaaaaaagtacctcaggatctcaggatttagatagcatttcccaatcwctattacttgaaagcaagagttttcactctcaaagaggcataatgtccaaaaagaaacaatrctctgaacaaagatgaaaaattgtagattactttcacaggctctcattctacaatggggaaaatatccacactcaagctaggcttctttgcaaagaatattttccttttatacagagataaaaagcaaagctttcaggtcagaggctataggggaaaagagctaatgtctctctgtgctttgatgttacaagtagtccctcgttacagaagtgtattaaagccactagtaaactgagccagcatatttaatagccactctcagtatgggtggtatatggattattttgtacataacacag

SEQ ID NO: 28516 - DNA, 600 bp, Chicken  19866894246621_1
tggaaggatgactcactgtcatgtgtgaaaggctgccaggccttgcttacatgcttaaacaggtatggggtgtctgtgttagacgtccattgcctcagaagaagcagacgctcagccctgagaaggcaaccctggaaagggctctgctgactaaaggacctgaacttcaaagtatttctcaatcctttctagaaagttcaaggctgttgttagatggcccaaagccatcactgaggacttggcttactatcgcagtgtcttaaaagcaggactcacaaggaccatcaggttttactcagwgtgtgcatacagcatgatacagatgcagacaaaggtaactgagaccaagccaaggcctcctagagcagaaactgaaaagtttctcccaacaccaagagaaggaagctgtgaagtagcctcccttagcttcaggtattggccaacatcttgctgcatcattcagtagagaaaccatgttgctgtagggcagcgatagcacaattgcctcttgcatgtccagccaggtatgtaccatccaggagtagcttgtgctgcctcaagagacagttggacatgctgttgcccaaccagactcccagg

SEQ ID NO: 28517 - DNA, 600 bp, Chicken  19866894246622_1
ttggtctccacttggacactgagccattgatcacaactctctaagtgtaaccatccagccttatctagcaagggtccatccatcaaatccatttttctccaatttggtgaccaggatgtcaaaagggacagcacagaaaagcataagccagtctactattggttattttatatttatctaaaatcttacttattcatctcattgacttccctagaacacattttagttcacagttgactaggattaagattgtggcaaaccacacttcagtacttttcatgacacataacatgttgactytttgtaagctgctgatgactcttagttttttccttgttagctcaagcaggtgtatggtgccgacagatcactcrgcttgactggaaaactttaccaaaaaaggctagttacaagagctgtgcagtcacccatgtgttttgagcagaactaactgctacagcttgtgtcctagttttgaggttgctgaatttgggtagtcttatcattattacttgctttcagacagtagcacatattgctagataccaaacacttgactgacaccttttttgggggatacttccctacattcttagactt

SEQ ID NO: 28518 - DNA, 600 bp, Chicken  19866894246622_2
tccatccatcaaatccatttttctccaatttggtgaccaggatgtcaaaagggacagcacagaaaagcataagccagtctactattggttattttatatttatctaaaatcttacttattcatctcattgacttccctagaacacattttagttcacagttgactaggattaagattgtggcaaaccacacttcagtacttttcatgacacataacatgttgactytttgtaagctgctgatgactcttagttttttccttgttagctcaagcaggtgtatggtgccgacagatcactcrgcttgactggaaaactttaccaaaaaaggctagttacaagagctgtgcagtcacccatgtgttttgagcagaactaactgctacagcttgtgtcctagttttgaggttgctgaatttgggtagtcttatcattattacttgctttcagacagtagcacatattgctagataccaaacacttgactgacaccttttttgggggatacttccctacattcttagacttgagttaagctggtactgggaaagctgccagttactatggggactctgtgcttgctacagtacgttctttaggaa

SEQ ID NO: 28519 - DNA, 537 bp, Chicken  19866894246623_1
agaaggggactacaatcatgcgtacccctatatagtgcccagtggctgatatgatccaattatctacagctaatgaacaaaaattttaaatctgcaataatctttgtgtgacaagactgtttcaaatttgtagtgttggaaattatactatggcttatggtctgtgtaattctgaatcaagcacactgtgtctaggccaaaggatccacctgctaacccagtgctctgttctgcatctgcatgcaccagcacagagaacatgaaggaggatgtggttttaggcactgatcatcagctacracagcagcaaaacaaacacaaacaaaaacttaaataagaggtggattatgtggtttgtcagaagaaatatatagatataattttaatatctttttgactttttttggaagtgttcatcttggaaacaacctcttccaacaccagacatttattgtaggctctttcattgaaaggacacaagcaaattattttactggatatattatttaagtcctgattatgcagcagttgttacca

SEQ ID NO: 28520 - DNA, 600 bp, Chicken  19866894246626_1
caaattcttctctgggatgactaatacacatgtgatgccaaagcatcttcagtattggcagtaagcttttgtgtttctgttgaaaaccccattctctttttaggtgaccaagtgtagatttagaagacagaaatttaacctcagagttgcattaactctgcctttaaagtactctagctttttgaacttctctcaagtaaagaaaatttaaaatgcagcccaggagtcagtatctttaacttcgagccttccttctgaagggaattacatcttactgaagtttctgaaatatccttaggrtagagagtctgaagggctatacagaagtggaaggtcacacctagagaatttttcttctcaaagcacagtcctccagaataagcctacgttttagttcttgaatacagtatatacccccaaaaattatctacgtgtctttttgaactgggaatattgctactcctcttaagtaatgtataaaaatgttaaaataggtacataaatagcagcagttactagcagacgaagtgtaacttaattcagatgtccaatacaggaaaaaaaatccaaaagttctttagatagaaacattgttttgta

SEQ ID NO: 28521 - DNA, 600 bp, Chicken  19866894246627_1
tttactacagcatctacacatccagagacaaagacttcctagcacctagttcccaaactgcagtgtcagctgagaaatcaaactcagtgttgagagctggatgttagactaaatagattattgtagattgccttcctcctctgtggctcaggtgtccacatctgaatataaaatctctgattgagcctctggacatcttccatgatctgaagaatgggagcagtgtgactttcttagcgctgtcatggtgtgtgtgcacaaggatgggttgacccgtgcttttgtctggggttaataaaygaataacctatcaaatgtcatttgtacaaagtgttttggggaagaaatggaccatgtgttgtgtagaagtgcaacagtttaggcacttgtgtttgctttttggcagaaccacatctggattctgggtttggaggactgaaaaagcagaaggtgtaaatggttatgaagcaaaggtaaagtctgttctatacagctaactgaaacgttgttgtgttttgcctttatttcttgaatattttaggttctaagtttcctatcaagggcttcattgtattacagaacagggtaggagtgaggatc

SEQ ID NO: 28522 - DNA, 600 bp, Chicken  19866894246633_1
gaaaacagaatgaatttacaacacattctaacccagcctgttacctgaagccccacttacggagtgaggtgattataaaagctagaagtttaaaatgaacctgtattacaaacgccatgaaagggaacatgaagtcctcccagctctgcctcccacccagcagtctgcactgcgaagcgcttcacaaagcaggagtgctctcaggtctgagagggaacagtgctgtaattacctgcatcatcagaaggaagaatggcacaaggaggactgctgtggttatgcttcacatgctgagataayggcagggggtgggcgaggaggcggtgcaacagctccaaactgagacaacacagtgaccagaagcagtctttcattccagctcatccacagccctctggctcttacggaagactcagcattgctttgccgtaccctacaaccccattacgatgtcctgcacaaggacagagctgtcacacccaaaggcaaagatatcatctgcccagatgctgcctccttccccatccccacatgggtgctggctgcaagctggggccacaccacagaaacaaagctggggggaaggctgggagccacatc

SEQ ID NO: 28523 - DNA, 548 bp, Chicken  19866894246633_2
accccattacgatgtcctgcacaaggacagagctgtcacacccaaaggcaaagatatcatctgcccagatgctgcctccttccccatccccacatgggtgctggctgcaagctggggccacaccacagaaacaaagctggggggaaggctgggagccacatcacgcaaggacacgatgcgctggcagtgcggataaacacatctgtcactagaattaaatgtgtgcctgggtcttctgtatattagacttctgagtctgttttaaaaagggaggggcagggaggaaagcagcagacacartgaaaatcccatccggttcctgaatcttttacacctcacagcaaacccaacaacaggcagcaaaaatcagggcagctctaaagaaaagtaagccaggttggtttttttttaagttgtccttaaattctgataagaacactgtacgttgtttgcttgttctcagccattttcaaggactacacacgaactttcagcaggaagaacaccaaactggctgcccaggagcacaaaaggacagagaagttaat

SEQ ID NO: 28524 - DNA, 600 bp, Chicken  19866894246640_1
tcatatcagttacaaaatgggagtattagaggtggtataataggagatgctgtgcctcagcttgtgctcagaaaggtttttctgagttctatagtagagggcctgggcttgtagggcaccctggcaattcctcctggataatgatgcctttctgccttcctttcagctgtagcttgttgaaaataggagccattaaaaactgcccaatttcatttgggaggttactgcagcatcttcctgaggactgtgagtaccggggatttcgctttcaacccaaactaccacagtggctttgatgcragcccaaagagcacaaagcagcagcactactttgtttcaggggcaattttctcatgtcctcattaaaaacctgcagttgtgctgccttcctatggcttcccccactgctctcagctacatgtggagttctagaaggccaaacagaaaggaatctcacagagcactggtcgcttccagcttcctaagtgggtggatgctagtttggcactcagaagcctaaaaccctgataattygtgactgctttgcttggtgggaagtgcaggcatcccaacagctggtgacttggagagctgtcccgt

SEQ ID NO: 28525 - DNA, 600 bp, Chicken  19866894246640_2
ttcctgaggactgtgagtaccggggatttcgctttcaacccaaactaccacagtggctttgatgcragcccaaagagcacaaagcagcagcactactttgtttcaggggcaattttctcatgtcctcattaaaaacctgcagttgtgctgccttcctatggcttcccccactgctctcagctacatgtggagttctagaaggccaaacagaaaggaatctcacagagcactggtcgcttccagcttcctaagtgggtggatgctagtttggcactcagaagcctaaaaccctgataattygtgactgctttgcttggtgggaagtgcaggcatcccaacagctggtgacttggagagctgtcccgtgtttctaccacgtaagagctttacgtgtcacgtttgtgcagttctctgagcctggccatccaaaccttgargacctgagctctgcccaatgctgtgagcctccatagaggcaaacaaacagcagggcggtttgtctttaggattgccactcccccggtgacccacrtctcatatacatatatatatctcatctggaaaagagctccttgaaaccttgcatacatccatatgcag

SEQ ID NO: 28526 - DNA, 600 bp, Chicken  19866894246640_3
tgcagttgtgctgccttcctatggcttcccccactgctctcagctacatgtggagttctagaaggccaaacagaaaggaatctcacagagcactggtcgcttccagcttcctaagtgggtggatgctagtttggcactcagaagcctaaaaccctgataattygtgactgctttgcttggtgggaagtgcaggcatcccaacagctggtgacttggagagctgtcccgtgtttctaccacgtaagagctttacgtgtcacgtttgtgcagttctctgagcctggccatccaaaccttgargacctgagctctgcccaatgctgtgagcctccatagaggcaaacaaacagcagggcggtttgtctttaggattgccactcccccggtgacccacrtctcatatacatatatatatctcatctggaaaagagctccttgaaaccttgcatacatccatatgcagtgaaagccatagagcatctaccgttctcacgctatgggcagtgctgacctctcccaggctcagtgaggccaaccagatgtagctrttagaacacatcagtcagctktattgccctcttgaatttttaatcatttttg

SEQ ID NO: 28527 - DNA, 600 bp, Chicken  19866894246640_4
gtcgcttccagcttcctaagtgggtggatgctagtttggcactcagaagcctaaaaccctgataattygtgactgctttgcttggtgggaagtgcaggcatcccaacagctggtgacttggagagctgtcccgtgtttctaccacgtaagagctttacgtgtcacgtttgtgcagttctctgagcctggccatccaaaccttgargacctgagctctgcccaatgctgtgagcctccatagaggcaaacaaacagcagggcggtttgtctttaggattgccactcccccggtgacccacrtctcatatacatatatatatctcatctggaaaagagctccttgaaaccttgcatacatccatatgcagtgaaagccatagagcatctaccgttctcacgctatgggcagtgctgacctctcccaggctcagtgaggccaaccagatgtagctrttagaacacatcagtcagctktattgccctcttgaatttttaatcatttttgccaactcagtgtagtacttgctttaaagtatttgttttaagtggatgttaacatccagtttttttccattctctttcctattgactggggaatat

SEQ ID NO: 28528 - DNA, 476 bp, Chicken  19866894246640_5
tttacgtgtcacgtttgtgcagttctctgagcctggccatccaaaccttgargacctgagctctgcccaatgctgtgagcctccatagaggcaaacaaacagcagggcggtttgtctttaggattgccactcccccggtgacccacrtctcatatacatatatatatctcatctggaaaagagctccttgaaaccttgcatacatccatatgcagtgaaagccatagagcatctaccgttctcacgctatgggcagtgctgacctctcccaggctcagtgaggccaaccagatgtagctrttagaacacatcagtcagctktattgccctcttgaatttttaatcatttttgccaactcagtgtagtacttgctttaaagtatttgttttaagtggatgttaacatccagtttttttccattctctttcctattgactggggaatatcttaagtaaatatttgagaagaaccattt

SEQ ID NO: 28529 - DNA, 455 bp, Chicken  19866894246640_6
gttctctgagcctggccatccaaaccttgargacctgagctctgcccaatgctgtgagcctccatagaggcaaacaaacagcagggcggtttgtctttaggattgccactcccccggtgacccacrtctcatatacatatatatatctcatctggaaaagagctccttgaaaccttgcatacatccatatgcagtgaaagccatagagcatctaccgttctcacgctatgggcagtgctgacctctcccaggctcagtgaggccaaccagatgtagctrttagaacacatcagtcagctktattgccctcttgaatttttaatcatttttgccaactcagtgtagtacttgctttaaagtatttgttttaagtggatgttaacatccagtttttttccattctctttcctattgactggggaatatcttaagtaaatatttgagaagaaccattt

SEQ ID NO: 28530 - DNA, 600 bp, Chicken  19866894246643_1
gttttaacaaaaagtctgtgtgcgggtgtttccaaaaacatccagttagctcaattacaaactactgtttggaaaaactatgcaacagctttgggtggtgcgagcacaaagctgtaccctcagcaaccacctctacaaagcagcccatgcacatggatcttgctttcacacacaaaaaatggttatttctgattctttcacaagacattttcttatctttctgagagtttctgaaagccgaggttcttactctgatcctccagggagccaaaagagaaagtctcatgactttcagccagktttacctttcccactgaatggaaaatggaaacagaacagcaaagttttctaggagctgtagcgcattccttctctactgagactcccagtgcagcacatgatgtgatgacagggaatactgataacaaaaatcatgaaaccacagcacctctccaactactaaraaactaatatttcagtaataaagaatggaagaggagcacaattctgggaactacattcccaaagtctttccctcttgttaactgatgaatgccacttaaaaaaaagaagtacttcaagtctagcyttgcaaaaagg

SEQ ID NO: 28531 - DNA, 600 bp, Chicken  19866894246643_10
gctctctaaggtcatccttaacagaagaattttactattctctttaaacagtatgtgttcatcagcaccttttctgagcaggacttaggaagctcatctcagtttgacatagagtattacaaatagaaaatccatcagccattaacaaacaaggtttgaagagggaaacagtatcctataaagcactatttagggcaattgcattttaacataattaaatactgcacctctgraagtacagaaaaccctgcattgtttgcaaatgcacttaagccttttaagcrgaccatcacctttccrtaagtacggcaacaaaaatgacagccagtagggaaaaattaaacaatactgaaataaagcttaaacagattaacttcaggagattcaaaaaattaagcagtgatatattttgctattttaaatctttaatacaaattaaattatgctactctagataacwacatgtgttatctgcattattaactgttactgttgaaaactgttaataataattgataatgcccaaactttgcagcatggaactggtgcctcacactgcactacagcatactccatgagtcccacaagggtaccagygta

SEQ ID NO: 28532 - DNA, 600 bp, Chicken  19866894246643_11
gagggaaacagtatcctataaagcactatttagggcaattgcattttaacataattaaatactgcacctctgraagtacagaaaaccctgcattgtttgcaaatgcacttaagccttttaagcrgaccatcacctttccrtaagtacggcaacaaaaatgacagccagtagggaaaaattaaacaatactgaaataaagcttaaacagattaacttcaggagattcaaaaaattaagcagtgatatattttgctattttaaatctttaatacaaattaaattatgctactctagataacwacatgtgttatctgcattattaactgttactgttgaaaactgttaataataattgataatgcccaaactttgcagcatggaactggtgcctcacactgcactacagcatactccatgagtcccacaagggtaccagygtaaggcagatgctagtggtagcggttatgctattcctttttaacctactcacacagacccaggttcaaatcgccaggtcctaccattcagacctaaaggactaccaaaatttccaagcagatgaatgatgcttttcctctcgctgatgaatgaatcctgcac

SEQ ID NO: 28533 - DNA, 581 bp, Chicken  19866894246643_12
ccrtaagtacggcaacaaaaatgacagccagtagggaaaaattaaacaatactgaaataaagcttaaacagattaacttcaggagattcaaaaaattaagcagtgatatattttgctattttaaatctttaatacaaattaaattatgctactctagataacwacatgtgttatctgcattattaactgttactgttgaaaactgttaataataattgataatgcccaaactttgcagcatggaactggtgcctcacactgcactacagcatactccatgagtcccacaagggtaccagygtaaggcagatgctagtggtagcggttatgctattcctttttaacctactcacacagacccaggttcaaatcgccaggtcctaccattcagacctaaaggactaccaaaatttccaagcagatgaatgatgcttttcctctcgctgatgaatgaatcctgcacaaatggacatcagaattctgcagtgagaaaaaagcaagctgtattctctgttcgtgcaggcatttggcttacatagtgcgtcagtctgcagctcccaggatctgggccacgctctcta

SEQ ID NO: 28534 - DNA, 600 bp, Chicken  19866894246643_2
ttcacacacaaaaaatggttatttctgattctttcacaagacattttcttatctttctgagagtttctgaaagccgaggttcttactctgatcctccagggagccaaaagagaaagtctcatgactttcagccagktttacctttcccactgaatggaaaatggaaacagaacagcaaagttttctaggagctgtagcgcattccttctctactgagactcccagtgcagcacatgatgtgatgacagggaatactgataacaaaaatcatgaaaccacagcacctctccaactactaaraaactaatatttcagtaataaagaatggaagaggagcacaattctgggaactacattcccaaagtctttccctcttgttaactgatgaatgccacttaaaaaaaagaagtacttcaagtctagcyttgcaaaaaggaagcataaagggtacacagaaggccagtgmgagarctgccaataccaaggatgaagttctgcacaaataagagtgcatgcatttgcccagcccagctgactggtaccaaatgcacaaatagaatctctggtgctagactacttctgtgtgyccaaaaataccaa

SEQ ID NO: 28535 - DNA, 600 bp, Chicken  19866894246643_3
tttcagccagktttacctttcccactgaatggaaaatggaaacagaacagcaaagttttctaggagctgtagcgcattccttctctactgagactcccagtgcagcacatgatgtgatgacagggaatactgataacaaaaatcatgaaaccacagcacctctccaactactaaraaactaatatttcagtaataaagaatggaagaggagcacaattctgggaactacattcccaaagtctttccctcttgttaactgatgaatgccacttaaaaaaaagaagtacttcaagtctagcyttgcaaaaaggaagcataaagggtacacagaaggccagtgmgagarctgccaataccaaggatgaagttctgcacaaataagagtgcatgcatttgcccagcccagctgactggtaccaaatgcacaaatagaatctctggtgctagactacttctgtgtgyccaaaaataccaagagaagcacaytgcggcgtgaatgggctctctaaggtcatccttaacagaagaattttactattctctttaaacagtatgtgttcatcagcaccttttctgagcaggacttaggaagctcatctc

SEQ ID NO: 28536 - DNA, 600 bp, Chicken  19866894246643_4
acagaacagcaaagttttctaggagctgtagcgcattccttctctactgagactcccagtgcagcacatgatgtgatgacagggaatactgataacaaaaatcatgaaaccacagcacctctccaactactaaraaactaatatttcagtaataaagaatggaagaggagcacaattctgggaactacattcccaaagtctttccctcttgttaactgatgaatgccacttaaaaaaaagaagtacttcaagtctagcyttgcaaaaaggaagcataaagggtacacagaaggccagtgmgagarctgccaataccaaggatgaagttctgcacaaataagagtgcatgcatttgcccagcccagctgactggtaccaaatgcacaaatagaatctctggtgctagactacttctgtgtgyccaaaaataccaagagaagcacaytgcggcgtgaatgggctctctaaggtcatccttaacagaagaattttactattctctttaaacagtatgtgttcatcagcaccttttctgagcaggacttaggaagctcatctcagtttgacatagagtattacaaatagaaaatccatcagcca

SEQ ID NO: 28537 - DNA, 600 bp, Chicken  19866894246643_5
acagcaaagttttctaggagctgtagcgcattccttctctactgagactcccagtgcagcacatgatgtgatgacagggaatactgataacaaaaatcatgaaaccacagcacctctccaactactaaraaactaatatttcagtaataaagaatggaagaggagcacaattctgggaactacattcccaaagtctttccctcttgttaactgatgaatgccacttaaaaaaaagaagtacttcaagtctagcyttgcaaaaaggaagcataaagggtacacagaaggccagtgmgagarctgccaataccaaggatgaagttctgcacaaataagagtgcatgcatttgcccagcccagctgactggtaccaaatgcacaaatagaatctctggtgctagactacttctgtgtgyccaaaaataccaagagaagcacaytgcggcgtgaatgggctctctaaggtcatccttaacagaagaattttactattctctttaaacagtatgtgttcatcagcaccttttctgagcaggacttaggaagctcatctcagtttgacatagagtattacaaatagaaaatccatcagccattaac

SEQ ID NO: 28538 - DNA, 600 bp, Chicken  19866894246643_6
tccaactactaaraaactaatatttcagtaataaagaatggaagaggagcacaattctgggaactacattcccaaagtctttccctcttgttaactgatgaatgccacttaaaaaaaagaagtacttcaagtctagcyttgcaaaaaggaagcataaagggtacacagaaggccagtgmgagarctgccaataccaaggatgaagttctgcacaaataagagtgcatgcatttgcccagcccagctgactggtaccaaatgcacaaatagaatctctggtgctagactacttctgtgtgyccaaaaataccaagagaagcacaytgcggcgtgaatgggctctctaaggtcatccttaacagaagaattttactattctctttaaacagtatgtgttcatcagcaccttttctgagcaggacttaggaagctcatctcagtttgacatagagtattacaaatagaaaatccatcagccattaacaaacaaggtttgaagagggaaacagtatcctataaagcactatttagggcaattgcattttaacataattaaatactgcacctctgraagtacagaaaaccctgcattgtttgcaa

SEQ ID NO: 28539 - DNA, 600 bp, Chicken  19866894246643_7
tcagtaataaagaatggaagaggagcacaattctgggaactacattcccaaagtctttccctcttgttaactgatgaatgccacttaaaaaaaagaagtacttcaagtctagcyttgcaaaaaggaagcataaagggtacacagaaggccagtgmgagarctgccaataccaaggatgaagttctgcacaaataagagtgcatgcatttgcccagcccagctgactggtaccaaatgcacaaatagaatctctggtgctagactacttctgtgtgyccaaaaataccaagagaagcacaytgcggcgtgaatgggctctctaaggtcatccttaacagaagaattttactattctctttaaacagtatgtgttcatcagcaccttttctgagcaggacttaggaagctcatctcagtttgacatagagtattacaaatagaaaatccatcagccattaacaaacaaggtttgaagagggaaacagtatcctataaagcactatttagggcaattgcattttaacataattaaatactgcacctctgraagtacagaaaaccctgcattgtttgcaaatgcacttaagccttttaagcrga

SEQ ID NO: 28540 - DNA, 600 bp, Chicken  19866894246643_8
atctctggtgctagactacttctgtgtgyccaaaaataccaagagaagcacaytgcggcgtgaatgggctctctaaggtcatccttaacagaagaattttactattctctttaaacagtatgtgttcatcagcaccttttctgagcaggacttaggaagctcatctcagtttgacatagagtattacaaatagaaaatccatcagccattaacaaacaaggtttgaagagggaaacagtatcctataaagcactatttagggcaattgcattttaacataattaaatactgcacctctgraagtacagaaaaccctgcattgtttgcaaatgcacttaagccttttaagcrgaccatcacctttccrtaagtacggcaacaaaaatgacagccagtagggaaaaattaaacaatactgaaataaagcttaaacagattaacttcaggagattcaaaaaattaagcagtgatatattttgctattttaaatctttaatacaaattaaattatgctactctagataacwacatgtgttatctgcattattaactgttactgttgaaaactgttaataataattgataatgcccaaactttgc

SEQ ID NO: 28541 - DNA, 600 bp, Chicken  19866894246643_9
aytgcggcgtgaatgggctctctaaggtcatccttaacagaagaattttactattctctttaaacagtatgtgttcatcagcaccttttctgagcaggacttaggaagctcatctcagtttgacatagagtattacaaatagaaaatccatcagccattaacaaacaaggtttgaagagggaaacagtatcctataaagcactatttagggcaattgcattttaacataattaaatactgcacctctgraagtacagaaaaccctgcattgtttgcaaatgcacttaagccttttaagcrgaccatcacctttccrtaagtacggcaacaaaaatgacagccagtagggaaaaattaaacaatactgaaataaagcttaaacagattaacttcaggagattcaaaaaattaagcagtgatatattttgctattttaaatctttaatacaaattaaattatgctactctagataacwacatgtgttatctgcattattaactgttactgttgaaaactgttaataataattgataatgcccaaactttgcagcatggaactggtgcctcacactgcactacagcatactccatgagtccca

SEQ ID NO: 28542 - DNA, 600 bp, Chicken  19866894246647_1
cttaaattacagacatggtacagaactctacagaaaccttctatccagataacctaagcaacatcatgcttataaaacctggaaggaccagtcagccttttcattatttctatgtgacatacgtatgggacaatgagaaacattacgttacaagtcccttatgctagaagggtaggagtaacgaactttcatagacataagcaaatttaattcagtcaaacagtttaaaaaaaaaacaaacaaaccaaaacaaacccaccctaaacaataaaaataaaaaaaagccatatctctatttcytcaactactgtaaraactttactccactgaatcacattctcagccatgtttttcttccagaattgcaagargtttctgcaaactattatttctcttcaaataaaatgtgtgatatttccaagtgcatggaaaattttaaagtgtttctgaatcttattttccagctaagtgcattaacttaagtgttactgagttacatgaaaacactctacttgcatgtcagtcaagtatcacactatcagtttagaagaaacatgttttcatctaacattcttcttgcatttgaaataagcaaatgta

SEQ ID NO: 28543 - DNA, 600 bp, Chicken  19866894246647_2
atggtacagaactctacagaaaccttctatccagataacctaagcaacatcatgcttataaaacctggaaggaccagtcagccttttcattatttctatgtgacatacgtatgggacaatgagaaacattacgttacaagtcccttatgctagaagggtaggagtaacgaactttcatagacataagcaaatttaattcagtcaaacagtttaaaaaaaaaacaaacaaaccaaaacaaacccaccctaaacaataaaaataaaaaaaagccatatctctatttcytcaactactgtaaraactttactccactgaatcacattctcagccatgtttttcttccagaattgcaagargtttctgcaaactattatttctcttcaaataaaatgtgtgatatttccaagtgcatggaaaattttaaagtgtttctgaatcttattttccagctaagtgcattaacttaagtgttactgagttacatgaaaacactctacttgcatgtcagtcaagtatcacactatcagtttagaagaaacatgttttcatctaacattcttcttgcatttgaaataagcaaatgtaatacaaccttttca

SEQ ID NO: 28544 - DNA, 600 bp, Chicken  19866894246647_3
ataaaacctggaaggaccagtcagccttttcattatttctatgtgacatacgtatgggacaatgagaaacattacgttacaagtcccttatgctagaagggtaggagtaacgaactttcatagacataagcaaatttaattcagtcaaacagtttaaaaaaaaaacaaacaaaccaaaacaaacccaccctaaacaataaaaataaaaaaaagccatatctctatttcytcaactactgtaaraactttactccactgaatcacattctcagccatgtttttcttccagaattgcaagargtttctgcaaactattatttctcttcaaataaaatgtgtgatatttccaagtgcatggaaaattttaaagtgtttctgaatcttattttccagctaagtgcattaacttaagtgttactgagttacatgaaaacactctacttgcatgtcagtcaagtatcacactatcagtttagaagaaacatgttttcatctaacattcttcttgcatttgaaataagcaaatgtaatacaaccttttcagataactcagaactacataaaatataattaaaaatgtctcatctgcaagtctagctc

SEQ ID NO: 28545 - DNA, 600 bp, Chicken  19866894246650_1
atctgcacgcagggcttgcttcacccctccctgcttctcttctgctctcatacaactctgttgaagtagctgcgtacaagtggagtaatgcagtggtgaatcaggcctgtgttttgtaagtaatttattgcaagcatttgcagtactgagaggggaaacattcaggcgtgttcattgtcgagatttaaactcccggagctgcgttcagctggcagcggtcgcgtgtcacggggtgagacactgagcgcagcagctatgacagtagctgagcacatttattgcattaaaacctggtaacaygctagaatactgtaaacagtatcattaagcgtgctgaaaggaagttgcagttcaagtgatattttttttggacrttgactgttaaactcatacattgggttaactggagagggcacttcctctctcatttgttagttgtcacagtgataatttgtgtcatttccccattcatccgtttgcaggtgaygcgtggcttggatcagtattcaaactactgagggaagcacaagcaaggtgtagaagtattcatggcatgctaggaagagctcctggttgtctggagtgctcatcttgagctgc

SEQ ID NO: 28546 - DNA, 600 bp, Chicken  19866894246650_2
tacaagtggagtaatgcagtggtgaatcaggcctgtgttttgtaagtaatttattgcaagcatttgcagtactgagaggggaaacattcaggcgtgttcattgtcgagatttaaactcccggagctgcgttcagctggcagcggtcgcgtgtcacggggtgagacactgagcgcagcagctatgacagtagctgagcacatttattgcattaaaacctggtaacaygctagaatactgtaaacagtatcattaagcgtgctgaaaggaagttgcagttcaagtgatattttttttggacrttgactgttaaactcatacattgggttaactggagagggcacttcctctctcatttgttagttgtcacagtgataatttgtgtcatttccccattcatccgtttgcaggtgaygcgtggcttggatcagtattcaaactactgagggaagcacaagcaaggtgtagaagtattcatggcatgctaggaagagctcctggttgtctggagtgctcatcttgagctgccaggagcacaatgaaygtgtgcagggcaacagtgccatcttatataacgtgtctgtggaaggaggagtgtgtca

SEQ ID NO: 28547 - DNA, 600 bp, Chicken  19866894246650_3
aactcccggagctgcgttcagctggcagcggtcgcgtgtcacggggtgagacactgagcgcagcagctatgacagtagctgagcacatttattgcattaaaacctggtaacaygctagaatactgtaaacagtatcattaagcgtgctgaaaggaagttgcagttcaagtgatattttttttggacrttgactgttaaactcatacattgggttaactggagagggcacttcctctctcatttgttagttgtcacagtgataatttgtgtcatttccccattcatccgtttgcaggtgaygcgtggcttggatcagtattcaaactactgagggaagcacaagcaaggtgtagaagtattcatggcatgctaggaagagctcctggttgtctggagtgctcatcttgagctgccaggagcacaatgaaygtgtgcagggcaacagtgccatcttatataacgtgtctgtggaaggaggagtgtgtcaaactgctttaatctgtatgaacaagtggtagtgactcctgtaatgggggctgaaayaaaattaatctcaagtgtaatgtgttaagagcttggttttatgagccatttctagaa

SEQ ID NO: 28548 - DNA, 600 bp, Chicken  19866894246650_4
cagtatcattaagcgtgctgaaaggaagttgcagttcaagtgatattttttttggacrttgactgttaaactcatacattgggttaactggagagggcacttcctctctcatttgttagttgtcacagtgataatttgtgtcatttccccattcatccgtttgcaggtgaygcgtggcttggatcagtattcaaactactgagggaagcacaagcaaggtgtagaagtattcatggcatgctaggaagagctcctggttgtctggagtgctcatcttgagctgccaggagcacaatgaaygtgtgcagggcaacagtgccatcttatataacgtgtctgtggaaggaggagtgtgtcaaactgctttaatctgtatgaacaagtggtagtgactcctgtaatgggggctgaaayaaaattaatctcaagtgtaatgtgttaagagcttggttttatgagccatttctagaactagacaacatcaaacaaaaatacttggcacaattgttttatggtggacagtcccaagaagcgataggaattgagctgtgaaagcagagttaaagaacattccaattagcctgggtgagaaaggcagca

SEQ ID NO: 28549 - DNA, 600 bp, Chicken  19866894246650_5
gttagttgtcacagtgataatttgtgtcatttccccattcatccgtttgcaggtgaygcgtggcttggatcagtattcaaactactgagggaagcacaagcaaggtgtagaagtattcatggcatgctaggaagagctcctggttgtctggagtgctcatcttgagctgccaggagcacaatgaaygtgtgcagggcaacagtgccatcttatataacgtgtctgtggaaggaggagtgtgtcaaactgctttaatctgtatgaacaagtggtagtgactcctgtaatgggggctgaaayaaaattaatctcaagtgtaatgtgttaagagcttggttttatgagccatttctagaactagacaacatcaaacaaaaatacttggcacaattgttttatggtggacagtcccaagaagcgataggaattgagctgtgaaagcagagttaaagaacattccaattagcctgggtgagaaaggcagcattaactctgggtgtgttttctgtggtattttcagaactatttctcattttaaatacttcgtgtatctgttccattgctatctcatgtaaatcctttttgccacagggttggtgt

SEQ ID NO: 28550 - DNA, 600 bp, Chicken  19866894246653_1
gcagcccttgcagggctccaagctccttgcaaggcttcctcatagcctgaggaggagcagctccgcctgggcgccgatcgtttgggagcggtgtcatcgctgtctctgggtgtgtgtctggccccgtttgtctgcctgctcatcccaaatcatttgcagccggctggatggctcccaccaggcgcccggtgacaaaattggggtgtgcagctgagccctattagccaccagcgaatctccgcaggaccggtggcaccggtgggggtgtcccagtctggctctgttggccatggggatgcyggggcgtggggaagacatcccatcccagctggtcttgctgcctgtgtgggctgggtgggggccgtgggactcggggctgttcgtgtctgagagccagtggtgatgctgaggttgggaacaccgagctggggtgagttggacacaactttggggctggggagggagacagcagcaattctatgggaacttctcgaggtctttccccttaaacaatgaatggagaggaggagccggcagggtggaggagctgtgtgctcccatgtatcgatgctaactcagcccccgaatttgcttttcctt

SEQ ID NO: 28551 - DNA, 589 bp, Chicken  19866894246653_2
gggaagacatcccatcccagctggtcttgctgcctgtgtgggctgggtgggggccgtgggactcggggctgttcgtgtctgagagccagtggtgatgctgaggttgggaacaccgagctggggtgagttggacacaactttggggctggggagggagacagcagcaattctatgggaacttctcgaggtctttccccttaaacaatgaatggagaggaggagccggcagggtggaggagctgtgtgctcccatgtatcgatgctaactcagcccccgaatttgcttttccttgtcctgcrtgttgctggcggctgcaggttctgagcatcctttaatccctgcagaaagctgatttttatttattcatcattgagctcattgatgcagcatggagccaggcacagggctggcaagcagcacgtcctgcaacagtgggggggggggggaaactcgctactgaaacaataagcagagagctgaaatatcagcgataaaattaaactgtaatgagattaaacagtggctcttctatcagaccctccttgtgcagagataattacctggggaagtgcagtgagcacattgtga

SEQ ID NO: 28552 - DNA, 600 bp, Chicken  19866894246663_1
ggtaggacagttacatggttatcagaatggagatcccgaaaaggccctctgccagtagttcgtggttctatggcaggccgtgcacacgagcagaagtacaaacacaaactccagtcttaaagtacatcaagcatatctctcattaagcactactttgatcttgcaccatgagtcaggagtgcagacacagcagtacagtggaacaaggtggtgatggaggacctgctactgcctgggagtaactgcaaagtatgtggatctcacagtgagtgctgccacacaggcaccttgggcaggtgktatctgtcactccagtgaggtcacagacttcggtttgagaagctgtgtatcacagggtcctcagaagtaagtgcttcatctcactcaaaccaagtgctaaagtccggagcttccattactgactatagaaagcaagataagtctattctttccctagcttcccaactaaaccagctaatttcctgaccaacttgattactcacttgtagttctggcattcattctctgtgatattaagctgtgtgtctagctggtctagcagagtatctgtgcactcctcacacaaggggtgatccacat

SEQ ID NO: 28553 - DNA, 600 bp, Chicken  19866894246667_1
cttcatccgtcctgacagccaaaccctggctgactctgccccaatcccccccagcatcacatcaatgagagcaggcaatgcagagtgctccctgatgtgctcaaacacgggcaggcactgctctaagtatggctcgttgcaagcaacaaagccctaggagtaaaacaacaagatatgaatctgtcttctgcaggtttgctgagccttgatctcccaagatcaaacattgaggcaaagcttgcttaccttggtgctgcactgcacccatagctcaatattactgggaaagatggagcacasaaagccatgaggaaagcaggaattgtgttttgttggagcctgtgaaacaaacagagctcacacagcaaacagaagtgcgagaacacagctctataagcaaaagctgcaggaaatgaaggaactgagaactgaccttaatacagragcacaaatgagcccagagcagccttttctgctcccaaattaccatcataccatcggcccgtccctgcccagaaccaactgctggttcagtgacagaaacaccaagggacattacccaggaagagttctctatgaaatcctgcaagtcatcactgc

SEQ ID NO: 28554 - DNA, 600 bp, Chicken  19866894246667_2
aacaaagccctaggagtaaaacaacaagatatgaatctgtcttctgcaggtttgctgagccttgatctcccaagatcaaacattgaggcaaagcttgcttaccttggtgctgcactgcacccatagctcaatattactgggaaagatggagcacasaaagccatgaggaaagcaggaattgtgttttgttggagcctgtgaaacaaacagagctcacacagcaaacagaagtgcgagaacacagctctataagcaaaagctgcaggaaatgaaggaactgagaactgaccttaatacagragcacaaatgagcccagagcagccttttctgctcccaaattaccatcataccatcggcccgtccctgcccagaaccaactgctggttcagtgacagaaacaccaagggacattacccaggaagagttctctatgaaatcctgcaagtcatcactgcagctccaggacgcccttaaaagttgcacaccatgaataaaacattgatttgaacaccagaatttcacgtagacacattgctcattcatcactaccctccctgtcctcagcctgtggtgggactgagaatgccacacaaagcaga

SEQ ID NO: 28555 - DNA, 599 bp, Chicken  19866894246671_1
  misc_feature (1)..(121): n is any nucleotide
nnnnnnnnnnnnnnnnnnnnnnnnnnnnnnnnnnnnnnnnnnnnnnnnnnnnnnnnnnnnnnnnnnnnnnnnnnnnnnnnnnnnnnnnnnnnnnnnnnnnnnnnnnnnnnnnnnnnnnnnntgttgttctctttccttttaaacttccttatcccccactacagttctgcctcccccttccccccccaaaaaccctcaccccaaacaacaacaaaaaacaccacgttttaactgcctcaccatctgtcagatgcacaggatatgaccagctcactgaaacagtcgctgaattcctccccrtctgttttcagcttcatttgcaaacctcagataaagcaattccgtctggtgttctgctcagtggcactgcaatgtcagagctgacagcaaagacagcttttaacctgccactcgaaacatatggcttccacttcttgagactttaatttgaaggttagattttactttgatgaggggagagcttataaagcagtgaactcatgctgggtcagccatcgcttttctaggaatgcagaatagcatgaagtcaagcaaaactctaaaagcctttcctrtttatttacttcttatttgttgtt

SEQ ID NO: 28556 - DNA, 600 bp, Chicken  19866894246671_2
gaaacagtcgctgaattcctccccrtctgttttcagcttcatttgcaaacctcagataaagcaattccgtctggtgttctgctcagtggcactgcaatgtcagagctgacagcaaagacagcttttaacctgccactcgaaacatatggcttccacttcttgagactttaatttgaaggttagattttactttgatgaggggagagcttataaagcagtgaactcatgctgggtcagccatcgcttttctaggaatgcagaatagcatgaagtcaagcaaaactctaaaagcctttcctrtttatttacttcttatttgttgttgttggtttttgtttgtttgtttgttttaataaaatgaatgttttgcacatggttctcttctccctgcatgcgtctttcccatgaactctccatcttctatggattactgtggttatgatctgatcccaagaggagggcttgctggggaggaccttttctccagctatgtatgtggcgcccagagagggttctccttggcagacagacaaaccattctgtgctgacatatgtttgtttgaaacaacagtgtatcaagagcagttgctcctcgggtgt

SEQ ID NO: 28557 - DNA, 600 bp, Chicken  19866894246684_1
aaatttttcatcaacttaaaacacactgcgatggggcactgatgttttaaactatcttgtatttgtatcacttaaaaacaagaagatgcagtttgattcttgtaaacttgtgagaaatgtaaaccgagtttggcatcaagcttagtttaaagtgggattgtagtttattattgaaacaggatgttgtgagtgacttagagcatatttcaaacaggtctgtgtctcctttgcacaacttcttagcaaaacagtcttgcatagtagctgattttgggtgcagctatcaattaagagaacagycatgcagttaatgatgtacaaaaaagacttatgtgctagcttagtgcagagatgagcctacaagtagccataattagacatccccactagaaacataaccaattcaaacctaagctcaaatcctaaatttgaaggtagatagactctcatgaaggctgaaacaaagcagtgaatctcaatttatggacaattcagacgcagatgatacaaagttggcttatttctacttgtctcactgctaatctttacacagctggacataatcaatttgcaagtattatcacttcaaattttcagaaa

SEQ ID NO: 28558 - DNA, 599 bp, Chicken  19866894246687_1
  misc_feature (1)..(63): n is any nucleotide
nnnnnnnnnnnnnnnnnnnnnnnnnnnnnnnnnnnnnnnnnnnnnnnnnnnnnnnnnnnnnnntaatctacatacagttatttatataactatgctatttagactgattgtggtaataaatgccgttataacacctgtggcttccctcattaagagcccagtagatagggtcgtgggttgaaagggcagcatatgggctacgaaagggctagttaacataacccattataatggtgcgctggtaaagctcattcctattcatctgacgattagttcaatcaatatttactcctgtgtgcytcttttgtcttcagctacaaagcacgcattcttcaatttcatagcacagaccttgtttgtgaatttgtcacattatttgagagaaaggaaaacaacttcctggatagcttgggaatcactcaccactttgatttagttttcctgtgtcagacaaccagcgtccataccactgtggatcctagttcctcaaactgcttaataatacacagtgctgttgaagttacacttcatccacacatttcttaatacacgtattgcagtatccattataacaccctacaggcattccactagatatt

SEQ ID NO: 28559 - DNA, 599 bp, Chicken  19866894246691_1
  misc_feature (1)..(55): n is any nucleotide
nnnnnnnnnnnnnnnnnnnnnnnnnnnnnnnnnnnnnnnnnnnnnnnnnnnnnnnaaaaaaaaaaaaaaaaaaaataaaaattgaatgatggaaataataatgcagtttgttttcttgtacagaatcctggatatgctggacgccaagagctaccagaaaatctcaaaattctgtttagaactgtgtcaatgatggttccagatagacaggtacaattaataactgaactgggagaaaaaaatgtactttgatttttgaatattttaatttgcttatctatataaaaaacaaacaaacaraaaaacycaccttatttctaaaacgaaaacattgtgtttcagataattataagagttaagcttgcaagttatggatttattgataatgtggttttgtctcagaagttcttcgttctttataaactttgtgaggagcagctcactaagcaggtaatgttatacgttctcttctcctttgtcttagtatttacgcagtgcaaccctttagattttgatttgtacaggttgtttctgaacaatcacttttatgtttttaatattggagtagttgaaatataattgaagcatttttcttttaa

SEQ ID NO: 28560 - DNA, 599 bp, Chicken  19866894246691_2
  misc_feature (1)..(48): n is any nucleotide
nnnnnnnnnnnnnnnnnnnnnnnnnnnnnnnnnnnnnnnnnnnnnnnnaaaaaaaaaaaaaaaaaaaataaaaattgaatgatggaaataataatgcagtttgttttcttgtacagaatcctggatatgctggacgccaagagctaccagaaaatctcaaaattctgtttagaactgtgtcaatgatggttccagatagacaggtacaattaataactgaactgggagaaaaaaatgtactttgatttttgaatattttaatttgcttatctatataaaaaacaaacaaacaraaaaacycaccttatttctaaaacgaaaacattgtgtttcagataattataagagttaagcttgcaagttatggatttattgataatgtggttttgtctcagaagttcttcgttctttataaactttgtgaggagcagctcactaagcaggtaatgttatacgttctcttctcctttgtcttagtatttacgcagtgcaaccctttagattttgatttgtacaggttgtttctgaacaatcacttttatgtttttaatattggagtagttgaaatataattgaagcatttttcttttaacattttt

SEQ ID NO: 28561 - DNA, 600 bp, Chicken  19866894246692_1
gccgcgggtgctgttggcgcactcggcgtccttggctttccggtccatctccccccccttgatcttcttgcgggtcatgtgcccgcggaagctggcctggatcttggccgccgccgcgttggcgtcggggtcgtccagggggatgtccaggatgtcctcatccagcttcgtgcaggcgccctcctgccggcagcgagcggccgttatgggggcactttggggcctggggggtcggggtgtgtgcgggtgacggtgtgggaaaggtgccatcatcccacaaagtacagaaaagcaaagggraaattggggagaggtgggggaaatgactgcatcgacaccctgctggaaacgcagccccatgcactgcaccctgaccccacggcacccccagggcagggcttggagccgggggcagtaattcgctctatcacctccgaggagtggaaaggagtgaaaaacagaggggaaaaatcacccaccacccaaacgggaccagcgacagcccaccgccactgcatcactgcgtcaccctgccctgagctcctgacttttgggagagttctgggggttcttcgggagcaaagggacggcggccacagc

SEQ ID NO: 28562 - DNA, 573 bp, Chicken  19866894246693_1
acaaactgtttttgcttattttctccagacagaaagctttgggctatgttgtaaaaactgtctgtgtgcaataactagcacttgaaacacattattttgccaaatcccttagtacatataaatgtaaaaataatgatcataatttctgtcttcagatctccttttttttccagtttcttcttccatggttttttaggattgaggattcttttctctaaaatgtttaatcttaaattgtacttaatttaatactacatattcaacaaacatttactttttttatgaaaactgcaattcttrgyatattttcttcaattatgtcaaccataaacatatgttatgtgggtgagcagtatattttgttcattcgtaaacgtgggtaacaaaatatctgtattaccatacctctttgtacgtaaagtattcatgttatttcttccactggagtttgctcattaatcatggtgacaactgatacttttctcactgacatgagatattcagctgttaaaacatttgttatagagcttaatattgtcatttaggatatgtgcaaaaggagagaaccttcat

SEQ ID NO: 28563 - DNA, 571 bp, Chicken  19866894246693_2
aaactgtttttgcttattttctccagacagaaagctttgggctatgttgtaaaaactgtctgtgtgcaataactagcacttgaaacacattattttgccaaatcccttagtacatataaatgtaaaaataatgatcataatttctgtcttcagatctccttttttttccagtttcttcttccatggttttttaggattgaggattcttttctctaaaatgtttaatcttaaattgtacttaatttaatactacatattcaacaaacatttactttttttatgaaaactgcaattcttrgyatattttcttcaattatgtcaaccataaacatatgttatgtgggtgagcagtatattttgttcattcgtaaacgtgggtaacaaaatatctgtattaccatacctctttgtacgtaaagtattcatgttatttcttccactggagtttgctcattaatcatggtgacaactgatacttttctcactgacatgagatattcagctgttaaaacatttgttatagagcttaatattgtcatttaggatatgtgcaaaaggagagaaccttcat

SEQ ID NO: 28564 - DNA, 599 bp, Chicken  19866894246695_1
  misc_feature (1)..(171): n is any nucleotide
nnnnnnnnnnnnnnnnnnnnnnnnnnnnnnnnnnnnnnnnnnnnnnnnnnnnnnnnnnnnnnnnnnnnnnnnnnnnnnnnnnnnnnnnnnnnnnnnnnnnnnnnnnnnnnnnnnnnnnnnnnnnnnnnnnnnnnnnnnnnnnnnnnnnnnnnnnnnnnnnnnnnnnnnnnncccccccaatacacgctatgcacccctcactgtaccttgaagtcagggaagacgggcatgacctcgaggggcgtgacgcgaggtttgctgtagtgctgtgtgatctgaagggagggaggatgggtgaarcgtgcaggatggggtcaagatggcaccccctcctcccaaaagcagggtgggagaccccaayccgcccccaacyccttctcaccgctttctgagcatcttcaaaggtcttctcaatggcagcaatttggctgtcgcggtctttgtagatctcttcttctgtgaactgctgcttcaccgacactccgatcctggacagggatgggcacgtggcagcaggggggggggataaggaggccgtgccccttgtgtgccccccctccagactcacttgacctcgggcttctcgttggacacgccgt

SEQ ID NO: 28565 - DNA, 599 bp, Chicken  19866894246695_2
  misc_feature (1)..(110): n is any nucleotide
nnnnnnnnnnnnnnnnnnnnnnnnnnnnnnnnnnnnnnnnnnnnnnnnnnnnnnnnnnnnnnnnnnnnnnnnnnnnnnnnnnnnnnnnnnnnnnnnnnnnnnnnnnnnnncccccccaatacacgctatgcacccctcactgtaccttgaagtcagggaagacgggcatgacctcgaggggcgtgacgcgaggtttgctgtagtgctgtgtgatctgaagggagggaggatgggtgaarcgtgcaggatggggtcaagatggcaccccctcctcccaaaagcagggtgggagaccccaayccgcccccaacyccttctcaccgctttctgagcatcttcaaaggtcttctcaatggcagcaatttggctgtcgcggtctttgtagatctcttcttctgtgaactgctgcttcaccgacactccgatcctggacagggatgggcacgtggcagcaggggggggggataaggaggccgtgccccttgtgtgccccccctccagactcacttgacctcgggcttctcgttggacacgccgtagcggttgaactcagtggagatgtattcggtctttcgcatccatggcaccaccttggcatg

SEQ ID NO: 28566 - DNA, 599 bp, Chicken  19866894246695_3
  misc_feature (1)..(98): n is any nucleotide
nnnnnnnnnnnnnnnnnnnnnnnnnnnnnnnnnnnnnnnnnnnnnnnnnnnnnnnnnnnnnnnnnnnnnnnnnnnnnnnnnnnnnnnnnnnnnnnnnncccccccaatacacgctatgcacccctcactgtaccttgaagtcagggaagacgggcatgacctcgaggggcgtgacgcgaggtttgctgtagtgctgtgtgatctgaagggagggaggatgggtgaarcgtgcaggatggggtcaagatggcaccccctcctcccaaaagcagggtgggagaccccaayccgcccccaacyccttctcaccgctttctgagcatcttcaaaggtcttctcaatggcagcaatttggctgtcgcggtctttgtagatctcttcttctgtgaactgctgcttcaccgacactccgatcctggacagggatgggcacgtggcagcaggggggggggataaggaggccgtgccccttgtgtgccccccctccagactcacttgacctcgggcttctcgttggacacgccgtagcggttgaactcagtggagatgtattcggtctttcgcatccatggcaccaccttggcatgctgctgtgacct

SEQ ID NO: 28567 - DNA, 599 bp, Chicken  19866894246698_1
  misc_feature (1)..(169): n is any nucleotide
nnnnnnnnnnnnnnnnnnnnnnnnnnnnnnnnnnnnnnnnnnnnnnnnnnnnnnnnnnnnnnnnnnnnnnnnnnnnnnnnnnnnnnnnnnnnnnnnnnnnnnnnnnnnnnnnnnnnnnnnnnnnnnnnnnnnnnnnnnnnnnnnnnnnnnnnnnnnnnnnnnnnnnnnnctgagaactgctccattccactctagcagaacctagttctttaaacactgctttgaaaggtggtaagcagggatctgaaaccctctgacaaagttgattctaggtcttccacttcttagctgcatgtattmtgatcactggactataatgtcaaatggcagcacatactcctcatgtttggaaaattataagtattcccccagatattaaaatatamagatataggtactttgcttgagaaaagtattagcctcagaattccacttcccaaggaccacctccaaagcccaagacagtgcagtagacaggttttaggaagtagacataattatgttcagcatttcctgtttgactagttctagacagctgcccagagattatcacttaacactgatgtgccccctttaaaggtgcttaactattgtagtag

SEQ ID NO: 28568 - DNA, 599 bp, Chicken  19866894246698_2
  misc_feature (1)..(83): n is any nucleotide
nnnnnnnnnnnnnnnnnnnnnnnnnnnnnnnnnnnnnnnnnnnnnnnnnnnnnnnnnnnnnnnnnnnnnnnnnnnnnnnnnnnctgagaactgctccattccactctagcagaacctagttctttaaacactgctttgaaaggtggtaagcagggatctgaaaccctctgacaaagttgattctaggtcttccacttcttagctgcatgtattmtgatcactggactataatgtcaaatggcagcacatactcctcatgtttggaaaattataagtattcccccagatattaaaatatamagatataggtactttgcttgagaaaagtattagcctcagaattccacttcccaaggaccacctccaaagcccaagacagtgcagtagacaggttttaggaagtagacataattatgttcagcatttcctgtttgactagttctagacagctgcccagagattatcacttaacactgatgtgccccctttaaaggtgcttaactattgtagtagatgggaaagctccatgcctgaaataagaatcttgggaagctgagaggcctacaaactccagagcctggctccagactgagtccaat

SEQ ID NO: 28569 - DNA, 600 bp, Chicken  19866894246699_1
aagtcctccagtcagggctgcgctgctgcacaaagcccaccacatgtgagatgttgtagggtccaaagcagaccccaaagttgaccatggtgaccacagccagccccacagtgcggtacttcttctgcagtgggatgtggggttgagtgaggagggcacggatgaagcagatgtagcagaccatggtgatggcagaggggatgaggaaggtgatgaggcagagtgaaaggcgcagcagtaggacgaagtgcagctgggttttggataagtcgtcatagcagtggtagccccggtggggtwgggtctcagaggtgtcgtgggaggtcgaggtggaggtggtgtagaatagtgttcagaattatgatcttttcttccaacatccacataaggtcagatgtgcaagcttgcagggagttcactatcgttgtacggcaattcaggaaagtaatgacgtggaaatttggagaggaagaagcagtgaaggaattgctgaccaactctggcaattccagttccaccagccagaaggaatccagggacagttgggttcataaaggagtgcccggtttgagaggttcctaagattcacctttctcacaa

SEQ ID NO: 28570 - DNA, 599 bp, Chicken  19866894246700_1
  misc_feature (1)..(124): n is any nucleotide
nnnnnnnnnnnnnnnnnnnnnnnnnnnnnnnnnnnnnnnnnnnnnnnnnnnnnnnnnnnnnnnnnnnnnnnnnnnnnnnnnnnnnnnnnnnnnnnnnnnnnnnnnnnnnnnnnnnnnnnnnnnnatcttggttctcacttctgatgcacacctctgtttcacagaacaatttccaaatccaaactcactctactttaagaaactttaaaccagactttgaggtttaactcccatattactgaaacgaaacatgtttctaaaatgaaatgttcctctttaaacaaagcaaccaaaacttgmatttgacatttacaagccagtatcgagaagatgcatcactgacatcactccttttagcacctcattaagtatgttggtggaaggacaagcttcacttgccacrgtgaatcaacaaaactgactccagaaaatttatacaggattttatctgacgaatgcaaagccaacaaaaaaccctctctgcatcattgtggttggtcttgattgatcctgccacattattacaaataaagcatttgcttgaagtatttgtttgctttccttttgcctgggggaatctgggaatcagtaaatgccac

SEQ ID NO: 28571 - DNA, 599 bp, Chicken  19866894246700_2
  misc_feature (1)..(21): n is any nucleotide
nnnnnnnnnnnnnnnnnnnnnatcttggttctcacttctgatgcacacctctgtttcacagaacaatttccaaatccaaactcactctactttaagaaactttaaaccagactttgaggtttaactcccatattactgaaacgaaacatgtttctaaaatgaaatgttcctctttaaacaaagcaaccaaaacttgmatttgacatttacaagccagtatcgagaagatgcatcactgacatcactccttttagcacctcattaagtatgttggtggaaggacaagcttcacttgccacrgtgaatcaacaaaactgactccagaaaatttatacaggattttatctgacgaatgcaaagccaacaaaaaaccctctctgcatcattgtggttggtcttgattgatcctgccacattattacaaataaagcatttgcttgaagtatttgtttgctttccttttgcctgggggaatctgggaatcagtaaatgccacagaacttaatggaaacttttaatgcggacaagccacaagatgagattatgtttctggggtgaactggtttgctttttcattagatccatttgttctctattat

SEQ ID NO: 28572 - DNA, 599 bp, Chicken  19866894246711_1
  misc_feature (1)..(141): n is any nucleotide
nnnnnnnnnnnnnnnnnnnnnnnnnnnnnnnnnnnnnnnnnnnnnnnnnnnnnnnnnnnnnnnnnnnnnnnnnnnnnnnnnnnnnnnnnnnnnnnnnnnnnnnnnnnnnnnnnnnnnnnnnnnnnnnnnnnnnnnnnnnnnactatgtggcccaagccaaaggggccatgggacaaaattgcaatcactacaccctgtgttaaagaggaaaatagggcaggaaggaggttgtggctgtggctctcagatgtattcctctggggtttctgtgccatccagaacctgagtaaaacgactcasagcacaraatcccaaaacagcttcctgctgccatgacagcacgtccttaacggcagacaacccacaatttgcaaatgtacattatttaacttaaagaatacctgttcccacacataaacccctcctgctgtcatggcaaagaaaaaaaaagggaaaaaaaagtgctcattcttccatttttgcccttgaaattctgttcctgttctttggtgcagatctcagaagtggatgggacagcaagtgctggaagcgaggttacgacacctcacatcctgtagatctcacaggatgacagcaca

SEQ ID NO: 28573 - DNA, 599 bp, Chicken  19866894246711_2
  misc_feature (1)..(134): n is any nucleotide
nnnnnnnnnnnnnnnnnnnnnnnnnnnnnnnnnnnnnnnnnnnnnnnnnnnnnnnnnnnnnnnnnnnnnnnnnnnnnnnnnnnnnnnnnnnnnnnnnnnnnnnnnnnnnnnnnnnnnnnnnnnnnnnnnnnnnnactatgtggcccaagccaaaggggccatgggacaaaattgcaatcactacaccctgtgttaaagaggaaaatagggcaggaaggaggttgtggctgtggctctcagatgtattcctctggggtttctgtgccatccagaacctgagtaaaacgactcasagcacaraatcccaaaacagcttcctgctgccatgacagcacgtccttaacggcagacaacccacaatttgcaaatgtacattatttaacttaaagaatacctgttcccacacataaacccctcctgctgtcatggcaaagaaaaaaaaagggaaaaaaaagtgctcattcttccatttttgcccttgaaattctgttcctgttctttggtgcagatctcagaagtggatgggacagcaagtgctggaagcgaggttacgacacctcacatcctgtagatctcacaggatgacagcacattggagt

SEQ ID NO: 28574 - DNA, 600 bp, Chicken  19866894246714_1
cacctgagccaccccatgaacttggttcaccatcagcatcatataccttaatacctcccagtactgaggacaaagctattccactctatcaatggcaagtctatcaaataagagtttgttgtgatgggacaaggggaaatagtttcagattaaaagaggagagacttagattgattataaggaaaaaaaaaatatgataagagtagtgaagcattaggacaggttgcccagagagctggtggatttcctgtccttggagacattctggctcaagctggacaaggctccgagtaccctgayctagctctaggtgtccctgttcattgcagggaagttggaactttaaagatcccttccaactcaaataaaatatgtgattctaactaaagatgcaacgtgatttttccagggccatgcaagaaatgtatagagcagagaatggaacaagggtccctgttggacaacactctaagtgttaagacagctttcacttcagctctctgtacattaaaaaaaaatgctgctttctycctgtaatgctcactctgaataatttttggattgagaggacatggagtgagcattcatcctttactaaat

SEQ ID NO: 28575 - DNA, 600 bp, Chicken  19866894246714_2
gagagctggtggatttcctgtccttggagacattctggctcaagctggacaaggctccgagtaccctgayctagctctaggtgtccctgttcattgcagggaagttggaactttaaagatcccttccaactcaaataaaatatgtgattctaactaaagatgcaacgtgatttttccagggccatgcaagaaatgtatagagcagagaatggaacaagggtccctgttggacaacactctaagtgttaagacagctttcacttcagctctctgtacattaaaaaaaaatgctgctttctycctgtaatgctcactctgaataatttttggattgagaggacatggagtgagcattcatcctttactaaatgtatgtgaggcatcaaccataatggagttaaattcagtagatgtcacattcacagagtaagttgttgttacagaaagttccacacccagaaaacattctgcattggagcacataccttagtttgcgttttggcccctatttcccttcccatgattttctttttcattttagtattttattctttccttgataaatcaggaaactttcccattgcattacgcttagccttt

SEQ ID NO: 28576 - DNA, 600 bp, Chicken  19866894246718_1
atctagccaacattgagcctatgtatcagtactctctcatgtggtttattaaccttttcatcatgtctatagataactcagagaaatcagaagatttacaaacaaggtaagaggggtaacttccatttctaattggtgaaatattctttgttactctagaaaagctattgctgtttctgcaaagcatgttgtgtcaggcattgcattttgaaatagtccttgtatgaatctgccagatatttttctggaagataatttattcaaagaaacaaaatggtacgatataatacaagtgcaacrtattccgctattttatttagtaattgctaacttaagccatgtgtgaaattgcaaagtagcagatagattaaagtggtccactcaccttaattttatatataatatattgactttgtatgccttccagaagcagataagaaactttcacacaactgataaaagagagaatgaagtctagtgacgggggctctcggctgtagagtaggaagagtcataattattaacttggcaaattttggaccatttgattatagctttgtatgcaggatagttttgtatgccctcttccagtttttcttc

SEQ ID NO: 28577 - DNA, 600 bp, Chicken  19866894246722_1
ttcctctgtgcttacagcccagaaggggccagataaggttatgacatgcagggtaggagctgatgtaggagaagggaggggtaagagaagacaggtatagcatcagcttggtggggggaaaaagagccgcacacacttagtcccaaagttttaggctggatttctccagggagataatttaaattgaagattccagctgcagatgaattttatattactcagaaggaaggcgatgtcattaacctagtttgccaccctcactcccccagctgacagcagggaaacatctgaaaggcagcrctgcttggagaggatgctgatcgactttcataccatcccttggatttgtctcatttctggctacttctggagactctgagaatggctgtgctataaccatagcaacgcagagtttttgcacagcattcaaaatctctgctgttaagaaaaaagcagaggtgctaactcaataaggacaaagtgagtttctaccggcatgaagtggaagcaggtgggttttgtttgtgctgaagcaggggctggagctgcaggcagcacagcaatgaggccggggtgggagctgctgggcagcagtgcagc

SEQ ID NO: 28578 - DNA, 600 bp, Chicken  19866894246725_1
agggaaacaatgctcacttatgctcttcaggccttctgggcaactagggctgctcgcaactcccaggaagaataacctgccctaaaagacttgctcatggtacttggaggaagcaagtcccttgctctgggggattcggggagggctgcccagccaaatctggtacccaccagtatgctgaaatgtcttgcccctatataatcagtacagaaaactctctggaggggatgggctccctttccagcgatgacaatgagatgtcaggagaaagagtatcctgaaacagatgcctcaatgaaygcctgaaattaatttcccattgaaaccaaacttggcccatctgccttctccttggaaaagtgcaatgggaagagccccaaggtgtctcccctgaggacaggacttgctcacatgctgctgcctctgtagtgaagacagtgcagaccaaatacgatgacgaggcacgggtttgctttcagaccttcctaagattatgagatgcaccagtggatgcaccagtagaattcctgctggtgaaatgcatcatttaatataggtgtccttcccaggacacagagcagcctttaggattcccactcg

SEQ ID NO: 28579 - DNA, 599 bp, Chicken  19866894246734_1
  misc_feature (1)..(96): n is any nucleotide
nnnnnnnnnnnnnnnnnnnnnnnnnnnnnnnnnnnnnnnnnnnnnnnnnnnnnnnnnnnnnnnnnnnnnnnnnnnnnnnnnnnnnnnnnnnnnnnntgcaggcaattaatgtgatgagaactctggattttagtgcactacagtaatgtggaacaatgaattggagaaagtggctctggttgaagtttctgaaatatttggtgttggtaggagttgaatattcataaggaacatagctgaatccatcctagataatttggaaaaatctgaccttgaacttggcagaataggcagacttaracttgtttccttgctcttcatatctttgaagtcacggtaataagaacaaaagaatatttgaggcaaatttacaaaatctgattggattcaatgggctaaaacagaacgtagagtctttggatttgcgcatgtgagcaggaaggtggagaagcactggccacagcggattatgatgcttttggaaggcttgttatgtgccggagatgtagtaagatcggaaggcttagcttttctttagctatgtgagtaaatcccagcattctgacaggcagtagaggctgcccagatggttatcttgc

SEQ ID NO: 28580 - DNA, 600 bp, Chicken  19866894246738_1
aagctgcactgactgtaaaaaaaaactccagtccactgatttttaaatgaatgtctgtccacctgttaaggtttgttctgtaaagcccaggatttagaagcgaacctaatcaggtgtattcagactgctgtttcatcgaggttgtatcctggttcttccagttacccgctgagcaatcttctctcccttccccgtgctcttttttatctctgcctttcttatccagtcaccacttgggtcaccgtactctcaaccctttgaagccctaaacacatagcttggcatattagaagttgcccrctaaaatgtgtgacaccactcgagagcacactgatacacacagtagtacaatatatgaaataatatatataaataccacagcagatcacscagtctggaaccataatggatgcaacacagctattacatgcaattcatgtgtctgaatacatcatttgacattgcaaaaaaatttctctgtgaatttcctacaatgttttgcttgaaagatgaaactccatgcagaagacacaccaaaatcaccaacagctaattacttgactgcacctattacagctatacactgctctccatctctgg

SEQ ID NO: 28581 - DNA, 600 bp, Chicken  19866894246738_2
gatttagaagcgaacctaatcaggtgtattcagactgctgtttcatcgaggttgtatcctggttcttccagttacccgctgagcaatcttctctcccttccccgtgctcttttttatctctgcctttcttatccagtcaccacttgggtcaccgtactctcaaccctttgaagccctaaacacatagcttggcatattagaagttgcccrctaaaatgtgtgacaccactcgagagcacactgatacacacagtagtacaatatatgaaataatatatataaataccacagcagatcacscagtctggaaccataatggatgcaacacagctattacatgcaattcatgtgtctgaatacatcatttgacattgcaaaaaaatttctctgtgaatttcctacaatgttttgcttgaaagatgaaactccatgcagaagacacaccaaaatcaccaacagctaattacttgactgcacctattacagctatacactgctctccatctctggacatttccattgccagctcctactgtatttgttacctagagataaattagacgttgcagcctacagggcatacagtaccatgtcacagtg

SEQ ID NO: 28582 - DNA, 600 bp, Chicken  19866894246738_3
gatgaaactccatgcagaagacacaccaaaatcaccaacagctaattacttgactgcacctattacagctatacactgctctccatctctggacatttccattgccagctcctactgtatttgttacctagagataaattagacgttgcagcctacagggcatacagtaccatgtcacagtgcagctccaaatttaagtctcctttgttagtgtgaagtcgtacatagcccttcttcttcacatactggtatcttacaacatcatcttcaatagcagctgtaagaagcaaaaagcagtarttagatctctagaagtttattcattgatcagcaaacaaattactagattctgctgtctggcgtgttcctctggagtacaccaggccttcagggacggtactcagcaactgatctccaacagcctcacattaatctctctgtgcaaaacactttccattacagaaagccaacaatataatatagatattatatatctatatttttaagtcacagaaacattcaatattatatactataattttcaagtaatgtctaccaaccacaaacattactttgaaaccaaacaatttcttgtcaaat

SEQ ID NO: 28583 - DNA, 600 bp, Chicken  19866894246740_1
cacgtcgttccgcttggtaaaagcagttctctgcaacagactgcagatttgtcatgttttgtagtgcctcctgttttcctattgcctgtgttgtgactgaggaatgatgcacaaatggatgtaagtagcgtacggtgggacacaaagtcccgtgttccttagcccggcgcagcagctggaggcaactaaggaaattctggactgtgctggttttttttgtagctatactcttaattcttgccaaaaaggtgtgtttgtcaaatagcgagggattaaagaaaacatggcgtgggtctaatyggagttctgaatgtatttaggtgttcagtgttctctatgacttggtgaggacagtacaaaagtagaactcggtgtttgatcttccaaatcttctgaagtgttctggtgcttgttaaacataggccttgtctatcaagtagaaacwaaatcgtactgctttaacttgactgaataacaaaagctatatttgcttctacactagaaaaaaaaaatgttgtatcaatataaaggtactcttttattccttttccctgtgggaatatgttataccagtgtcagtgcaaaggtggtatatagctc

SEQ ID NO: 28584 - DNA, 600 bp, Chicken  19866894246740_2
agtcccgtgttccttagcccggcgcagcagctggaggcaactaaggaaattctggactgtgctggttttttttgtagctatactcttaattcttgccaaaaaggtgtgtttgtcaaatagcgagggattaaagaaaacatggcgtgggtctaatyggagttctgaatgtatttaggtgttcagtgttctctatgacttggtgaggacagtacaaaagtagaactcggtgtttgatcttccaaatcttctgaagtgttctggtgcttgttaaacataggccttgtctatcaagtagaaacwaaatcgtactgctttaacttgactgaataacaaaagctatatttgcttctacactagaaaaaaaaaatgttgtatcaatataaaggtactcttttattccttttccctgtgggaatatgttataccagtgtcagtgcaaaggtggtatatagctcttttcacagtgagaattgcaaaaatgtaattgatttggaagaaaaattgcattcccagccagaatacttcctgacagtgcagaagttgtataaacaaggccttggtttaaggctggtcttatgaccacatattttgctgtacata

SEQ ID NO: 28585 - DNA, 600 bp, Chicken  19866894246740_3
tattccttttccctgtgggaatatgttataccagtgtcagtgcaaaggtggtatatagctcttttcacagtgagaattgcaaaaatgtaattgatttggaagaaaaattgcattcccagccagaatacttcctgacagtgcagaagttgtataaacaaggccttggtttaaggctggtcttatgaccacatattttgctgtacataatgatggtatttttaaaaatccaagcttgttctattgccagaaagcatgcctttgaaatcccagtctctgtgattgtaactgtgccatattccrgacctcgttgcaaatacaagtgtggttcttcccatccctgtgctygggctctgttgatgcgtgcagttctgagggcggcgttcagtgctgtgcgattcctggaggttctgctgcagtcaatagaatgcatggcaagtttttcctccaagagcatttattttcaataaagggcagctggctctttatggcggcttcatctggatcctccatgtgtgcaggtgttgctaagtatcgcgtttcctcaaggagtgacaaaatgcaagaactttcattttctccaagagctttgtgtgaaaagga

SEQ ID NO: 28586 - DNA, 600 bp, Chicken  19866894246740_4
aggtggtatatagctcttttcacagtgagaattgcaaaaatgtaattgatttggaagaaaaattgcattcccagccagaatacttcctgacagtgcagaagttgtataaacaaggccttggtttaaggctggtcttatgaccacatattttgctgtacataatgatggtatttttaaaaatccaagcttgttctattgccagaaagcatgcctttgaaatcccagtctctgtgattgtaactgtgccatattccrgacctcgttgcaaatacaagtgtggttcttcccatccctgtgctygggctctgttgatgcgtgcagttctgagggcggcgttcagtgctgtgcgattcctggaggttctgctgcagtcaatagaatgcatggcaagtttttcctccaagagcatttattttcaataaagggcagctggctctttatggcggcttcatctggatcctccatgtgtgcaggtgttgctaagtatcgcgtttcctcaaggagtgacaaaatgcaagaactttcattttctccaagagctttgtgtgaaaaggagcagcacgtgtgtcctcgaaccctctgccgtgcagagtaacgggc

SEQ ID NO: 28587 - DNA, 387 bp, Chicken  19866894246740_5
gcggcttcatctggatcctccatgtgtgcaggtgttgctaagtatcgcgtttcctcaaggagtgacaaaatgcaagaactttcattttctccaagagctttgtgtgaaaaggagcagcacgtgtgtcctcgaaccctctgccgtgcagagtaacgggcagctcccctggcggccacgggaagcgtttggagcagcgtgccgttaggagctctgtgcctcgcagatgagtagagcaggcggcccgggagcctttgtggcagagctttgctgtaccctggaggactgctgccgtgagcaccsatttgtgggctgaagagagactgctgtggaagcaagtgtgtgtgtgagctctgtcaaaggtgagatagtaatggtcttcacagccca

SEQ ID NO: 28588 - DNA, 600 bp, Chicken  19866894246744_1
agcggcctcaaatacagtgtctcagctgtctttcatacctgccagttactacatgcaaaatactagacttcttgttcctgctcccttccaagtaatttgaatgcacactcatctttcctccctggtgccattaaccagaaagatttgcagcctcatccttttttgtgagctcaggataaccgcatgtactcccagtgtagtacaatttggggaaaattctattccagcaaaagactgcagctgatttattcatttgctcctgacaaagattcagtgaaaaggatcttgttgtggacattygcctttccttcctaccctctctccaatctgatgaaaataatgcaaayrtacaaagyctgactaggagaaagctgtttgtcccaggagctgatagatttttcatagggagggcacacatgcaaatagggcccaaaaatcatcgccatccatcagttcctgagaaattgtattatgtttcctgcccactttttaacagaaaaatgcatgtctcgcaatatctgctgtcacattcagtgcctgtgaataaagaataatacatgtggcatctcagtmacgttattgatgatcccgattttttta

SEQ ID NO: 28589 - DNA, 600 bp, Chicken  19866894246744_10
ttaaaataaaccaagaactgcattcagctttcttgttactatatccacattcgtgcacatgctataaactgatcggtccatgaaggaaaaatatgtaaagagaaggatttgatagtgctttaaagtgtttgagcacttgattaaagcacaagcaagacagaagcctcatttcttgtgattcctttcctttgacggaggtaataaaattcacactactattttttctcttgcacgcacatttgtttagcgagcttattgcttgccattgttaaagctactgtgtggctgatggttttcccyatggtcactgctcccaggagggatgcacaagtgcctcacrtctgcctcatgctgcctctaatagacagctcatctgctgggcccaccagcagcagcctcgatgcctccatgttgaccagttggtgaacagagcctcctgcttagacacagggctgccacagtgctgtacttcagtgtaagcgtgcttggtctattgggcaactgctttctgatgttctctccaatcagttgttaactatggaaaatgaagagtcctgtggcagatcccaaaagaaaaggagaacatctctacagccagaa

SEQ ID NO: 28590 - DNA, 600 bp, Chicken  19866894246744_11
atatccacattcgtgcacatgctataaactgatcggtccatgaaggaaaaatatgtaaagagaaggatttgatagtgctttaaagtgtttgagcacttgattaaagcacaagcaagacagaagcctcatttcttgtgattcctttcctttgacggaggtaataaaattcacactactattttttctcttgcacgcacatttgtttagcgagcttattgcttgccattgttaaagctactgtgtggctgatggttttcccyatggtcactgctcccaggagggatgcacaagtgcctcacrtctgcctcatgctgcctctaatagacagctcatctgctgggcccaccagcagcagcctcgatgcctccatgttgaccagttggtgaacagagcctcctgcttagacacagggctgccacagtgctgtacttcagtgtaagcgtgcttggtctattgggcaactgctttctgatgttctctccaatcagttgttaactatggaaaatgaagagtcctgtggcagatcccaaaagaaaaggagaacatctctacagccagaatattcaaaaggttctgcaaatacttctcaatagggaagat

SEQ ID NO: 28591 - DNA, 600 bp, Chicken  19866894246744_12
cagttggtgaacagagcctcctgcttagacacagggctgccacagtgctgtacttcagtgtaagcgtgcttggtctattgggcaactgctttctgatgttctctccaatcagttgttaactatggaaaatgaagagtcctgtggcagatcccaaaagaaaaggagaacatctctacagccagaatattcaaaaggttctgcaaatacttctcaatagggaagatccctctcttactggagtctttgacacgtgaagcttcttaatatgaggaaaatgaaagtttctatatttacttcaargctgggctttgtatatccagcgtgtcatcaacaaaccattatctctgatctgagctttacctgatcctttccaactctgttgttcagagccattatttttgaggctagacatggcattgagcattgagtcagaattcagaaacatccatcctcatctagctcttgtactctgcattggtagttcacagtaattaggtttaaaagaattctgttgtttttaacactatatttatcagtaactgcaactttgcttgtttctgtttagatgagagtccttacacaaagtctgcaaaccagaca

SEQ ID NO: 28592 - DNA, 600 bp, Chicken  19866894246744_2
actacatgcaaaatactagacttcttgttcctgctcccttccaagtaatttgaatgcacactcatctttcctccctggtgccattaaccagaaagatttgcagcctcatccttttttgtgagctcaggataaccgcatgtactcccagtgtagtacaatttggggaaaattctattccagcaaaagactgcagctgatttattcatttgctcctgacaaagattcagtgaaaaggatcttgttgtggacattygcctttccttcctaccctctctccaatctgatgaaaataatgcaaayrtacaaagyctgactaggagaaagctgtttgtcccaggagctgatagatttttcatagggagggcacacatgcaaatagggcccaaaaatcatcgccatccatcagttcctgagaaattgtattatgtttcctgcccactttttaacagaaaaatgcatgtctcgcaatatctgctgtcacattcagtgcctgtgaataaagaataatacatgtggcatctcagtmacgttattgatgatcccgatttttttatattgacaggagctagaacgctatattgagacccttagcttgagttc

SEQ ID NO: 28593 - DNA, 600 bp, Chicken  19866894246744_3
ctacatgcaaaatactagacttcttgttcctgctcccttccaagtaatttgaatgcacactcatctttcctccctggtgccattaaccagaaagatttgcagcctcatccttttttgtgagctcaggataaccgcatgtactcccagtgtagtacaatttggggaaaattctattccagcaaaagactgcagctgatttattcatttgctcctgacaaagattcagtgaaaaggatcttgttgtggacattygcctttccttcctaccctctctccaatctgatgaaaataatgcaaayrtacaaagyctgactaggagaaagctgtttgtcccaggagctgatagatttttcatagggagggcacacatgcaaatagggcccaaaaatcatcgccatccatcagttcctgagaaattgtattatgtttcctgcccactttttaacagaaaaatgcatgtctcgcaatatctgctgtcacattcagtgcctgtgaataaagaataatacatgtggcatctcagtmacgttattgatgatcccgatttttttatattgacaggagctagaacgctatattgagacccttagcttgagttct

SEQ ID NO: 28594 - DNA, 600 bp, Chicken  19866894246744_4
aaaatactagacttcttgttcctgctcccttccaagtaatttgaatgcacactcatctttcctccctggtgccattaaccagaaagatttgcagcctcatccttttttgtgagctcaggataaccgcatgtactcccagtgtagtacaatttggggaaaattctattccagcaaaagactgcagctgatttattcatttgctcctgacaaagattcagtgaaaaggatcttgttgtggacattygcctttccttcctaccctctctccaatctgatgaaaataatgcaaayrtacaaagyctgactaggagaaagctgtttgtcccaggagctgatagatttttcatagggagggcacacatgcaaatagggcccaaaaatcatcgccatccatcagttcctgagaaattgtattatgtttcctgcccactttttaacagaaaaatgcatgtctcgcaatatctgctgtcacattcagtgcctgtgaataaagaataatacatgtggcatctcagtmacgttattgatgatcccgatttttttatattgacaggagctagaacgctatattgagacccttagcttgagttctagctcagc

SEQ ID NO: 28595 - DNA, 600 bp, Chicken  19866894246744_5
gtgaaaaggatcttgttgtggacattygcctttccttcctaccctctctccaatctgatgaaaataatgcaaayrtacaaagyctgactaggagaaagctgtttgtcccaggagctgatagatttttcatagggagggcacacatgcaaatagggcccaaaaatcatcgccatccatcagttcctgagaaattgtattatgtttcctgcccactttttaacagaaaaatgcatgtctcgcaatatctgctgtcacattcagtgcctgtgaataaagaataatacatgtggcatctcagtmacgttattgatgatcccgatttttttatattgacaggagctagaacgctatattgagacccttagcttgagttctagctcagctgtgcctcttctgtggcagaaaagagctgatcctgcttcctttacaagctcttgttcacttctttcattttttcttttctttttctytttaacttccataaggatatgtatatactgcatatgttgcaatattagattttccacttacatgtctgcctttttcttatctcgtgtagctgtgtctgtgctaataatctttcattcttctgtacatcgg

SEQ ID NO: 28596 - DNA, 600 bp, Chicken  19866894246744_6
catccatcagttcctgagaaattgtattatgtttcctgcccactttttaacagaaaaatgcatgtctcgcaatatctgctgtcacattcagtgcctgtgaataaagaataatacatgtggcatctcagtmacgttattgatgatcccgatttttttatattgacaggagctagaacgctatattgagacccttagcttgagttctagctcagctgtgcctcttctgtggcagaaaagagctgatcctgcttcctttacaagctcttgttcacttctttcattttttcttttctttttctytttaacttccataaggatatgtatatactgcatatgttgcaatattagattttccacttacatgtctgcctttttcttatctcgtgtagctgtgtctgtgctaataatctttcattcttctgtacatcggtagctgacagctttattttcttcaagcttgtattaacatgyrgtataaccaaacctgttacctctctccttgtaacaatatagtcccaaagcaatggcagttcrttttctgtagaaaacacaatgatatctgtctgctgagatatttcaccagtatatggtctttattac

SEQ ID NO: 28597 - DNA, 600 bp, Chicken  19866894246744_7
agaacgctatattgagacccttagcttgagttctagctcagctgtgcctcttctgtggcagaaaagagctgatcctgcttcctttacaagctcttgttcacttctttcattttttcttttctttttctytttaacttccataaggatatgtatatactgcatatgttgcaatattagattttccacttacatgtctgcctttttcttatctcgtgtagctgtgtctgtgctaataatctttcattcttctgtacatcggtagctgacagctttattttcttcaagcttgtattaacatgyrgtataaccaaacctgttacctctctccttgtaacaatatagtcccaaagcaatggcagttcrttttctgtagaaaacacaatgatatctgtctgctgagatatttcaccagtatatggtctttattacttgctgcatttatgtcaacatacgtggccttgcaaaaatgttttgcctttaaaataaaccaagaactgcattcagctttcttgttactatatccacattcgtgcacatgctataaactgatcggtccatgaaggaaaaatatgtaaagagaaggatttgatagtgctttaa

SEQ ID NO: 28598 - DNA, 600 bp, Chicken  19866894246744_8
gaacgctatattgagacccttagcttgagttctagctcagctgtgcctcttctgtggcagaaaagagctgatcctgcttcctttacaagctcttgttcacttctttcattttttcttttctttttctytttaacttccataaggatatgtatatactgcatatgttgcaatattagattttccacttacatgtctgcctttttcttatctcgtgtagctgtgtctgtgctaataatctttcattcttctgtacatcggtagctgacagctttattttcttcaagcttgtattaacatgyrgtataaccaaacctgttacctctctccttgtaacaatatagtcccaaagcaatggcagttcrttttctgtagaaaacacaatgatatctgtctgctgagatatttcaccagtatatggtctttattacttgctgcatttatgtcaacatacgtggccttgcaaaaatgttttgcctttaaaataaaccaagaactgcattcagctttcttgttactatatccacattcgtgcacatgctataaactgatcggtccatgaaggaaaaatatgtaaagagaaggatttgatagtgctttaaa

SEQ ID NO: 28599 - DNA, 600 bp, Chicken  19866894246744_9
aagagctgatcctgcttcctttacaagctcttgttcacttctttcattttttcttttctttttctytttaacttccataaggatatgtatatactgcatatgttgcaatattagattttccacttacatgtctgcctttttcttatctcgtgtagctgtgtctgtgctaataatctttcattcttctgtacatcggtagctgacagctttattttcttcaagcttgtattaacatgyrgtataaccaaacctgttacctctctccttgtaacaatatagtcccaaagcaatggcagttcrttttctgtagaaaacacaatgatatctgtctgctgagatatttcaccagtatatggtctttattacttgctgcatttatgtcaacatacgtggccttgcaaaaatgttttgcctttaaaataaaccaagaactgcattcagctttcttgttactatatccacattcgtgcacatgctataaactgatcggtccatgaaggaaaaatatgtaaagagaaggatttgatagtgctttaaagtgtttgagcacttgattaaagcacaagcaagacagaagcctcatttcttgtgattcctttc

SEQ ID NO: 28600 - DNA, 600 bp, Chicken  19866894246749_1
gcttctgttatccgaccttcagacaaaacaaacaaggaaggccatacgttttgctgtagctggaaataaatggatgtgattgaaaaggatttccaagtgaagatacaaaaccacatctcgactgcactgacttcccccaagactctttaaccaacccaaaccctgtcttatttcaaaagctcggtttcattattctgagaaacaaaaaagccagcactgactctcaggtcagacaaaagtcttcacacttcccagtctgatttgcacaataaactgaagccacaactgacacaaactccrgagacctggacgaggacgtggggcctctatgcacaatttacaaacttggagtgaaattaagttgctgcgctgtgccactgtgtgctcagggctgcatcacatccctccctgaccaggaattccctaacaaacrcagagggaagaagagaactgcagcagcagctctccagggcttgcagtgggtgagcgcagccttggccacatgcaccagcaccccatggcaggaggcacctccatgaggatctgtagctgctaacttctgcctttgatacttctctgtccctgcactaggagctcacc

SEQ ID NO: 28601 - DNA, 600 bp, Chicken  19866894246749_2
cccccaagactctttaaccaacccaaaccctgtcttatttcaaaagctcggtttcattattctgagaaacaaaaaagccagcactgactctcaggtcagacaaaagtcttcacacttcccagtctgatttgcacaataaactgaagccacaactgacacaaactccrgagacctggacgaggacgtggggcctctatgcacaatttacaaacttggagtgaaattaagttgctgcgctgtgccactgtgtgctcagggctgcatcacatccctccctgaccaggaattccctaacaaacrcagagggaagaagagaactgcagcagcagctctccagggcttgcagtgggtgagcgcagccttggccacatgcaccagcaccccatggcaggaggcacctccatgaggatctgtagctgctaacttctgcctttgatacttctctgtccctgcactaggagctcacctgtgtccaatctgccccatgcacagcacaaacctgaaatggaatttggaacttcttgaagtcagtaaaggccacgtacaaagggtggtttccccatccgtcacaaagccaagctttgcatggctggcaccgtg

SEQ ID NO: 28602 - DNA, 600 bp, Chicken  19866894246752_1
gccaggcatcaccctgccctcccaccccacccacagccccctgaccaacccagatccccagaggagctcctgtttgaggccctgtgctctcagagcacaaaaccttcagcctgatcctaagcactccaaacgatgcgctgttcccagggtctcaccccagatctaagcgtctaccaaacgcaaacaacttatagatacactgcaattaaagcaaggcagattgagtttcagtgcaagcaggtaggcttagagtcgtcccacttgattttggggacttaagtgaggcaccaggcaaggcgygctttgcccctggctccttgtacctttactctgagcagcctgcaggtgtctcagcagcagagctgcccttaggatggatttcctcctctcccatgcccttaagacagggcagtttgggtgaaggggtagcacagcaggggagcagaacatgggctatcaccacggggacaccacctcctgctctacagtgccactcatttccaaacccatgacctgcagggtgagaccgagctacggggacagcggtggcaaagcccttcctcagcaaaacctcttgcttcagccctaagccaacgtttt

SEQ ID NO: 28603 - DNA, 600 bp, Chicken  19866894246756_1
ggggccacacaagcacagagcagaggtgggcaatccccctccctctcactgctggccacccctgttttgatgcaacccaggatactgttggccttctatactgcaacaacacatatctagcttttcatatctagcttttcattcaccaggatccccaaaaaataaggtcttcaaaatttgaattgcacatgcaaacttagagattactttttaacactctgaaccacagcttgtaatctctataatggagataatcctactcattcacttcataaaggtaaaagcaatttcattaatgtytgaaaagctgaatagccccctgggtgaattagtcattctctctacaaagcaaaatttgaaaagcacgtactaaataaatgtgtcatatttgaataagaaaaataagcgactaaaatgcaaataccatatattctgggccttaagaatggccaagatcttgttgaaaaataaatactagctaccataagggcaaggaaagtcagcatttagggctcgactgagcaaatttaatcaaggacattaatgtaactacctataagtagatccaaacaaatgaaaaacttacaccttgctagtcac

SEQ ID NO: 28604 - DNA, 599 bp, Chicken  19866894246762_1
  misc_feature (1)..(190): n is any nucleotide
nnnnnnnnnnnnnnnnnnnnnnnnnnnnnnnnnnnnnnnnnnnnnnnnnnnnnnnnnnnnnnnnnnnnnnnnnnnnnnnnnnnnnnnnnnnnnnnnnnnnnnnnnnnnnnnnnnnnnnnnnnnnnnnnnnnnnnnnnnnnnnnnnnnnnnnnnnnnnnnnnnnnnnnnnnnnnnnnnnnnnnnnnnnnnnacgtggggttcagcaaatgctggggttaggctgggccttgccgctgtcctgccctgctgagaggtggtgggaccttcaggcaccctctctgggactgctcatggtgcccyggtacagggctggccctkcayccccatggagatcttctcacccctggaacccacacagcatagcctttctcattgatatcatacagcatttmatagaaccatagaatcattaaggttggaaagaccactaaggtcatccggtccaaccatcaacccatgcctgtgaccgctctaggccacgtccctcagtgtcacacgtacccatcaaagcatcacaaaggtatcaggggagatattggtgctaattgctcataagcatttccagaaaaagccggccctcccactcctacaaaccgcat

SEQ ID NO: 28605 - DNA, 599 bp, Chicken  19866894246762_2
  misc_feature (1)..(172): n is any nucleotide
nnnnnnnnnnnnnnnnnnnnnnnnnnnnnnnnnnnnnnnnnnnnnnnnnnnnnnnnnnnnnnnnnnnnnnnnnnnnnnnnnnnnnnnnnnnnnnnnnnnnnnnnnnnnnnnnnnnnnnnnnnnnnnnnnnnnnnnnnnnnnnnnnnnnnnnnnnnnnnnnnnnnnnnnnnnnacgtggggttcagcaaatgctggggttaggctgggccttgccgctgtcctgccctgctgagaggtggtgggaccttcaggcaccctctctgggactgctcatggtgcccyggtacagggctggccctkcayccccatggagatcttctcacccctggaacccacacagcatagcctttctcattgatatcatacagcatttmatagaaccatagaatcattaaggttggaaagaccactaaggtcatccggtccaaccatcaacccatgcctgtgaccgctctaggccacgtccctcagtgtcacacgtacccatcaaagcatcacaaaggtatcaggggagatattggtgctaattgctcataagcatttccagaaaaagccggccctcccactcctacaaaccgcattacagccccaaacacygc

SEQ ID NO: 28606 - DNA, 599 bp, Chicken  19866894246762_3
  misc_feature (1)..(169): n is any nucleotide
nnnnnnnnnnnnnnnnnnnnnnnnnnnnnnnnnnnnnnnnnnnnnnnnnnnnnnnnnnnnnnnnnnnnnnnnnnnnnnnnnnnnnnnnnnnnnnnnnnnnnnnnnnnnnnnnnnnnnnnnnnnnnnnnnnnnnnnnnnnnnnnnnnnnnnnnnnnnnnnnnnnnnnnnnacgtggggttcagcaaatgctggggttaggctgggccttgccgctgtcctgccctgctgagaggtggtgggaccttcaggcaccctctctgggactgctcatggtgcccyggtacagggctggccctkcayccccatggagatcttctcacccctggaacccacacagcatagcctttctcattgatatcatacagcatttmatagaaccatagaatcattaaggttggaaagaccactaaggtcatccggtccaaccatcaacccatgcctgtgaccgctctaggccacgtccctcagtgtcacacgtacccatcaaagcatcacaaaggtatcaggggagatattggtgctaattgctcataagcatttccagaaaaagccggccctcccactcctacaaaccgcattacagccccaaacacygcttc

SEQ ID NO: 28607 - DNA, 599 bp, Chicken  19866894246762_4
  misc_feature (1)..(98): n is any nucleotide
nnnnnnnnnnnnnnnnnnnnnnnnnnnnnnnnnnnnnnnnnnnnnnnnnnnnnnnnnnnnnnnnnnnnnnnnnnnnnnnnnnnnnnnnnnnnnnnnnnacgtggggttcagcaaatgctggggttaggctgggccttgccgctgtcctgccctgctgagaggtggtgggaccttcaggcaccctctctgggactgctcatggtgcccyggtacagggctggccctkcayccccatggagatcttctcacccctggaacccacacagcatagcctttctcattgatatcatacagcatttmatagaaccatagaatcattaaggttggaaagaccactaaggtcatccggtccaaccatcaacccatgcctgtgaccgctctaggccacgtccctcagtgtcacacgtacccatcaaagcatcacaaaggtatcaggggagatattggtgctaattgctcataagcatttccagaaaaagccggccctcccactcctacaaaccgcattacagccccaaacacygcttccacccaaggccttgggctccaagcccatctgcagctcaaacctccctctgctgagccctcctacgccgttc

SEQ ID NO: 28608 - DNA, 519 bp, Chicken  19866894246762_5
ctkcayccccatggagatcttctcacccctggaacccacacagcatagcctttctcattgatatcatacagcatttmatagaaccatagaatcattaaggttggaaagaccactaaggtcatccggtccaaccatcaacccatgcctgtgaccgctctaggccacgtccctcagtgtcacacgtacccatcaaagcatcacaaaggtatcaggggagatattggtgctaattgctcataagcatttccagaaaaagccggccctcccactcctacaaaccgcattacagccccaaacacygcttccacccaaggccttgggctccaagcccatctgcagctcaaacctccctctgctgagccctcctacgccgttctgctgcatgagacctccgctccttgttgctacagctgtagaagcaggggctgacagagcaggggagggatcggcgctgctccaaacacgtgctttgtgctccagcttaatctgcttcaggccctcggcagctgctgtttatgg

SEQ ID NO: 28609 - DNA, 600 bp, Chicken  19866894246765_1
aaaggccagacggaatagatttcctatcaacacaatgcctcagagcacctcacacccagctgcaaaagccagtggtgccagcaagcagttctccaaaggatggacatgaaacaaactggtgagacaaaatcacagcaactacttgggtatcatccacgatgccgtgctgctgagatgccactacatttgtttgcacgtgggatgagttaatagcatggtgaattcacacataactaaactgttcttcagtctgaatttgacttgactggatctgcagcacttccctggtttgtctccaartgtttgaatgcacaagctttgcaggtacaaacactcatggaaaacaaaacaaaacaaaaacaatctgcatttgtagttcaaatatccccaaaggatgattcacttgctggtagacagccagtctgagctcctataacacctgagccctcaaaatatgccttgaaggggcagtatgtggtgcacagacccgtgatggctgggccagggtggggagatctcaccccaaagaaatccccagttgtggggggagtggcatacaagaaaggaattattcgtggaacaaagatgtgaataagcttt

SEQ ID NO: 28610 - DNA, 600 bp, Chicken  19866894246771_1
aatttcctctcacttccctgtcagattgccagaagattaacatccataaggactaaaagaacagcttatttttaatatatatgtggaaattagcttctgagagttaaatgccgagaagcagaaggttgatccagttctgatagctcaggatttctcatctaaaacaagtgttgatgagacatcatggcttctctgtcatgagacaaggatgttccgtgctgccctgtcctgtagcatgtagagtcctcaacatgattacttcattttacatattatgaatttcaaaccattaaataattmatttggttatcttatgcagcattttcctccttctacgggtagtagtcataaatcataacaaygtgcaagagaaaaaaaacattgcaaaatgctagagtattccagggrtggaaatgctgtcttttacccagctctttgtccaccttctgttctggactcatgcacaggtcaattttaagcaatgtaaataatcaagccccacaaatccacagaataggccaataacatatcatgtrgataaaactgtctcattttgtccttcatccctggagacatccagtctcctataaattttgcaaa

SEQ ID NO: 28611 - DNA, 600 bp, Chicken  19866894246771_2
agcttatttttaatatatatgtggaaattagcttctgagagttaaatgccgagaagcagaaggttgatccagttctgatagctcaggatttctcatctaaaacaagtgttgatgagacatcatggcttctctgtcatgagacaaggatgttccgtgctgccctgtcctgtagcatgtagagtcctcaacatgattacttcattttacatattatgaatttcaaaccattaaataattmatttggttatcttatgcagcattttcctccttctacgggtagtagtcataaatcataacaaygtgcaagagaaaaaaaacattgcaaaatgctagagtattccagggrtggaaatgctgtcttttacccagctctttgtccaccttctgttctggactcatgcacaggtcaattttaagcaatgtaaataatcaagccccacaaatccacagaataggccaataacatatcatgtrgataaaactgtctcattttgtccttcatccctggagacatccagtctcctataaattttgcaaaaggatagaaggataaatttcagtaggtttcccttgtcaaatggatctaarctaaactgtgaa

SEQ ID NO: 28612 - DNA, 600 bp, Chicken  19866894246771_3
tgccgagaagcagaaggttgatccagttctgatagctcaggatttctcatctaaaacaagtgttgatgagacatcatggcttctctgtcatgagacaaggatgttccgtgctgccctgtcctgtagcatgtagagtcctcaacatgattacttcattttacatattatgaatttcaaaccattaaataattmatttggttatcttatgcagcattttcctccttctacgggtagtagtcataaatcataacaaygtgcaagagaaaaaaaacattgcaaaatgctagagtattccagggrtggaaatgctgtcttttacccagctctttgtccaccttctgttctggactcatgcacaggtcaattttaagcaatgtaaataatcaagccccacaaatccacagaataggccaataacatatcatgtrgataaaactgtctcattttgtccttcatccctggagacatccagtctcctataaattttgcaaaaggatagaaggataaatttcagtaggtttcccttgtcaaatggatctaarctaaactgtgaacagcaaaacatagtcaccaagtggcttttggggactacatttttac

SEQ ID NO: 28613 - DNA, 600 bp, Chicken  19866894246771_4
tgtagagtcctcaacatgattacttcattttacatattatgaatttcaaaccattaaataattmatttggttatcttatgcagcattttcctccttctacgggtagtagtcataaatcataacaaygtgcaagagaaaaaaaacattgcaaaatgctagagtattccagggrtggaaatgctgtcttttacccagctctttgtccaccttctgttctggactcatgcacaggtcaattttaagcaatgtaaataatcaagccccacaaatccacagaataggccaataacatatcatgtrgataaaactgtctcattttgtccttcatccctggagacatccagtctcctataaattttgcaaaaggatagaaggataaatttcagtaggtttcccttgtcaaatggatctaarctaaactgtgaacagcaaaacatagtcaccaagtggcttttggggactacatttttacagggctggaaatttatgcttgaattcataaatgtactctaccttttcagtttatttgctatgtgctagcaattagcaaacagatactgatgtttgaagccagtgttcaactgtatttctggaaggttt

SEQ ID NO: 28614 - DNA, 600 bp, Chicken  19866894246771_5
aatcataacaaygtgcaagagaaaaaaaacattgcaaaatgctagagtattccagggrtggaaatgctgtcttttacccagctctttgtccaccttctgttctggactcatgcacaggtcaattttaagcaatgtaaataatcaagccccacaaatccacagaataggccaataacatatcatgtrgataaaactgtctcattttgtccttcatccctggagacatccagtctcctataaattttgcaaaaggatagaaggataaatttcagtaggtttcccttgtcaaatggatctaarctaaactgtgaacagcaaaacatagtcaccaagtggcttttggggactacatttttacagggctggaaatttatgcttgaattcataaatgtactctaccttttcagtttatttgctatgtgctagcaattagcaaacagatactgatgtttgaagccagtgttcaactgtatttctggaaggtttatttacctgaactttcagttatgaaatctatatgcatgatggtggaggtacatgcacgtatatgtcacatgtacataaaacacagtctcacaaaataaaagtgcatttacatcc

SEQ ID NO: 28615 - DNA, 600 bp, Chicken  19866894246771_6
cttcactatctggaataaaagagatatatatttcttctttgcttctcttgcatcaaactctgttaaaaacttgataaataaaatgtttttctagtgattgaatccaacttgtgtgtgagactgtgatatttgtgggaaaatgagatctgaaggaaattactggcaattttctatctaaattaaatgcattgtaaagtttccagtgatgcttgaagattttttcagctcatgacccaagagggaaaaatacatgtgccttcagagatctttttctttcccctagttctgcttacatagccytcttactgcaggaagcaggtagtagcagacaaggtgctgtatgttccaggtaactctgacgttatcttatttcttgtgccatccagaagtgttggataaggtgggattggagatatccaaacataatacagcccatttttttgaaaagaaagaaagaaacacaaaccatacaaaaacctgtatttgtttcctgatgactcatctaaaagctcagggagaatgtgaggaagtgactgatacaaactgaggagataaagaactaaacggaatgtgaataaaggtattttatctgattgtcaa

SEQ ID NO: 28616 - DNA, 600 bp, Chicken  19866894246774_1
cttgtgtgcccttggctaggacatgcaggagatgccacgaaggtaggtgggtcttgcatcctctttaagcactggatgctcagtgcaggcttcctggcaaggctggaatttgtgcttgtctgtttttgctgcctgcataggttcgtatttcttggtcacaaagaaagtttgtcataaaagatgtctcaaataggaaatctggactatgtttcaaacctagggtttgaaatgtactgtccacaatcgagggattattcacataattggggttaaactttgtcattgacccatcggtaaagsgctcaggattaagtttatatttacagaagtacagaaatgggaatttaagatgaatctacttatcatatgctcattgaaagctggatgcctaagaatttttggaatccatgcagtttactcatgttgagctttgggttttcaaatgttggatcattttgattacttaaagtgatcttataatactaagtctcctagttgaagtcttatgctgataaaggagaatcagataagttgtttcaacgaggcattttgccttaagctaagaacagacatctgttttattatctgggccaacaattt

SEQ ID NO: 28617 - DNA, 600 bp, Chicken  19866894246780_1
tctagacctgaagtgagactagaaggcttttttacaatttttttcccatttcttttctctgaatatggttactgtgctcagcaacgtggctgatgcgagatatttctgaagataaaagcatttaatattgtaatacccatgccgctattccgatactgaaatagcacgctggcaacagttttttgaggtcacgtgagaactcagttttgtgcagatagctttgggtgggagggaagaaggagggggattttgagaaccaagagtaattaattaaaaattgccacagctatgatgttttgrgcttagaaaattacagagcaccacgccatctagtttaaatatctaagttaaaatattttctttaatattacatacgctgttcaaaataattacatgaagctgaagggaatttttttcctgttggaataaactttagcctagtctgaaacatgtgttctcacttactgttgatagcttctttaataccataaaaaaactccagcaggtattgcaagaattcggtaacttaatcttaacgctttgaagtgaaatcacgtgaaatgttttgattctattgtatttttgtacaggcggcagcat

SEQ ID NO: 28618 - DNA, 600 bp, Chicken  19866894246795_1
tccttttctttacttatacagcatgtttaattttgttttgacctcacactggtatccaatcaattacagattcacttcttgccccataggttttcagactccttagaattcttcattatctcagtgtggatgcaatcattaccaggctgttacaaagacattggtgagactggaaaaagaaaagaaagaaaacttgcctattcggggtgacactgtcattatggcattaactagttttgcacttactcatggttttgcaacctacctatgcgtaaaggaatactgatccattattcataytgaccattgtgtttaagatgtgtctatgagcatccatcagacctctagaggttagtatgcacaagggctccctgacggatcattttgattctgacagttgttaggagtttagtcaacttatcccagtatctcccctttcaatacttcagcctcacaaccccatagagagtatgcattatctcctatctgcagtctgtgtgtagagaatgtaaggaggagattatgcttttcatcaccagaggaaaaagttgttctttatgatatgcttagatcgtgtgaagagaagtaacacctcaaaag

SEQ ID NO: 28619 - DNA, 600 bp, Chicken  19866894246795_2
aagggctccctgacggatcattttgattctgacagttgttaggagtttagtcaacttatcccagtatctcccctttcaatacttcagcctcacaaccccatagagagtatgcattatctcctatctgcagtctgtgtgtagagaatgtaaggaggagattatgcttttcatcaccagaggaaaaagttgttctttatgatatgcttagatcgtgtgaagagaagtaacacctcaaaagcacggtaattcctgagcttttaatgcaaagatgtgttttagtagtgcatgcaggaaaacccrtgctcaaaaacattaccatctttctccataccatttcatatttcattaggcaaccaaataacacagaaaggaaggcaaattgaatagaaattcaggactgttttttcagtgtactatataggacactgatctctgctactcaggctaaaagcatctgctatgagtcatttggtgagctagttctgaggaacagctgtctggaattaaaggaaggtgttatgtcaaggtatattacatttcataggaatrtgtccccagagcaacaggttttcatctagcagacagcagtggcttctaaca

SEQ ID NO: 28620 - DNA, 600 bp, Chicken  19866894246795_3
ctgagcttttaatgcaaagatgtgttttagtagtgcatgcaggaaaacccrtgctcaaaaacattaccatctttctccataccatttcatatttcattaggcaaccaaataacacagaaaggaaggcaaattgaatagaaattcaggactgttttttcagtgtactatataggacactgatctctgctactcaggctaaaagcatctgctatgagtcatttggtgagctagttctgaggaacagctgtctggaattaaaggaaggtgttatgtcaaggtatattacatttcataggaatrtgtccccagagcaacaggttttcatctagcagacagcagtggcttctaacacagcctatgcttgttctttcatcctgtctgtcaccaagtcaaaagctggctggcagatgaccactgccacaagtgagccatgcagctccagcacaggtggatggagcccagcactgctcagctacctacagtaacagtaaccccttcttaagggaactgctcagaaggccttatttcctctagagataccactgtgggtcagtacatttacaaagtacctggggttctgtgctactaggcgggaggatt

SEQ ID NO: 28621 - DNA, 599 bp, Chicken  19866894246796_1
  misc_feature (1)..(120): n is any nucleotide
nnnnnnnnnnnnnnnnnnnnnnnnnnnnnnnnnnnnnnnnnnnnnnnnnnnnnnnnnnnnnnnnnnnnnnnnnnnnnnnnnnnnnnnnnnnnnnnnnnnnnnnnnnnnnnnnnnnnnnnntttctgaaattaaatcaggacagctaaaaaaaaaaactttaagagacagaaggagacagaagactgctgtttagactaataccatcttacagaacagtgaaatgtcaaaactctacttgcacttgatactaactgcccattggcctctccttgtccaacacaggctaagacagctgtccygtgcaagcagcaacartttttcacatgttaaggaaccaaagaaagctgaacgtgtccattatcagtgcctgggttgtgctgctgtgccagtggtatttgccaacagattgacaacaaagtgacatgagaatggtattagaaaactcaacagctgactcagaattgctcaaaatggtatctttacacacttactttgtatttgagctctcctctttacatttttgtctactctgtgcttgcatttggaaagcaaacctggtgctgtgcacaaraactgacttaagatagggcagtgcaga

SEQ ID NO: 28622 - DNA, 599 bp, Chicken  19866894246796_2
  misc_feature (1)..(104): n is any nucleotide
nnnnnnnnnnnnnnnnnnnnnnnnnnnnnnnnnnnnnnnnnnnnnnnnnnnnnnnnnnnnnnnnnnnnnnnnnnnnnnnnnnnnnnnnnnnnnnnnnnnnnnnntttctgaaattaaatcaggacagctaaaaaaaaaaactttaagagacagaaggagacagaagactgctgtttagactaataccatcttacagaacagtgaaatgtcaaaactctacttgcacttgatactaactgcccattggcctctccttgtccaacacaggctaagacagctgtccygtgcaagcagcaacartttttcacatgttaaggaaccaaagaaagctgaacgtgtccattatcagtgcctgggttgtgctgctgtgccagtggtatttgccaacagattgacaacaaagtgacatgagaatggtattagaaaactcaacagctgactcagaattgctcaaaatggtatctttacacacttactttgtatttgagctctcctctttacatttttgtctactctgtgcttgcatttggaaagcaaacctggtgctgtgcacaaraactgacttaagatagggcagtgcagactgctttaaagcacac

SEQ ID NO: 28623 - DNA, 600 bp, Chicken  19866894246796_3
gtccaacacaggctaagacagctgtccygtgcaagcagcaacartttttcacatgttaaggaaccaaagaaagctgaacgtgtccattatcagtgcctgggttgtgctgctgtgccagtggtatttgccaacagattgacaacaaagtgacatgagaatggtattagaaaactcaacagctgactcagaattgctcaaaatggtatctttacacacttactttgtatttgagctctcctctttacatttttgtctactctgtgcttgcatttggaaagcaaacctggtgctgtgcacaaraactgacttaagatagggcagtgcagactgctttaaagcacacaagcttatttagatttttactttaagaatggagccagagaaaatagctttaacaatatagaaggtggtggaagcctccggaaagtcgaaaggtcaaagctaaggaaataaaagtatcagttttatggaaatataattacattgaatgttccttatttgtttcaggagcaatgcagctgggtgtgatggagcaaaaggcatttgtgactaatgtgagtgaggtgggcagctctgcactgggaaagggcactgtcacag

SEQ ID NO: 28624 - DNA, 599 bp, Chicken  19866894246798_1
  misc_feature (1)..(11): n is any nucleotide
nnnnnnnnnnncgtgtgaaaatggccatactgatgtagcagatgtcttacttcaggcaggtgcagatctggtaagtaatttccttcttaaaaattataaagtggaaatacagtgattaatatgtttattttcatgttcactgctgaaaacttttaaagctttttcttttaagaaagaactagtgatggcattctgattgctattagactcttctgttatctgggagtgcttatgtcacaaggaaaacttctgcagttgtgtctagagcattttcaaaccttcacggttgcatgtgcaggraatcaggagatycagttctttttgtcatgtgcagtgcagcttagagttgccgagctggttatggtttaatacttatatttgaaatttattctgctctctaagcagtagacagttggcagttttgttcttctagtgatatctatttggtgtactctgtttattttttgcccttgggccagcttgtatgccagtagattatcgaaagatgaaattaagcatgacaaaacacattttcttaatttatagtaaccattctgtgcttgaaggcttcttatccaagagtcttagacctgtgcaag

SEQ ID NO: 28625 - DNA, 600 bp, Chicken  19866894246798_2
gtgtgaaaatggccatactgatgtagcagatgtcttacttcaggcaggtgcagatctggtaagtaatttccttcttaaaaattataaagtggaaatacagtgattaatatgtttattttcatgttcactgctgaaaacttttaaagctttttcttttaagaaagaactagtgatggcattctgattgctattagactcttctgttatctgggagtgcttatgtcacaaggaaaacttctgcagttgtgtctagagcattttcaaaccttcacggttgcatgtgcaggraatcaggagatycagttctttttgtcatgtgcagtgcagcttagagttgccgagctggttatggtttaatacttatatttgaaatttattctgctctctaagcagtagacagttggcagttttgttcttctagtgatatctatttggtgtactctgtttattttttgcccttgggccagcttgtatgccagtagattatcgaaagatgaaattaagcatgacaaaacacattttcttaatttatagtaaccattctgtgcttgaaggcttcttatccaagagtcttagacctgtgcaagggtgggtagatac

SEQ ID NO: 28626 - DNA, 600 bp, Chicken  19866894246804_1
gacttctagcaggccaggtgatggaaatagttcagtccttaacaaaaaaaggaaagggctcctgttcagctgcaaagctgagcagcatcgtacgtccccgtaccagaaaggttggaaaaatgagtctagaaggctcagaggtcaaatgttgcatcttgttcttgctgacagggagggaatgcacagacaggcactgtgttttaaaggcagggactcatctaaagcagaatcaaaggagcctccaaaaagtagttctcctttgctatcctttagaaaacagatagcagtacagaactgctsgttctgttatagcatttctcatcagtgctgtcacaytgctagagcaccaggagcatctgcactacaggagcacctttggcacagggctggacatctatgccctctatatgcacacagctctgcaaccacccagctacaaccagcagacttccagtgggggcagagcagaggtcctccaggcgttcttccaagcagttgtactgtttggatgggaggcaatcygaaatcccccagggatttgcaagcttgctcatagggctgctaagatttattgcatgcatgcagcagctcaactgggat

SEQ ID NO: 28627 - DNA, 600 bp, Chicken  19866894246804_2
ccttaacaaaaaaaggaaagggctcctgttcagctgcaaagctgagcagcatcgtacgtccccgtaccagaaaggttggaaaaatgagtctagaaggctcagaggtcaaatgttgcatcttgttcttgctgacagggagggaatgcacagacaggcactgtgttttaaaggcagggactcatctaaagcagaatcaaaggagcctccaaaaagtagttctcctttgctatcctttagaaaacagatagcagtacagaactgctsgttctgttatagcatttctcatcagtgctgtcacaytgctagagcaccaggagcatctgcactacaggagcacctttggcacagggctggacatctatgccctctatatgcacacagctctgcaaccacccagctacaaccagcagacttccagtgggggcagagcagaggtcctccaggcgttcttccaagcagttgtactgtttggatgggaggcaatcygaaatcccccagggatttgcaagcttgctcatagggctgctaagatttattgcatgcatgcagcagctcaactgggatgcttacaagaaaacgcattcattgtgtaaccatcca

SEQ ID NO: 28628 - DNA, 600 bp, Chicken  19866894246804_3
agcagaatcaaaggagcctccaaaaagtagttctcctttgctatcctttagaaaacagatagcagtacagaactgctsgttctgttatagcatttctcatcagtgctgtcacaytgctagagcaccaggagcatctgcactacaggagcacctttggcacagggctggacatctatgccctctatatgcacacagctctgcaaccacccagctacaaccagcagacttccagtgggggcagagcagaggtcctccaggcgttcttccaagcagttgtactgtttggatgggaggcaatcygaaatcccccagggatttgcaagcttgctcatagggctgctaagatttattgcatgcatgcagcagctcaactgggatgcttacaagaaaacgcattcattgtgtaaccatccaaaggaggtagaaggaaaatattaattataggaagagactgcgttcwgcttttattccagtaaaagggaaatgtggggactgttgtacttcatttttgctttgttcttcagaagtgcagtgcacagcttggcaggcattgctgggagcggctgcatggccccatctgccccagtggctgcacctttg

SEQ ID NO: 28629 - DNA, 600 bp, Chicken  19866894246804_4
agggctggacatctatgccctctatatgcacacagctctgcaaccacccagctacaaccagcagacttccagtgggggcagagcagaggtcctccaggcgttcttccaagcagttgtactgtttggatgggaggcaatcygaaatcccccagggatttgcaagcttgctcatagggctgctaagatttattgcatgcatgcagcagctcaactgggatgcttacaagaaaacgcattcattgtgtaaccatccaaaggaggtagaaggaaaatattaattataggaagagactgcgttcwgcttttattccagtaaaagggaaatgtggggactgttgtacttcatttttgctttgttcttcagaagtgcagtgcacagcttggcaggcattgctgggagcggctgcatggccccatctgccccagtggctgcacctttgttcctgtggtgactgggacaagcaggatgcaggaccgagcacagctcagcagccagrgcagtgagcttcagagcctggtttgctaatcacttatttacaaccaatcctgactattagcagctaaaaaactcagcccagggaacagcctgcctgccaaccc

SEQ ID NO: 28630 - DNA, 600 bp, Chicken  19866894246804_5
atgcagcagctcaactgggatgcttacaagaaaacgcattcattgtgtaaccatccaaaggaggtagaaggaaaatattaattataggaagagactgcgttcwgcttttattccagtaaaagggaaatgtggggactgttgtacttcatttttgctttgttcttcagaagtgcagtgcacagcttggcaggcattgctgggagcggctgcatggccccatctgccccagtggctgcacctttgttcctgtggtgactgggacaagcaggatgcaggaccgagcacagctcagcagccagrgcagtgagcttcagagcctggtttgctaatcacttatttacaaccaatcctgactattagcagctaaaaaactcagcccagggaacagcctgcctgccaacccgtccccttctgagcaccctcaccttgccatcgcacacctgtggcattggctcagctcatacagagagaccatgcagaaaacagataaactgctcaaatgcagaccaccctcagctcatcccggaatacatcttcttccagctgctcccagcagcaggaacaccaggactcacattgtccaacctatgccagattcat

SEQ ID NO: 28631 - DNA, 600 bp, Chicken  19866894246808_1
tagctgggaatcatttatctgctccacgggaactgaatttctatgaaagctgatagtttggattcatgtaagtgagtcccttttttatatcagtctttttgattttgcaccccagaaatttgctccaagttctctgaaagctgaaagtaaacatcagtcaaagttgggatggattttcatttaaagccatacaaacccacccacgtggtccagagtagtgtcctgcaaatactacgtttgctagagtaaacacgtagcagggcaagcagccagctaggtttgtctccagaattgtcttgraaaggacaaaacaaacttgatgttgtgttacgttttgggagaaacccaaagagataatagaaggagaatctgtttcctccaaacatccaaaaacaaacctagaaagtttcaataaagaataataagagttgtatrcacaaattgactcgaggcaactttttagcttgcttcagtgatgttttgatggctgattagctgagctggcagtgaccttggcagtgctacaaaagcaatcttgacatcagtcagcataaagaattccacactttcttcaacccacctccccccttaaaaaaaaga

SEQ ID NO: 28632 - DNA, 600 bp, Chicken  19866894246808_2
gaaagctgaaagtaaacatcagtcaaagttgggatggattttcatttaaagccatacaaacccacccacgtggtccagagtagtgtcctgcaaatactacgtttgctagagtaaacacgtagcagggcaagcagccagctaggtttgtctccagaattgtcttgraaaggacaaaacaaacttgatgttgtgttacgttttgggagaaacccaaagagataatagaaggagaatctgtttcctccaaacatccaaaaacaaacctagaaagtttcaataaagaataataagagttgtatrcacaaattgactcgaggcaactttttagcttgcttcagtgatgttttgatggctgattagctgagctggcagtgaccttggcagtgctacaaaagcaatcttgacatcagtcagcataaagaattccacactttcttcaacccacctccccccttaaaaaaaagacaactacttgcccatgaaatctgtgtttgtttctgagtttggctagatcttctcattctgttcctggttttggacagtattcagctgcaaaggactcaaaggtggctacactggtggtcagatccaccatgtaaa

SEQ ID NO: 28633 - DNA, 600 bp, Chicken  19866894246811_1
gtgcttgagaccaaaaaaacctgtattagagcacagattcaagagccaaagccaaatttcagtggaatatcaagatgctaactgtagctgcagaagcttcagtggacttgtgggtatgtgcatggatgcaccagctcattacaagtggctcactgctgagtttcatcaacggagcaagatctgggcccatccccacgtggctctgcagaatatgcagtttacctaagcactctcttggaacaggcattcttcagaaacataaagtaacaggaggcagggctttcccaaactttagctacrttctgttagaggagagggtaggytgggggctgtgtgacaaacaggctcaacggctgcactgacatacgtcttgcttaggtgtctagaccatgctaggcctcagtgttacaattccatgacctggaaaactcatgaagattagaatgccaggcgggtgctcattaagaatagaacaccaggttatgtgctcattaagagcagacaaccaggtgggtgctcacagctgctgccattcacaccaaccgtttcccccatcccacgagtctccacaatctcagcatggatttggattccatgcct

SEQ ID NO: 28634 - DNA, 600 bp, Chicken  19866894246811_2
tattagagcacagattcaagagccaaagccaaatttcagtggaatatcaagatgctaactgtagctgcagaagcttcagtggacttgtgggtatgtgcatggatgcaccagctcattacaagtggctcactgctgagtttcatcaacggagcaagatctgggcccatccccacgtggctctgcagaatatgcagtttacctaagcactctcttggaacaggcattcttcagaaacataaagtaacaggaggcagggctttcccaaactttagctacrttctgttagaggagagggtaggytgggggctgtgtgacaaacaggctcaacggctgcactgacatacgtcttgcttaggtgtctagaccatgctaggcctcagtgttacaattccatgacctggaaaactcatgaagattagaatgccaggcgggtgctcattaagaatagaacaccaggttatgtgctcattaagagcagacaaccaggtgggtgctcacagctgctgccattcacaccaaccgtttcccccatcccacgagtctccacaatctcagcatggatttggattccatgcctcaaaacagtgcatgaaacagttc

SEQ ID NO: 28635 - DNA, 600 bp, Chicken  19866894246823_1
catatttaatagagtgtgtgagaggtagcttgtgtttttgcagtggaaatttccagtagttctgcatgtagcataggataagttgttttccacaaagaaagctgctgaacagagtaaagttaagactggattgttccaacctaggtagaattggcacaggcattaggtaagttaattatatagggtaggggagagtctggtacaggacaaaatgagtgtgctaatttttgagaatactgtcctcctatcaccataaaaagtacagaacatacctaaaaacaatggcttcgtaacagacaytgtatggaaatgtaaggtagcaacagtgttggaagactgtgagcctcagaaactcaaccagtgagtgccaggagaggcattacctgcgtcagacccaggatatataacagaatggatttcactgactggctgctcaatttctcccttgtcagtagggggtgtgcgcccattattgcaataatgaatgaactgctcttcacagagatctttgcctgattagaaatttttgatcttgagtgtgtttctcacaagggctagtaatggatggagaaaatgttttgacaaaacatatattgcggt

SEQ ID NO: 28636 - DNA, 599 bp, Chicken  19866894246824_1
  misc_feature (1)..(77): n is any nucleotide
nnnnnnnnnnnnnnnnnnnnnnnnnnnnnnnnnnnnnnnnnnnnnnnnnnnnnnnnnnnnnnnnnnnnnnnnnnnnncttattaacttagtgaacatcagtatcttgaatatgaaatgtttagctaccttctgcaccttgaacatgaaatgttcacctctattttctactaagaaactttaatactcactctaaaaagcagtctctttgcagctacacttagtttggctcggtcatctaatttttcttcatctacagaaagtaaaaaagaaaaagctcacattaagtgaaagtttttctractaagtcatttctgaactcactctaaatagtgtttaactaatgaaaaaatatctgtagtcaaaagttggctgtactccctttcagttgaagatatattgtgaagcaaattgtataaacttttactcgtatttgcaaggatagcatcagagaaaaattctgagccggatttctagagcaaaagaatgttgtgcaggacagctcatggcccttcaggttaactagagaaacttttatgaatgatcatatatattacggtagtctctgataacacacagagtaagaaaacgcttagactaa

SEQ ID NO: 28637 - DNA, 600 bp, Chicken  19866894246830_1
tctgtctattaggaagattctaattagtgcaagccttgataattaagggtagagaagtgaagggaagaaagctgaaagctgcctaaggaccatgcagaggggaaaggggggagcagcagaagggtcccaagctctgcagggcggtgctgcagagcctcagccccacattcaccctggggtattcaacaggtagaaaccatcacctgccatccgcttacctccatcactccagagtgcacagaaaaggccaaaaactccgttcccacctgctgtccaagaacaggaaacgctctgtgttgycccagcaccttacaccgggcagagctcaccaccgagctcagccaggctgccctttctctccttgtctcacaatcaggaggcctccaagcagacagcagccctgctcagatccaggagtcctcactccccatccatgcctggatgctccacgaactcatctctgttcattcactgctgcttttgctgtttgcccagggtcactgctgctgttcggcaccttcagcatcctcctgaacgtctttcagatcggctacagtgtcattcaaatcaactgcaaatccaaggtggaaatcgtgttcc

SEQ ID NO: 28638 - DNA, 600 bp, Chicken  19866894246849_1
gagcttgcacagagcagtggactgggcaggtaacctcatctccaggcagtgcagggatgcgaatacccctctgtgccccccccgtgctgctgcatggccctcctgctccccatgcacgggtctggccccatcccagctgctggaggtctcctgaggatgtgggatttgcccagaagcacaagaagacattcatacagctactgggaggggggttgtgaaagcccagcacgttttttttccctctaacaaatgacctttgtctttccttttattttcattttcaggctctggctttccagmggtcaagcrgtttaagaatcttggcaggatgaaaaaaaagcaggattcatccccctaattgctctgtctctctggccaccacgtcatcctgcttcggcccaaggtcagtaactttcctaaatcatcatatcccagaatgccacggaggacgcatggaactcatgctgaaacgcacagcctttgcacgaacacccatcgcctcctcggctttgcctctccactcgagagtccgtgcagttcttgttttgcagaaaaaggaagaacagcgctgatgtaatgacaggattctgggagctggag

SEQ ID NO: 28639 - DNA, 600 bp, Chicken  19866894246849_2
cagagcagtggactgggcaggtaacctcatctccaggcagtgcagggatgcgaatacccctctgtgccccccccgtgctgctgcatggccctcctgctccccatgcacgggtctggccccatcccagctgctggaggtctcctgaggatgtgggatttgcccagaagcacaagaagacattcatacagctactgggaggggggttgtgaaagcccagcacgttttttttccctctaacaaatgacctttgtctttccttttattttcattttcaggctctggctttccagmggtcaagcrgtttaagaatcttggcaggatgaaaaaaaagcaggattcatccccctaattgctctgtctctctggccaccacgtcatcctgcttcggcccaaggtcagtaactttcctaaatcatcatatcccagaatgccacggaggacgcatggaactcatgctgaaacgcacagcctttgcacgaacacccatcgcctcctcggctttgcctctccactcgagagtccgtgcagttcttgttttgcagaaaaaggaagaacagcgctgatgtaatgacaggattctgggagctggagatttatggg

SEQ ID NO: 28640 - DNA, 598 bp, Chicken  19866894246849_3
tgaaaaaaaagcaggattcatccccctaattgctctgtctctctggccaccacgtcatcctgcttcggcccaaggtcagtaactttcctaaatcatcatatcccagaatgccacggaggacgcatggaactcatgctgaaacgcacagcctttgcacgaacacccatcgcctcctcggctttgcctctccactcgagagtccgtgcagttcttgttttgcagaaaaaggaagaacagcgctgatgtaatgacaggattctgggagctggagatttatgggggaaaagtaagcaaatagcyagcagctcttgataaagtggtgagaaagcacctgcggtgagctgctattgctttgcctcttgagtacggctgattgcatggggtcatacccacccggggcaaggagcaaccctaagcccccagcagctagatgtgctgctcttaattaaccctgcttaattaccaggtgggaacacatcctcccctgtacactgggagcagcacaaccaacctgcagttaaacattgacgagttgcctccgcagtggatttccaggaatctattgagataaggtcatccttctggatgtgctatgggg

SEQ ID NO: 28641 - DNA, 600 bp, Chicken  19866894246852_1
ggcaggggctgggaattggagtggcagctctcactggcatttcaaaggaaattacttagcactgtaagctaagtgtagtgagtgaggatgaaggactgttggttattgctgtgatgaagctaatccagtcctaagaaagataaagggttgcttagcaatgctttagtgaggactagcaatgcttcactaggctcttactgtttactgagacctaaatagtggctcagcgggtttttagtggaatgttcttactatatctgtaatggtctctcctcttgagaagctgtcacgctcatcacrtataatgaacaggaagcagtcagagagcatttggtggctgatcgtgtgttgattttttggcctgaccttgttaagattccatatctctacctttcctttccgtaggagttcttaaattagccacggagattagattattgaagtgcttttcatacaaatgcctcctggtctgtttatttttcctaaaccactccttgtccacgtggaagctcacttctggtggatgaaggagaggtgttctgaggaagagatgggctgaaccagagtcacatctcagaaaactgtgttacagtcttatct

SEQ ID NO: 28642 - DNA, 433 bp, Chicken  19866894246852_2
tctctacctttcctttccgtaggagttcttaaattagccacggagattagattattgaagtgcttttcatacaaatgcctcctggtctgtttatttttcctaaaccactccttgtccacgtggaagctcacttctggtggatgaaggagaggtgttctgaggaagagatgggctgaaccagagtcacatctcagaaaactgtgttacagtcttatctgaagccccttaacagagcaagatgcagattgttcaatttagtatttcttactaggatatctattaagtctccttaatggaagragcctgctgtgtagtatattcacataatttccagaaaatgatggggacttgagggctgagtgctctattcatgcttttaggtgttcagctgaaaaacataagcatgcaccaaagaagtagctcctcctcttct

SEQ ID NO: 28643 - DNA, 600 bp, Chicken  19866894246854_1
tcttctggatgatattcaagtttttagagtccctgaaagctaatggagattttttttgatttggaaatcttcctgtcagttcttagcaacaaaatatgattttgtgatacacagaagatactgttttgctgcatgagacataaactgcagaataccagtttaatgagttgctgatgttttcaaatggtaatgtgcagttaggaaagggggagtctttttttttttagattcaaatggtttgttacatatgtgttttttcctttttcttattaaaggtttggtatagaaatggtgcctctygttcaaaatgatcaagagtgtctggaacttggtgaagaatctgatctgtctactctggaaggattccagtgggaagggatttccttagcagtgcctgggtcagctagaaaacgtagcttttctgaaagcagtgtcattgcagacagacacccttctgcttacagcttttttagtgaacaacccaaagcaaaagaatgtgaggaaaggcaaatagttgcagccagacacttacgtgatataacatctggatacgaggcaagtgttgatattgaagctgactcgaaacaggagacctcttct

SEQ ID NO: 28644 - DNA, 390 bp, Chicken  19866894246854_2
aaaatgatcaagagtgtctggaacttggtgaagaatctgatctgtctactctggaaggattccagtgggaagggatttccttagcagtgcctgggtcagctagaaaacgtagcttttctgaaagcagtgtcattgcagacagacacccttctgcttacagcttttttagtgaacaacccaaagcaaaagaatgtgaggaaaggcaaatagttgcagccagacacttacgtgatataacatctggatacgaggcaagtgttgatattgaagctgactcgaaacaggagacctcttctcttyctttgtcaccatttatatctgaaagaactgagaccacaggaaggaaacacagcctacaggctgcttctgagctcactggcctcacaaaag

SEQ ID NO: 28645 - DNA, 600 bp, Chicken  19866894246855_1
tttacttgtttagtttgtagttttttacaactgctccagcatctaaaggtctgagatatatgtaatgaatgacctcttatttgagcctgcttccctcctctcgaggggaagatttttgatggcttttaattccatcgaatcctgtttcataactgaactcagagtcatatctttgccttacagtaatcgtacaaaatatctagaatgtaggaaccttgcgatataccaaataattctttcctggactgggcatttgcagcacatttcaagcaataaaactcttctagatatcaaaggggraaatgtagtctgcattttataaggaacttgttttctgtcatgtttataacataaaaattaaatggaagtacatattcataataaagtattgcagagcatgttcacctggttcatttttgtatttgctaagcttctcaagcaccttctgtcagaagaactttgagttcgaaactttctatatagttcagataccctgcaggaataattgaaaggcaaatcatgacacctccagcagttcagtatttgggaccacatcctgtaatagatgctttatatttttgcagtcccggggggataaac

SEQ ID NO: 28646 - DNA, 599 bp, Chicken  19866894246858_1
  misc_feature (1)..(202): n is any nucleotide
nnnnnnnnnnnnnnnnnnnnnnnnnnnnnnnnnnnnnnnnnnnnnnnnnnnnnnnnnnnnnnnnnnnnnnnnnnnnnnnnnnnnnnnnnnnnnnnnnnnnnnnnnnnnnnnnnnnnnnnnnnnnnnnnnnnnnnnnnnnnnnnnnnnnnnnnnnnnnnnnnnnnnnnnnnnnnnnnnnnnnnnnnnnnnnnnnnnnnnnnnnttgactgaagaactctgaataactacctgtggcaaatcttggaatgtttgagaaattccagaactgtgaattgtaatgctcaagaatatttcaagaaktggtagaagtatagtaactgcaaaccactaaaattggtcaaccactgtgcaaataaacaagcagtggcataactgaaaaatcagtgaagaattgtgctgtaattgccaacactcagccttctttccttgcagaaaacagatctcaaacaaacagaattaataaaaytgggggtaaagtcttgatcagtaaargtaactggattgatgtaaagtattcagatttctgcagggttctcgattatatctgtccaagtatttaaaaaacaataaccagattccatgtagatggcatgcatttt

SEQ ID NO: 28647 - DNA, 599 bp, Chicken  19866894246858_2
  misc_feature (1)..(36): n is any nucleotide
nnnnnnnnnnnnnnnnnnnnnnnnnnnnnnnnnnnnttgactgaagaactctgaataactacctgtggcaaatcttggaatgtttgagaaattccagaactgtgaattgtaatgctcaagaatatttcaagaaktggtagaagtatagtaactgcaaaccactaaaattggtcaaccactgtgcaaataaacaagcagtggcataactgaaaaatcagtgaagaattgtgctgtaattgccaacactcagccttctttccttgcagaaaacagatctcaaacaaacagaattaataaaaytgggggtaaagtcttgatcagtaaargtaactggattgatgtaaagtattcagatttctgcagggttctcgattatatctgtccaagtatttaaaaaacaataaccagattccatgtagatggcatgcattttcaagctgcgtttatctgctaactttaaaatattcataaattgyccatcactttcatagatgtgaaagtatctatgactggctcaaagctatttcaattatttatcagggaaaaaaaaaaaaaaaccaattgctgataaaaactgcaaataacaaaaaaagtgtatt

SEQ ID NO: 28648 - DNA, 599 bp, Chicken  19866894246858_3
  misc_feature (1)..(10): n is any nucleotide
nnnnnnnnnnttgactgaagaactctgaataactacctgtggcaaatcttggaatgtttgagaaattccagaactgtgaattgtaatgctcaagaatatttcaagaaktggtagaagtatagtaactgcaaaccactaaaattggtcaaccactgtgcaaataaacaagcagtggcataactgaaaaatcagtgaagaattgtgctgtaattgccaacactcagccttctttccttgcagaaaacagatctcaaacaaacagaattaataaaaytgggggtaaagtcttgatcagtaaargtaactggattgatgtaaagtattcagatttctgcagggttctcgattatatctgtccaagtatttaaaaaacaataaccagattccatgtagatggcatgcattttcaagctgcgtttatctgctaactttaaaatattcataaattgyccatcactttcatagatgtgaaagtatctatgactggctcaaagctatttcaattatttatcagggaaaaaaaaaaaaaaaccaattgctgataaaaactgcaaataacaaaaaaagtgtattaatattaaatcatgtacagaaagtac

SEQ ID NO: 28649 - DNA, 600 bp, Chicken  19866894246858_4
cactgtgcaaataaacaagcagtggcataactgaaaaatcagtgaagaattgtgctgtaattgccaacactcagccttctttccttgcagaaaacagatctcaaacaaacagaattaataaaaytgggggtaaagtcttgatcagtaaargtaactggattgatgtaaagtattcagatttctgcagggttctcgattatatctgtccaagtatttaaaaaacaataaccagattccatgtagatggcatgcattttcaagctgcgtttatctgctaactttaaaatattcataaattgyccatcactttcatagatgtgaaagtatctatgactggctcaaagctatttcaattatttatcagggaaaaaaaaaaaaaaaccaattgctgataaaaactgcaaataacaaaaaaagtgtattaatattaaatcatgtacagaaagtactatctttatcagtaacatgctctgtatgactttagtctttaagttaagactgattgttttccaaagacgtacaatattgtactaaggaaaatgctctcctggttcaaaaacgagtggtgcaatgcaatgaccactactagacaggagatta

SEQ ID NO: 28650 - DNA, 600 bp, Chicken  19866894246860_1
agctctgtatgtgcttggctatacgacttcagagtctctaaccaaccctttctggtcatgacattcagaccatgccttttatcttgactgcctggtctatcacgtgaaggtgccagtgaagcagctgcctcagtgcagctcacggtgtagctggggcactgctcacctactgacaacatactgctctcacttggtggctttcacaagccgtgctgaacaaccatgctagcagtctcagggctcgctaacttagtcaagcttcaatcgtctaccttaggctagcgcacagaagccttgctsggcccactgtacacaggggcattatggttatggagacaatgcaggattttgctgtacaaatatttccgtacgaagccccaracccatccaggtgggacaccccgtcayttctatgctgttacagcttttttttcccattttattctgcaaaaatgaaggacaggcatgaaatctycctgtgactctccatggagctaagaacacatgctgcatacacagaaccagaacaccgttgctctgcttcccacttgcactcaaagagcttgcagcatttactggtctccccgtcaggtgaaactg

SEQ ID NO: 28651 - DNA, 537 bp, Chicken  19866894246860_2
tcttgactgcctggtctatcacgtgaaggtgccagtgaagcagctgcctcagtgcagctcacggtgtagctggggcactgctcacctactgacaacatactgctctcacttggtggctttcacaagccgtgctgaacaaccatgctagcagtctcagggctcgctaacttagtcaagcttcaatcgtctaccttaggctagcgcacagaagccttgctsggcccactgtacacaggggcattatggttatggagacaatgcaggattttgctgtacaaatatttccgtacgaagccccaracccatccaggtgggacaccccgtcayttctatgctgttacagcttttttttcccattttattctgcaaaaatgaaggacaggcatgaaatctycctgtgactctccatggagctaagaacacatgctgcatacacagaaccagaacaccgttgctctgcttcccacttgcactcaaagagcttgcagcatttactggtctccccgtcaggtgaaactgacccccttgcctgcagca

SEQ ID NO: 28652 - DNA, 510 bp, Chicken  19866894246860_3
ggtgccagtgaagcagctgcctcagtgcagctcacggtgtagctggggcactgctcacctactgacaacatactgctctcacttggtggctttcacaagccgtgctgaacaaccatgctagcagtctcagggctcgctaacttagtcaagcttcaatcgtctaccttaggctagcgcacagaagccttgctsggcccactgtacacaggggcattatggttatggagacaatgcaggattttgctgtacaaatatttccgtacgaagccccaracccatccaggtgggacaccccgtcayttctatgctgttacagcttttttttcccattttattctgcaaaaatgaaggacaggcatgaaatctycctgtgactctccatggagctaagaacacatgctgcatacacagaaccagaacaccgttgctctgcttcccacttgcactcaaagagcttgcagcatttactggtctccccgtcaggtgaaactgacccccttgcctgcagca

SEQ ID NO: 28653 - DNA, 443 bp, Chicken  19866894246860_4
acatactgctctcacttggtggctttcacaagccgtgctgaacaaccatgctagcagtctcagggctcgctaacttagtcaagcttcaatcgtctaccttaggctagcgcacagaagccttgctsggcccactgtacacaggggcattatggttatggagacaatgcaggattttgctgtacaaatatttccgtacgaagccccaracccatccaggtgggacaccccgtcayttctatgctgttacagcttttttttcccattttattctgcaaaaatgaaggacaggcatgaaatctycctgtgactctccatggagctaagaacacatgctgcatacacagaaccagaacaccgttgctctgcttcccacttgcactcaaagagcttgcagcatttactggtctccccgtcaggtgaaactgacccccttgcctgcagca

SEQ ID NO: 28654 - DNA, 600 bp, Chicken  19866894246864_1
tgtctctggattactggacatattcgagtgctgcagggacccatcccataatggtgctcactagtatcctctagtcaacgctatggagagtagcaaaggttaatctaccttcagaggacacctgctgctgccttagcaaactcaccccaatttcataattactggtgaaacattagcaacagttaagtgcaccagatgacataatcctccatatgcttcagttgcacggatgattatttttcctttctccccccacatgcatgtgatggaggaccaatgaacactgaaactcaaatgatkaaacaaatgaactaagcactcaaaagaaaagacagcccactgggcagaaaaagctgcaaaacaaataccaccaacccactaccycccttaaattcattcagggcacttcattctccaatggcaatgccttgaacttgtttccctccttcaccttcttcctttcttgactggatgaagagggactcataytctcaaatgcatatgtagctgtctctggtcagggtggaaacttctgtaggagaactccacagctcttacgtttgtttttgcacatgcagtaataatcaggctctgggtatg

SEQ ID NO: 28655 - DNA, 600 bp, Chicken  19866894246864_2
ggagagtagcaaaggttaatctaccttcagaggacacctgctgctgccttagcaaactcaccccaatttcataattactggtgaaacattagcaacagttaagtgcaccagatgacataatcctccatatgcttcagttgcacggatgattatttttcctttctccccccacatgcatgtgatggaggaccaatgaacactgaaactcaaatgatkaaacaaatgaactaagcactcaaaagaaaagacagcccactgggcagaaaaagctgcaaaacaaataccaccaacccactaccycccttaaattcattcagggcacttcattctccaatggcaatgccttgaacttgtttccctccttcaccttcttcctttcttgactggatgaagagggactcataytctcaaatgcatatgtagctgtctctggtcagggtggaaacttctgtaggagaactccacagctcttacgtttgtttttgcacatgcagtaataatcaggctctgggtatgtgcttcaggctcaaaactcatccgtcaacatgctagagtcaacagcactagaaacttgcaagtaacaactattaaaccaaaata

SEQ ID NO: 28656 - DNA, 600 bp, Chicken  19866894246864_3
caccagatgacataatcctccatatgcttcagttgcacggatgattatttttcctttctccccccacatgcatgtgatggaggaccaatgaacactgaaactcaaatgatkaaacaaatgaactaagcactcaaaagaaaagacagcccactgggcagaaaaagctgcaaaacaaataccaccaacccactaccycccttaaattcattcagggcacttcattctccaatggcaatgccttgaacttgtttccctccttcaccttcttcctttcttgactggatgaagagggactcataytctcaaatgcatatgtagctgtctctggtcagggtggaaacttctgtaggagaactccacagctcttacgtttgtttttgcacatgcagtaataatcaggctctgggtatgtgcttcaggctcaaaactcatccgtcaacatgctagagtcaacagcactagaaacttgcaagtaacaactattaaaccaaaatacagacaatcggctcaccacagaccacacattagaactgaacactttaggaccttactaattcaaacatgactggtactttttaggaaagctctcaagttatattc

SEQ ID NO: 28657 - DNA, 600 bp, Chicken  19866894246865_1
gcaattataccgggggaacgttgttgctgacatcaccggcacctaatttgctgtcacattctgccatctgtttatttagatcagaaatataccataactgcataatgcaaactcgttctggctgacggggaggggactccatctggcatgaataatgcaactttaatcagtaataacgattattatgattattaagaggctactggagccctgtgcagaaagctaacgcatccatattcatttatgagaataggaattttaagaataggtaaggtaagcagcaaatccaatgaagaacakccaacaggcaatcgataagatacagtttgtttcctggttttggctggaaaaaayaacaggttttattaaaactgaccaataggactagcagacagaaggatggatgcactttcagataacctttctgcacctgctttagctcagtccttgctggagcatcactgacggaggaagcaaaggaggagctgaaacccaaaggcaggagagctggcttcatttttatgcctaatccttacctctgatcaaagttcacgtcagcctagctctagggctctggagttcagggggaaagctacaggt

SEQ ID NO: 28658 - DNA, 600 bp, Chicken  19866894246865_2
cacattctgccatctgtttatttagatcagaaatataccataactgcataatgcaaactcgttctggctgacggggaggggactccatctggcatgaataatgcaactttaatcagtaataacgattattatgattattaagaggctactggagccctgtgcagaaagctaacgcatccatattcatttatgagaataggaattttaagaataggtaaggtaagcagcaaatccaatgaagaacakccaacaggcaatcgataagatacagtttgtttcctggttttggctggaaaaaayaacaggttttattaaaactgaccaataggactagcagacagaaggatggatgcactttcagataacctttctgcacctgctttagctcagtccttgctggagcatcactgacggaggaagcaaaggaggagctgaaacccaaaggcaggagagctggcttcatttttatgcctaatccttacctctgatcaaagttcacgtcagcctagctctagggctctggagttcagggggaaagctacaggtcttgcagctggacacagtgtaaagcacggcacrgcctgcacacagctccctatc

SEQ ID NO: 28659 - DNA, 600 bp, Chicken  19866894246865_3
ctggttttggctggaaaaaayaacaggttttattaaaactgaccaataggactagcagacagaaggatggatgcactttcagataacctttctgcacctgctttagctcagtccttgctggagcatcactgacggaggaagcaaaggaggagctgaaacccaaaggcaggagagctggcttcatttttatgcctaatccttacctctgatcaaagttcacgtcagcctagctctagggctctggagttcagggggaaagctacaggtcttgcagctggacacagtgtaaagcacggcacrgcctgcacacagctccctatctgaggcagaagaaggaaccagtttggccatttctgcccctttctcttcctgacttcagcccccttctgaatcgtacagcatgcactgggctctccactgcaacaaaagcggggagatggcacagaagatacttcaatcatccctccaagtgctctctaggtagagagtcctcctgcacttctgcacaagctacacttataataaaaaccttcagatttgaaattcctaggtgctgagctgacccttgctatgcaactaaaaacacgctcagccaatact

SEQ ID NO: 28660 - DNA, 599 bp, Chicken  19866894246873_1
  misc_feature (1)..(217): n is any nucleotide
nnnnnnnnnnnnnnnnnnnnnnnnnnnnnnnnnnnnnnnnnnnnnnnnnnnnnnnnnnnnnnnnnnnnnnnnnnnnnnnnnnnnnnnnnnnnnnnnnnnnnnnnnnnnnnnnnnnnnnnnnnnnnnnnnnnnnnnnnnnnnnnnnnnnnnnnnnnnnnnnnnnnnnnnnnnnnnnnnnnnnnnnnnnnnnnnnnnnnnnnnnnnnnnnnnnnnnnnnatacagtcaggatatgctgctcttcatttcttgtgtactgagaacaacaagcaaaacacgaacgtgctgaggccaaactaacrtcttcactctgctgttatacaaggcacgtgagctgagggtagtgaagaatttcaccaccmaaatgtatcccagcagatactagatgatccagttggaaggtccctaacaactctaaggattccttgattctatgatactaatttacttttgatttaaagtaaagactacaaacatcatcaagcrtggcacacaactatagttcagctgmtgtaaccctcccagctggaagggcaggtctgaaatgaaaggatcccgaggaaggtccaaggagcaacaattcagtaatcatgttaaatta

SEQ ID NO: 28661 - DNA, 599 bp, Chicken  19866894246873_2
  misc_feature (1)..(157): n is any nucleotide
nnnnnnnnnnnnnnnnnnnnnnnnnnnnnnnnnnnnnnnnnnnnnnnnnnnnnnnnnnnnnnnnnnnnnnnnnnnnnnnnnnnnnnnnnnnnnnnnnnnnnnnnnnnnnnnnnnnnnnnnnnnnnnnnnnnnnnnnnnnnnnnnnnnnnnnnnnnnnatacagtcaggatatgctgctcttcatttcttgtgtactgagaacaacaagcaaaacacgaacgtgctgaggccaaactaacrtcttcactctgctgttatacaaggcacgtgagctgagggtagtgaagaatttcaccaccmaaatgtatcccagcagatactagatgatccagttggaaggtccctaacaactctaaggattccttgattctatgatactaatttacttttgatttaaagtaaagactacaaacatcatcaagcrtggcacacaactatagttcagctgmtgtaaccctcccagctggaagggcaggtctgaaatgaaaggatcccgaggaaggtccaaggagcaacaattcagtaatcatgttaaattattctttgtggagccacaataatgtactgcttcttaaattattttgtgcactgccgctttc

SEQ ID NO: 28662 - DNA, 599 bp, Chicken  19866894246873_3
  misc_feature (1)..(33): n is any nucleotide
nnnnnnnnnnnnnnnnnnnnnnnnnnnnnnnnnatacagtcaggatatgctgctcttcatttcttgtgtactgagaacaacaagcaaaacacgaacgtgctgaggccaaactaacrtcttcactctgctgttatacaaggcacgtgagctgagggtagtgaagaatttcaccaccmaaatgtatcccagcagatactagatgatccagttggaaggtccctaacaactctaaggattccttgattctatgatactaatttacttttgatttaaagtaaagactacaaacatcatcaagcrtggcacacaactatagttcagctgmtgtaaccctcccagctggaagggcaggtctgaaatgaaaggatcccgaggaaggtccaaggagcaacaattcagtaatcatgttaaattattctttgtggagccacaataatgtactgcttcttaaattattttgtgcactgccgctttcttgtaagagggctatgactactgtgtgtgcagaaaactttgagggagttcttagaaaccgtaattttttgcttgatcattcataacccactacgtaaagagccattcacggtatcgctcttgcg

SEQ ID NO: 28663 - DNA, 599 bp, Chicken  19866894246873_4
  misc_feature (1)..(8): n is any nucleotide
nnnnnnnnatacagtcaggatatgctgctcttcatttcttgtgtactgagaacaacaagcaaaacacgaacgtgctgaggccaaactaacrtcttcactctgctgttatacaaggcacgtgagctgagggtagtgaagaatttcaccaccmaaatgtatcccagcagatactagatgatccagttggaaggtccctaacaactctaaggattccttgattctatgatactaatttacttttgatttaaagtaaagactacaaacatcatcaagcrtggcacacaactatagttcagctgmtgtaaccctcccagctggaagggcaggtctgaaatgaaaggatcccgaggaaggtccaaggagcaacaattcagtaatcatgttaaattattctttgtggagccacaataatgtactgcttcttaaattattttgtgcactgccgctttcttgtaagagggctatgactactgtgtgtgcagaaaactttgagggagttcttagaaaccgtaattttttgcttgatcattcataacccactacgtaaagagccattcacggtatcgctcttgcgcagcctgtattagatctccatagtt

SEQ ID NO: 28664 - DNA, 599 bp, Chicken  19866894246875_1
  misc_feature (1)..(88): n is any nucleotide
nnnnnnnnnnnnnnnnnnnnnnnnnnnnnnnnnnnnnnnnnnnnnnnnnnnnnnnnnnnnnnnnnnnnnnnnnnnnnnnnnnnnnnnnactgatctgacagataccattgcatcttagaaactgggtttaaattagccttttgattaccacaggaagaagggttttaactcttttctcaggtgacaggtggtaggagacaaggaaatagtcttaaattgcaccagaaaagatttagattgcatatcatgaagaatgtcttcacagagagtgtgatcaagcattggaatgggctgtccagraaagtcatagagatctatttcttgaggtatttaagagacacgtggatgtgacaatatgggatattgtttagtgatgggactcagtaggtcaagttgatggttggacttggtgatctttaaggtattttccaaacaagatgattcaagcaaaagcttaacaagacgcagatttccagggaacaaatctggtttgacatcttccacttgcttgatgattcctgtttcctgtgatcctttccactgccacctcacaggctgcacaacctcacttagaactcaggaacttggagcctcagttg

SEQ ID NO: 28665 - DNA, 600 bp, Chicken  19866894246877_1
agattatctgcttctgcagttgagcattaattgtgatttcccccttcctgagcacagcacttgtgcttgctgctattgctttccatccagttggtttctccatggagatggtctccaaggtacttgcagtggcccccagcttggtgtcctcattgaaagtcaggtgccttctttctattgcatcccaaaggtgttaagtgaagtattaaagagatcagggcacaaagaggaccgtggtaacaactcacaaaacctccctccctgcagatagctgtctgttgattgcagctctttgaagcrtcctgatggtgatttaacatctgccatattttcttagcttgttcaggaggctgtcaggcctgctcaagtcaagatatatcacacactgctccctctttatccactatgccagttatcctataaaaaaaggggtgacaagatatatgtttgccaaaaatgcattggttattttttcctttactgtattattatcctctaggtgtttacaaaggggatgtttaattgtttgctccgttacactcagtaacttgttctaggagagtgagccataaagggaacctggtggctgcccctctccaa

SEQ ID NO: 28666 - DNA, 589 bp, Chicken  19866894246887_1
gtgctcagaagaaaaggttagtttaagtttatgaacagaagagctagaagtgaaataactggggccgttggccgttgttctagggtctgattttgtcactggcaaccctgcccatggcaggaggttggaactagatatctttgaggtcccttccaaaccaagccattctacgattctattcatttgccacacaggcttttattgtgtttgcttagatctaattaaatatctaatttccttgtttttccccttgactgcagcctctggtagcagaacagccacttacttttctcatctctyctgattttttatgaactctgtttttcccttccattttgtgtttcactgatctcgcatctgttgcaggaagtggcagatcacacataccaccaccaacactgaagccagaaacccacctacagcctcttttatcaagatgtagtcctacgcaggtagatatatttcctgaggacttcctttaagtcctgtcaccttcacatttctggccaaatgttacacaatgctgtgcatactttccctctctccaggttaaaatacacacagttttgccagcttttaatggattcag

SEQ ID NO: 28667 - DNA, 600 bp, Chicken  19866894246889_1
tttggcagaaaagtgatacacagcaccccttgctcagagcagattgtacagttaccttttagccctttgctagttgttgacagagtttattctgttcacactgcaatatggggatgttagctcatgacttcctttaatgttaaatccagaagttttaaattaggaggcagatgcaaggatttcatcaatatattattattattcattaattatatcaaaagtatccattatataatataaaatgagaagatactataatacatatgtctctgtacagtcctggaaactttcatttgcatrttttccagaggaggtggcctgactttcaggatgaatattagtctttaatgcttaattttcactccaggtttaacacagatgtggtggaatggaggaaaaatacatattcaaacttgcaccaaagctgttgtcttaacatagatggtcctgcagtttgtttatattaaatctgattctattcacacytgaactgctttgttgttctaattgctcacctttattcattaatatataaacttmtctcttggttcacctataaactactcgataatttatttttgacacggtattatttttgcg

SEQ ID NO: 28668 - DNA, 532 bp, Chicken  19866894246889_2
aatatattattattattcattaattatatcaaaagtatccattatataatataaaatgagaagatactataatacatatgtctctgtacagtcctggaaactttcatttgcatrttttccagaggaggtggcctgactttcaggatgaatattagtctttaatgcttaattttcactccaggtttaacacagatgtggtggaatggaggaaaaatacatattcaaacttgcaccaaagctgttgtcttaacatagatggtcctgcagtttgtttatattaaatctgattctattcacacytgaactgctttgttgttctaattgctcacctttattcattaatatataaacttmtctcttggttcacctataaactactcgataatttatttttgacacggtattatttttgcgttacacgttggacctaatgttggttgataatgttctgcttaagcctttggaaggaagctgattcacaacagctgcagggtttcttggtgacattttttttttttctgatcatgcacat

SEQ ID NO: 28669 - DNA, 478 bp, Chicken  19866894246889_3
aatgagaagatactataatacatatgtctctgtacagtcctggaaactttcatttgcatrttttccagaggaggtggcctgactttcaggatgaatattagtctttaatgcttaattttcactccaggtttaacacagatgtggtggaatggaggaaaaatacatattcaaacttgcaccaaagctgttgtcttaacatagatggtcctgcagtttgtttatattaaatctgattctattcacacytgaactgctttgttgttctaattgctcacctttattcattaatatataaacttmtctcttggttcacctataaactactcgataatttatttttgacacggtattatttttgcgttacacgttggacctaatgttggttgataatgttctgcttaagcctttggaaggaagctgattcacaacagctgcagggtttcttggtgacattttttttttttctgatcatgcacat

SEQ ID NO: 28670 - DNA, 599 bp, Chicken  19866894246890_1
  misc_feature (1)..(137): n is any nucleotide
nnnnnnnnnnnnnnnnnnnnnnnnnnnnnnnnnnnnnnnnnnnnnnnnnnnnnnnnnnnnnnnnnnnnnnnnnnnnnnnnnnnnnnnnnnnnnnnnnnnnnnnnnnnnnnnnnnnnnnnnnnnnnnnnnnnnnnnnnaaatttatttgttacagctgtctatgtaattgtcctccacttaaacaacacgtcacagctacccagcatggccgagattacagaaggacagtcaggaaacaaattgtccggtacttctttaaacaaagatgagagaacaagtgtaaatgacacctgttgaatktgagcacaatatttcctttaaactaatggtaatttgagactgagtgagtccaacttttccagggttcccctaagagccatgtttgctttgttgtcttgtgcttcatgttactttgatttatttaattcagaaatctttgcaggctatatagatccaagtgagcagaatattcttagatatactgtttgcagaaacagatgggagaacacatcaaatcccataatatcttgtgtctttatccagaagttcagtgagcctacttagtcggtgtatagccaaattataccttggagatgatg

SEQ ID NO: 28671 - DNA, 599 bp, Chicken  19866894246894_1
  misc_feature (1)..(50): n is any nucleotide
nnnnnnnnnnnnnnnnnnnnnnnnnnnnnnnnnnnnnnnnnnnnnnnnnngcacagtcctgcagccagttcctcgtctatccaacagctcagccatcaaatccaccatctctccaatttagagagtgggatacgttgtgaggatacgttgaaggccttactgaagttcagatagatgacataattggctctttccttgcccactgatgcaactacgccaccataaaaggccaccaggctggccaggcaacctatgagggcatgatgggggcatggcttctcatcaccccgttactgtctrtctgagtggtgaagccacttggggtgtgaaacaagtctagacttgttccataaacccaccgatggctgcacatggacaaggaaaggcgggagcccaccagtgagggtggggagtgctctgtccctctgtgggagcagaggatggcagaggcctcgggtgacctggtcttgtgcctgattgatttggtgggtggcctccctgcctgcaccagggggtggaaccagatgagctttgaggtccttcctgacccaagccattctatgactctggggttctgaaagcattgcatgaagatctca

SEQ ID NO: 28672 - DNA, 600 bp, Chicken  19866894246895_1
tatcatttaagtgcattctcaggtgacacatcaaaaaatgttttgatgccaaagcacaaagcgaaactaaggatttcacattttgcttttagcaacgtaacactgtgaatgctcatcactctcttggatctgtattcatttcgctgtgtagacagtattcatttgaaagaatatgctcagtaaatttaatttcttgaaagcaaaaaagctactaaatactccagtacattttcagtaggtacacaagttacaaagagtaagtagactcctgtggagttaacaaaaggtaatttacaacasctactatctatgtatttttatatacagaaactgagcagccaaagtcgttattctttacagatgtagacatcaaaatgtataaatgtacaaatataatgccacatggaagctttttttccataaacagtaatactggaggaacaacaatttaattgcataatttaaatacacatgaattgaaaaaaaaatttaacagaaacactttggtagagcaattaagctatactattttcaaaattcacatgcaaacatgaaactacaaaactacttgtgagaaacaccacaccaaaatcaggacag

SEQ ID NO: 28673 - DNA, 600 bp, Chicken  19866894246903_1
tattacagacattttcacagtaaacatgaaatagtcctctttcctaatcccccacgtgggacaagtatgagacttttacagtagtgcaaagaatataaaatctagtgtgggcaacagcaaggactaaaacatgtctttaaagtttggcttagtaagtgcacattgaagataggattgtgtttaattataatgagtgcagagactcttttaattttcaagtaaaaattggacctacttggaatgcagttcagttatttcattgcaggtaatgtataagaaggtttctaacctttctggtgraacaatggatgaattgagccaacaaagtgcaaaaacatatgaaaggccgcrcataaactttggtcaaatcttctccaaagactccttctggccaaccayaggttgcagtcattcactgttcatcatgatgattyactcagcactgcatttcaaaagacactagacaaatagactatgggtaacaaaaatctatyttataatrattctattatgaawcttaagaatttacagtatatgaactttcatttgttccaagaagtacttcttcagctcttcaattacaccaatcctgggtaatgc

SEQ ID NO: 28674 - DNA, 600 bp, Chicken  19866894246903_2
ccacgtgggacaagtatgagacttttacagtagtgcaaagaatataaaatctagtgtgggcaacagcaaggactaaaacatgtctttaaagtttggcttagtaagtgcacattgaagataggattgtgtttaattataatgagtgcagagactcttttaattttcaagtaaaaattggacctacttggaatgcagttcagttatttcattgcaggtaatgtataagaaggtttctaacctttctggtgraacaatggatgaattgagccaacaaagtgcaaaaacatatgaaaggccgcrcataaactttggtcaaatcttctccaaagactccttctggccaaccayaggttgcagtcattcactgttcatcatgatgattyactcagcactgcatttcaaaagacactagacaaatagactatgggtaacaaaaatctatyttataatrattctattatgaawcttaagaatttacagtatatgaactttcatttgttccaagaagtacttcttcagctcttcaattacaccaatcctgggtaatgcagagtgcacatctttaccatgcactcaattcctatctaaattcttcatcag

SEQ ID NO: 28675 - DNA, 600 bp, Chicken  19866894246903_3
atctagtgtgggcaacagcaaggactaaaacatgtctttaaagtttggcttagtaagtgcacattgaagataggattgtgtttaattataatgagtgcagagactcttttaattttcaagtaaaaattggacctacttggaatgcagttcagttatttcattgcaggtaatgtataagaaggtttctaacctttctggtgraacaatggatgaattgagccaacaaagtgcaaaaacatatgaaaggccgcrcataaactttggtcaaatcttctccaaagactccttctggccaaccayaggttgcagtcattcactgttcatcatgatgattyactcagcactgcatttcaaaagacactagacaaatagactatgggtaacaaaaatctatyttataatrattctattatgaawcttaagaatttacagtatatgaactttcatttgttccaagaagtacttcttcagctcttcaattacaccaatcctgggtaatgcagagtgcacatctttaccatgcactcaattcctatctaaattcttcatcagaagttttgatatgaggtatagatacatgttcaggttatataacttcat

SEQ ID NO: 28676 - DNA, 600 bp, Chicken  19866894246903_4
ctttaaagtttggcttagtaagtgcacattgaagataggattgtgtttaattataatgagtgcagagactcttttaattttcaagtaaaaattggacctacttggaatgcagttcagttatttcattgcaggtaatgtataagaaggtttctaacctttctggtgraacaatggatgaattgagccaacaaagtgcaaaaacatatgaaaggccgcrcataaactttggtcaaatcttctccaaagactccttctggccaaccayaggttgcagtcattcactgttcatcatgatgattyactcagcactgcatttcaaaagacactagacaaatagactatgggtaacaaaaatctatyttataatrattctattatgaawcttaagaatttacagtatatgaactttcatttgttccaagaagtacttcttcagctcttcaattacaccaatcctgggtaatgcagagtgcacatctttaccatgcactcaattcctatctaaattcttcatcagaagttttgatatgaggtatagatacatgttcaggttatataacttcattgtttcaggaagtgtgttaaaaaataatgtatttg

SEQ ID NO: 28677 - DNA, 600 bp, Chicken  19866894246903_5
tgcagagactcttttaattttcaagtaaaaattggacctacttggaatgcagttcagttatttcattgcaggtaatgtataagaaggtttctaacctttctggtgraacaatggatgaattgagccaacaaagtgcaaaaacatatgaaaggccgcrcataaactttggtcaaatcttctccaaagactccttctggccaaccayaggttgcagtcattcactgttcatcatgatgattyactcagcactgcatttcaaaagacactagacaaatagactatgggtaacaaaaatctatyttataatrattctattatgaawcttaagaatttacagtatatgaactttcatttgttccaagaagtacttcttcagctcttcaattacaccaatcctgggtaatgcagagtgcacatctttaccatgcactcaattcctatctaaattcttcatcagaagttttgatatgaggtatagatacatgttcaggttatataacttcattgtttcaggaagtgtgttaaaaaataatgtatttggtgtttctttaaaaacaaacaaacaaacacgcctttcacagtacacttcgtcttcaayat

SEQ ID NO: 28678 - DNA, 600 bp, Chicken  19866894246903_6
ctcttttaattttcaagtaaaaattggacctacttggaatgcagttcagttatttcattgcaggtaatgtataagaaggtttctaacctttctggtgraacaatggatgaattgagccaacaaagtgcaaaaacatatgaaaggccgcrcataaactttggtcaaatcttctccaaagactccttctggccaaccayaggttgcagtcattcactgttcatcatgatgattyactcagcactgcatttcaaaagacactagacaaatagactatgggtaacaaaaatctatyttataatrattctattatgaawcttaagaatttacagtatatgaactttcatttgttccaagaagtacttcttcagctcttcaattacaccaatcctgggtaatgcagagtgcacatctttaccatgcactcaattcctatctaaattcttcatcagaagttttgatatgaggtatagatacatgttcaggttatataacttcattgtttcaggaagtgtgttaaaaaataatgtatttggtgtttctttaaaaacaaacaaacaaacacgcctttcacagtacacttcgtcttcaayatactgatag

SEQ ID NO: 28679 - DNA, 600 bp, Chicken  19866894246903_7
aagtaaaaattggacctacttggaatgcagttcagttatttcattgcaggtaatgtataagaaggtttctaacctttctggtgraacaatggatgaattgagccaacaaagtgcaaaaacatatgaaaggccgcrcataaactttggtcaaatcttctccaaagactccttctggccaaccayaggttgcagtcattcactgttcatcatgatgattyactcagcactgcatttcaaaagacactagacaaatagactatgggtaacaaaaatctatyttataatrattctattatgaawcttaagaatttacagtatatgaactttcatttgttccaagaagtacttcttcagctcttcaattacaccaatcctgggtaatgcagagtgcacatctttaccatgcactcaattcctatctaaattcttcatcagaagttttgatatgaggtatagatacatgttcaggttatataacttcattgtttcaggaagtgtgttaaaaaataatgtatttggtgtttctttaaaaacaaacaaacaaacacgcctttcacagtacacttcgtcttcaayatactgatagcactcatggaccta

SEQ ID NO: 28680 - DNA, 542 bp, Chicken  19866894246903_8
tyttataatrattctattatgaawcttaagaatttacagtatatgaactttcatttgttccaagaagtacttcttcagctcttcaattacaccaatcctgggtaatgcagagtgcacatctttaccatgcactcaattcctatctaaattcttcatcagaagttttgatatgaggtatagatacatgttcaggttatataacttcattgtttcaggaagtgtgttaaaaaataatgtatttggtgtttctttaaaaacaaacaaacaaacacgcctttcacagtacacttcgtcttcaayatactgatagcactcatggacctaactcattcctaactttaaaacatattaattcctcaaagattaatcaaaccaacacgtttcacatttgcaattgagctctctcaaataagctttgtgctaccacaatctggtacattgacacagcatgtgaaaatcactctagaattagattcaggtttctcacagagctttgaaagctaaaatcaaatgttctccaggaattaaaaagtaaaggttaa

SEQ ID NO: 28681 - DNA, 574 bp, Chicken  19866894246904_1
tcttatgatgactactagtgaggctttttctatccatgaacctccacccatgtatttctacagacccacctttcaatgatctatgcaataacagaaggaaaaaaagaaaaataaagttgatgaaatatttcaaaatctgagcagataatatttccatttagccttgtaaatatgtttaattgtgcacattacttaaatatacgaattaatggcttcaaagtcttgtaaacagtgttgtaaaaaatgtataacatgttgtaaaaaaatgtaggatagaacttttttacttattggaaactkcttggaagtgatggctacttaaagagaatgagaaaatctagggaacagccataaatcatattgtgtaggattctatttcaaatacatagtagtttattccctgctttgtttgcttcctgatacatttctgagatatatatttggaaggaaaatcaatcatcccttagccctttactctttcctgacacagagtagtactcagtatttttttgcaaggtttcagtgactggtccttttctgtcccttttttcccttgattctgtacaaggagtca

SEQ ID NO: 28682 - DNA, 600 bp, Chicken  19866894246906_1
gtcatccttcagggtgagcaaacgtaacgataattatagcaatttgattttaaaaaggtcttaaagatgtttcacttctttcccaaaataaagcacagccatacggttctcattgtttcttcttaatgctgttgactgattggagcttctgcctgctatccgaaggcatggctataggctggtgtgagaccatttgctgttcagagggaaccacatcagtgccccgagcactgtctgtaggcatctctgcaaagtcaaggaaggctcctctgcacctggctctgctgtgtacccacaccrctgcgctcttgcatggctcatgagagctgccacaggcacctggggtgggggcaaaccatagggtttggatttttgtcacataattatttcagttagaagggacwtttatttttatgtatgcgatgcaagtatgtcattttaggttctgcgtattttctgatgggttgtacaagtttttactacaccagaaggatatgcctgacataaatcaaatgtaaggtcacaatgtgttaaaaaatagaaactactctattttggacatgagatcctttgggaaagagagctggttggctttctagg

SEQ ID NO: 28683 - DNA, 600 bp, Chicken  19866894246906_2
ggttctcattgtttcttcttaatgctgttgactgattggagcttctgcctgctatccgaaggcatggctataggctggtgtgagaccatttgctgttcagagggaaccacatcagtgccccgagcactgtctgtaggcatctctgcaaagtcaaggaaggctcctctgcacctggctctgctgtgtacccacaccrctgcgctcttgcatggctcatgagagctgccacaggcacctggggtgggggcaaaccatagggtttggatttttgtcacataattatttcagttagaagggacwtttatttttatgtatgcgatgcaagtatgtcattttaggttctgcgtattttctgatgggttgtacaagtttttactacaccagaaggatatgcctgacataaatcaaatgtaaggtcacaatgtgttaaaaaatagaaactactctattttggacatgagatcctttgggaaagagagctggttggctttctaggcctggcaacagacatgggagcagctctcagtgctttctcgtgctttggcagaggcatatgatggccgcggtgtcacctctgctccccacagctctgcacaagcc

SEQ ID NO: 28684 - DNA, 600 bp, Chicken  19866894246906_3
ttatttttatgtatgcgatgcaagtatgtcattttaggttctgcgtattttctgatgggttgtacaagtttttactacaccagaaggatatgcctgacataaatcaaatgtaaggtcacaatgtgttaaaaaatagaaactactctattttggacatgagatcctttgggaaagagagctggttggctttctaggcctggcaacagacatgggagcagctctcagtgctttctcgtgctttggcagaggcatatgatggccgcggtgtcacctctgctccccacagctctgcacaagcckctgggctgcctgagtgggagttgtgctgaaagcagaagtacccacagcgcgttcctcaccacctgcacccacagcccctgcatcccacagccgcgggcactggggcagccgggccgcacgcctcctcttctccagacagaacctttgctgttccctcggccgctccccataagacttgtgctccagacccttcacagcagtgttgtccttctctggatgtgctccagaagccatcccacccagcgctgggatgtgacgcaccaggcatcggctgcatccggccctggaggcagtggtgtg

SEQ ID NO: 28685 - DNA, 599 bp, Chicken  19866894246909_1
  misc_feature (1)..(139): n is any nucleotide
nnnnnnnnnnnnnnnnnnnnnnnnnnnnnnnnnnnnnnnnnnnnnnnnnnnnnnnnnnnnnnnnnnnnnnnnnnnnnnnnnnnnnnnnnnnnnnnnnnnnnnnnnnnnnnnnnnnnnnnnnnnnnnnnnnnnnnnnnnnattttggcccacctttttatgaattttcatccaatatatgtttgacaatcctgttcatggtaaaacatgaagaatacttatgttcttgttgatatgcttttgtaaaaaatgtatcttgttttttctcagtcttgaggataccttacagacagaaggatacrtttctaaatctgaaatgaaatagagaggaaagagcattcagttattcacacagagggtggtgacacactggaacaggttgcccaaggaggctgtggatgccccattcctggaggcattcaaggccaggctggatgtggctctgggcagcctggtctggtggttggtgaccctgtgcatggcagggggttgaaactagatgagcattgtggtccttttcaaccaggccattctatgattctattattctaatttggactgccctgctttcaaaatctaatgactaccataaaatgtcttc

SEQ ID NO: 28686 - DNA, 600 bp, Chicken  19866894246910_1
atctccttagtcatccacaatttaaaatataattcagaaatagagtgagcagtataaccataagattcatcataaatattctctttgtaagtgttctaatgctgaaagatggaatctagtagtgggcagagatttacatccatgtctctaatgcaatattagataaatatcctgtggttggagatgagtatccagaggattcatgaagcaaggaagaagcagtcttttcatctactgcaccttgtctgctttctaaccaaatactgaactgctagaaaagtgatggcaaactttgggggkttcagagaaggactagaaagggtgctaaaatgttcagtgcagtgtggtagaacaacacagggaagacaraagcagcgatctgaggaagaaaggagttgtaaattgtgtgatagatccatctggtctattattaactgtcctatcaaacatagttttccctgtggcttcctattcaaaaaatttagcaaaacaaaagtctcttttaartacaaacaaccaaaaccactatctaggctacagactgcagctttatcatttactgtctaatatgatttcttcctgtcattgaggtagctagtt

SEQ ID NO: 28687 - DNA, 600 bp, Chicken  19866894246910_2
tcataaatattctctttgtaagtgttctaatgctgaaagatggaatctagtagtgggcagagatttacatccatgtctctaatgcaatattagataaatatcctgtggttggagatgagtatccagaggattcatgaagcaaggaagaagcagtcttttcatctactgcaccttgtctgctttctaaccaaatactgaactgctagaaaagtgatggcaaactttgggggkttcagagaaggactagaaagggtgctaaaatgttcagtgcagtgtggtagaacaacacagggaagacaraagcagcgatctgaggaagaaaggagttgtaaattgtgtgatagatccatctggtctattattaactgtcctatcaaacatagttttccctgtggcttcctattcaaaaaatttagcaaaacaaaagtctcttttaartacaaacaaccaaaaccactatctaggctacagactgcagctttatcatttactgtctaatatgatttcttcctgtcattgaggtagctagttttagggctttcttatttactcttgtggaattactgggttttctctgtgcatagacaacacaggcatcya

SEQ ID NO: 28688 - DNA, 591 bp, Chicken  19866894246910_3
gcaaggaagaagcagtcttttcatctactgcaccttgtctgctttctaaccaaatactgaactgctagaaaagtgatggcaaactttgggggkttcagagaaggactagaaagggtgctaaaatgttcagtgcagtgtggtagaacaacacagggaagacaraagcagcgatctgaggaagaaaggagttgtaaattgtgtgatagatccatctggtctattattaactgtcctatcaaacatagttttccctgtggcttcctattcaaaaaatttagcaaaacaaaagtctcttttaartacaaacaaccaaaaccactatctaggctacagactgcagctttatcatttactgtctaatatgatttcttcctgtcattgaggtagctagttttagggctttcttatttactcttgtggaattactgggttttctctgtgcatagacaacacaggcatcyacagctgcataactcctttattgctagraaatgagtaggatatacccatcttttaacagtaatgcggttaaaaatatactcttttccgtaaggcatgtatacaatctgaattataaaggacagagtaaag

SEQ ID NO: 28689 - DNA, 430 bp, Chicken  19866894246910_4
raagcagcgatctgaggaagaaaggagttgtaaattgtgtgatagatccatctggtctattattaactgtcctatcaaacatagttttccctgtggcttcctattcaaaaaatttagcaaaacaaaagtctcttttaartacaaacaaccaaaaccactatctaggctacagactgcagctttatcatttactgtctaatatgatttcttcctgtcattgaggtagctagttttagggctttcttatttactcttgtggaattactgggttttctctgtgcatagacaacacaggcatcyacagctgcataactcctttattgctagraaatgagtaggatatacccatcttttaacagtaatgcggttaaaaatatactcttttccgtaaggcatgtatacaatctgaattataaaggacagagtaaag

SEQ ID NO: 28690 - DNA, 402 bp, Chicken  19866894246910_5
tgtaaattgtgtgatagatccatctggtctattattaactgtcctatcaaacatagttttccctgtggcttcctattcaaaaaatttagcaaaacaaaagtctcttttaartacaaacaaccaaaaccactatctaggctacagactgcagctttatcatttactgtctaatatgatttcttcctgtcattgaggtagctagttttagggctttcttatttactcttgtggaattactgggttttctctgtgcatagacaacacaggcatcyacagctgcataactcctttattgctagraaatgagtaggatatacccatcttttaacagtaatgcggttaaaaatatactcttttccgtaaggcatgtatacaatctgaattataaaggacagagtaaag

SEQ ID NO: 28691 - DNA, 599 bp, Chicken  19866894246918_1
  misc_feature (1)..(14): n is any nucleotide
nnnnnnnnnnnnnntttcatgggatttcaaaagatccttcaggaactaatttagaactcggtgcagaagactgattgaggtcataatgtaaaactgttttgtctatctttagtttcctaagctaaagatggaatgagaattcccaagtggttatcagggcatacgtgcactcctttgctgcatcccacccacctcacattgtatggtagcctttcctttgatgcacttaggtgtttaccctggaaagttgtgtatgtgaatctccacagctggttatgaaatggcatttcaacagaaaakgaatgtttctgacaacctgggactgttgataattaacctttgtattcttactatcttttcaagtccgttatgttactaaagacyctaaatacagtaagacagaaagagaagccactgcatagctattgctaaggaaccaaaccttagytttggtttcaatctggtttgccaatagtgtgataactaattgtctggtgcagcttgcatactttggagatctgatcaccagatatttctgctgttgatgactgactgttcgagtaaactgggataattcagaggaagagttaggattcttt

SEQ ID NO: 28692 - DNA, 600 bp, Chicken  19866894246918_2
aatgtaaaactgttttgtctatctttagtttcctaagctaaagatggaatgagaattcccaagtggttatcagggcatacgtgcactcctttgctgcatcccacccacctcacattgtatggtagcctttcctttgatgcacttaggtgtttaccctggaaagttgtgtatgtgaatctccacagctggttatgaaatggcatttcaacagaaaakgaatgtttctgacaacctgggactgttgataattaacctttgtattcttactatcttttcaagtccgttatgttactaaagacyctaaatacagtaagacagaaagagaagccactgcatagctattgctaaggaaccaaaccttagytttggtttcaatctggtttgccaatagtgtgataactaattgtctggtgcagcttgcatactttggagatctgatcaccagatatttctgctgttgatgactgactgttcgagtaaactgggataattcagaggaagagttaggattcttttttactttaggaaataaaaagcattttgcattgaatgcagaatcatttgagataagtgatgagattactcagtaaacgcagaata

SEQ ID NO: 28693 - DNA, 600 bp, Chicken  19866894246918_3
ggttatcagggcatacgtgcactcctttgctgcatcccacccacctcacattgtatggtagcctttcctttgatgcacttaggtgtttaccctggaaagttgtgtatgtgaatctccacagctggttatgaaatggcatttcaacagaaaakgaatgtttctgacaacctgggactgttgataattaacctttgtattcttactatcttttcaagtccgttatgttactaaagacyctaaatacagtaagacagaaagagaagccactgcatagctattgctaaggaaccaaaccttagytttggtttcaatctggtttgccaatagtgtgataactaattgtctggtgcagcttgcatactttggagatctgatcaccagatatttctgctgttgatgactgactgttcgagtaaactgggataattcagaggaagagttaggattcttttttactttaggaaataaaaagcattttgcattgaatgcagaatcatttgagataagtgatgagattactcagtaaacgcagaataaaaactgggagagatgtaattcattggctgttttttttcaagctgctgacatgatgtgagagtt

SEQ ID NO: 28694 - DNA, 473 bp, Chicken  19866894246932_1
cttcttactcttatgctgtctttcattgctgccccagagagacccacaagttaaatatgagaaacaggacaatatgcaaacagaataagatcataagaggtaatcgggtctttcatgaaacaagtagaacaataaaaattttaaagctttaaggatatgtccaaatattcctacacaataattttatttgctcaaataatcttgaattactgagtgtattatgtaaaaaaatttaaaagtgcataatgatagtcaaaggttaatattaattcagacatttcctgcagagaagactacaayactggtaggaagaagatttggaactctacacagctgaagcaagcatacctgaaaaccatcagcaactcatcttttcctattaaagcagattatctatgcaattaactgaagagactttcccagttcacccagaaaatatacctcctgcttcttcttaaatatgcatatctttt

SEQ ID NO: 28695 - DNA, 482 bp, Chicken  19866894246933_1
tggaagcattttgtttttgttaaaatgaaacaaaacaaaaacaaaaaaaaacaacaaccaaactttatttggagcttagggagtgagggaaaggtggaactgagcaatgtattttgaggtctggctctgtgttagtcgctctggtatctctgaactgtaaccccggtggtatcacttctgcaggggagttttttggagcacgtgggagggtttggtcatttatgtaggcctgcactcaaattggtaagcagttgcagagcttctggaagtttatacaaagatgtaaagtttaactttttytaattattacttttttccagttagcacagcagaggattgggtttgtgtatgtcagtgtgttaaaatagattatgcaatcagttctgtttggatttttattgctgtttgtcctagttatatagagttgccatgttacccccacactttgagctgctagtactgtaaataggatgagtggtaga

SEQ ID NO: 28696 - DNA, 599 bp, Chicken  19866894246935_1
  misc_feature (1)..(11): n is any nucleotide
nnnnnnnnnnntattttttcagaccaatttttaaatctagctattataatatgctttatatataacatgcttagaattactttttaattaaatgttcttcagaggtgttacattaacaacacaacaaacatcagtaagttcaaaaagtatgcttaggcaagactgcaaatcttacttcattctcgactgatagtgttgtggacacttggaagcaaaaatactaatataacataacctaataatatacaagacttacataaaaaaccttttgcctttgcatttcttaatgaaaacactggrattayttgcatgcatttcaaatgatcagatggattttctttctttttttaaaattacagttatagaagttgatttgattgatagtacgtttcagggaggggtgttgttttacagaggtacacctagctccaacaactgtaaaaggctgagaaaaaacataaaaacccaggaatgcttttgaaacttttgaatgtatttaaggaaagcataacaataaaaaaaatgacagaagaaaaagcagaaaagaatagcagaagattaaaaaaaagaaaaaacaacaacaaagcaaaataaacaaa

SEQ ID NO: 28697 - DNA, 599 bp, Chicken  19866894246935_2
  misc_feature (1)..(6): n is any nucleotide
nnnnnntattttttcagaccaatttttaaatctagctattataatatgctttatatataacatgcttagaattactttttaattaaatgttcttcagaggtgttacattaacaacacaacaaacatcagtaagttcaaaaagtatgcttaggcaagactgcaaatcttacttcattctcgactgatagtgttgtggacacttggaagcaaaaatactaatataacataacctaataatatacaagacttacataaaaaaccttttgcctttgcatttcttaatgaaaacactggrattayttgcatgcatttcaaatgatcagatggattttctttctttttttaaaattacagttatagaagttgatttgattgatagtacgtttcagggaggggtgttgttttacagaggtacacctagctccaacaactgtaaaaggctgagaaaaaacataaaaacccaggaatgcttttgaaacttttgaatgtatttaaggaaagcataacaataaaaaaaatgacagaagaaaaagcagaaaagaatagcagaagattaaaaaaaagaaaaaacaacaacaaagcaaaataaacaaacagaa

SEQ ID NO: 28698 - DNA, 600 bp, Chicken  19866894246938_1
gttcagtttgtaactgtgttaaatgtaaatgtatgtggagatggtatgtaggtgcagtaaataacataataaaactaatcagcatattcattttaagcatatgctggcaatataagtggaaattgaaattctgactgcacttgacatctttcacattgagtgggtaaaaaacacaacgttataagaagactactgaaaggaaactctatcaaagttataagatcccttttgctgcattcatgaattcatatttgaaaaatcagatatcagaacccaagtcaccagaaagttgaaagagaktttaggtctacagtagggtwtcctcacattacaatccttgcagagaastgtacaaaggtctgtgtctgcaaaagcttcccggtgaccttctcagtgagcaacaggaggttggaagtctctcagattactttctgaagtgggtaagaaattagtactgcatagcaatgcatatgctacatttataattgctttagttacagaaaagaaatattttttccacagacaaccctgcagtaatcatcattctttccagctatcaaaaccttatcaaaactttatcaaaacacttaggagctcatt

SEQ ID NO: 28699 - DNA, 600 bp, Chicken  19866894246938_2
aaatgtaaatgtatgtggagatggtatgtaggtgcagtaaataacataataaaactaatcagcatattcattttaagcatatgctggcaatataagtggaaattgaaattctgactgcacttgacatctttcacattgagtgggtaaaaaacacaacgttataagaagactactgaaaggaaactctatcaaagttataagatcccttttgctgcattcatgaattcatatttgaaaaatcagatatcagaacccaagtcaccagaaagttgaaagagaktttaggtctacagtagggtwtcctcacattacaatccttgcagagaastgtacaaaggtctgtgtctgcaaaagcttcccggtgaccttctcagtgagcaacaggaggttggaagtctctcagattactttctgaagtgggtaagaaattagtactgcatagcaatgcatatgctacatttataattgctttagttacagaaaagaaatattttttccacagacaaccctgcagtaatcatcattctttccagctatcaaaaccttatcaaaactttatcaaaacacttaggagctcattagtttaatagaacattaaag

SEQ ID NO: 28700 - DNA, 600 bp, Chicken  19866894246938_3
taggtgcagtaaataacataataaaactaatcagcatattcattttaagcatatgctggcaatataagtggaaattgaaattctgactgcacttgacatctttcacattgagtgggtaaaaaacacaacgttataagaagactactgaaaggaaactctatcaaagttataagatcccttttgctgcattcatgaattcatatttgaaaaatcagatatcagaacccaagtcaccagaaagttgaaagagaktttaggtctacagtagggtwtcctcacattacaatccttgcagagaastgtacaaaggtctgtgtctgcaaaagcttcccggtgaccttctcagtgagcaacaggaggttggaagtctctcagattactttctgaagtgggtaagaaattagtactgcatagcaatgcatatgctacatttataattgctttagttacagaaaagaaatattttttccacagacaaccctgcagtaatcatcattctttccagctatcaaaaccttatcaaaactttatcaaaacacttaggagctcattagtttaatagaacattaaagagagtaactgtaagcatggaattaacta

SEQ ID NO: 28701 - DNA, 600 bp, Chicken  19866894246938_4
tctacacagggagatagtgacaggacaaaggagaatggctttaaagtaaaaaagaggaaatacaggttagatgtgaggaagacattttttactcagggagtggtgaagcactggaacaggttgcccagagatgttgtggatgccccatccctgaaagccaggctggatggggccctgggcagcctgatctagaggtcagcaaccctggctatggcaaggaggctggaactagatgatctttaagggtgcttccaagctaagccattctattattctatgaataacaaacaagcatcaagyctggctcataaagtaagaacaagagactgaaaagcagcaggctatgcagcgatggccactgctacagaatctacatcgtattagaggtcatacgcgaagttacaccttgtgagcactcatccagacttacaatgcctttatgtctgtaattgcatcaattttgattaatttggaagcatacaatggcatttattttcagtactctccttagaatggtgaagaaaccagttacttctcaaatcagacgtaactggtaaaaaagctcttacctgctgcctcctttagcaaaagcaatgtcac

SEQ ID NO: 28702 - DNA, 600 bp, Chicken  19866894246948_1
ccagaaagagctgtagttcccaatttttgcaacgtctccgctctgattggcaaggaaaggtggtcagagttggaatctgcagtcgcacagtgcttaaaaaccccaaagatgctccaggcactgcatgcttcgagagccaggcgcggccctaagggcagtagccatgggaagcaggcgttttgccaaagctctgctgcggtcagtgtgctttgctgatagaaatcattcatgcttttggcagtagtgtctgtatctggggttgtgatgctcaaagtccattgatgactagttaaaaaaatrcgcagatagataagctgactattcttgcaccgaaagcagaataaaggggtcagttctgagcagtgtgccggaccctgctggtgygacatcccagtgccagcacctccctctggaacgggctgcgggagctcacagctgctttttttaacctatattttaaccaacctttaattaattatttcagttcctggaaatttctgcttaggatttgattgtaagagccaggtgtccagaagattaatttgtcctttyggagtgcagacatactgttgctgttttataatcatcgacggtggttgc

SEQ ID NO: 28703 - DNA, 600 bp, Chicken  19866894246948_2
gcacagtgcttaaaaaccccaaagatgctccaggcactgcatgcttcgagagccaggcgcggccctaagggcagtagccatgggaagcaggcgttttgccaaagctctgctgcggtcagtgtgctttgctgatagaaatcattcatgcttttggcagtagtgtctgtatctggggttgtgatgctcaaagtccattgatgactagttaaaaaaatrcgcagatagataagctgactattcttgcaccgaaagcagaataaaggggtcagttctgagcagtgtgccggaccctgctggtgygacatcccagtgccagcacctccctctggaacgggctgcgggagctcacagctgctttttttaacctatattttaaccaacctttaattaattatttcagttcctggaaatttctgcttaggatttgattgtaagagccaggtgtccagaagattaatttgtcctttyggagtgcagacatactgttgctgttttataatcatcgacggtggttgcaaggagcaaggaaggatgcagtaaaatacggccgtgctgacagtgtagaagtagcgcatcttcttgctgcttgatattttgata

SEQ ID NO: 28704 - DNA, 600 bp, Chicken  19866894246948_3
tctggggttgtgatgctcaaagtccattgatgactagttaaaaaaatrcgcagatagataagctgactattcttgcaccgaaagcagaataaaggggtcagttctgagcagtgtgccggaccctgctggtgygacatcccagtgccagcacctccctctggaacgggctgcgggagctcacagctgctttttttaacctatattttaaccaacctttaattaattatttcagttcctggaaatttctgcttaggatttgattgtaagagccaggtgtccagaagattaatttgtcctttyggagtgcagacatactgttgctgttttataatcatcgacggtggttgcaaggagcaaggaaggatgcagtaaaatacggccgtgctgacagtgtagaagtagcgcatcttcttgctgcttgatattttgatagaaaccttttatcgctttaaaaaccggctgtgtatcaatatgctacgttaaaaacagaagtaggaaactgcaggcttttaatttttgccatttgaaccctcttaccttggatgaacgcagcgtgtaaattatagttcccatgaggtaaaaatcagtcaaatgctactt

SEQ ID NO: 28705 - DNA, 600 bp, Chicken  19866894246950_1
aacacaacatatgcagaaattgtacaggattcagctcaggggggtaagttatttgtatttaggtgtttacatacaggtgtccacataggtactggttgtatacattcccattgtaattgctatggtttagcctagcacgcggctgagtgccacacagtcattcactcactctctcctcttcccaaagagatagggatagaatcaaaaacacaacttgtgggttgaaataaatctatttactacgatagagaaaaggataatagttatgataccacttgttatatacattcatacatataygaattcatatgaagaataaatgataacaagcaattgctcaccacccaccaactaatgcccagttaaatcccagcaagtgaaagagagtgagatgaactctcaccctcttcaaaaccctccttccacatgatgacaagtagtatggaatatccctttggccagtttgtcagctgtcctgattctgccccttcccagccctttgttactatcaactgagacactgggatggcgttggctctgtacaatactacttagcaataactataatcattagtatgttatcagaattgttttttctcc

SEQ ID NO: 28706 - DNA, 599 bp, Chicken  19866894246956_1
  misc_feature (1)..(188): n is any nucleotide
nnnnnnnnnnnnnnnnnnnnnnnnnnnnnnnnnnnnnnnnnnnnnnnnnnnnnnnnnnnnnnnnnnnnnnnnnnnnnnnnnnnnnnnnnnnnnnnnnnnnnnnnnnnnnnnnnnnnnnnnnnnnnnnnnnnnnnnnnnnnnnnnnnnnnnnnnnnnnnnnnnnnnnnnnnnnnnnnnnnnnnnnnnnnacccctggggctgacgaaagcccacagggagcagcacagggagcagtgcctctgaagccaggaatgccgcgtgcaaagagctcccactgcctgctgccagagtcagtccctraaagaactaaacctgagttgacggggctttcctctccctgatgttctgcacagcttgctgtgcctctcccacagtgactgggtgttgtttggatttaacctggcatgcctccacccgatgtacatcacaggcctcggaggggctgcggccgtttcccccagcagagtgccagatgcctcctgctcggcggccgggtcttcctttctacagtgtaaacctacactggtttgtttcttgtacacagaaacagactatgctggccttacaagttcaggttaactggggcatgggtgaggtaa

SEQ ID NO: 28707 - DNA, 600 bp, Chicken  19866894246958_1
ttgcctgcacagtgtgcgtgtaaggtgacggtgtggttgtgacagctgccaagcaagcagcggggtctgcactcattgcattgcctatctttgtcttttcctgcagaagcccaacgcaggccttactatgctgactattctccagcacggaaatacattcacaccctctgcaccagccactatctcgacctcttcatcaccttcatcattggagtcaacgtcatcactatgtcgatggagcactacaaccagccaaaggtaagagccaactgtcaacgtgtgaagcacagccatcttttsctaagaaaacaacggtccaaatattttctctccttatcccagctctgactgactctcagactgtaaaacagtcccatgttttagtccaggattttagagcattctgttaatggatataacaacgaagctaatgcatgcagagcaatgtttctcttcttcgatgagtttgaaatgaatgattctaagtatagcctttctttttttcttcacatatccccacgtccttttttccaaacttctggtataaatcacatagcctgtacatttgctgcatatattaaccttccattgagttattgt

SEQ ID NO: 28708 - DNA, 599 bp, Chicken  19866894246959_1
  misc_feature (1)..(50): n is any nucleotide
nnnnnnnnnnnnnnnnnnnnnnnnnnnnnnnnnnnnnnnnnnnnnnnnnncgatttggtaaaattccctttattttggctactaataagcagtatgtgttgtgaggccctccatttttgcatacctttgcaaaatctaaagacaattgcttttagcaaaaatattgtcatgccttcagtccaggaatgtaaaaaggaatttatggggggaactatccttagaggcattcagtcattcaatcaattttcttgagattactaacatccgtaaaagacagtgcaaggtttaaagctttgcctytgaggtttgtgtctgtgattctgaggttttcagtacttgttggttgtttgaagatagtagtttctattcctttacaagcttctcttttacattacaataatgtatattcagtgtatgatcttcattttcagcatgcttatgtcattaagagagctacaaactttctggaagataaactaaaagaaggcatttcggataattatacattagcacttgtgacgtatgctttgtcatgggcaaaaagtacraaagcaaaggaagctttgagtatgctgaatgagagagcagaacgacaaggt

SEQ ID NO: 28709 - DNA, 600 bp, Chicken  19866894246959_2
ttgagattactaacatccgtaaaagacagtgcaaggtttaaagctttgcctytgaggtttgtgtctgtgattctgaggttttcagtacttgttggttgtttgaagatagtagtttctattcctttacaagcttctcttttacattacaataatgtatattcagtgtatgatcttcattttcagcatgcttatgtcattaagagagctacaaactttctggaagataaactaaaagaaggcatttcggataattatacattagcacttgtgacgtatgctttgtcatgggcaaaaagtacraaagcaaaggaagctttgagtatgctgaatgagagagcagaacgacaaggtattgcacaacagtcttctatggttgtacagatggatttttttcaattttacatatatatatatatagatatagaattagagaaaaagataatccttcaaaattaaaatatgttctcagcttgctagataatacattagggacttcaaataaagctttaattcataacaaagctaagcctttctgtcttaatttctgtgttctcgatgggagaaccatgatgctgtcaaaaaggatgatttgtcagttct

SEQ ID NO: 28710 - DNA, 600 bp, Chicken  19866894246964_1
gaaaagttacttgtcattactgttagacgacttcttatctttaaactaaattttgctccagacagtttaaaattggtacatgattgttacaaactcagcacaagctacataaagatgaagtgttaaagttgattttagtttcaaatctaggcagctgtggggatatggctccgcttaatcaaggcaaagccatcagaaatttccaaggaagtaagcccaccagcttgcagcagatcatttgaagttctgcacatcctgaaaattttcctgctaaccagattatgcatgtagttcccaccragaacagtgggaattacacttacaattaagagtaacaaaaaacttacgaggaggtaatactgaactaagttttttgctttttgtttcctcacgcttaaaatctgaactttctcttctacatcactgagtcctgtacaaataaagggagatgacctggtggccacagcagctttcccacaagttcgcatttgaaggacagagacaaccaaggacaaccaagtccttctcctaataacagaaaacccggactgccagcagccagtgctgaagtcctaattagaacttcgctgaggaagcttg

SEQ ID NO: 28711 - DNA, 600 bp, Chicken  19866894246965_1
aaggaagaagagaaaggtctgaacactatccttggctgggggtgaagtgagacaaaaagactcccacagtgaaagtcattatcagcacttggaaaattaaaggccagcactctataagcatggtcataggaacttcaccctctaggatgtaagagaaaactcacaatattaaattaactccttatgtcccatagcaggggacataggctatgtctgaacagttaatactctgctgagttgctctggaaaagcacctggactggtagcttcaaagaagtttcatgacgaatgggtagaatragaagaatcatttcatggaattccttccctgacctcctaatctagcaatttcttctgttttacatgacctgcttctgctcatccaaaggacacctaaactctgcaccagtcagaccacaggagtgactgcaatagcaccaaagagtgatccataacatgccatgtcatttgctttgctgtgtgatgaaatactcaaccaatagaagcttcttcagttcctctccatatttttttaataattaataaaaataacaaggtggtaacaacaatcatagcttttgttacttccatggacacagc

SEQ ID NO: 28712 - DNA, 599 bp, Chicken  19866894246966_1
  misc_feature (1)..(184): n is any nucleotide
nnnnnnnnnnnnnnnnnnnnnnnnnnnnnnnnnnnnnnnnnnnnnnnnnnnnnnnnnnnnnnnnnnnnnnnnnnnnnnnnnnnnnnnnnnnnnnnnnnnnnnnnnnnnnnnnnnnnnnnnnnnnnnnnnnnnnnnnnnnnnnnnnnnnnnnnnnnnnnnnnnnnnnnnnnnnnnnnnnnnnnnnctttgatagcaatgggggaaagacaaggaaatccaagtgggatgggcaaagcaatgaaaccccagaacagagagccccatctttccccacgttacaccagaaatggagaagaaatrgggacgatcctgaggtgtctgcattccaacacagccctcaaataggccctgggagaaggcaaagcaaaagcaacggcttggaagcgtgagcttggatccagtccaccatacaggaaaaaaccaacagccctagggctctacatgattgaaatcagggttttccagcccagaacacaccccaggacagctcatatctgtggcccctgagccaggaaaccccgaggctccaagagctcrcattagctgagaattcggccctatagtcgctctctaaatatctatacacacacacacacaat

SEQ ID NO: 28713 - DNA, 600 bp, Chicken  19866894246966_2
atgaaaccccagaacagagagccccatctttccccacgttacaccagaaatggagaagaaatrgggacgatcctgaggtgtctgcattccaacacagccctcaaataggccctgggagaaggcaaagcaaaagcaacggcttggaagcgtgagcttggatccagtccaccatacaggaaaaaaccaacagccctagggctctacatgattgaaatcagggttttccagcccagaacacaccccaggacagctcatatctgtggcccctgagccaggaaaccccgaggctccaagagctcrcattagctgagaattcggccctatagtcgctctctaaatatctatacacacacacacacaataactgtatgggaaatggctgaaaactgctgaccaaacaagtccagagagcccgttcctgccattccacctgctcctccagccctgccccatcagctgtgctttctgctcctgacacccagattaatgactaattactcgccccataatgagcgcaggtgtttaactttcagctcaccttccatggagccggctcttggggctgggtgccggggcactcaggctttgcctcgttatcta

SEQ ID NO: 28714 - DNA, 600 bp, Chicken  19866894246967_1
atgggcacttaaactgggtaatgtaaacaagaacatttcaaacaacaacaataacaacaaaaaacatgtatcttaaaagagagtgcttgtgaaattccattgaaaggaagtgcaggaaccacaggttcaggaactgctaggtgctacaacaactatgggtctaatgttttcactgagcattatgaagctacaaagaatagatcctgtgatgggcagacgatgtttagagttgtgtcttataatccaaatggactacagtgcttcaaaacacagcatgatccttagggagaagtggcatcrcatctgatgctgtagaaggcaacagctcttacctgagctggaggaacacaaagcaaccatggagcagtctttccctgcagtggaatgaatacctgtgtcgttcattaaaaattaataatcccaacaatgagcaaagacctatggtttcttttctgtggttgtcttgtcaaacgttggatctgttccctttcaaattggcaatcagagaagaacaaaccattttattaaacaggtgccagcaggaaaagaaagctgcctgcaacagaagcataacttgccaattcagaatattttaatatg

SEQ ID NO: 28715 - DNA, 600 bp, Chicken  19866894246972_1
ctaatgacaacaagctgagtggtggagctgatacagtggaagggagggatgctatccagaggcacctggacaggcttgaaaattgtatcctaatgaggttcaacaagtccatgtgtaaggcccccattgcggccttcctatacttgagggaatcttataagcagaaggaagaccaactttttacatagtctgatagtgacaggagaaggggcaatggttttaaactaaaaggggtgaaatttaggttagatgttaaggtgaaattctttacttagagggtggtgagatactggcacagawgcccagagaagctgtggatgccccatccctggagatgttcaagaccaggttggcaagctgcccacagcagggggttggaactgggtgatctttgaagtcccttccaacctaagccattctatgattctatgattttacactaacatgagttaaaattggaagtgtaggccagattctgagattaactggcacttctgcttcttgtgaagtgatgaaaatgacagtaccaattatgtaggaacacatcgcctttaccctaattttgacagacccaaagttatctcttcacaattttatgca

SEQ ID NO: 28716 - DNA, 600 bp, Chicken  19866894246974_1
aaatgccattgttggaatattgcaaagtttgtgctaggtgggtctgaagtatgctcacaggaagataaagaacattgcacgccaatttgtcaggatctgttgaaccaatacaaggctgatgagtgatgagacatggtgtgaacactacaagccagaatcaaaactgcagtccatgaagtgctgacatgaatttcccattgaagaagttgttcaagatgcaaccctcagaagggaaaagtgatgtacgctgtcttttgaaatagaaaaggggtgatcattctgggtttcctggaacctggrcaaaccatcaagtctgactgcatcacaacactgacaaagctgaagccttgaacttccagagtcaggccagagaagacaatctctttcaacacaataacaccaggtcccataccagtttggagaccttacagaacactaccaatcttggctggattgtcctactacacctaccatatagtccagatttgacatcttctgacttcaatctgtttgggctagtgaaagatggactggcactggcattttcctagcaacaatgtcatcatagcagctgtgtaacagtgggtcatctcagttggt

SEQ ID NO: 28717 - DNA, 600 bp, Chicken  19866894246981_1
agactctgctgatttgctctatttctttctttcatgtgttgtaatttttttatggtgcattcagttgttactgactcttgattattcatctgacttttaattatttttgagtgctgtgttatcactcaatcagacatgctttgaaaagtatatagcgcacttgttggagattcccatagcaaccatagtttcagagtactttcgtacccatcccagaatgatgacacgatttgaacacgcctgagctattttgagtgtactattttcagaccacactgactaaaagtagcactgtacatygatcttactactttactgtcaaagtgtttctttagygtttggttactactacaaattcttcatcttctctactcctgacataaaccaaaggatgtttatggtgatrtctttcttttctgaacatactagaaaaaccttccttcttaaatttattttttattttttattttatttttttgcagtgcagttgtggattggttcaaaataaaagatggtgaagtagcaagtaagcatgtcattagaatcaagaaagtcaccatctcacagaaatatttctacattacatcacacttagagagt

SEQ ID NO: 28718 - DNA, 600 bp, Chicken  19866894246981_2
tgttgtaatttttttatggtgcattcagttgttactgactcttgattattcatctgacttttaattatttttgagtgctgtgttatcactcaatcagacatgctttgaaaagtatatagcgcacttgttggagattcccatagcaaccatagtttcagagtactttcgtacccatcccagaatgatgacacgatttgaacacgcctgagctattttgagtgtactattttcagaccacactgactaaaagtagcactgtacatygatcttactactttactgtcaaagtgtttctttagygtttggttactactacaaattcttcatcttctctactcctgacataaaccaaaggatgtttatggtgatrtctttcttttctgaacatactagaaaaaccttccttcttaaatttattttttattttttattttatttttttgcagtgcagttgtggattggttcaaaataaaagatggtgaagtagcaagtaagcatgtcattagaatcaagaaagtcaccatctcacagaaatatttctacattacatcacacttagagagtcacagcctcttgctaaggtgccttttaatgacagaa

SEQ ID NO: 28719 - DNA, 600 bp, Chicken  19866894246981_3
ttgagtgctgtgttatcactcaatcagacatgctttgaaaagtatatagcgcacttgttggagattcccatagcaaccatagtttcagagtactttcgtacccatcccagaatgatgacacgatttgaacacgcctgagctattttgagtgtactattttcagaccacactgactaaaagtagcactgtacatygatcttactactttactgtcaaagtgtttctttagygtttggttactactacaaattcttcatcttctctactcctgacataaaccaaaggatgtttatggtgatrtctttcttttctgaacatactagaaaaaccttccttcttaaatttattttttattttttattttatttttttgcagtgcagttgtggattggttcaaaataaaagatggtgaagtagcaagtaagcatgtcattagaatcaagaaagtcaccatctcacagaaatatttctacattacatcacacttagagagtcacagcctcttgctaaggtgccttttaatgacagaagaaaacaattcctccacaaacataaacagcatgttaacagctgaagtcacagctcagtttgcctcctggc

SEQ ID NO: 28720 - DNA, 600 bp, Chicken  19866894246989_1
caaaacatttctattgcaacgaaagatggagttgatgagtaccttgcaggactgggccaccactacttcaaggctgatgacacatcccagggacctcaggaagagcaccaatgcagtttactcagtgacttgctaaataaataaggattaaataatttctataaatgtagcagtctcactgggagctccttgcccgtgattaatctgaaaataaccagaaatgtttcattggattaataaataaaaaatatcagttcattgcaacttcaaaattgagggcacatttcttttggattgagmacatagttttgttccttgttccgtaygtttctatttcttcagtaagtgtaatttgaaagaggaagagaaatatatgactgacgcattaagatcaatcgtgatagctaatttaatatccaaaaggttcctcagatattccggggaagaaaatgtaagtgaaaaatgcagtattatggctagtgctcatttgctgtattacagtcagacgtacacagtatcttaattttcctcatgattataaatggcttttaactttactggcaagtccaagctataccgcggcgctagcgataaccaggt

SEQ ID NO: 28721 - DNA, 600 bp, Chicken  19866894246989_2
tggagttgatgagtaccttgcaggactgggccaccactacttcaaggctgatgacacatcccagggacctcaggaagagcaccaatgcagtttactcagtgacttgctaaataaataaggattaaataatttctataaatgtagcagtctcactgggagctccttgcccgtgattaatctgaaaataaccagaaatgtttcattggattaataaataaaaaatatcagttcattgcaacttcaaaattgagggcacatttcttttggattgagmacatagttttgttccttgttccgtaygtttctatttcttcagtaagtgtaatttgaaagaggaagagaaatatatgactgacgcattaagatcaatcgtgatagctaatttaatatccaaaaggttcctcagatattccggggaagaaaatgtaagtgaaaaatgcagtattatggctagtgctcatttgctgtattacagtcagacgtacacagtatcttaattttcctcatgattataaatggcttttaactttactggcaagtccaagctataccgcggcgctagcgataaccaggttatcttgcatgtgcagcctaggagca

SEQ ID NO: 28722 - DNA, 600 bp, Chicken  19866894246990_1
cagtactccctggactctctttcattagtattcacttgtattgaatgatgctggaggagaagttttgccctgaaaaaagcacagctgaacaaaatgattgtgggttatgctcctgttcatacattttattgtggtgctcctcttactgtgccataccgctcacctgtggatcacaggtgatgaacctcagactttctcctcaaatactgcactaagacagctgtagcacataaagggcatcttgaacagagctttattttttgtacctgtgattagactgtatgtaaggccagattattytttaacttgcatacagttccatgtgctacaaaacaaacatacttcttgatgcatgagcttgtggatgattaccaggattcttcagatttgtgggatttagttatactagttgatgctgtttcaatgttggaacttggctttcaagtccagaatgagttttcagggctttgagtaaagtttcttaattaaagagatctcatgaatgttttcatgtgcctgaatgttgtttggragaattaagatccatccaagtattaattattgatgagcctataggcaattacttggtatgtgttaaaa

SEQ ID NO: 28723 - DNA, 600 bp, Chicken  19866894246990_2
aagggcatcttgaacagagctttattttttgtacctgtgattagactgtatgtaaggccagattattytttaacttgcatacagttccatgtgctacaaaacaaacatacttcttgatgcatgagcttgtggatgattaccaggattcttcagatttgtgggatttagttatactagttgatgctgtttcaatgttggaacttggctttcaagtccagaatgagttttcagggctttgagtaaagtttcttaattaaagagatctcatgaatgttttcatgtgcctgaatgttgtttggragaattaagatccatccaagtattaattattgatgagcctataggcaattacttggtatgtgttaaaaaattagtcatggaactctttacaaaaaaaaaaagttaatgttgaagggaggtggtagtatatacttgttaattaactagtaatgtaacttggtctgatcaaaccatgtttaaagagagggaatatcatgcaagtgaaaactagtctaaacaagctgrtgaatatttaccaagtaaacacatccacagggatgttagggctcagctttgcaggtaaagttgtttggcttacct

SEQ ID NO: 28724 - DNA, 600 bp, Chicken  19866894246990_3
tttcagggctttgagtaaagtttcttaattaaagagatctcatgaatgttttcatgtgcctgaatgttgtttggragaattaagatccatccaagtattaattattgatgagcctataggcaattacttggtatgtgttaaaaaattagtcatggaactctttacaaaaaaaaaaagttaatgttgaagggaggtggtagtatatacttgttaattaactagtaatgtaacttggtctgatcaaaccatgtttaaagagagggaatatcatgcaagtgaaaactagtctaaacaagctgrtgaatatttaccaagtaaacacatccacagggatgttagggctcagctttgcaggtaaagttgtttggcttaccttgggcagcagtgttgttttatacctgattacagtactatggatcagactgatggcttctgatggcaatgacagagataggagcttaaggaaaaatacatggaacagtgtgaaacaggtaacaaacagttcattttcctactcagcctaaggaatttctagttctggtctgcatctgttgcgttacttattgatggacctgccttcaaagaaaccagctcttcctg

SEQ ID NO: 28725 - DNA, 600 bp, Chicken  19866894246990_4
tgatggcttctgatggcaatgacagagataggagcttaaggaaaaatacatggaacagtgtgaaacaggtaacaaacagttcattttcctactcagcctaaggaatttctagttctggtctgcatctgttgcgttacttattgatggacctgccttcaaagaaaccagctcttcctgaaacaattgatacttctggcctttagttgttatgttgtacttagttcagaagtggttttcagtagcatcattgaactctttccaaaagctcactctggattaattattgtacagataaatttkctggcttatttgcatcaatgggaagaaatcaattaaataattattgtgcatttgacaggacataattacaagcaattagttcttycacaaatatatggttgcctttttattttctgtgtatttcttggtcacaaataatgaaaaaatgttttgtatttaagctaggtagtgtgctttagaacaaacttcaaacaacttatgaataaggggcatgttatctacctggttttaacacacacaaatttatttgaggcctacaatgagtttacttttatcattattaatttcaagctgtttcag

SEQ ID NO: 28726 - DNA, 600 bp, Chicken  19866894246990_5
ttcctactcagcctaaggaatttctagttctggtctgcatctgttgcgttacttattgatggacctgccttcaaagaaaccagctcttcctgaaacaattgatacttctggcctttagttgttatgttgtacttagttcagaagtggttttcagtagcatcattgaactctttccaaaagctcactctggattaattattgtacagataaatttkctggcttatttgcatcaatgggaagaaatcaattaaataattattgtgcatttgacaggacataattacaagcaattagttcttycacaaatatatggttgcctttttattttctgtgtatttcttggtcacaaataatgaaaaaatgttttgtatttaagctaggtagtgtgctttagaacaaacttcaaacaacttatgaataaggggcatgttatctacctggttttaacacacacaaatttatttgaggcctacaatgagtttacttttatcattattaatttcaagctgtttcaggtttttctttttcagcagaaacttttcattttcctatgagctcaggaaaatgctacttgctcccctgcttgtccataccaaacag

SEQ ID NO: 28727 - DNA, 598 bp, Chicken  19866894246992_1
  misc_feature (1)..(76): n is any nucleotide
nnnnnnnnnnnnnnnnnnnnnnnnnnnnnnnnnnnnnnnnnnnnnnnnnnnnnnnnnnnnnnnnnnnnnnnnnnnnccccgcctcgccttgccttgccttgccttgacttgccttgcgacgccctgcctagccctgctacgcctctcccctccccacctcgccccacctcgcctcgccccaccccgcctagcctcgccccaccttgcccccattctccctgccacgcctcgacccactccgcctcaccccaccctgcctcgcctcgcctgccacgcatcgccctgcctcgccccacctcrccccgtctctcccgcctcgcaacgcatagacttacmccgcctcgccccgcctcacctggccacgcctagccttgccccgcaccgccccgccccaccccgcctcgcccaaccttgccccgtcccaccttgcctcgcctcgccccacctcgcttcccctcgccccaccccacttcgcctgccacaactcgcctcgccctgttttgctccgcctcacaccgccacgcctagcctcaacttgcctcgccccaccaggccccgcctcgcttcccctcgcctcgcaccgccttgccccgcctca

SEQ ID NO: 28728 - DNA, 562 bp, Chicken  19866894246992_2
  misc_feature (1)..(40): n is any nucleotide
nnnnnnnnnnnnnnnnnnnnnnnnnnnnnnnnnnnnnnnnccccgcctcgccttgccttgccttgccttgacttgccttgcgacgccctgcctagccctgctacgcctctcccctccccacctcgccccacctcgcctcgccccaccccgcctagcctcgccccaccttgcccccattctccctgccacgcctcgacccactccgcctcaccccaccctgcctcgcctcgcctgccacgcatcgccctgcctcgccccacctcrccccgtctctcccgcctcgcaacgcatagacttacmccgcctcgccccgcctcacctggccacgcctagccttgccccgcaccgccccgccccaccccgcctcgcccaaccttgccccgtcccaccttgcctcgcctcgccccacctcgcttcccctcgccccaccccacttcgcctgccacaactcgcctcgccctgttttgctccgcctcacaccgccacgcctagcctcaacttgcctcgccccaccaggccccgcctcgcttcccctcgcctcgcaccgccttgccccgcctca

SEQ ID NO: 28729 - DNA, 600 bp, Chicken  19866894247004_1
aacccctgtagtttggtgggttggtttgtttgttaagttctgcacaatgcagctcaaatccagaacaccttcagtgaagtttaggggtggctccaaaccaccctcgcgacagctccgtactcagcactgtctcattttagagtgaaaccccgcagtcccattgaacagagcccaccctgcagggctggggcagtcccaaacagcgcagccatctcccagccctcggggctgccaagcacagcgggtgttgaaaaaatagaagtggagaaatggatggatgctgagtaagagaaggagagygttccacattcagggacctgacaccccacaaaacatctcctggatggtctatccaacctagtgctttaaaatcccattgtaacaccctaacccagcaataggatgggactgctgagcaacgtgaccaggctccagtctgatccttgtaagaccttgtgagcccagagacagaagggtgacctgaaaggaaccactacacctcgaatgaaaggatgaaaactgcagataatcttttttaccttcaactccctgcragttatgaggccaagactgctttggaaagaggtgaaatcaggggtc

SEQ ID NO: 28730 - DNA, 600 bp, Chicken  19866894247004_2
aatagaagtggagaaatggatggatgctgagtaagagaaggagagygttccacattcagggacctgacaccccacaaaacatctcctggatggtctatccaacctagtgctttaaaatcccattgtaacaccctaacccagcaataggatgggactgctgagcaacgtgaccaggctccagtctgatccttgtaagaccttgtgagcccagagacagaagggtgacctgaaaggaaccactacacctcgaatgaaaggatgaaaactgcagataatcttttttaccttcaactccctgcragttatgaggccaagactgctttggaaagaggtgaaatcaggggtcagcctgaaagaacggtgtgtagatgacgtgggaaggacgcccagctcttcgcaccttcctggtgcttataaaccagttcccacttccagcagcttccttccaccctttaccagtacaatgtgtaggttactgtttaggaccaaaagcatcatgaatacataggcttaatttcttgagctcagctgctaaagccaaacacctattgactgtgagaatggcacagccaacagaccaagtgcttcttccaccatcag

SEQ ID NO: 28731 - DNA, 600 bp, Chicken  19866894247008_1
gcagctgccctcaccagtgctggtggcactccttggggctcctgtctcttcatttgcgaagcacaccagcagtgtgccatttagttgcatggacttcttaatagaggattgtcttgagcttccctgggaatgacgtaagcagcttgacctaaggaactactacttggtttcctttcatttgagatgaggtctttgtgtacgacttgctgccaccaaaacctgcttattaacatagttggtgttgatacgacatacgcccttcaaatttatcaactgatgcgtcttcctgcatttttcttyggaaggttagctgcctagaccatgtgagtgggtcacatacttgtcacttagtgcagcgttctgcatggtgaagcagtgactccctcatcatgaacaactttcagaagactaactcatccttaagcaattattccttgggtccgttctgtctttttgctgccttttggactgttgaacctctgcaaatccccaggtcttggtggaaaagcattgacaggctgctatgtctaagatgagtggaatagctgctccagcactgcagggaccttagcatgtgttctctgatctctccatagcttg

SEQ ID NO: 28732 - DNA, 499 bp, Chicken  19866894247018_1
agaaacacagacaaagtgcaattaattaggatgcattcttaattaattaacaggaagcatgaatgataaccttcctcaaacacctgatggttgtacgcttcagaaaatgaaatcaaataacaagagtaatattaatagtaataataacagaaaatttccagaggatattttaatactaattaatccataagaaatacattagctttatactgtggagaacaatccaagtgtaaaggatagggagtccttaacagagaatttaccagttctggatttctaagcatcccccttaaccaaatyctgtgagctctagaaycttttccaccattctgatcattctgcttgtctttctgactacacagtttttgaaataacaggagcagaacagtcaacagttaccaagttaaggcatggatttatattctatcatcattatgttctaagttttttttactcttacttctttttttagcaatttttgtgagcgtgcgcgtgaata

SEQ ID NO: 28733 - DNA, 483 bp, Chicken  19866894247018_2
tgcaattaattaggatgcattcttaattaattaacaggaagcatgaatgataaccttcctcaaacacctgatggttgtacgcttcagaaaatgaaatcaaataacaagagtaatattaatagtaataataacagaaaatttccagaggatattttaatactaattaatccataagaaatacattagctttatactgtggagaacaatccaagtgtaaaggatagggagtccttaacagagaatttaccagttctggatttctaagcatcccccttaaccaaatyctgtgagctctagaaycttttccaccattctgatcattctgcttgtctttctgactacacagtttttgaaataacaggagcagaacagtcaacagttaccaagttaaggcatggatttatattctatcatcattatgttctaagttttttttactcttacttctttttttagcaatttttgtgagcgtgcgcgtgaata

SEQ ID NO: 28734 - DNA, 600 bp, Chicken  19866894247024_1
taatcttcctaggaagtagaaaaagtcaaacagttaatgagtgcattataaggaatatcaagtcctgttccagcctgatattcagctttgacaacattgggttgctgagccaactgcgtgttttgttgtcatacctctcctgctgagaaacccattttctaaataatagcatgaccactcgagtgtagaaaggggctgagggagggaaggccgctgcttagaaaaggtctatggctggagcagtgctaaacagcagcacgtagcaagtaacttctgctgtattgccatgcatcctgcacracctgtctgtactgcagtaagaagtttccaagggaatgggagtggtatgacctattytaatggctattaacttcattgctgcaaaccatgcatttgaaaacaagagtaactttccattgtgtcaacatgcagtaattgacaatgggaagcttttcactttcaaaatcaactacacaaagatttagctgttaattacagatctcaactcttctttgaaagaacagtcatagaataaattttctaagctcccatgggcagtgagaggtttaaccagattctctggagaaggtaatgggtgag

SEQ ID NO: 28735 - DNA, 600 bp, Chicken  19866894247024_2
tcaagtcctgttccagcctgatattcagctttgacaacattgggttgctgagccaactgcgtgttttgttgtcatacctctcctgctgagaaacccattttctaaataatagcatgaccactcgagtgtagaaaggggctgagggagggaaggccgctgcttagaaaaggtctatggctggagcagtgctaaacagcagcacgtagcaagtaacttctgctgtattgccatgcatcctgcacracctgtctgtactgcagtaagaagtttccaagggaatgggagtggtatgacctattytaatggctattaacttcattgctgcaaaccatgcatttgaaaacaagagtaactttccattgtgtcaacatgcagtaattgacaatgggaagcttttcactttcaaaatcaactacacaaagatttagctgttaattacagatctcaactcttctttgaaagaacagtcatagaataaattttctaagctcccatgggcagtgagaggtttaaccagattctctggagaaggtaatgggtgagttgtgctgaggcttttcttgttcacctgagtgcagaatgctgggggtggggaagttt

SEQ ID NO: 28736 - DNA, 599 bp, Chicken  19866894247028_1
  misc_feature (1)..(191): n is any nucleotide
nnnnnnnnnnnnnnnnnnnnnnnnnnnnnnnnnnnnnnnnnnnnnnnnnnnnnnnnnnnnnnnnnnnnnnnnnnnnnnnnnnnnnnnnnnnnnnnnnnnnnnnnnnnnnnnnnnnnnnnnnnnnnnnnnnnnnnnnnnnnnnnnnnnnnnnnnnnnnnnnnnnnnnnnnnnnnnnnnnnnnnnnnnnnnnnaagagtttatataagaggccagatgaaactgcctctcaatgaaaagaattgcccatacgtgcccttctataacattacagcagccctacgctcctttacctttgtattstttgctgtactctttgtttaataacattgaggctagggctctccttagaggccaacctctgcctgagcgcctggaagcacctgggccactgttgtgctcccctgcctggccagcacagcacagccaaggagygagagcagagccaaaggtctracagcagccagctcccactgaactccgaactagttggcttcccctgccagggccgtacccgctccaggycagaaacctcatcaggcaacagcaccaacatgctcagrtctccgctggcaaatgggagctccaggatcttcattttc

SEQ ID NO: 28737 - DNA, 599 bp, Chicken  19866894247028_2
  misc_feature (1)..(59): n is any nucleotide
nnnnnnnnnnnnnnnnnnnnnnnnnnnnnnnnnnnnnnnnnnnnnnnnnnnnnnnnnnnaagagtttatataagaggccagatgaaactgcctctcaatgaaaagaattgcccatacgtgcccttctataacattacagcagccctacgctcctttacctttgtattstttgctgtactctttgtttaataacattgaggctagggctctccttagaggccaacctctgcctgagcgcctggaagcacctgggccactgttgtgctcccctgcctggccagcacagcacagccaaggagygagagcagagccaaaggtctracagcagccagctcccactgaactccgaactagttggcttcccctgccagggccgtacccgctccaggycagaaacctcatcaggcaacagcaccaacatgctcagrtctccgctggcaaatgggagctccaggatcttcattttctctgcaggcagtgtggccacattaaagctattgttcatacacatcatttgcacaggtttgctttcttsctgcaaaacagaagcatgagacaatgtgagaagggggcagtttctcttgaagcaggcagatgtg

SEQ ID NO: 28738 - DNA, 599 bp, Chicken  19866894247028_3
  misc_feature (1)..(38): n is any nucleotide
nnnnnnnnnnnnnnnnnnnnnnnnnnnnnnnnnnnnnnaagagtttatataagaggccagatgaaactgcctctcaatgaaaagaattgcccatacgtgcccttctataacattacagcagccctacgctcctttacctttgtattstttgctgtactctttgtttaataacattgaggctagggctctccttagaggccaacctctgcctgagcgcctggaagcacctgggccactgttgtgctcccctgcctggccagcacagcacagccaaggagygagagcagagccaaaggtctracagcagccagctcccactgaactccgaactagttggcttcccctgccagggccgtacccgctccaggycagaaacctcatcaggcaacagcaccaacatgctcagrtctccgctggcaaatgggagctccaggatcttcattttctctgcaggcagtgtggccacattaaagctattgttcatacacatcatttgcacaggtttgctttcttsctgcaaaacagaagcatgagacaatgtgagaagggggcagtttctcttgaagcaggcagatgtgcaagtccttcagaggaactgg

SEQ ID NO: 28739 - DNA, 600 bp, Chicken  19866894247028_4
cctctcaatgaaaagaattgcccatacgtgcccttctataacattacagcagccctacgctcctttacctttgtattstttgctgtactctttgtttaataacattgaggctagggctctccttagaggccaacctctgcctgagcgcctggaagcacctgggccactgttgtgctcccctgcctggccagcacagcacagccaaggagygagagcagagccaaaggtctracagcagccagctcccactgaactccgaactagttggcttcccctgccagggccgtacccgctccaggycagaaacctcatcaggcaacagcaccaacatgctcagrtctccgctggcaaatgggagctccaggatcttcattttctctgcaggcagtgtggccacattaaagctattgttcatacacatcatttgcacaggtttgctttcttsctgcaaaacagaagcatgagacaatgtgagaagggggcagtttctcttgaagcaggcagatgtgcaagtccttcagaggaactgggctggatcctcaagctgtgtctccattttcctctcttgtctacaggtgtgctttggatgcctggtcagac

SEQ ID NO: 28740 - DNA, 600 bp, Chicken  19866894247028_5
taacattacagcagccctacgctcctttacctttgtattstttgctgtactctttgtttaataacattgaggctagggctctccttagaggccaacctctgcctgagcgcctggaagcacctgggccactgttgtgctcccctgcctggccagcacagcacagccaaggagygagagcagagccaaaggtctracagcagccagctcccactgaactccgaactagttggcttcccctgccagggccgtacccgctccaggycagaaacctcatcaggcaacagcaccaacatgctcagrtctccgctggcaaatgggagctccaggatcttcattttctctgcaggcagtgtggccacattaaagctattgttcatacacatcatttgcacaggtttgctttcttsctgcaaaacagaagcatgagacaatgtgagaagggggcagtttctcttgaagcaggcagatgtgcaagtccttcagaggaactgggctggatcctcaagctgtgtctccattttcctctcttgtctacaggtgtgctttggatgcctggtcagacacaatttttgccagcctgtcttgggctcagccccatgc

SEQ ID NO: 28741 - DNA, 600 bp, Chicken  19866894247028_6
cgcctggaagcacctgggccactgttgtgctcccctgcctggccagcacagcacagccaaggagygagagcagagccaaaggtctracagcagccagctcccactgaactccgaactagttggcttcccctgccagggccgtacccgctccaggycagaaacctcatcaggcaacagcaccaacatgctcagrtctccgctggcaaatgggagctccaggatcttcattttctctgcaggcagtgtggccacattaaagctattgttcatacacatcatttgcacaggtttgctttcttsctgcaaaacagaagcatgagacaatgtgagaagggggcagtttctcttgaagcaggcagatgtgcaagtccttcagaggaactgggctggatcctcaagctgtgtctccattttcctctcttgtctacaggtgtgctttggatgcctggtcagacacaatttttgccagcctgtcttgggctcagccccatgccctgtcagcgaggggcccagaagaaccatggaccaatgactgtaggatggtgtatgtcgcacccttgatggctttctgtcctgcccagaagcggtgaccacgtcccc

SEQ ID NO: 28742 - DNA, 599 bp, Chicken  19866894247041_1
  misc_feature (1)..(70): n is any nucleotide
nnnnnnnnnnnnnnnnnnnnnnnnnnnnnnnnnnnnnnnnnnnnnnnnnnnnnnnnnnnnnnnnnnnnnnatctgttgctatttatatctgacacaggtgtatattaatgatatatttgctggtaggcagcaaacagtcagactttcagggaagcatttatgcaatggttttctacccaaagattaaagaaaagaaatagaaaggagtctacaaatttccctctcttctgttcatcctcactcttcaaggtccaagctggaggagaaattgaaaatctggatgctcagaggattcattaracaccattccttgacctaccacaacaacctacgttctgcaacaaaattttcaggcttaatattctgtcttcaagaaaaagagaaattcttttgctgtatctggaattggcttgcacatagaaagacaaaacagttcctagtaaatgccagctgtcacgtagcatacacataattgtatcaggaacaatgacctggcttggcactaacttcactaagtcacttctgggtcagctctgctgaagarcagcaattttaaagagaacctgcagcagctttcaatgtgtacatttccactaggc

SEQ ID NO: 28743 - DNA, 600 bp, Chicken  19866894247041_2
tcaaggtccaagctggaggagaaattgaaaatctggatgctcagaggattcattaracaccattccttgacctaccacaacaacctacgttctgcaacaaaattttcaggcttaatattctgtcttcaagaaaaagagaaattcttttgctgtatctggaattggcttgcacatagaaagacaaaacagttcctagtaaatgccagctgtcacgtagcatacacataattgtatcaggaacaatgacctggcttggcactaacttcactaagtcacttctgggtcagctctgctgaagarcagcaattttaaagagaacctgcagcagctttcaatgtgtacatttccactaggctctcttgaccacaagtttaggaaacaaagtttgataaatttgcagaagcctaggtaaaatgttggttttgtaaaatcacgtgactgacacttcaaagaatataaaagcattcttatttttcaggacacagatataaaaagtcaattcaaaaatgaaagagtaacttctcaaataataatcagtcaggaatatgcagcattttatttcaataactaatgttgaactgaacagcttttaccagtgcc

SEQ ID NO: 28744 - DNA, 600 bp, Chicken  19866894247044_1
agcaagaggcacaagtggcaatgaagctgcaatgcttcggccctctaagcaggagcagttcagctgcacaaggctgggcagcagtctaaagtctatctctaggtgcaagaggggcttacaggacacgtcagctgcatggatgtctgcagagaagccaggtcccaccagtacttcagcacagggcgtccggacgtatcctagccaccgagctcagagcagcagcaacagaaggttaacagtgctcctccacactcagcaattagagaacagagggaaggagagcatccccagagaagagcrgaatcaggaaatgccttgcccgaaaatattgagcgccccgggcacaaagacacgggtcagaggaaggacatgggcaggaggaggcaccgtggaggcgggggcagctcaccagcacaggacaccgtgccctggccacagcacagccccagccagtccctcacaccaagcaacatccctgccctgatccacgcaggtgggctctgcccaaaaggccgaggggatcccagccaggagatgggctctggcacagtgctgcagctccagcagcctcatggttttcctgcctctgtgagcctgccg

SEQ ID NO: 28745 - DNA, 600 bp, Chicken  19866894247059_1
aggtgttgcagggggaaagtttctggcggctccaagcctgctgaaataatgggacacagatgaagcagccatcgctgggggctgatttttgggaggggggctgctgggtctgggtgatggcagagcctgtcctccagcaccgcacgcttgcaaataaatctgccctgcctgtgaacatgtgtctgggattcgctgcccacccccagcatgccatgacatttattggctcccactggagaacagcagcgagccttcatctgctgtctgatcttcgtgtcttaatcctgagctgagccccgrctgggaggagtgatcccacccggactggggtkagatgtgcacgtgagatccgtagtgcagatctgaagcccttctgactgctgcgctgaagtcygcaggacccccgcagccacctccgtgttcctctctgcttttgagaagcttctggcatttaatcactttgaggcttttctctctgcacagtgactgcaatttgaaacgcaagggtcccctacaaaaagagagtgctcaatgggctgtgttaatattcagtgccttttacaatgggtgcagcatgaaaaggggagaatggatgggctg

SEQ ID NO: 28746 - DNA, 600 bp, Chicken  19866894247059_2
caagcctgctgaaataatgggacacagatgaagcagccatcgctgggggctgatttttgggaggggggctgctgggtctgggtgatggcagagcctgtcctccagcaccgcacgcttgcaaataaatctgccctgcctgtgaacatgtgtctgggattcgctgcccacccccagcatgccatgacatttattggctcccactggagaacagcagcgagccttcatctgctgtctgatcttcgtgtcttaatcctgagctgagccccgrctgggaggagtgatcccacccggactggggtkagatgtgcacgtgagatccgtagtgcagatctgaagcccttctgactgctgcgctgaagtcygcaggacccccgcagccacctccgtgttcctctctgcttttgagaagcttctggcatttaatcactttgaggcttttctctctgcacagtgactgcaatttgaaacgcaagggtcccctacaaaaagagagtgctcaatgggctgtgttaatattcagtgccttttacaatgggtgcagcatgaaaaggggagaatggatgggctgggggaaaggggagggaaagttcccagagcagg

SEQ ID NO: 28747 - DNA, 600 bp, Chicken  19866894247059_3
ggggggctgctgggtctgggtgatggcagagcctgtcctccagcaccgcacgcttgcaaataaatctgccctgcctgtgaacatgtgtctgggattcgctgcccacccccagcatgccatgacatttattggctcccactggagaacagcagcgagccttcatctgctgtctgatcttcgtgtcttaatcctgagctgagccccgrctgggaggagtgatcccacccggactggggtkagatgtgcacgtgagatccgtagtgcagatctgaagcccttctgactgctgcgctgaagtcygcaggacccccgcagccacctccgtgttcctctctgcttttgagaagcttctggcatttaatcactttgaggcttttctctctgcacagtgactgcaatttgaaacgcaagggtcccctacaaaaagagagtgctcaatgggctgtgttaatattcagtgccttttacaatgggtgcagcatgaaaaggggagaatggatgggctgggggaaaggggagggaaagttcccagagcagggggacaagaagcccagtaggcatcagagaagtgaacacacagmagtttttctctaggaaaac

SEQ ID NO: 28748 - DNA, 600 bp, Chicken  19866894247059_4
gactgctgcgctgaagtcygcaggacccccgcagccacctccgtgttcctctctgcttttgagaagcttctggcatttaatcactttgaggcttttctctctgcacagtgactgcaatttgaaacgcaagggtcccctacaaaaagagagtgctcaatgggctgtgttaatattcagtgccttttacaatgggtgcagcatgaaaaggggagaatggatgggctgggggaaaggggagggaaagttcccagagcagggggacaagaagcccagtaggcatcagagaagtgaacacacagmagtttttctctaggaaaactaacctttatgattttgtaggagctcagtattttaactttgccttgcaaactgccctgcggatgtttggggctagagggtgaccgagccttgcagragcccagcctgaarygtagactgaaggagctttggggctgcttgccttctcccatcacttgggtctcccctygtgcagcctagccccatgcctgctggcacagccgtcccattcagtgcacagtgggtgcttggaatctgcagtgctgcctttggctcttgactacttccatccctctcagagag

SEQ ID NO: 28749 - DNA, 600 bp, Chicken  19866894247059_5
aatttgaaacgcaagggtcccctacaaaaagagagtgctcaatgggctgtgttaatattcagtgccttttacaatgggtgcagcatgaaaaggggagaatggatgggctgggggaaaggggagggaaagttcccagagcagggggacaagaagcccagtaggcatcagagaagtgaacacacagmagtttttctctaggaaaactaacctttatgattttgtaggagctcagtattttaactttgccttgcaaactgccctgcggatgtttggggctagagggtgaccgagccttgcagragcccagcctgaarygtagactgaaggagctttggggctgcttgccttctcccatcacttgggtctcccctygtgcagcctagccccatgcctgctggcacagccgtcccattcagtgcacagtgggtgcttggaatctgcagtgctgcctttggctcttgactacttccatccctctcagagaggttggagctttgccttctgcacggtgcaaagcttcccagtggctctcacctctcagtgcccatttaagaccctctgcattgtcctgcatgtcaaccgcacccagaaatcccagtc

SEQ ID NO: 28750 - DNA, 600 bp, Chicken  19866894247059_6
gggtcccctacaaaaagagagtgctcaatgggctgtgttaatattcagtgccttttacaatgggtgcagcatgaaaaggggagaatggatgggctgggggaaaggggagggaaagttcccagagcagggggacaagaagcccagtaggcatcagagaagtgaacacacagmagtttttctctaggaaaactaacctttatgattttgtaggagctcagtattttaactttgccttgcaaactgccctgcggatgtttggggctagagggtgaccgagccttgcagragcccagcctgaarygtagactgaaggagctttggggctgcttgccttctcccatcacttgggtctcccctygtgcagcctagccccatgcctgctggcacagccgtcccattcagtgcacagtgggtgcttggaatctgcagtgctgcctttggctcttgactacttccatccctctcagagaggttggagctttgccttctgcacggtgcaaagcttcccagtggctctcacctctcagtgcccatttaagaccctctgcattgtcctgcatgtcaaccgcacccagaaatcccagtcaggctgcggggctt

SEQ ID NO: 28751 - DNA, 600 bp, Chicken  19866894247059_7
ggtcccctacaaaaagagagtgctcaatgggctgtgttaatattcagtgccttttacaatgggtgcagcatgaaaaggggagaatggatgggctgggggaaaggggagggaaagttcccagagcagggggacaagaagcccagtaggcatcagagaagtgaacacacagmagtttttctctaggaaaactaacctttatgattttgtaggagctcagtattttaactttgccttgcaaactgccctgcggatgtttggggctagagggtgaccgagccttgcagragcccagcctgaarygtagactgaaggagctttggggctgcttgccttctcccatcacttgggtctcccctygtgcagcctagccccatgcctgctggcacagccgtcccattcagtgcacagtgggtgcttggaatctgcagtgctgcctttggctcttgactacttccatccctctcagagaggttggagctttgccttctgcacggtgcaaagcttcccagtggctctcacctctcagtgcccatttaagaccctctgcattgtcctgcatgtcaaccgcacccagaaatcccagtcaggctgcggggcttt

SEQ ID NO: 28752 - DNA, 600 bp, Chicken  19866894247059_8
aatgggtgcagcatgaaaaggggagaatggatgggctgggggaaaggggagggaaagttcccagagcagggggacaagaagcccagtaggcatcagagaagtgaacacacagmagtttttctctaggaaaactaacctttatgattttgtaggagctcagtattttaactttgccttgcaaactgccctgcggatgtttggggctagagggtgaccgagccttgcagragcccagcctgaarygtagactgaaggagctttggggctgcttgccttctcccatcacttgggtctcccctygtgcagcctagccccatgcctgctggcacagccgtcccattcagtgcacagtgggtgcttggaatctgcagtgctgcctttggctcttgactacttccatccctctcagagaggttggagctttgccttctgcacggtgcaaagcttcccagtggctctcacctctcagtgcccatttaagaccctctgcattgtcctgcatgtcaaccgcacccagaaatcccagtcaggctgcggggctttgcactgatcctgctatcagacacctcagattgggttagctcagctcgtcagttttta

SEQ ID NO: 28753 - DNA, 599 bp, Chicken  19866894247060_1
  misc_feature (1)..(99): n is any nucleotide
nnnnnnnnnnnnnnnnnnnnnnnnnnnnnnnnnnnnnnnnnnnnnnnnnnnnnnnnnnnnnnnnnnnnnnnnnnnnnnnnnnnnnnnnnnnnnnnnnnncagtttaattaagaacctaaaatacagagaaatacaaacattgttgagtggctatccataattcaccaccattttttgactgctttgagccttaaagccattaaataacaagaaacacagaacataaatgctataaataagtaaatcctcacacaaacattaatatgtaaatgctaaataaaaggaataagagaaactaaragtaagtttggtctacactctgagaaattggtcttgaatytctgccttgcaaacagaagcaagacctgttattaattcccctgacagccaatgctttaatcttttcctgccttttccctggatggctcatcatatgcagggaatccgttggtacagaaaaggggtggtggttaatttcaaacttggcatttaaaycataacgatagtatgttactttgctaggaggtagtgttatgtttcaaaggatgcctagcaacataggatttcaccatgaatctaacatgctgtactagatttca

SEQ ID NO: 28754 - DNA, 599 bp, Chicken  19866894247060_2
  misc_feature (1)..(59): n is any nucleotide
nnnnnnnnnnnnnnnnnnnnnnnnnnnnnnnnnnnnnnnnnnnnnnnnnnnnnnnnnnncagtttaattaagaacctaaaatacagagaaatacaaacattgttgagtggctatccataattcaccaccattttttgactgctttgagccttaaagccattaaataacaagaaacacagaacataaatgctataaataagtaaatcctcacacaaacattaatatgtaaatgctaaataaaaggaataagagaaactaaragtaagtttggtctacactctgagaaattggtcttgaatytctgccttgcaaacagaagcaagacctgttattaattcccctgacagccaatgctttaatcttttcctgccttttccctggatggctcatcatatgcagggaatccgttggtacagaaaaggggtggtggttaatttcaaacttggcatttaaaycataacgatagtatgttactttgctaggaggtagtgttatgtttcaaaggatgcctagcaacataggatttcaccatgaatctaacatgctgtactagatttcaaagagtagttgaagcactaaatgaatttcaaattagggat

SEQ ID NO: 28755 - DNA, 600 bp, Chicken  19866894247060_3
gccattaaataacaagaaacacagaacataaatgctataaataagtaaatcctcacacaaacattaatatgtaaatgctaaataaaaggaataagagaaactaaragtaagtttggtctacactctgagaaattggtcttgaatytctgccttgcaaacagaagcaagacctgttattaattcccctgacagccaatgctttaatcttttcctgccttttccctggatggctcatcatatgcagggaatccgttggtacagaaaaggggtggtggttaatttcaaacttggcatttaaaycataacgatagtatgttactttgctaggaggtagtgttatgtttcaaaggatgcctagcaacataggatttcaccatgaatctaacatgctgtactagatttcaaagagtagttgaagcactaaatgaatttcaaattagggataggaaattcaaaccagcattactcttaactgggctcactgtaaccactgacgcgtctctggttttttaagggtgttcttgcaatttggtacacttgtactagttgcatatctcagaaaaagaggggaggttataattcctctatcgtgcaacatca

SEQ ID NO: 28756 - DNA, 600 bp, Chicken  19866894247063_1
aatccctgcaaaaggagttaattttaaatacgtcaacatctgaaattgaagtcaacagctttatgtgcgttggtaaatagaaggcaagtaacagatttgccctcaagagttatgttttccaacttttcctattcacacgcggactgagttcatgcaagcatgcgtttatttaatcttgtgcaagcagtggtgtcaatgatttcacttgggactgtcatcgcgttgtataatcacagtgtacagctgaaagttttcaggaatgggtctttaaggaaacctgttgcgtttatgtacctgttrtgtattgctcaagaaaggacactgctgggtagctgtacgtcactgtgatttgaactacctggaaagttgggaggaaaaagaaatgccagttgtttttaatcacgcgccctgattgtttagctttgcagggcactctgcaaaggcaggtgtcacagccctrttggtgtttgtggctggttgctataaatttccctattgttcttaatgcccaagaacaatcagtacgctgtctggatcgcagggtctggaagtgcacatgaggagatctgaatagcaaggagagattattgctgtgaaagc

SEQ ID NO: 28757 - DNA, 600 bp, Chicken  19866894247063_2
tgcgtttatttaatcttgtgcaagcagtggtgtcaatgatttcacttgggactgtcatcgcgttgtataatcacagtgtacagctgaaagttttcaggaatgggtctttaaggaaacctgttgcgtttatgtacctgttrtgtattgctcaagaaaggacactgctgggtagctgtacgtcactgtgatttgaactacctggaaagttgggaggaaaaagaaatgccagttgtttttaatcacgcgccctgattgtttagctttgcagggcactctgcaaaggcaggtgtcacagccctrttggtgtttgtggctggttgctataaatttccctattgttcttaatgcccaagaacaatcagtacgctgtctggatcgcagggtctggaagtgcacatgaggagatctgaatagcaaggagagattattgctgtgaaagcaaaaactaattgaaacctctgcattgaaagagacgttctgataaaatctcctacttcgagcctgcacctgttggtatgttcttgtaggttatcccccctcaagcttcccaaagtgtttttctttatagagctaaggaagggctgcttttcttcttgtcct

SEQ ID NO: 28758 - DNA, 600 bp, Chicken  19866894247066_1
aagccccatgtggacgagataacttgtctacacagacactaattgaggataagaaatcaaattaaagcactaactctgtttttaggggtcagtatagtagaaaaacatttaaatcaatgtaattcccaaccagattccagtaatttaaaaggattatgggaagtgccagtcattactagcgctcacttatgttcctcccccctctctccgaagactcataagctatttctcactgaaaagcattcaccgctgagtgtcagcaggcggagctgcagtaacatttagcacagggttaccgcygctgaggcacatgaactgagtcgctggatggagcaaatgctgcagcagccccggacaaaagagggggttgcatcaatatgctaggttmaggcttgacatctctctgctttaaagggcrggtggtagcaacagttctaccagtggctygaattggtctctaccctctctgcagttacctgctggctgacgctgaggatgcagtgtgtggatgtccatggggaagtggagtttgtttcggatgatctcctggttcttgcctgtgaatttgttggcactgttaatgctcttggtgtgccagtc

SEQ ID NO: 28759 - DNA, 600 bp, Chicken  19866894247066_2
tcagtatagtagaaaaacatttaaatcaatgtaattcccaaccagattccagtaatttaaaaggattatgggaagtgccagtcattactagcgctcacttatgttcctcccccctctctccgaagactcataagctatttctcactgaaaagcattcaccgctgagtgtcagcaggcggagctgcagtaacatttagcacagggttaccgcygctgaggcacatgaactgagtcgctggatggagcaaatgctgcagcagccccggacaaaagagggggttgcatcaatatgctaggttmaggcttgacatctctctgctttaaagggcrggtggtagcaacagttctaccagtggctygaattggtctctaccctctctgcagttacctgctggctgacgctgaggatgcagtgtgtggatgtccatggggaagtggagtttgtttcggatgatctcctggttcttgcctgtgaatttgttggcactgttaatgctcttggtgtgccagtctgtccagtacaaactgtcctcaaacacggtgatagcaaatgggtgtggaaggcctgcaacagacatccaatacaggrcttccatcacg

SEQ ID NO: 28760 - DNA, 600 bp, Chicken  19866894247066_3
gtaattcccaaccagattccagtaatttaaaaggattatgggaagtgccagtcattactagcgctcacttatgttcctcccccctctctccgaagactcataagctatttctcactgaaaagcattcaccgctgagtgtcagcaggcggagctgcagtaacatttagcacagggttaccgcygctgaggcacatgaactgagtcgctggatggagcaaatgctgcagcagccccggacaaaagagggggttgcatcaatatgctaggttmaggcttgacatctctctgctttaaagggcrggtggtagcaacagttctaccagtggctygaattggtctctaccctctctgcagttacctgctggctgacgctgaggatgcagtgtgtggatgtccatggggaagtggagtttgtttcggatgatctcctggttcttgcctgtgaatttgttggcactgttaatgctcttggtgtgccagtctgtccagtacaaactgtcctcaaacacggtgatagcaaatgggtgtggaaggcctgcaacagacatccaatacaggrcttccatcacgttcaacaggacttgtggtagcagagaggca

SEQ ID NO: 28761 - DNA, 600 bp, Chicken  19866894247066_4
aaaggattatgggaagtgccagtcattactagcgctcacttatgttcctcccccctctctccgaagactcataagctatttctcactgaaaagcattcaccgctgagtgtcagcaggcggagctgcagtaacatttagcacagggttaccgcygctgaggcacatgaactgagtcgctggatggagcaaatgctgcagcagccccggacaaaagagggggttgcatcaatatgctaggttmaggcttgacatctctctgctttaaagggcrggtggtagcaacagttctaccagtggctygaattggtctctaccctctctgcagttacctgctggctgacgctgaggatgcagtgtgtggatgtccatggggaagtggagtttgtttcggatgatctcctggttcttgcctgtgaatttgttggcactgttaatgctcttggtgtgccagtctgtccagtacaaactgtcctcaaacacggtgatagcaaatgggtgtggaaggcctgcaacagacatccaatacaggrcttccatcacgttcaacaggacttgtggtagcagagaggcaagggaackcttaccagtaccccttaggca

SEQ ID NO: 28762 - DNA, 600 bp, Chicken  19866894247066_5
atgctaggttmaggcttgacatctctctgctttaaagggcrggtggtagcaacagttctaccagtggctygaattggtctctaccctctctgcagttacctgctggctgacgctgaggatgcagtgtgtggatgtccatggggaagtggagtttgtttcggatgatctcctggttcttgcctgtgaatttgttggcactgttaatgctcttggtgtgccagtctgtccagtacaaactgtcctcaaacacggtgatagcaaatgggtgtggaaggcctgcaacagacatccaatacaggrcttccatcacgttcaacaggacttgtggtagcagagaggcaagggaackcttaccagtaccccttaggcacagtcaatctrctcaaatctaccatacactaatgtgacaagacactttctctctcccgtccgttgatgtccaggtagtaaagcccatccctcgttagtgacagaattaatcccmcagcaattaaaaaacaaataaccatagaacaacaagtcacctacaagcaggtggctctgaaactcagctaagcaccatgccattctgccttctttgcttcagagaacrtttccagt

SEQ ID NO: 28763 - DNA, 600 bp, Chicken  19866894247066_6
caacagttctaccagtggctygaattggtctctaccctctctgcagttacctgctggctgacgctgaggatgcagtgtgtggatgtccatggggaagtggagtttgtttcggatgatctcctggttcttgcctgtgaatttgttggcactgttaatgctcttggtgtgccagtctgtccagtacaaactgtcctcaaacacggtgatagcaaatgggtgtggaaggcctgcaacagacatccaatacaggrcttccatcacgttcaacaggacttgtggtagcagagaggcaagggaackcttaccagtaccccttaggcacagtcaatctrctcaaatctaccatacactaatgtgacaagacactttctctctcccgtccgttgatgtccaggtagtaaagcccatccctcgttagtgacagaattaatcccmcagcaattaaaaaacaaataaccatagaacaacaagtcacctacaagcaggtggctctgaaactcagctaagcaccatgccattctgccttctttgcttcagagaacrtttccagtacctagctccattacttaccttggctaataacagctttcctattccgtc

SEQ ID NO: 28764 - DNA, 600 bp, Chicken  19866894247066_7
taccctctctgcagttacctgctggctgacgctgaggatgcagtgtgtggatgtccatggggaagtggagtttgtttcggatgatctcctggttcttgcctgtgaatttgttggcactgttaatgctcttggtgtgccagtctgtccagtacaaactgtcctcaaacacggtgatagcaaatgggtgtggaaggcctgcaacagacatccaatacaggrcttccatcacgttcaacaggacttgtggtagcagagaggcaagggaackcttaccagtaccccttaggcacagtcaatctrctcaaatctaccatacactaatgtgacaagacactttctctctcccgtccgttgatgtccaggtagtaaagcccatccctcgttagtgacagaattaatcccmcagcaattaaaaaacaaataaccatagaacaacaagtcacctacaagcaggtggctctgaaactcagctaagcaccatgccattctgccttctttgcttcagagaacrtttccagtacctagctccattacttaccttggctaataacagctttcctattccgtccatcaaggtcagccctctcgatgacatggtgt

SEQ ID NO: 28765 - DNA, 600 bp, Chicken  19866894247066_8
gaatttgttggcactgttaatgctcttggtgtgccagtctgtccagtacaaactgtcctcaaacacggtgatagcaaatgggtgtggaaggcctgcaacagacatccaatacaggrcttccatcacgttcaacaggacttgtggtagcagagaggcaagggaackcttaccagtaccccttaggcacagtcaatctrctcaaatctaccatacactaatgtgacaagacactttctctctcccgtccgttgatgtccaggtagtaaagcccatccctcgttagtgacagaattaatcccmcagcaattaaaaaacaaataaccatagaacaacaagtcacctacaagcaggtggctctgaaactcagctaagcaccatgccattctgccttctttgcttcagagaacrtttccagtacctagctccattacttaccttggctaataacagctttcctattccgtccatcaaggtcagccctctcgatgacatggtgtttggcatccacccagtacatccgatgccctgcatagtcaatggtcagcccattgggccagaataggtgcgtatccgcaatgatgcgccgattagagccatcca

SEQ ID NO: 28766 - DNA, 600 bp, Chicken  19866894247066_9
atacaggrcttccatcacgttcaacaggacttgtggtagcagagaggcaagggaackcttaccagtaccccttaggcacagtcaatctrctcaaatctaccatacactaatgtgacaagacactttctctctcccgtccgttgatgtccaggtagtaaagcccatccctcgttagtgacagaattaatcccmcagcaattaaaaaacaaataaccatagaacaacaagtcacctacaagcaggtggctctgaaactcagctaagcaccatgccattctgccttctttgcttcagagaacrtttccagtacctagctccattacttaccttggctaataacagctttcctattccgtccatcaaggtcagccctctcgatgacatggtgtttggcatccacccagtacatccgatgccctgcatagtcaatggtcagcccattgggccagaataggtgcgtatccgcaatgatgcgccgattagagccatccatgttggaatactcaatgcggggagtgttgccccagtcagtccagtagattgtgctggagggggcagggagacacaggttagaatattaacgtcccacctaatgcacac

SEQ ID NO: 28767 - DNA, 487 bp, Chicken  19866894247068_1
tcacatttgctatggaaacccaagaaattcagcaaccaacgtgctatcacagatcaaccgtcttctctcatctattgggaccacacagagtatactcagtttatctgtgagcagaaacctgcaggacaggtttccaagggctcccatcccaccgtcctgtgtggcaaacagatcagaatgacccacctggggtcactgaaactacgcacaacatcagccagggacagcatgacatcaaactgccacctgaaaaccaagtgcaaataaggcaagatttacagtagttttacaaagcactcrtcgtattattgcatgcaattcttctattgcctttattattgcagtgtgatccctcggctggagaagatttacaactgactcctcttacacacaggcgaactgtatattatttggggatccaaagtgtatgtgtgcatgaaggggaggggtgggaagaggagtggaaagacatgtatcccaggcccat

SEQ ID NO: 28768 - DNA, 600 bp, Chicken  19866894247075_1
tttgttactcataccccaatacacaccttgtactgtggtggtgaagttttctgttttgctttttgcagctcacaagattcttgatccaatatactccaacagataaagtagaaaaagtataagctactaccctcttttaaagagaataagcaactgcattctactttcagaaacttggagtgaaggacacacgagtcactttctttacagggaagttttggggccctgaaagcatcacaccaaaacttctaccttgaaggaaattagaatgctgctccaaaccactccacaataatcagygttgctcacacacagccatcaaattttactttaaaaatgctgtttacagtagctctggataatacatttgtttcattgacattacaaagaacattagatttgtgaacatgactacacatttgtttttccaaccgatycctgttaagctttgaatctcgggccagtttggagggagaaaagcagaacagcttacacragtaaataygggccgatgtgcattctgtaaacattctgaaacaagtaattacagaatgtaccttcttgcaaataagacatgtatgtaattcaaaaactgcttca

SEQ ID NO: 28769 - DNA, 600 bp, Chicken  19866894247075_2
taaagagaataagcaactgcattctactttcagaaacttggagtgaaggacacacgagtcactttctttacagggaagttttggggccctgaaagcatcacaccaaaacttctaccttgaaggaaattagaatgctgctccaaaccactccacaataatcagygttgctcacacacagccatcaaattttactttaaaaatgctgtttacagtagctctggataatacatttgtttcattgacattacaaagaacattagatttgtgaacatgactacacatttgtttttccaaccgatycctgttaagctttgaatctcgggccagtttggagggagaaaagcagaacagcttacacragtaaataygggccgatgtgcattctgtaaacattctgaaacaagtaattacagaatgtaccttcttgcaaataagacatgtatgtaattcaaaaactgcttcaaaccaagtttaagcaaaagccttctttggacgcactttgtaaaacattccaaaagccattatggcatataaagggttagggctcaaaactaattgggatttttttttttccccccagcaaatttggaaatgaactga

SEQ ID NO: 28770 - DNA, 600 bp, Chicken  19866894247075_3
cactttctttacagggaagttttggggccctgaaagcatcacaccaaaacttctaccttgaaggaaattagaatgctgctccaaaccactccacaataatcagygttgctcacacacagccatcaaattttactttaaaaatgctgtttacagtagctctggataatacatttgtttcattgacattacaaagaacattagatttgtgaacatgactacacatttgtttttccaaccgatycctgttaagctttgaatctcgggccagtttggagggagaaaagcagaacagcttacacragtaaataygggccgatgtgcattctgtaaacattctgaaacaagtaattacagaatgtaccttcttgcaaataagacatgtatgtaattcaaaaactgcttcaaaccaagtttaagcaaaagccttctttggacgcactttgtaaaacattccaaaagccattatggcatataaagggttagggctcaaaactaattgggatttttttttttccccccagcaaatttggaaatgaactgaagctgctccctggtgtgaaagctgaatccagcagccacctgcaggatcagcgaccagtg

SEQ ID NO: 28771 - DNA, 600 bp, Chicken  19866894247075_4
tacagggaagttttggggccctgaaagcatcacaccaaaacttctaccttgaaggaaattagaatgctgctccaaaccactccacaataatcagygttgctcacacacagccatcaaattttactttaaaaatgctgtttacagtagctctggataatacatttgtttcattgacattacaaagaacattagatttgtgaacatgactacacatttgtttttccaaccgatycctgttaagctttgaatctcgggccagtttggagggagaaaagcagaacagcttacacragtaaataygggccgatgtgcattctgtaaacattctgaaacaagtaattacagaatgtaccttcttgcaaataagacatgtatgtaattcaaaaactgcttcaaaccaagtttaagcaaaagccttctttggacgcactttgtaaaacattccaaaagccattatggcatataaagggttagggctcaaaactaattgggatttttttttttccccccagcaaatttggaaatgaactgaagctgctccctggtgtgaaagctgaatccagcagccacctgcaggatcagcgaccagtgctgccagat

SEQ ID NO: 28772 - DNA, 599 bp, Chicken  19866894247076_1
  misc_feature (1)..(120): n is any nucleotide
nnnnnnnnnnnnnnnnnnnnnnnnnnnnnnnnnnnnnnnnnnnnnnnnnnnnnnnnnnnnnnnnnnnnnnnnnnnnnnnnnnnnnnnnnnnnnnnnnnnnnnnnnnnnnnnnnnnnnnnnaaaaggaatctggcagctacttggatttacaagcttgagtgtaatttcctgtcagaatctgctgtatggtcacacactgtgacaaaggaaaggaaggtggtgaggcttgagatggtttctgtggcagggaataccacagtcttgtaccaaatactgctatctcagctgctcctcactggragaggcagctcagtcactcaggcagggaagaggtgagattctgggtggctgactgagctacggattcttaaaagctctgtagatatgtacctctgtgtcattcattcttcacaagatttcaccataggtctgatgagttcactccgttttcaaagggctaaagctttcatgtctaagcagctgcctctgctgggagataagggaacaactggaaatcaagtgatcacctggaaactgcaggtaggaatagctgtagtggatcagagaaaagtctctctcccrtcgtgtcyggtgcctaa

SEQ ID NO: 28773 - DNA, 600 bp, Chicken  19866894247076_2
cagctgctcctcactggragaggcagctcagtcactcaggcagggaagaggtgagattctgggtggctgactgagctacggattcttaaaagctctgtagatatgtacctctgtgtcattcattcttcacaagatttcaccataggtctgatgagttcactccgttttcaaagggctaaagctttcatgtctaagcagctgcctctgctgggagataagggaacaactggaaatcaagtgatcacctggaaactgcaggtaggaatagctgtagtggatcagagaaaagtctctctcccrtcgtgtcyggtgcctaaggcccttccctgagaccccagtgatcctgcacatcccttcagcaggctggcagacatgcagctggtctgcctcgtgtcttggaarcacctccatgtgctcgaatcccagtcctcagctttgtgtgtcccacttacacagggaatggcagcatccatcaaaaagacttccagtgacatcacctctttcagtgctttgagaatatttggcatcccaggacaggctgagacaaacagcatcactaaaatctacggtagttttagcagtcgaggacttgaagattct

SEQ ID NO: 28774 - DNA, 600 bp, Chicken  19866894247076_3
cctcactggragaggcagctcagtcactcaggcagggaagaggtgagattctgggtggctgactgagctacggattcttaaaagctctgtagatatgtacctctgtgtcattcattcttcacaagatttcaccataggtctgatgagttcactccgttttcaaagggctaaagctttcatgtctaagcagctgcctctgctgggagataagggaacaactggaaatcaagtgatcacctggaaactgcaggtaggaatagctgtagtggatcagagaaaagtctctctcccrtcgtgtcyggtgcctaaggcccttccctgagaccccagtgatcctgcacatcccttcagcaggctggcagacatgcagctggtctgcctcgtgtcttggaarcacctccatgtgctcgaatcccagtcctcagctttgtgtgtcccacttacacagggaatggcagcatccatcaaaaagacttccagtgacatcacctctttcagtgctttgagaatatttggcatcccaggacaggctgagacaaacagcatcactaaaatctacggtagttttagcagtcgaggacttgaagattctacttaatg

SEQ ID NO: 28775 - DNA, 600 bp, Chicken  19866894247076_4
atgtacctctgtgtcattcattcttcacaagatttcaccataggtctgatgagttcactccgttttcaaagggctaaagctttcatgtctaagcagctgcctctgctgggagataagggaacaactggaaatcaagtgatcacctggaaactgcaggtaggaatagctgtagtggatcagagaaaagtctctctcccrtcgtgtcyggtgcctaaggcccttccctgagaccccagtgatcctgcacatcccttcagcaggctggcagacatgcagctggtctgcctcgtgtcttggaarcacctccatgtgctcgaatcccagtcctcagctttgtgtgtcccacttacacagggaatggcagcatccatcaaaaagacttccagtgacatcacctctttcagtgctttgagaatatttggcatcccaggacaggctgagacaaacagcatcactaaaatctacggtagttttagcagtcgaggacttgaagattctacttaatgtgagtaaaataaaacttttcatatccttttgtgtttagcttctactgtgcctggtgacacaagcctgcaacacacacctccagcatgagagctt

SEQ ID NO: 28776 - DNA, 600 bp, Chicken  19866894247078_1
tattatgtaaaatatgccaatttgataagtggagaaaatttgcacatctcccattaagtagcccttaattttaccaaacactgttaaagattcacacgtaatttatcagctttctcttttagctatcacttgaagagatttcaggtgtaacaagccagtcatataatccccatgcaaagtgcttgtgatgaaaagtgctaggttttgctgttacgtaagtaatgagtttcatttgggtgcatttttttcccatggcagtggattgctttgatagctctcactttcattggtagtgatcayggggcaacaccaattggatcctttacatctttatgttgctagcaaaggagagacacctcaacaacaaaaaaaaacacgttgaagagtgtttgcaaggtgttttgaatggtgaatatattgcaaacttggataggaactgggttgcgctatatcttaaaaagtgagtccatacctaatgtattttgtaggttagcattaatttgacttgctgggtgtgtggaatttatggatgtaatgcattgcactaggcaaataaaaacatcctccttcagtaataaaggcgagggcaggctccatact

SEQ ID NO: 28777 - DNA, 599 bp, Chicken  19866894247079_1
  misc_feature (1)..(106): n is any nucleotide
nnnnnnnnnnnnnnnnnnnnnnnnnnnnnnnnnnnnnnnnnnnnnnnnnnnnnnnnnnnnnnnnnnnnnnnnnnnnnnnnnnnnnnnnnnnnnnnnnnnnnnnnnnaaggaagagttcctgttaagattcagcttacagagcctaagcaagctgcatgtaaaattacattttcccatgcactgtactgaagatacaaaaagcatttcacagatgtatggtatacactagaagagatttatggcatggccaggctaaatttggggaaaatgttgaagtataaaaaggaaaaagatttacastgactggtcctttgtctcctctaaaactggctgaatacttttgtctacatcaattcagcagaatttatctgcatctgaattctctaaacatgctgatagtgaaggcagacacaggtgmatgctcccactgaaaaagtcagagtttaaccctggttctggtgatatttaatgagggaaaacatactaaaaatatatatgtgcttgtattgtaacaatatacatgtgtgtatatagttataatacatactcttcattgactttattgacacatataacactgatgatggagttcacagatt

SEQ ID NO: 28778 - DNA, 600 bp, Chicken  19866894247079_2
ctgttaagattcagcttacagagcctaagcaagctgcatgtaaaattacattttcccatgcactgtactgaagatacaaaaagcatttcacagatgtatggtatacactagaagagatttatggcatggccaggctaaatttggggaaaatgttgaagtataaaaaggaaaaagatttacastgactggtcctttgtctcctctaaaactggctgaatacttttgtctacatcaattcagcagaatttatctgcatctgaattctctaaacatgctgatagtgaaggcagacacaggtgmatgctcccactgaaaaagtcagagtttaaccctggttctggtgatatttaatgagggaaaacatactaaaaatatatatgtgcttgtattgtaacaatatacatgtgtgtatatagttataatacatactcttcattgactttattgacacatataacactgatgatggagttcacagattgttccaaactgaggagagaggcaggtatgctggatagtaggacagctgttcagaaggatcttggcgtgggaaatgaactgacaagaacctcatgagtgaaccaaaaggaaattcacatt

SEQ ID NO: 28779 - DNA, 600 bp, Chicken  19866894247092_1
taattcaaaataagggaagccctgtattaaattagaagtcaactgatctgctagagagaaaataaatacttactgttaaaatagtgcattcttgctgcattctcactgagtctgctttttatcaaaaccttcgagtgaattctagagaaaaagcattaccattcaccttattttaattttactattatccatggaagtgattgttatttttttcagtgaatttaagatttcacgatctgcatacactttacactttatgtacgataaactactgtgtcttccacatatttctagactctycgcatccacagaatgctggtgaacagttgcaggataaaggaggcttgaaacctctaggagtaaaaagtctgataatcccttacaaattataaatacagaatggaccaaattatgcttttttgggagtatttctgtgaccctatggttttctgatgattgacagcatgctctcagtattttctacagaaaagttttgtagatatttcttaagagtctcttagatgcttttttcacttttcagttacatttttcgattcattctcttactgcagagttactaaatgtaattagttttataca

SEQ ID NO: 28780 - DNA, 600 bp, Chicken  19866894247097_1
atttctctgggcgtaataattctacagcagcccttacagcagtacaattttctccttccagaatcatttatcagaagaacacctagaaccaaagctgaatcttaagtccacaaagcaggtcctattctacaccacagtctaatagctcatgcataccaacaggagaatgcagcactgccacatgctcaggtggaacaggaggagcaatattagttgcagcataagggtagaaaaagaatttcaaggcctgtttcattctcagcaacacaatacgtaactgcttctgccccagcctcacasataacactgtcatggattcacacrtcgttgtgccacaacaaaataaaggcacatcctttcttgaaccacaaaatgatttcaattggtgcttttagtgwaggttaagtataaaccaaatatgaaacttaatggaaaggacgatggtagtagcaaatgtaggtaggccaggcttcctttacaatagaggactgtggtatttggaactgtgcataacctattagaaagcaaaagccagtgtcagctggcttcacacctgaaagagaagttccagatttcaacaccaccagtttcctagagcct

SEQ ID NO: 28781 - DNA, 600 bp, Chicken  19866894247097_2
cagcagcccttacagcagtacaattttctccttccagaatcatttatcagaagaacacctagaaccaaagctgaatcttaagtccacaaagcaggtcctattctacaccacagtctaatagctcatgcataccaacaggagaatgcagcactgccacatgctcaggtggaacaggaggagcaatattagttgcagcataagggtagaaaaagaatttcaaggcctgtttcattctcagcaacacaatacgtaactgcttctgccccagcctcacasataacactgtcatggattcacacrtcgttgtgccacaacaaaataaaggcacatcctttcttgaaccacaaaatgatttcaattggtgcttttagtgwaggttaagtataaaccaaatatgaaacttaatggaaaggacgatggtagtagcaaatgtaggtaggccaggcttcctttacaatagaggactgtggtatttggaactgtgcataacctattagaaagcaaaagccagtgtcagctggcttcacacctgaaagagaagttccagatttcaacaccaccagtttcctagagcctgtttcatagagagcagagcccgga

SEQ ID NO: 28782 - DNA, 600 bp, Chicken  19866894247097_3
atcttaagtccacaaagcaggtcctattctacaccacagtctaatagctcatgcataccaacaggagaatgcagcactgccacatgctcaggtggaacaggaggagcaatattagttgcagcataagggtagaaaaagaatttcaaggcctgtttcattctcagcaacacaatacgtaactgcttctgccccagcctcacasataacactgtcatggattcacacrtcgttgtgccacaacaaaataaaggcacatcctttcttgaaccacaaaatgatttcaattggtgcttttagtgwaggttaagtataaaccaaatatgaaacttaatggaaaggacgatggtagtagcaaatgtaggtaggccaggcttcctttacaatagaggactgtggtatttggaactgtgcataacctattagaaagcaaaagccagtgtcagctggcttcacacctgaaagagaagttccagatttcaacaccaccagtttcctagagcctgtttcatagagagcagagcccggactaagatgacagagatgcaaattcattattcatatttgttattccaaacaaaaagcaaaagaaatgggaaggga

SEQ ID NO: 28783 - DNA, 599 bp, Chicken  19866894247105_1
  misc_feature (1)..(62): n is any nucleotide
nnnnnnnnnnnnnnnnnnnnnnnnnnnnnnnnnnnnnnnnnnnnnnnnnnnnnnnnnnnnnntgcataccgctgctaggagaggctgaaagctcaggatatctaacttctgctccacacatcttcttaactcgtttggtatggtgtaatgtggcaggaagcttggaaactttctgctatttctaaaacagaaacatatactgtatcattaatttttttttaattttatgtgaaggacagctaattaacatgccacatcatcaaggctattaaaaaacatacatatgcaatagatccaacrattgcttcraagttacaattataagtttgctattctgacatgaaagrtaagtgtaccagctactgatcatacaaaaacatyatgaacctgcttttatcctcttcccttttgtcattattgttgtaactaagcaaatagcaaatataattaagcaaatttctaagtcaatacttagaaaattatttgcaaagtgaaaagttctaaatgaaagatgaacatcaacaagtttatctgagagaggtgccaagctttctgaggatttaagtcaactccaaaygtgattaagatggaaaatctga

SEQ ID NO: 28784 - DNA, 599 bp, Chicken  19866894247105_2
  misc_feature (1)..(53): n is any nucleotide
nnnnnnnnnnnnnnnnnnnnnnnnnnnnnnnnnnnnnnnnnnnnnnnnnnnnntgcataccgctgctaggagaggctgaaagctcaggatatctaacttctgctccacacatcttcttaactcgtttggtatggtgtaatgtggcaggaagcttggaaactttctgctatttctaaaacagaaacatatactgtatcattaatttttttttaattttatgtgaaggacagctaattaacatgccacatcatcaaggctattaaaaaacatacatatgcaatagatccaacrattgcttcraagttacaattataagtttgctattctgacatgaaagrtaagtgtaccagctactgatcatacaaaaacatyatgaacctgcttttatcctcttcccttttgtcattattgttgtaactaagcaaatagcaaatataattaagcaaatttctaagtcaatacttagaaaattatttgcaaagtgaaaagttctaaatgaaagatgaacatcaacaagtttatctgagagaggtgccaagctttctgaggatttaagtcaactccaaaygtgattaagatggaaaatctgaactaactgt

SEQ ID NO: 28785 - DNA, 599 bp, Chicken  19866894247105_3
  misc_feature (1)..(15): n is any nucleotide
nnnnnnnnnnnnnnntgcataccgctgctaggagaggctgaaagctcaggatatctaacttctgctccacacatcttcttaactcgtttggtatggtgtaatgtggcaggaagcttggaaactttctgctatttctaaaacagaaacatatactgtatcattaatttttttttaattttatgtgaaggacagctaattaacatgccacatcatcaaggctattaaaaaacatacatatgcaatagatccaacrattgcttcraagttacaattataagtttgctattctgacatgaaagrtaagtgtaccagctactgatcatacaaaaacatyatgaacctgcttttatcctcttcccttttgtcattattgttgtaactaagcaaatagcaaatataattaagcaaatttctaagtcaatacttagaaaattatttgcaaagtgaaaagttctaaatgaaagatgaacatcaacaagtttatctgagagaggtgccaagctttctgaggatttaagtcaactccaaaygtgattaagatggaaaatctgaactaactgtcacctgtaggacacagctgcatagtaatctgaattgca

SEQ ID NO: 28786 - DNA, 600 bp, Chicken  19866894247105_4
aggctgaaagctcaggatatctaacttctgctccacacatcttcttaactcgtttggtatggtgtaatgtggcaggaagcttggaaactttctgctatttctaaaacagaaacatatactgtatcattaatttttttttaattttatgtgaaggacagctaattaacatgccacatcatcaaggctattaaaaaacatacatatgcaatagatccaacrattgcttcraagttacaattataagtttgctattctgacatgaaagrtaagtgtaccagctactgatcatacaaaaacatyatgaacctgcttttatcctcttcccttttgtcattattgttgtaactaagcaaatagcaaatataattaagcaaatttctaagtcaatacttagaaaattatttgcaaagtgaaaagttctaaatgaaagatgaacatcaacaagtttatctgagagaggtgccaagctttctgaggatttaagtcaactccaaaygtgattaagatggaaaatctgaactaactgtcacctgtaggacacagctgcatagtaatctgaattgcacgttacatctgtacatatacagcagagcgtttctg

SEQ ID NO: 28787 - DNA, 600 bp, Chicken  19866894247105_5
atacatatgcaatagatccaacrattgcttcraagttacaattataagtttgctattctgacatgaaagrtaagtgtaccagctactgatcatacaaaaacatyatgaacctgcttttatcctcttcccttttgtcattattgttgtaactaagcaaatagcaaatataattaagcaaatttctaagtcaatacttagaaaattatttgcaaagtgaaaagttctaaatgaaagatgaacatcaacaagtttatctgagagaggtgccaagctttctgaggatttaagtcaactccaaaygtgattaagatggaaaatctgaactaactgtcacctgtaggacacagctgcatagtaatctgaattgcacgttacatctgtacatatacagcagagcgtttctgtctgaacagatcacaaggaaatcaagtattactagaaaaacccttctgtcagtaaagtctgaaatcaacatgcttacaacacctatgaaaacatgcacaaacaccttcaatttcacatttagcaatatgatatacaacactattagacaagtactattttccccctcaccagttcatcataccttctgtatttagg

SEQ ID NO: 28788 - DNA, 600 bp, Chicken  19866894247105_6
gaaaataataaagaacttaaaaacctccgtttcatcaaaagcttggctaaagagcaaaatccatctgcctaactagacacagaacaataagatgacgggagtattactgtacctgaacaagatgagaccaacatttcccttagaggaatctacagagtatcccttctgcgtgtacagcagcagctttgctttgccttgcttaaagggactcagaactgagtcttaactgcaaacacatcaagtggaaaaagcaggaaggatcctttatcttctcaaaaactgtaccctgtatgtgtaagyggggctgggaatgactgattaaaaaaaataaacaaaaaccaaaacagagggaatggtttcttcagatccagttctaaggaacttaagaccaaagcccctggcacgcaccacgtgctccagaactccttaatgaactcttcctagcactatccagaggcagattctacctattcaggtagaataggttttctctctgatacgcactcagtgcagacaatgaacagtgcagattcatggtctagaatttcagtctctgtggtctttcaaagtggccagcaaacgtattatcttcgggctgct

SEQ ID NO: 28789 - DNA, 600 bp, Chicken  19866894247119_1
tcagttccatgtgagaatgcacctcttgctgttagattttagcttcccccagatagttcatatgtctgcccaacttatttggaagaaaccaggcttttaactgggtttgaaggtttctgtcagcacccatcactgttctaccttaacaccactcttctgtcagctagttctgtgcagacaagttgtttctgtaagaaggatcaaacgttgctcaccttaattgtgtgagagtccctctggcaataatcaggctaattgcctcagtgaagccagctggatttggcttaaaatcaaccaccraaattattaaagcacaagtgcacatggttcctttacaaccccaagacccgctcattgaacactatttacatctcactcaaaaatactccttttattctctcctttttgccaaggagaaagatagaaagtgtttggcgttcgggaacaccccaaatgaaaattaaacttctctaagcagtcccagttcactgcctccacttgtgcacaaatctccacatatctctaatcattttcactgtcagtctctgcactctttttacatctattagagaatttatgagacagaatgacgagaaatga

SEQ ID NO: 28790 - DNA, 600 bp, Chicken  19866894247119_2
gtgcacatggttcctttacaaccccaagacccgctcattgaacactatttacatctcactcaaaaatactccttttattctctcctttttgccaaggagaaagatagaaagtgtttggcgttcgggaacaccccaaatgaaaattaaacttctctaagcagtcccagttcactgcctccacttgtgcacaaatctccacatatctctaatcattttcactgtcagtctctgcactctttttacatctattagagaatttatgagacagaatgacgagaaatgaaaaaggattctgagggragagcacgcaattgatttatgttaatagcattataataatattttcagtggtttatttctttttcatcttgtacacagctaaattgttgattacttttctattcctctcctgcttatcaaacagtcgcttccacttgggctccacgaattcattctcaggtctgtctccaaagtggttaaaacataattaattttraatcccccaacacatgagaagttgagataactctttccaatcaatcttactwgcattcatcaatgagtttcaccaactgtcatgctgctcatacatttctctat

SEQ ID NO: 28791 - DNA, 600 bp, Chicken  19866894247119_3
cacatatctctaatcattttcactgtcagtctctgcactctttttacatctattagagaatttatgagacagaatgacgagaaatgaaaaaggattctgagggragagcacgcaattgatttatgttaatagcattataataatattttcagtggtttatttctttttcatcttgtacacagctaaattgttgattacttttctattcctctcctgcttatcaaacagtcgcttccacttgggctccacgaattcattctcaggtctgtctccaaagtggttaaaacataattaattttraatcccccaacacatgagaagttgagataactctttccaatcaatcttactwgcattcatcaatgagtttcaccaactgtcatgctgctcatacatttctctatgcgaagctcctctgccttcagtagctttggcatatttaacaactgttaatgctaaaaaaatcaccaaccctgtaatttctattgggctataccagaagccttagaagtcccccagatgggcatgaataaatatcatagtcacctgtgacagcatccttaatgatttttgcatttcttcgcactgataactttcatc

SEQ ID NO: 28792 - DNA, 600 bp, Chicken  19866894247119_4
ttagagaatttatgagacagaatgacgagaaatgaaaaaggattctgagggragagcacgcaattgatttatgttaatagcattataataatattttcagtggtttatttctttttcatcttgtacacagctaaattgttgattacttttctattcctctcctgcttatcaaacagtcgcttccacttgggctccacgaattcattctcaggtctgtctccaaagtggttaaaacataattaattttraatcccccaacacatgagaagttgagataactctttccaatcaatcttactwgcattcatcaatgagtttcaccaactgtcatgctgctcatacatttctctatgcgaagctcctctgccttcagtagctttggcatatttaacaactgttaatgctaaaaaaatcaccaaccctgtaatttctattgggctataccagaagccttagaagtcccccagatgggcatgaataaatatcatagtcacctgtgacagcatccttaatgatttttgcatttcttcgcactgataactttcatctcttgtgcttatgtcagaaatataaaaaggctaagatgcactgggagtttat

SEQ ID NO: 28793 - DNA, 600 bp, Chicken  19866894247126_1
gtggtactcccatctgttaatcttgacatttgttttgtgtgcaagattataatattatagaagttaatgttacagtggaatagccaaacatgagttccattaaccttctgattcactctccaagcagaagatttattaactacaaagtctcggaagtaagaaacattcactttatgttgtgctacactgaggtgttagtagtggagtcaccagaattgtagagcatgcaagatttgcaaaggctgtgaagaaacgcattggcattttagttcacatttttaccattaacaaactaattamgcccagtacctacccacctgcatggatcatcatatgcctgtaaaagggcactatgtaacgctgccttcagttttggaaaattaaataaactgatactgtaaaaaccttaaagcccgtgacacttcactcaagaagtaatactcaaagtctactgkcatttatatatggattatatatttttaggaaagtagtaaggcgtaagaaaagaaaaagcaagacacctccacactagcaagaaatcagccataaggcaggaaacataagttctctaagaaatgtaagggcttattcattattaga

SEQ ID NO: 28794 - DNA, 600 bp, Chicken  19866894247126_2
gtaagaaacattcactttatgttgtgctacactgaggtgttagtagtggagtcaccagaattgtagagcatgcaagatttgcaaaggctgtgaagaaacgcattggcattttagttcacatttttaccattaacaaactaattamgcccagtacctacccacctgcatggatcatcatatgcctgtaaaagggcactatgtaacgctgccttcagttttggaaaattaaataaactgatactgtaaaaaccttaaagcccgtgacacttcactcaagaagtaatactcaaagtctactgkcatttatatatggattatatatttttaggaaagtagtaaggcgtaagaaaagaaaaagcaagacacctccacactagcaagaaatcagccataaggcaggaaacataagttctctaagaaatgtaagggcttattcattattagatacattgcataaaagtatctttaaatactggaattataaacaaaagatgaacaaaaagtaattagtccatctaggttttgttgttgttgttttttgtttgtttgttttcccctgaagaaaaattttgagtataaagccagatctctgctgtcacc

SEQ ID NO: 28795 - DNA, 600 bp, Chicken  19866894247129_1
ttgaaacgaacccttaaataggagatcattctgttactacgagtgactaaaaatgtaattttcttcatttcttgtaactgcttgttttcttttcacttggcatacatatcttaaaatctttaaaacatttggcaaatcacagttaacaatctagatattatagtgcatacacatttcagatcgaaagattatcaacctatcttagcctttgtgaaacttaacatgccagaaaatgtaatgtttactatgtagttgtggcaaactaattttccctcactgaaaagaaatgtcgcatagaarggaagggttcagagtgaaatgaaacctcaagctcacctaatgactggagtgaatttgaatgtcggattcctctttgtgctggtactaacatgagataaggaagatcaatctggacaccaggctaatttagcaatataggatgagattttctatgttggttatcctatgctgcatttctcttctcttcctagggtaataggttccctgaactgctttttgtgccctgattgtcatatgccttgatacagacattcttttccccctgctaacttctgtctctcatttacttttgactgtatg

SEQ ID NO: 28796 - DNA, 600 bp, Chicken  19866894247130_1
caggctggccgcacaccggagcgctctgacgttctccagggccctgctgtactcacgccgtcccggtttcttttcctgccctacaagatgaagctgcctgtagtgtgcacagcaaatacagcagagccataggaacgggatggagttggattatcagaattagatctggacccaaagcaaatccctgttagtggagcagggattattgtgccaagtaaatattgccatttccatgttttttttttgaaacccatgctgccagtgacagtgaatagtagcagtgtgtaacttagtttcacrgtgctggtgttttggaaagctctcggtgtaaatattgcactcaggatgagtggcccattggctgtgyttcgtttctgtgggaatctgagtgtctgcaacctgtggagcagctcctattgatacagctggtcctcggccccctgctctgacagaggagggcagtggtgcttggcctcctctggctgtgacctggccccatggtttctgtgttcctggagcaggcagagctgggtgccatggggtctcgaggtgtttgcctcagttcagcccctgttctccttttggcattgcccatccatc

SEQ ID NO: 28797 - DNA, 600 bp, Chicken  19866894247130_2
ttcttttcctgccctacaagatgaagctgcctgtagtgtgcacagcaaatacagcagagccataggaacgggatggagttggattatcagaattagatctggacccaaagcaaatccctgttagtggagcagggattattgtgccaagtaaatattgccatttccatgttttttttttgaaacccatgctgccagtgacagtgaatagtagcagtgtgtaacttagtttcacrgtgctggtgttttggaaagctctcggtgtaaatattgcactcaggatgagtggcccattggctgtgyttcgtttctgtgggaatctgagtgtctgcaacctgtggagcagctcctattgatacagctggtcctcggccccctgctctgacagaggagggcagtggtgcttggcctcctctggctgtgacctggccccatggtttctgtgttcctggagcaggcagagctgggtgccatggggtctcgaggtgtttgcctcagttcagcccctgttctccttttggcattgcccatccatccttccagctgcagtccccgtgttcctgccatgtgtgtggtgccactgtcctgtgtgtggggggctct

SEQ ID NO: 28798 - DNA, 600 bp, Chicken  19866894247140_1
aggggtaccttgcaaaactccggctgccaagctcaccccgcctgtcaaaaagtcccaggacatgcatgacgagaggagcaagctggtgaatgagtatgcatgtcgggtgctggaacttctggggatggggcatcggctgtttgtgcctcggctgcttgcggtgagatcccgttttcttcaaattaagtcattgtgaatttgccatctcccctcccaaacctgcttcccctgggattctttacgctggatggaggtgggagagctctcatggttttttttttttccttctcttggcttctytcaatccagctcctgagcgctgactcttccctatgcccaggagggctggtgctgtgatacctgcagtcacaaccagggctcttcccataaaacgtgtcctaaagcggtgaatgcttttgttctcagttctgtaatggttccaaataagcgtgctctgtctgctcccaggtgctgctggaaagtgctttaattcacagcagctcgaatttgatacttggggcatcagaggtttgttttaagcattttaggcaatcgtaacaattcaggatgtggtgtgttacagttttctgctgttttctg

SEQ ID NO: 28799 - DNA, 600 bp, Chicken  19866894247142_1
aatgcattccttgaaataaatggggatgtgctagtacaagaaataccctgtatcacaactcgtgcaacaataaatgagtgataaattccaataaattaccatcatgacagtttaattatgctctgccattggttactatgaaataaatctgtttatgtaaaccttcattttgtggttgtgcacaacttacagcaggtacagcttttatgagaaattgagtgtttagcaacagaaaaatagggagggggaggagttgccatccctattctgtccacctttttaacagaaacttaagtcagrtgatatttaacctgtatggttttttaatcatccagacatatgaagaggtaagatcactcaatgscattccttagkatgcgttaagaattttgacacgatatggattctattaggaatccacaacccttcacaaggagaagctatcataagttaccattctacccaaagcaatccagtaatgcagggccagaattcaaagaaaaaagtcaggcttcccagattcaagtaatactacaagcatcctcaattttaatatagaacagtgtrcagggatgagcagaagttgatgaaagctgctgt

SEQ ID NO: 28800 - DNA, 600 bp, Chicken  19866894247142_2
caacaataaatgagtgataaattccaataaattaccatcatgacagtttaattatgctctgccattggttactatgaaataaatctgtttatgtaaaccttcattttgtggttgtgcacaacttacagcaggtacagcttttatgagaaattgagtgtttagcaacagaaaaatagggagggggaggagttgccatccctattctgtccacctttttaacagaaacttaagtcagrtgatatttaacctgtatggttttttaatcatccagacatatgaagaggtaagatcactcaatgscattccttagkatgcgttaagaattttgacacgatatggattctattaggaatccacaacccttcacaaggagaagctatcataagttaccattctacccaaagcaatccagtaatgcagggccagaattcaaagaaaaaagtcaggcttcccagattcaagtaatactacaagcatcctcaattttaatatagaacagtgtrcagggatgagcagaagttgatgaaagctgctgtaattaggaggctgatctcttacaataattttccaagtttattgcttattttaaagggaacttcg

SEQ ID NO: 28801 - DNA, 600 bp, Chicken  19866894247142_3
gagtgataaattccaataaattaccatcatgacagtttaattatgctctgccattggttactatgaaataaatctgtttatgtaaaccttcattttgtggttgtgcacaacttacagcaggtacagcttttatgagaaattgagtgtttagcaacagaaaaatagggagggggaggagttgccatccctattctgtccacctttttaacagaaacttaagtcagrtgatatttaacctgtatggttttttaatcatccagacatatgaagaggtaagatcactcaatgscattccttagkatgcgttaagaattttgacacgatatggattctattaggaatccacaacccttcacaaggagaagctatcataagttaccattctacccaaagcaatccagtaatgcagggccagaattcaaagaaaaaagtcaggcttcccagattcaagtaatactacaagcatcctcaattttaatatagaacagtgtrcagggatgagcagaagttgatgaaagctgctgtaattaggaggctgatctcttacaataattttccaagtttattgcttattttaaagggaacttcgtaaagggttga

SEQ ID NO: 28802 - DNA, 600 bp, Chicken  19866894247142_4
ctgtccacctttttaacagaaacttaagtcagrtgatatttaacctgtatggttttttaatcatccagacatatgaagaggtaagatcactcaatgscattccttagkatgcgttaagaattttgacacgatatggattctattaggaatccacaacccttcacaaggagaagctatcataagttaccattctacccaaagcaatccagtaatgcagggccagaattcaaagaaaaaagtcaggcttcccagattcaagtaatactacaagcatcctcaattttaatatagaacagtgtrcagggatgagcagaagttgatgaaagctgctgtaattaggaggctgatctcttacaataattttccaagtttattgcttattttaaagggaacttcgtaaagggttgaaagatttaatcagtgatatttgagcatattgatttttaaaggttaaatataatctaataatcccacacgtttatgttttttttttccctgctactcccatacagggttaaaagcaatggtgtctcaaggagtgaaaaaccctatgatagatttaacagctttggaagacagaacattagatgaagtaagtag

SEQ ID NO: 28803 - DNA, 600 bp, Chicken  19866894247148_1
ttatttgccacaaactccacaaagttatactcatttttcttagtggcagtaagtggctttaatgcaagtaatggaatttaaaaccagaaagtccttattactattcaaagtgccctttgtcctttgataatgaacaccatattagcatcttgaagaaaaaccaaaaccctaaaacaggttatgttatttcagcattttgaactaagtgaccaaaactttattaatggaagttgattgcatttaattgcgtatagacaacactctaaaaaaaagttccaaactcttacctgttccagcaayaggaataagatggatatagactaacattagaaatgagaaaaatatgcccaaaagggaaaaaataataataataaaaaagtcatatgtgatatttgctataatcgtatttcttgtgctgtagaaaggcagtagagaaggggaggcagggaaaggcaaggccagtaaaagcaggagagtacagtgtatgaaatgtatcccgacagactgctggaaccagatgtcatgcaattttaattacccttaccaaaatacccacttagtttaaaaatgaaagggtaaaattgatagtcattttaaaac

SEQ ID NO: 28804 - DNA, 599 bp, Chicken  19866894247149_1
  misc_feature (1)..(51): n is any nucleotide
nnnnnnnnnnnnnnnnnnnnnnnnnnnnnnnnnnnnnnnnnnnnnnnnnnncagtgtcttttgtgcttggctctcattcacgcagtggcacattcttgactcacattcagctcgatgtccatcaggacctctaggtcctcttatgtaaagctagtttctagtcagcctgtacccagtttgtactgttgcgtggtgtcactatttacagggtgcaggacttcacatttgaagtcttgaacttcatgatgctcctgtcaccagattcttgttcatgcctcccgggatgacgactcccagtayataaaatagctgcaagtaataacacaaaagagatgacagtcagcctaatggcattgtataaactaagaattcagcaggactgacagctgtgctatactcatccttctactagaaaacaccgtgctgctgtccttcatgggatagttgatgtccttacttttgaagagaaaaccaaaggatgatgcttgtaacagaagaggccaagagaattcctctgagaagatttagtggatagaattaaggtgcctttttgtctttatttccagtcccagaaatcaaaattattagcatcagcccaa

SEQ ID NO: 28805 - DNA, 600 bp, Chicken  19866894247152_1
acccacaggaacaaatggttttgtttgtcacccaggcaagaagaaaaatatttgcataccgaatctgctatttttaatgctgctgcctgaaggactgggagatgatgggttgcacaaagtaattacagaagaaattgagggatttgtggatgtgatggacttaaagacaggagactggggatctgagtgcttcagtgacctggtatttttagcgtttggggaatgcaaccaagaggcagagaatagctactgcttcactagagacatgccaccttcagaaggatataagctaaggagagrgctctctgctaaggctcaggatgaagctttcagtcctggattaatctgtaaaagcagcccaagcttgagttgaaaatgagctgtgtgtcacactctggcatttgactggtggtcaagctcttctcatttttacccttaaatcagcrtcacttccctccctattgctttataagtactcagtgctctgcagcatggatgtattttgatgttggattcaactcatcaccttcctgcttttaaacctggcaacgaaggaaacagagctcacgctcccaactgaagtgcaaagcgagtgactct

SEQ ID NO: 28806 - DNA, 600 bp, Chicken  19866894247152_2
tggatgtgatggacttaaagacaggagactggggatctgagtgcttcagtgacctggtatttttagcgtttggggaatgcaaccaagaggcagagaatagctactgcttcactagagacatgccaccttcagaaggatataagctaaggagagrgctctctgctaaggctcaggatgaagctttcagtcctggattaatctgtaaaagcagcccaagcttgagttgaaaatgagctgtgtgtcacactctggcatttgactggtggtcaagctcttctcatttttacccttaaatcagcrtcacttccctccctattgctttataagtactcagtgctctgcagcatggatgtattttgatgttggattcaactcatcaccttcctgcttttaaacctggcaacgaaggaaacagagctcacgctcccaactgaagtgcaaagcgagtgactctgtaaagatcaaggagatgctcccgaccacgtaattcaaagcaaggtaaattgcgtgcatcacctagattccaggataccgttaacctaagaataatgattatttcattaagaatatgattatttcatgccatgagcacatagcaca

SEQ ID NO: 28807 - DNA, 600 bp, Chicken  19866894247154_1
tggctgattctgtgaaatagctctcccccttccatcatctccattacaattaggagccgagccctgttcaaaagcattttattttgttatattaaaattaatcaaaagaagaacagaattgctaagctaataatgcacacttcgtatctactgatgcaggcaaaaaaagagacatacttgtacagttgttctaagccatcatttcagtgatttggtctttgtgcataacctgcagatcttctggctcccagcacacctgactcactgattgccagccaggagcccacagtttgctcttcrtgctgggaccccacytccagctggaacaaaccccatggacatgrgcacgggtgcattyacacagatgcatgcacgctgcacccacaccttccaccagcttgggtccagcagccattgagatgcaccaatgtgcaactccacctccagagagtaataatgcaggcagagtgcgtgaaactgagctggcttagagcacacctacacctgtctgcccccatccttgcctagctagctgcctgcacgctggagatgtttgtggcatgggagaagcaggaggtcgagggtcatctttaatgcttt

SEQ ID NO: 28808 - DNA, 600 bp, Chicken  19866894247154_2
aatagctctcccccttccatcatctccattacaattaggagccgagccctgttcaaaagcattttattttgttatattaaaattaatcaaaagaagaacagaattgctaagctaataatgcacacttcgtatctactgatgcaggcaaaaaaagagacatacttgtacagttgttctaagccatcatttcagtgatttggtctttgtgcataacctgcagatcttctggctcccagcacacctgactcactgattgccagccaggagcccacagtttgctcttcrtgctgggaccccacytccagctggaacaaaccccatggacatgrgcacgggtgcattyacacagatgcatgcacgctgcacccacaccttccaccagcttgggtccagcagccattgagatgcaccaatgtgcaactccacctccagagagtaataatgcaggcagagtgcgtgaaactgagctggcttagagcacacctacacctgtctgcccccatccttgcctagctagctgcctgcacgctggagatgtttgtggcatgggagaagcaggaggtcgagggtcatctttaatgcttttgagtctaatactct

SEQ ID NO: 28809 - DNA, 586 bp, Chicken  19866894247154_3
tacaattaggagccgagccctgttcaaaagcattttattttgttatattaaaattaatcaaaagaagaacagaattgctaagctaataatgcacacttcgtatctactgatgcaggcaaaaaaagagacatacttgtacagttgttctaagccatcatttcagtgatttggtctttgtgcataacctgcagatcttctggctcccagcacacctgactcactgattgccagccaggagcccacagtttgctcttcrtgctgggaccccacytccagctggaacaaaccccatggacatgrgcacgggtgcattyacacagatgcatgcacgctgcacccacaccttccaccagcttgggtccagcagccattgagatgcaccaatgtgcaactccacctccagagagtaataatgcaggcagagtgcgtgaaactgagctggcttagagcacacctacacctgtctgcccccatccttgcctagctagctgcctgcacgctggagatgtttgtggcatgggagaagcaggaggtcgagggtcatctttaatgcttttgagtctaatactctgctgtacctcctgat

SEQ ID NO: 28810 - DNA, 572 bp, Chicken  19866894247154_4
gagccctgttcaaaagcattttattttgttatattaaaattaatcaaaagaagaacagaattgctaagctaataatgcacacttcgtatctactgatgcaggcaaaaaaagagacatacttgtacagttgttctaagccatcatttcagtgatttggtctttgtgcataacctgcagatcttctggctcccagcacacctgactcactgattgccagccaggagcccacagtttgctcttcrtgctgggaccccacytccagctggaacaaaccccatggacatgrgcacgggtgcattyacacagatgcatgcacgctgcacccacaccttccaccagcttgggtccagcagccattgagatgcaccaatgtgcaactccacctccagagagtaataatgcaggcagagtgcgtgaaactgagctggcttagagcacacctacacctgtctgcccccatccttgcctagctagctgcctgcacgctggagatgtttgtggcatgggagaagcaggaggtcgagggtcatctttaatgcttttgagtctaatactctgctgtacctcctgat

SEQ ID NO: 28811 - DNA, 599 bp, Chicken  19866894247156_1
tcaatgaagtttacatacttctccgttgaaaaaaaagtgagagttccttaaggtcttcatgctgacaaacttgattgatacagacatctaagtaatctcagttctacttatccagcccaaactcatatgtccaaagaacacttagaccaattcaacaggtggaagttcaggttataaataggaaaacaaaggtgcattgaggttaagtgatttgccaaagacacagtctaacaggattaggattcaggagttgccagtctctatttctttgcttgtcctacatttgctccactagattaygtatactgtgaagagtggggaagggaggaaaatgcttaaatcttctgcttgttgttaacacaaataacactgtcacactattcagtatcagctattcactttatatacacctaaaccatgcctactaccagaaataatgtaagtacaaaagaactaaacaaatttatttgaaatcagcataagctcttataaaagaaagcttcagactctgtgtgtgtctgtgtagaggaatgttgcagatagacttctctgacagcaaaaggaaaaagaaagaatgaacaaagtttacagtatctata

SEQ ID NO: 28812 - DNA, 600 bp, Chicken  19866894247158_1
tatattgaagagcttcaggtgaaaacccaccccagaaatcccctctcatgatcattatatgaaagtacagtggttgcacttgatgatcctcagggtgttttccagcctacgcaattctatgattgtaaacaggctttcatctacagcatttgtgtatggacactattttaaaagttgcctgccacacctctagacttgtcatctctgttaccacgtattgcagtacaaaccagcctagcccctgcatttagtcccagggaagatcctactgtggcgacaaccctgtgtatttcattgcaygctctttacaaatgtgttagcaggcagatggaaccgctrtgaattaaaccagagtgggtgaccacagcacaacagaaagagcctcacccagtggcttttgcatccagttcacatcttctggctcctttgcaaatacgtagagtgacagagtgccttattcccagcacggtgttccatggggttaggtcgtcttttggcagtgatgggaaggatgattcatttgtttaaaccactcaaccttgttacacactcagctggtaaacagaagtcacacccaggtctgtgctcacagactcccaa

SEQ ID NO: 28813 - DNA, 600 bp, Chicken  19866894247158_2
cccctctcatgatcattatatgaaagtacagtggttgcacttgatgatcctcagggtgttttccagcctacgcaattctatgattgtaaacaggctttcatctacagcatttgtgtatggacactattttaaaagttgcctgccacacctctagacttgtcatctctgttaccacgtattgcagtacaaaccagcctagcccctgcatttagtcccagggaagatcctactgtggcgacaaccctgtgtatttcattgcaygctctttacaaatgtgttagcaggcagatggaaccgctrtgaattaaaccagagtgggtgaccacagcacaacagaaagagcctcacccagtggcttttgcatccagttcacatcttctggctcctttgcaaatacgtagagtgacagagtgccttattcccagcacggtgttccatggggttaggtcgtcttttggcagtgatgggaaggatgattcatttgtttaaaccactcaaccttgttacacactcagctggtaaacagaagtcacacccaggtctgtgctcacagactcccaaagaagaaaatatcacttgctggaaggaggaaaaattaaa

SEQ ID NO: 28814 - DNA, 600 bp, Chicken  19866894247158_3
gagtgggtgaccacagcacaacagaaagagcctcacccagtggcttttgcatccagttcacatcttctggctcctttgcaaatacgtagagtgacagagtgccttattcccagcacggtgttccatggggttaggtcgtcttttggcagtgatgggaaggatgattcatttgtttaaaccactcaaccttgttacacactcagctggtaaacagaagtcacacccaggtctgtgctcacagactcccaaagaagaaaatatcacttgctggaaggaggaaaaattaaacctgctaacatyacaattttcatggtacttaaaataatcagcagccggggctagggattgatttgttttccttttcaaaactcagttcctttctgcctctttctttatcttttaagcacagatgcagggggttggctgaatctttacttgttcctgtcttgtgaaagtttcctggyttggcaaaaataattgggcatccaacagaaataaataaataaatagataaaaattgtatcttcttacatctgtaaatgcaagagtttgcatagtttggttcgtggacgtgtccatgttacaggsatgctwtaaggg

SEQ ID NO: 28815 - DNA, 600 bp, Chicken  19866894247158_4
ttcatttgtttaaaccactcaaccttgttacacactcagctggtaaacagaagtcacacccaggtctgtgctcacagactcccaaagaagaaaatatcacttgctggaaggaggaaaaattaaacctgctaacatyacaattttcatggtacttaaaataatcagcagccggggctagggattgatttgttttccttttcaaaactcagttcctttctgcctctttctttatcttttaagcacagatgcagggggttggctgaatctttacttgttcctgtcttgtgaaagtttcctggyttggcaaaaataattgggcatccaacagaaataaataaataaatagataaaaattgtatcttcttacatctgtaaatgcaagagtttgcatagtttggttcgtggacgtgtccatgttacaggsatgctwtaagggtctcatctggaaatctgcccagataccttgcggtaatgatactcagatacagttatttcaaagagcaagtctacgaggcatcagagattacttaaagtgaaacacgtacgtcgtttttatggagcagtctcaacaggcacagaaaaatgatgtacggtgaatca

SEQ ID NO: 28816 - DNA, 600 bp, Chicken  19866894247158_5
cctgctaacatyacaattttcatggtacttaaaataatcagcagccggggctagggattgatttgttttccttttcaaaactcagttcctttctgcctctttctttatcttttaagcacagatgcagggggttggctgaatctttacttgttcctgtcttgtgaaagtttcctggyttggcaaaaataattgggcatccaacagaaataaataaataaatagataaaaattgtatcttcttacatctgtaaatgcaagagtttgcatagtttggttcgtggacgtgtccatgttacaggsatgctwtaagggtctcatctggaaatctgcccagataccttgcggtaatgatactcagatacagttatttcaaagagcaagtctacgaggcatcagagattacttaaagtgaaacacgtacgtcgtttttatggagcagtctcaacaggcacagaaaaatgatgtacggtgaatcaaaccagatccatttgctgtgagtcctaaaggtgcgcaagccctggatgcactgcactcctgatatgccgccagctgtggggctgctgcagggtgggaaagtcccacattgaccaacagctcaga

SEQ ID NO: 28817 - DNA, 600 bp, Chicken  19866894247158_6
aacatyacaattttcatggtacttaaaataatcagcagccggggctagggattgatttgttttccttttcaaaactcagttcctttctgcctctttctttatcttttaagcacagatgcagggggttggctgaatctttacttgttcctgtcttgtgaaagtttcctggyttggcaaaaataattgggcatccaacagaaataaataaataaatagataaaaattgtatcttcttacatctgtaaatgcaagagtttgcatagtttggttcgtggacgtgtccatgttacaggsatgctwtaagggtctcatctggaaatctgcccagataccttgcggtaatgatactcagatacagttatttcaaagagcaagtctacgaggcatcagagattacttaaagtgaaacacgtacgtcgtttttatggagcagtctcaacaggcacagaaaaatgatgtacggtgaatcaaaccagatccatttgctgtgagtcctaaaggtgcgcaagccctggatgcactgcactcctgatatgccgccagctgtggggctgctgcagggtgggaaagtcccacattgaccaacagctcagagggggc

SEQ ID NO: 28818 - DNA, 600 bp, Chicken  19866894247161_1
tttgtttttatatatatcaggaagaatttcaattagctcacaattgctcaaattactgtaaagaaaacggaatacactttacagctttcaaaattttaacatcagtgttaaacatgctatgatattgctgcaatttataaaccagaaaaatgtggcagacggaatatatagtatataacctagaaggcaaaatagacactatataaaacatcaaactgagttaattaatttagagtaaattaagaaaaacattttctttggccacttcctcacattaacaccatttatttctcccaccaraagatactacttttgatgcacagaagtttaaataattmatgagaaagaaacttccccttaacaacatyagaacaacgttgaagcaatgctgaagtactgaacttttaagtatatatttctccattttccactctagagtgtggagacaattcttcagaaaattgttaatagatttcaaggaaagtaatatagctttggaaaacaaacaaactcaaaaaaagaatcaaagaacaccactatctgaaagaggttatcaatcaacctgaaagaagacgacaataaatgtctttttttttttta

SEQ ID NO: 28819 - DNA, 600 bp, Chicken  19866894247161_2
cacaattgctcaaattactgtaaagaaaacggaatacactttacagctttcaaaattttaacatcagtgttaaacatgctatgatattgctgcaatttataaaccagaaaaatgtggcagacggaatatatagtatataacctagaaggcaaaatagacactatataaaacatcaaactgagttaattaatttagagtaaattaagaaaaacattttctttggccacttcctcacattaacaccatttatttctcccaccaraagatactacttttgatgcacagaagtttaaataattmatgagaaagaaacttccccttaacaacatyagaacaacgttgaagcaatgctgaagtactgaacttttaagtatatatttctccattttccactctagagtgtggagacaattcttcagaaaattgttaatagatttcaaggaaagtaatatagctttggaaaacaaacaaactcaaaaaaagaatcaaagaacaccactatctgaaagaggttatcaatcaacctgaaagaagacgacaataaatgtcttttttttttttaatacataaaatacacactcactttctagttactgcaaa

SEQ ID NO: 28820 - DNA, 600 bp, Chicken  19866894247161_3
ggaatacactttacagctttcaaaattttaacatcagtgttaaacatgctatgatattgctgcaatttataaaccagaaaaatgtggcagacggaatatatagtatataacctagaaggcaaaatagacactatataaaacatcaaactgagttaattaatttagagtaaattaagaaaaacattttctttggccacttcctcacattaacaccatttatttctcccaccaraagatactacttttgatgcacagaagtttaaataattmatgagaaagaaacttccccttaacaacatyagaacaacgttgaagcaatgctgaagtactgaacttttaagtatatatttctccattttccactctagagtgtggagacaattcttcagaaaattgttaatagatttcaaggaaagtaatatagctttggaaaacaaacaaactcaaaaaaagaatcaaagaacaccactatctgaaagaggttatcaatcaacctgaaagaagacgacaataaatgtcttttttttttttaatacataaaatacacactcactttctagttactgcaaagaattagtaccacagaattcataaatggta

SEQ ID NO: 28821 - DNA, 600 bp, Chicken  19866894247161_4
aattcataaatggtagaatcattgtaacatctggcattcacatctcttgatgaacagagctccaaagagctttccactgttcaatacacaaaagtgctgagagctttctaaatactcttctattcttaaaaaataaaataaaaatgctttgatggagaaaaggcagtcagaatgagatgacaggacaaggaagtgtcttggcatgtaacatagaaatcagaactagaaaaaagcaaagaaggctgttttacctagactgtaagtgcattaagccagtccttttagcttaaatctagcttkaggtaattggtaatccttttttttcccccctactgggaaagccaaggtttccattggttctgaaagcactgtggtctgtgagggaccaacacacaaacagacagcacactaccaatggataaagatgattctgtgacatgtccaactactaaatggaaacaaggtagaacaaaattctaacatgtagggacagacttatggattattgtactccaacctgtttgcactggcttgtttagacacctccttcaaccttttcacttttttcctaattgcatcagcatcaggtaaatggtgatg

SEQ ID NO: 28822 - DNA, 367 bp, Chicken  19866894247163_1
ctcatccagtgcagacctgaacctgaacagtctgtgagtttcaggtttgcggctcgcccataccctgtgggccttcagaacaagggctgtgacccatctctctgctttggatccaaaagacttgctctgtgcccaagaggaatttgggttgcatggctccacctacgacacatggcctcttaggacaagatttatcttgtgggatttagggtgcacacagggcccgaggctcccagtgggtgggtgggtgggtgggagaaggagctttccacagggctttgtacactcttccagccccarttcatccagtacatcactaaagcacagaatcatagagttgttttgagtcggaggaccctcactctgc

SEQ ID NO: 28823 - DNA, 540 bp, Chicken  19866894247166_1
cttgttaaaaagccattctgctgtaaaacaatatccttgataactgtattaattttaaatgccagtgatatagtcataaaatttccttgtaggttgttacagccatccagccctttatctggcatgccagaaagcctcagccttctgcccagccccttcctctgctggtagtggtgataacgagtgaaatattttacagcgagcactgtgtttgaaaaggtcaatggctgacattatgtgtggagggaggggagggatcttccagtcctccccatcctaagttacttcactactgcaccrcttggaaataatgagagtgaggttcgtgcagcgtgaggtgctcagccaaagggtggcttcaaagtgaacgggacctcttcacttcagagcatcttccaggttttcaacagtctcccatgagcttgggctgctcccagtcacttatactggttggaaagccattcactgatggcttccacctcaaccccaggcagctcctggtgctcagatcctccctctatcattacatagagattcccg

SEQ ID NO: 28824 - DNA, 599 bp, Chicken  19866894247167_1
  misc_feature (1)..(61): n is any nucleotide
nnnnnnnnnnnnnnnnnnnnnnnnnnnnnnnnnnnnnnnnnnnnnnnnnnnnnnnnnnnnntggacagcttcagtgttatatggtgcctcagtcagattccagacagctgtgcagttcttttggtgttggcatgcagcagacgactgatgcattatgtgggaaaccaagttaaaggacgttgagttctctttggcctgagcttataaatgttgaaacagctgataatgaagtctagttgttcacctcagatttcaacatttttaaaaaacgcatcataaaaggttcctcctgtcagttgwttagtgctcttccagcaagaatcttttccagtaggttattatgtcagtcttccattaagcttcagtttcccagatacttgaaacagtgattctgtttctgttttcctcmctggcagcagcacttgtgtgctaaaccagatccagcaattaatccagtttattatgtagttgcagctgtgccaagggaaggagaggggaaaaatggaacttccagtttgtaagcattagtgctggtacatgggaggatcctgctctgaggttcattcaaagcaactgcaaaattatacccttaagccttc

SEQ ID NO: 28825 - DNA, 600 bp, Chicken  19866894247167_2
gtgcagttcttttggtgttggcatgcagcagacgactgatgcattatgtgggaaaccaagttaaaggacgttgagttctctttggcctgagcttataaatgttgaaacagctgataatgaagtctagttgttcacctcagatttcaacatttttaaaaaacgcatcataaaaggttcctcctgtcagttgwttagtgctcttccagcaagaatcttttccagtaggttattatgtcagtcttccattaagcttcagtttcccagatacttgaaacagtgattctgtttctgttttcctcmctggcagcagcacttgtgtgctaaaccagatccagcaattaatccagtttattatgtagttgcagctgtgccaagggaaggagaggggaaaaatggaacttccagtttgtaagcattagtgctggtacatgggaggatcctgctctgaggttcattcaaagcaactgcaaaattatacccttaagccttctaaatctgccctcctttatgagtgatgaccgttcggatttctggcctgtccttggaattgtctgtctgtttttgtttattttttttagattcatttgaaaactggagcat

SEQ ID NO: 28826 - DNA, 599 bp, Chicken  19866894247173_1
  misc_feature (1)..(123): n is any nucleotide
nnnnnnnnnnnnnnnnnnnnnnnnnnnnnnnnnnnnnnnnnnnnnnnnnnnnnnnnnnnnnnnnnnnnnnnnnnnnnnnnnnnnnnnnnnnnnnnnnnnnnnnnnnnnnnnnnnnnnnnnnnnttactgctttctacttctaaattcctcttatgatctaatattttcccctacacaggtgcctaagaagactgctcaaatgctattacttgtacatgaagtggaaaaattcttatttgctactgaatggttcaattgtcgaagaaagtagatgataatgaagaaaatatgtaaatgatwaatgtcaagaagactttatgcatcatataagcatgcaaaaatggtgcgttaggaaaaaaarttggcttcaccaatttaataaaatatttcattttaaaattttgagatattttatttctctctctttttaaaaacaatatatttatcttgtttttgctttcaatttgctttttatttatttatttatttattacacagttatctatgtattccagaggtgtcagatacaaggatataatgctgcacaatatgcctggaggtattcagaatgttttgaattctgataccagctattctag

SEQ ID NO: 28827 - DNA, 599 bp, Chicken  19866894247173_2
  misc_feature (1)..(62): n is any nucleotide
nnnnnnnnnnnnnnnnnnnnnnnnnnnnnnnnnnnnnnnnnnnnnnnnnnnnnnnnnnnnnnttactgctttctacttctaaattcctcttatgatctaatattttcccctacacaggtgcctaagaagactgctcaaatgctattacttgtacatgaagtggaaaaattcttatttgctactgaatggttcaattgtcgaagaaagtagatgataatgaagaaaatatgtaaatgatwaatgtcaagaagactttatgcatcatataagcatgcaaaaatggtgcgttaggaaaaaaarttggcttcaccaatttaataaaatatttcattttaaaattttgagatattttatttctctctctttttaaaaacaatatatttatcttgtttttgctttcaatttgctttttatttatttatttatttattacacagttatctatgtattccagaggtgtcagatacaaggatataatgctgcacaatatgcctggaggtattcagaatgttttgaattctgataccagctattctaggtgacttaggctgctagaatggcttctgagatgtcttgcaaaacgtaagccttgttgttca

SEQ ID NO: 28828 - DNA, 600 bp, Chicken  19866894247175_1
ccccacctgcggaggaagtggagatcggccttcagcagccgttccttgcaaagcttctacaaaataacccgcttcggcaaggctccttaatgacttttgtaagaatgatttacgacccatagccgagaaaaaacaaggtcacgggatagtatattgttttgaaagccagagccacagaaagtcacttactgttcacaaggctaaggaacttaaggccagaacagaccgctgtggccatgcatgtgagcgcagtgcacccagggatggaccttgctcatctctgctgcttcagcagaagayacaagtttaggaaaatacaggtgtgtttaaaagctcagcccacaaaggctgttctatatgtggtaagctgycacaattacaaacgggcaygtgagttctgcactaactcctctaactttggtgcccgccttcctactaaagcaccttctgcctgaatgtagctgttttccaaagccctattcttctttaagggtttgtaaactgaacttttaatcttcttatgggtaagttaaacagagtgaccttcatattttccatgttccccagatctgcagtcattcttggagctgtgcaccttgt

SEQ ID NO: 28829 - DNA, 600 bp, Chicken  19866894247175_2
cttcggcaaggctccttaatgacttttgtaagaatgatttacgacccatagccgagaaaaaacaaggtcacgggatagtatattgttttgaaagccagagccacagaaagtcacttactgttcacaaggctaaggaacttaaggccagaacagaccgctgtggccatgcatgtgagcgcagtgcacccagggatggaccttgctcatctctgctgcttcagcagaagayacaagtttaggaaaatacaggtgtgtttaaaagctcagcccacaaaggctgttctatatgtggtaagctgycacaattacaaacgggcaygtgagttctgcactaactcctctaactttggtgcccgccttcctactaaagcaccttctgcctgaatgtagctgttttccaaagccctattcttctttaagggtttgtaaactgaacttttaatcttcttatgggtaagttaaacagagtgaccttcatattttccatgttccccagatctgcagtcattcttggagctgtgcaccttgtctagttttgcaaggtccttttcatttgaaaaatggtcattgcctcagtacccaagaaaggctctggaaata

SEQ ID NO: 28830 - DNA, 600 bp, Chicken  19866894247175_3
tgacttttgtaagaatgatttacgacccatagccgagaaaaaacaaggtcacgggatagtatattgttttgaaagccagagccacagaaagtcacttactgttcacaaggctaaggaacttaaggccagaacagaccgctgtggccatgcatgtgagcgcagtgcacccagggatggaccttgctcatctctgctgcttcagcagaagayacaagtttaggaaaatacaggtgtgtttaaaagctcagcccacaaaggctgttctatatgtggtaagctgycacaattacaaacgggcaygtgagttctgcactaactcctctaactttggtgcccgccttcctactaaagcaccttctgcctgaatgtagctgttttccaaagccctattcttctttaagggtttgtaaactgaacttttaatcttcttatgggtaagttaaacagagtgaccttcatattttccatgttccccagatctgcagtcattcttggagctgtgcaccttgtctagttttgcaaggtccttttcatttgaaaaatggtcattgcctcagtacccaagaaaggctctggaaatatatttcctcctgagagtac

SEQ ID NO: 28831 - DNA, 600 bp, Chicken  19866894247189_1
tcccctgtgcccttcctaagcccctccaccaacaagtgctgctgctgaggctgctcttggctcttaaaggggtgggggtcctgagggacagcaccaagactgtcacctggcctgtccccatgcctgaatttctgttgttctcaaggacagagtcttttaagagtccctagaagggtctcagcaccttaggggaggaaaaactaaaggaactccctgtctctttggataagggacttatctgagcatcctggagcacactgagcccctgttccactgacagtcataaaatcatagaatcayagaaccatagaatyacagaatcatagaatggcctggattgaaaaggaccgtaattatcatctagtttcaaccccactgctatgtgcagggtcaccaagcaccagaccaggctgcccagagccacatccagcctggcctygaatgcctccagggatggggcatccacagcctcctttggcaacttgttccagtgcatcaccaccctctgagtgaaaaacttcctcctaatatctaacctaaacctctcctgtctcagtttaaaaccattccccccgtctatcactatccaccctttcaaac

SEQ ID NO: 28832 - DNA, 600 bp, Chicken  19866894247189_2
cctaagcccctccaccaacaagtgctgctgctgaggctgctcttggctcttaaaggggtgggggtcctgagggacagcaccaagactgtcacctggcctgtccccatgcctgaatttctgttgttctcaaggacagagtcttttaagagtccctagaagggtctcagcaccttaggggaggaaaaactaaaggaactccctgtctctttggataagggacttatctgagcatcctggagcacactgagcccctgttccactgacagtcataaaatcatagaatcayagaaccatagaatyacagaatcatagaatggcctggattgaaaaggaccgtaattatcatctagtttcaaccccactgctatgtgcagggtcaccaagcaccagaccaggctgcccagagccacatccagcctggcctygaatgcctccagggatggggcatccacagcctcctttggcaacttgttccagtgcatcaccaccctctgagtgaaaaacttcctcctaatatctaacctaaacctctcctgtctcagtttaaaaccattccccccgtctatcactatccaccctttcaaacagcagttccccctc

SEQ ID NO: 28833 - DNA, 600 bp, Chicken  19866894247189_3
ctcaaggacagagtcttttaagagtccctagaagggtctcagcaccttaggggaggaaaaactaaaggaactccctgtctctttggataagggacttatctgagcatcctggagcacactgagcccctgttccactgacagtcataaaatcatagaatcayagaaccatagaatyacagaatcatagaatggcctggattgaaaaggaccgtaattatcatctagtttcaaccccactgctatgtgcagggtcaccaagcaccagaccaggctgcccagagccacatccagcctggcctygaatgcctccagggatggggcatccacagcctcctttggcaacttgttccagtgcatcaccaccctctgagtgaaaaacttcctcctaatatctaacctaaacctctcctgtctcagtttaaaaccattccccccgtctatcactatccaccctttcaaacagcagttccccctcctgtttatatactcccttcaagtactggaaggccacaatgaggtctccccggagtcttctcttctccaagctaaacaagcccagttccctcaacctttcctcataggagaggtgctccagccctc

SEQ ID NO: 28834 - DNA, 600 bp, Chicken  19866894247198_1
gagggtaagggagctagtagctagcttaacttaccgagttttgttatttaaaatattgtttaaggtttcactcactgtgctctatctcgtgttgctgcaagcaaaaaggtggagttggaaaagaacaaggaggcattgagataaccttttcttcggacttttgttggttaggtgccactggcatagcagcttgggctatgataggatgcataaacctacgtaaatgcaattgtcttgtgatttatgtttggggaaaaaaaagctcatgaggttattatctggaaatgtgaagaaggaatmgttttagaacatttattttttcttcgatttgtgttctgagcatggrctgtcttaatacatgaaggatgcagaatatgtgtttttgctgtggtggttttgtttagttttgtcttttcacgctaatacattcaagaaaactgcttattctacagtattgcttttctggctatcatttgtacatcatgttttgtccagttcagaaataaaaaagcagttagaactaaaaataaatctgatttttttcccctacagttacgtgtctgcagaaagtacagcttttactttagcasaaaacraggc

SEQ ID NO: 28835 - DNA, 600 bp, Chicken  19866894247198_2
tttaaaatattgtttaaggtttcactcactgtgctctatctcgtgttgctgcaagcaaaaaggtggagttggaaaagaacaaggaggcattgagataaccttttcttcggacttttgttggttaggtgccactggcatagcagcttgggctatgataggatgcataaacctacgtaaatgcaattgtcttgtgatttatgtttggggaaaaaaaagctcatgaggttattatctggaaatgtgaagaaggaatmgttttagaacatttattttttcttcgatttgtgttctgagcatggrctgtcttaatacatgaaggatgcagaatatgtgtttttgctgtggtggttttgtttagttttgtcttttcacgctaatacattcaagaaaactgcttattctacagtattgcttttctggctatcatttgtacatcatgttttgtccagttcagaaataaaaaagcagttagaactaaaaataaatctgatttttttcccctacagttacgtgtctgcagaaagtacagcttttactttagcasaaaacraggctttgatttattttcttgaagtctttcgtacttstctttgttaaatt

SEQ ID NO: 28836 - DNA, 580 bp, Chicken  19866894247198_3
agaaggaatmgttttagaacatttattttttcttcgatttgtgttctgagcatggrctgtcttaatacatgaaggatgcagaatatgtgtttttgctgtggtggttttgtttagttttgtcttttcacgctaatacattcaagaaaactgcttattctacagtattgcttttctggctatcatttgtacatcatgttttgtccagttcagaaataaaaaagcagttagaactaaaaataaatctgatttttttcccctacagttacgtgtctgcagaaagtacagcttttactttagcasaaaacraggctttgatttattttcttgaagtctttcgtacttstctttgttaaattattgtaattgcattatgaatcctagttgtaggatgtgtaacgataaacaattccttgctttgctggatatgttgcataatcaaatatatatataaatttacttataggaatcagaagtaataaatgaatatcttaaaatagcatcacactttctacaattcttcccctctttaaagccacttcatgtgctgtcttcctattccattttaccgaaggatttgtat

SEQ ID NO: 28837 - DNA, 574 bp, Chicken  19866894247198_4
aatmgttttagaacatttattttttcttcgatttgtgttctgagcatggrctgtcttaatacatgaaggatgcagaatatgtgtttttgctgtggtggttttgtttagttttgtcttttcacgctaatacattcaagaaaactgcttattctacagtattgcttttctggctatcatttgtacatcatgttttgtccagttcagaaataaaaaagcagttagaactaaaaataaatctgatttttttcccctacagttacgtgtctgcagaaagtacagcttttactttagcasaaaacraggctttgatttattttcttgaagtctttcgtacttstctttgttaaattattgtaattgcattatgaatcctagttgtaggatgtgtaacgataaacaattccttgctttgctggatatgttgcataatcaaatatatatataaatttacttataggaatcagaagtaataaatgaatatcttaaaatagcatcacactttctacaattcttcccctctttaaagccacttcatgtgctgtcttcctattccattttaccgaaggatttgtat

SEQ ID NO: 28838 - DNA, 537 bp, Chicken  19866894247198_5
ttctgagcatggrctgtcttaatacatgaaggatgcagaatatgtgtttttgctgtggtggttttgtttagttttgtcttttcacgctaatacattcaagaaaactgcttattctacagtattgcttttctggctatcatttgtacatcatgttttgtccagttcagaaataaaaaagcagttagaactaaaaataaatctgatttttttcccctacagttacgtgtctgcagaaagtacagcttttactttagcasaaaacraggctttgatttattttcttgaagtctttcgtacttstctttgttaaattattgtaattgcattatgaatcctagttgtaggatgtgtaacgataaacaattccttgctttgctggatatgttgcataatcaaatatatatataaatttacttataggaatcagaagtaataaatgaatatcttaaaatagcatcacactttctacaattcttcccctctttaaagccacttcatgtgctgtcttcctattccattttaccgaaggatttgtat

SEQ ID NO: 28839 - DNA, 600 bp, Chicken  19866894247205_1
ttgtaacaagatgtattggagtttagaaacccacatttgggccaacatcctgaagaactaatcacaactgagataaatataaaatgttgcaattttcagtgataaagaagtcatagaaaggattgcttaggtcagtatattatgttagttacgaatgaccttttggtgaactcttatatattctgatatcttgggaggatctctatttgttatttcccctttattattattttctagatcagttgatcacctcctattagctccactttctttcaccgttgcatttgatcttctagctcrggaaagcttattacggccttttcctgggcacttttcagtagttccatgtttctctggtattggagggcccagaactggacacagtgcagaaggatcacctcttctacctgctggtggtactttgtatawtgcagcccagaataccattagccttctttgcagcatggtcacactgctagggtcatgttcaacgtgatgtccaaagracccccaagtccttttctaccaagctgctttccactttggggtcaccagtcttggatccttctgaacaaaaggtgwgcattatgaatctgagca

SEQ ID NO: 28840 - DNA, 600 bp, Chicken  19866894247205_2
ggtcagtatattatgttagttacgaatgaccttttggtgaactcttatatattctgatatcttgggaggatctctatttgttatttcccctttattattattttctagatcagttgatcacctcctattagctccactttctttcaccgttgcatttgatcttctagctcrggaaagcttattacggccttttcctgggcacttttcagtagttccatgtttctctggtattggagggcccagaactggacacagtgcagaaggatcacctcttctacctgctggtggtactttgtatawtgcagcccagaataccattagccttctttgcagcatggtcacactgctagggtcatgttcaacgtgatgtccaaagracccccaagtccttttctaccaagctgctttccactttggggtcaccagtcttggatccttctgaacaaaaggtgwgcattatgaatctgagcagattactggaaaccarggcttccacgtgaagtatgcaggagataatgcttctgtcagactcttttcagtggcaagcaataatagaacaagggtcagcagacagaatctggaacccaggaagttctatac

SEQ ID NO: 28841 - DNA, 599 bp, Chicken  19866894247205_3
ttgttatttcccctttattattattttctagatcagttgatcacctcctattagctccactttctttcaccgttgcatttgatcttctagctcrggaaagcttattacggccttttcctgggcacttttcagtagttccatgtttctctggtattggagggcccagaactggacacagtgcagaaggatcacctcttctacctgctggtggtactttgtatawtgcagcccagaataccattagccttctttgcagcatggtcacactgctagggtcatgttcaacgtgatgtccaaagracccccaagtccttttctaccaagctgctttccactttggggtcaccagtcttggatccttctgaacaaaaggtgwgcattatgaatctgagcagattactggaaaccarggcttccacgtgaagtatgcaggagataatgcttctgtcagactcttttcagtggcaagcaataatagaacaagggtcagcagacagaatctggaacccaggaagttctatactaacacaaggaagatattcttcaccgtcagagggacagagcactggaacaacctgtgctgagaggttgtctggtct

SEQ ID NO: 28842 - DNA, 523 bp, Chicken  19866894247205_4
atttgatcttctagctcrggaaagcttattacggccttttcctgggcacttttcagtagttccatgtttctctggtattggagggcccagaactggacacagtgcagaaggatcacctcttctacctgctggtggtactttgtatawtgcagcccagaataccattagccttctttgcagcatggtcacactgctagggtcatgttcaacgtgatgtccaaagracccccaagtccttttctaccaagctgctttccactttggggtcaccagtcttggatccttctgaacaaaaggtgwgcattatgaatctgagcagattactggaaaccarggcttccacgtgaagtatgcaggagataatgcttctgtcagactcttttcagtggcaagcaataatagaacaagggtcagcagacagaatctggaacccaggaagttctatactaacacaaggaagatattcttcaccgtcagagggacagagcactggaacaacctgtgctgagaggttgtctggtct

SEQ ID NO: 28843 - DNA, 489 bp, Chicken  19866894247205_5
ccttttcctgggcacttttcagtagttccatgtttctctggtattggagggcccagaactggacacagtgcagaaggatcacctcttctacctgctggtggtactttgtatawtgcagcccagaataccattagccttctttgcagcatggtcacactgctagggtcatgttcaacgtgatgtccaaagracccccaagtccttttctaccaagctgctttccactttggggtcaccagtcttggatccttctgaacaaaaggtgwgcattatgaatctgagcagattactggaaaccarggcttccacgtgaagtatgcaggagataatgcttctgtcagactcttttcagtggcaagcaataatagaacaagggtcagcagacagaatctggaacccaggaagttctatactaacacaaggaagatattcttcaccgtcagagggacagagcactggaacaacctgtgctgagaggttgtctggtct

SEQ ID NO: 28844 - DNA, 600 bp, Chicken  19866894247210_1
ttgagtccagcaataatttcttgcacatactatgttttgtcctgatgataatagcaaaagaatgaaccttcaaataaggtgtcagctttttgctaaaaataatgatcctcttcacctcctgcgttgttatagaaagcttaggaaaaattcacaggattttgatatattttggaagaaagcaatttaaatgtatgcagttcagtaggctcactgtcatatcacacagaacatagtacttcattagcccagttttagctaattgacttcctttgccatcttctccccactttggtttccccrttgttttgggtagtcaaatactgarcctatttctagcagattttccatccttttgaaatatacttctaaatcttactgctatgacttgttcagtgatacaagttcagcagtgtagttacaacttaactgagtatttttgaatgatacaaacaaatgcagcttgttagaggtaatagaagggttaaatattagtgacgtgtttctggaattattctttctgtggaaacagaraacatgaatgtgtctattaaataacacagcaaaatataaacaagtggctgrattgaaccagctacttca

SEQ ID NO: 28845 - DNA, 600 bp, Chicken  19866894247210_2
catactatgttttgtcctgatgataatagcaaaagaatgaaccttcaaataaggtgtcagctttttgctaaaaataatgatcctcttcacctcctgcgttgttatagaaagcttaggaaaaattcacaggattttgatatattttggaagaaagcaatttaaatgtatgcagttcagtaggctcactgtcatatcacacagaacatagtacttcattagcccagttttagctaattgacttcctttgccatcttctccccactttggtttccccrttgttttgggtagtcaaatactgarcctatttctagcagattttccatccttttgaaatatacttctaaatcttactgctatgacttgttcagtgatacaagttcagcagtgtagttacaacttaactgagtatttttgaatgatacaaacaaatgcagcttgttagaggtaatagaagggttaaatattagtgacgtgtttctggaattattctttctgtggaaacagaraacatgaatgtgtctattaaataacacagcaaaatataaacaagtggctgrattgaaccagctacttcagctgtttgcagtttctagtcaagtt

SEQ ID NO: 28846 - DNA, 600 bp, Chicken  19866894247210_3
agtacttcattagcccagttttagctaattgacttcctttgccatcttctccccactttggtttccccrttgttttgggtagtcaaatactgarcctatttctagcagattttccatccttttgaaatatacttctaaatcttactgctatgacttgttcagtgatacaagttcagcagtgtagttacaacttaactgagtatttttgaatgatacaaacaaatgcagcttgttagaggtaatagaagggttaaatattagtgacgtgtttctggaattattctttctgtggaaacagaraacatgaatgtgtctattaaataacacagcaaaatataaacaagtggctgrattgaaccagctacttcagctgtttgcagtttctagtcaagtttctaggaatgagcaataaagctaaggtagggtaaaatgcatcactgctattttgaagcttgcatgcaaaggactgacacagcactactaaaaatgaatctgaaggatgtttgaaattgctaaagctctggttatctgaaaccccttgtttcactttctctattatttgcttaatgagggtctcttactatttttttccattattac

SEQ ID NO: 28847 - DNA, 585 bp, Chicken  19866894247210_4
cccactttggtttccccrttgttttgggtagtcaaatactgarcctatttctagcagattttccatccttttgaaatatacttctaaatcttactgctatgacttgttcagtgatacaagttcagcagtgtagttacaacttaactgagtatttttgaatgatacaaacaaatgcagcttgttagaggtaatagaagggttaaatattagtgacgtgtttctggaattattctttctgtggaaacagaraacatgaatgtgtctattaaataacacagcaaaatataaacaagtggctgrattgaaccagctacttcagctgtttgcagtttctagtcaagtttctaggaatgagcaataaagctaaggtagggtaaaatgcatcactgctattttgaagcttgcatgcaaaggactgacacagcactactaaaaatgaatctgaaggatgtttgaaattgctaaagctctggttatctgaaaccccttgtttcactttctctattatttgcttaatgagggtctcttactatttttttccattattacatcaaatgaggcttgagaggataaaatgcatttaag

SEQ ID NO: 28848 - DNA, 600 bp, Chicken  19866894247214_1
tatttattttatgattgatctgcttttgcaacctcagaatctgtgtagtgtgttaagttagagaaaatggtgtggagtgctaatatatatgcgtgtgtgtggactagctgttgcatggtttcaatatcactatactttatgagggttattcgcaaaggtgtgagagtacatccttaattatttcaatcaaaattcaggtgaacactgtttttaggtctttaatattacctttcattagtatatataaatgtgtagtcctgtggacttaatatatatcaattactttttattaagtatggsatttatattttagatatcaagcaaaaagcattgtgtagctaaccattcctgccccaataacacactcaaactaacatgcagagtttggttcttagatgagttagaaagatacactatttatgtctaattgcattcttttattttgttgctttttctttcttctaggttgtatggccatgtcatccttgaagacgctactggtggaattaatcacttctccatataccagagcactgacatcctgaggttgttacatcaaaggatattgactgagaagacaaataatcaaatgacccgtaa

SEQ ID NO: 28849 - DNA, 600 bp, Chicken  19866894247214_2
gtggaattaatcacttctccatataccagagcactgacatcctgaggttgttacatcaaaggatattgactgagaagacaaataatcaaatgacccgtaacgcaggtaaatgatactcttgggatcaaaggaatcccctacgaatactgtgtgccgttctgttctgccagtcatagaaagtgtcatttggctgcaatggttatagtgaggtagcttttgtcagtccttcaaagtgagggttttctaaacaagatcttcctgtttgttttccttgtttgctaattcttcataaaatacagygatgaatgttaagtcttagttgcgtatcaattcacatgacatgcatacttgaaggctaggcttctgaaacacctccaaatggtagagaagacagtttgttttggaaatggatcgaggtggctagctgagaactggctggtgcaagaaaataggctgcaagaggtattacctttaaatcttatcctgaacaaaagccattggttttagtcttctttgaaggtgggttcagcttaacaagtagaaatcactcctcttcttgaatacaagtgcccacacagaaagttagtgtaggagagcgat

SEQ ID NO: 28850 - DNA, 600 bp, Chicken  19866894247215_1
cctaatcctgcagggaccacacgtacccaaggaccatccatccttaaggagctcgttatgagatcagggtgcagaggatttgcttagcattccacccatgcagcctttgggtcactccatgagcagcagtggcagaagcagagggcatttctggagacagcacagcacacaccttacaggggggaaatggaccccgctggcactgcccgctcctcaccttgtgcgcctggtccaaggactgcttcctgaagtccagctcctcatccaggtagcccttctgcttgctgaacagctcctggkgcacagggaggtgcaatcagtgytgtgcctgcctttcctgccttcatgcagttccacccaccccctcccccccacctcgttcccataccttttcgttctccagatccagcatcttctgctgcagtgcggactcggtcacctcgatctgctggagccactgtgcacacaaagagagcagggctgaggcagaggctggggctgccggggcacacagctgcaggcagcagtcagccctcactggaactgcagagtgcatccgtgcactgcgaacatgcagttagcctcacccattgacagggg

SEQ ID NO: 28851 - DNA, 600 bp, Chicken  19866894247215_2
tacccaaggaccatccatccttaaggagctcgttatgagatcagggtgcagaggatttgcttagcattccacccatgcagcctttgggtcactccatgagcagcagtggcagaagcagagggcatttctggagacagcacagcacacaccttacaggggggaaatggaccccgctggcactgcccgctcctcaccttgtgcgcctggtccaaggactgcttcctgaagtccagctcctcatccaggtagcccttctgcttgctgaacagctcctggkgcacagggaggtgcaatcagtgytgtgcctgcctttcctgccttcatgcagttccacccaccccctcccccccacctcgttcccataccttttcgttctccagatccagcatcttctgctgcagtgcggactcggtcacctcgatctgctggagccactgtgcacacaaagagagcagggctgaggcagaggctggggctgccggggcacacagctgcaggcagcagtcagccctcactggaactgcagagtgcatccgtgcactgcgaacatgcagttagcctcacccattgacaggggaaggatggaacctactgtgacac

SEQ ID NO: 28852 - DNA, 600 bp, Chicken  19866894247215_3
ccataccttttcgttctccagatccagcatcttctgctgcagtgcggactcggtcacctcgatctgctggagccactgtgcacacaaagagagcagggctgaggcagaggctggggctgccggggcacacagctgcaggcagcagtcagccctcactggaactgcagagtgcatccgtgcactgcgaacatgcagttagcctcacccattgacaggggaaggatggaacctactgtgacaccttcacttctataagaattggtgatggaaaaaggcactcgttcaaagtttgccatttgycctcyaacattttcctaactaaatagctcttttaaacagacagtttgtgcacatggctcraatgttctctttrttctaacaagaacccgttcaggtgtcgtgccccatagggaatcatggcctttggtggacaccctggctcatccccagcacctccagcagctgttctgagcaccagggctcaccgtggggctctgcagccgttaccttttcagccaatgtgagaaccgtccttgcttgtatgacaacaacttgctcctcgttggtcaggttctgcacgagatcagagcagaattacaa

SEQ ID NO: 28853 - DNA, 600 bp, Chicken  19866894247215_4
ccttttcgttctccagatccagcatcttctgctgcagtgcggactcggtcacctcgatctgctggagccactgtgcacacaaagagagcagggctgaggcagaggctggggctgccggggcacacagctgcaggcagcagtcagccctcactggaactgcagagtgcatccgtgcactgcgaacatgcagttagcctcacccattgacaggggaaggatggaacctactgtgacaccttcacttctataagaattggtgatggaaaaaggcactcgttcaaagtttgccatttgycctcyaacattttcctaactaaatagctcttttaaacagacagtttgtgcacatggctcraatgttctctttrttctaacaagaacccgttcaggtgtcgtgccccatagggaatcatggcctttggtggacaccctggctcatccccagcacctccagcagctgttctgagcaccagggctcaccgtggggctctgcagccgttaccttttcagccaatgtgagaaccgtccttgcttgtatgacaacaacttgctcctcgttggtcaggttctgcacgagatcagagcagaattacaacaagt

SEQ ID NO: 28854 - DNA, 600 bp, Chicken  19866894247215_5
gatctgctggagccactgtgcacacaaagagagcagggctgaggcagaggctggggctgccggggcacacagctgcaggcagcagtcagccctcactggaactgcagagtgcatccgtgcactgcgaacatgcagttagcctcacccattgacaggggaaggatggaacctactgtgacaccttcacttctataagaattggtgatggaaaaaggcactcgttcaaagtttgccatttgycctcyaacattttcctaactaaatagctcttttaaacagacagtttgtgcacatggctcraatgttctctttrttctaacaagaacccgttcaggtgtcgtgccccatagggaatcatggcctttggtggacaccctggctcatccccagcacctccagcagctgttctgagcaccagggctcaccgtggggctctgcagccgttaccttttcagccaatgtgagaaccgtccttgcttgtatgacaacaacttgctcctcgttggtcaggttctgcacgagatcagagcagaattacaacaagtcccggcgcctggcaggtaacccagcactgggccactgctgtgtgagatagatctg

SEQ ID NO: 28855 - DNA, 600 bp, Chicken  19866894247215_6
cactgtgcacacaaagagagcagggctgaggcagaggctggggctgccggggcacacagctgcaggcagcagtcagccctcactggaactgcagagtgcatccgtgcactgcgaacatgcagttagcctcacccattgacaggggaaggatggaacctactgtgacaccttcacttctataagaattggtgatggaaaaaggcactcgttcaaagtttgccatttgycctcyaacattttcctaactaaatagctcttttaaacagacagtttgtgcacatggctcraatgttctctttrttctaacaagaacccgttcaggtgtcgtgccccatagggaatcatggcctttggtggacaccctggctcatccccagcacctccagcagctgttctgagcaccagggctcaccgtggggctctgcagccgttaccttttcagccaatgtgagaaccgtccttgcttgtatgacaacaacttgctcctcgttggtcaggttctgcacgagatcagagcagaattacaacaagtcccggcgcctggcaggtaacccagcactgggccactgctgtgtgagatagatctgaaattaaatgcat

SEQ ID NO: 28856 - DNA, 600 bp, Chicken  19866894247223_1
cagagtttcctttggagggcctgcaatgagtgagactttattactggctgtatcactgaaatggcagtacaccatctattacagtctgctgcctttgtgtccattagcgcagtccacttaaagactaggcacaaccaaatttcctgtgctgaagagagttcacaaactgctttcccaaagagcaacgtgaccctttttaaagaagagcaggaataatgtgaggtaactgcatgctccaataaaattggagccatcccagtggaaaaaacagctctggtgcctcccagaacagggtattgrtrtctcctgggaatgggatccttctgcatatacatgacagttaaaaagaagttgagcaaatactacagctacaattaccaaatataaatcaatttaccaaatataccaattatatatgtattcacagataaataatatatttaccaaatatatgtatttttaatcaggttgatgatatttcagaaaacaattcattgccttaaaaactccctctgttttgaatagtaaaccattcccaagtaaatttaaatggccatgaacctctcaaacatgatgattttatgtggagaatataagttg

SEQ ID NO: 28857 - DNA, 600 bp, Chicken  19866894247223_2
gagtttcctttggagggcctgcaatgagtgagactttattactggctgtatcactgaaatggcagtacaccatctattacagtctgctgcctttgtgtccattagcgcagtccacttaaagactaggcacaaccaaatttcctgtgctgaagagagttcacaaactgctttcccaaagagcaacgtgaccctttttaaagaagagcaggaataatgtgaggtaactgcatgctccaataaaattggagccatcccagtggaaaaaacagctctggtgcctcccagaacagggtattgrtrtctcctgggaatgggatccttctgcatatacatgacagttaaaaagaagttgagcaaatactacagctacaattaccaaatataaatcaatttaccaaatataccaattatatatgtattcacagataaataatatatttaccaaatatatgtatttttaatcaggttgatgatatttcagaaaacaattcattgccttaaaaactccctctgttttgaatagtaaaccattcccaagtaaatttaaatggccatgaacctctcaaacatgatgattttatgtggagaatataagttgta

SEQ ID NO: 28858 - DNA, 600 bp, Chicken  19866894247234_1
gaagctgagtactctcagattagtaactacctctggaccagtatttcttaacctgaactttgaaacatacgttagaagccctcaaggaagcttttacactgatacacacttgttctgttcatttttatctgcagatacaaaataaaagcaccaaacaattatgtggttgcttcacaaaacaagattgtgtcaaatggtatgcaaacctcctatcccttcctgaagttaggtacttctgcagcctccaccatttgtctttatacattattacatcagaacaaaaatcctactttaaacttwgaccaacaagttagaacagaattttggtttgatccttaaataatacagtaattgcaatagaatcccaagtacatctaaatttaattccaatgtacattactamaatgaacattctcaattctctaggcaaataactgccgtattagcagcagattccctggctgagtcatttcaggcaggatttatcctaagcaaataccagccttccaatagaagtcyatttgagacaaggtgaaccagtgtaagagcttcagtaatagcactgtcactgcaactagaacgaagtgcaaaacaaaatcc

SEQ ID NO: 28859 - DNA, 600 bp, Chicken  19866894247234_2
acacacttgttctgttcatttttatctgcagatacaaaataaaagcaccaaacaattatgtggttgcttcacaaaacaagattgtgtcaaatggtatgcaaacctcctatcccttcctgaagttaggtacttctgcagcctccaccatttgtctttatacattattacatcagaacaaaaatcctactttaaacttwgaccaacaagttagaacagaattttggtttgatccttaaataatacagtaattgcaatagaatcccaagtacatctaaatttaattccaatgtacattactamaatgaacattctcaattctctaggcaaataactgccgtattagcagcagattccctggctgagtcatttcaggcaggatttatcctaagcaaataccagccttccaatagaagtcyatttgagacaaggtgaaccagtgtaagagcttcagtaatagcactgtcactgcaactagaacgaagtgcaaaacaaaatcccattctaaacacaattcgaagtatgggaatgtattttaatatcatggaacaaacacgtatcacagtgaatccacactgctgctcattctgtaggcacattgtg

SEQ ID NO: 28860 - DNA, 600 bp, Chicken  19866894247234_3
ctgaagttaggtacttctgcagcctccaccatttgtctttatacattattacatcagaacaaaaatcctactttaaacttwgaccaacaagttagaacagaattttggtttgatccttaaataatacagtaattgcaatagaatcccaagtacatctaaatttaattccaatgtacattactamaatgaacattctcaattctctaggcaaataactgccgtattagcagcagattccctggctgagtcatttcaggcaggatttatcctaagcaaataccagccttccaatagaagtcyatttgagacaaggtgaaccagtgtaagagcttcagtaatagcactgtcactgcaactagaacgaagtgcaaaacaaaatcccattctaaacacaattcgaagtatgggaatgtattttaatatcatggaacaaacacgtatcacagtgaatccacactgctgctcattctgtaggcacattgtggctacctacaggtcagcattctccaaaataaattttgcacagattcttttttttaagatccatcaccattagtttcaggatggaaattatgaaaaattatgtctcttcctttggga

SEQ ID NO: 28861 - DNA, 600 bp, Chicken  19866894247242_1
caggatccagctctgcaggatgagccacgcttgctgagtaacctcttgtctttctgttcctcctacaaggagtgggaaatgctcccaagtcacctctgctgggctcctggaacaccctagggactgtggtttggctgtgctgctgacactgggacaaaatgcttgtttagcattcagtgctgtgacagatcacctggcaaactgtccaaagagcctggagacagaggacggctcaggcttgaatctagagagaggggctaaataaaaggtagtgctgtaaaggcagggtttgcaggagcrtggtttgtggtgtgttgggaaaggggacagatgaagggatgggttaatttagcacaaggattgtcctggtgtgcagagctgcccttgtgttggttttttttgtttgtgcattttaaaaggaacttcggaacttcaacgtttagttaaggtaccttcttcctttggtttgttttgagcttgccatggcaatgagatgaaagcattttcctagtctctaaatgaggagctgcttgttgcagttcgctgggtctatttcataggtgaaggaagagtaatagaaccagaaaagtaattatatct

SEQ ID NO: 28862 - DNA, 558 bp, Chicken  19866894247242_2
ttttgtttgtgcattttaaaaggaacttcggaacttcaacgtttagttaaggtaccttcttcctttggtttgttttgagcttgccatggcaatgagatgaaagcattttcctagtctctaaatgaggagctgcttgttgcagttcgctgggtctatttcataggtgaaggaagagtaatagaaccagaaaagtaattatatctctctgtgtgttgctcagtttcacggcaagacctttgtttttctcctagtggagaggagtgggactgagctgcggggtttccacacaggtaacaacasgatcactgactccttctagctcagacggcctgaatgaagatgggctgatgctgtggggccctccccaggttgaggcacagaggtgtttgtggtctggcccatgcagcactaactcttgtctcaccccatgaaacacagaccctcttgggctgactgatgggctgcatacaggcagagggagctgctccctttgcactctgttctccctttactccagtttcctgagactgggagttaactgctcactgattatatagg

SEQ ID NO: 28863 - DNA, 600 bp, Chicken  19866894247252_1
ccgcggggcgggcctgtgacagagccgagctgaggcgcggggacgccgggccgccgctactcctcagtgcaaagtgcgtttatgagcgagacgtggaactggtgtgcgagctgatgtgtaactgctgcaaatgcacagcatccgacactgccgacctccagacagagcctcacgacactgtatgtgtctgtctgtatgtggttacccaccctgtacccactgatgacattttcctgtctcacagttacctggcgctctcagacgcttgagtatcgaaagcaaagtgggattcacagtgckgtttctgtatttctcttgaactctgtagtgtgygttgcagacttggagaagcgtttattgcctgaagtcttctcagttctactgtgtgaactgattcatttgagaagtaagaaattgccattcctgacaagaacaaagaccgctgacacaagtagggctccatccgtaygccttgagaacagmtgtctggtgtcaagcagagctcttgctccacagaaggtgatggctgtggggagtgcattatgctattttttccttattccattcttcattcattcactcttctctgatttctcccat

SEQ ID NO: 28864 - DNA, 600 bp, Chicken  19866894247252_2
ggcgcggggacgccgggccgccgctactcctcagtgcaaagtgcgtttatgagcgagacgtggaactggtgtgcgagctgatgtgtaactgctgcaaatgcacagcatccgacactgccgacctccagacagagcctcacgacactgtatgtgtctgtctgtatgtggttacccaccctgtacccactgatgacattttcctgtctcacagttacctggcgctctcagacgcttgagtatcgaaagcaaagtgggattcacagtgckgtttctgtatttctcttgaactctgtagtgtgygttgcagacttggagaagcgtttattgcctgaagtcttctcagttctactgtgtgaactgattcatttgagaagtaagaaattgccattcctgacaagaacaaagaccgctgacacaagtagggctccatccgtaygccttgagaacagmtgtctggtgtcaagcagagctcttgctccacagaaggtgatggctgtggggagtgcattatgctattttttccttattccattcttcattcattcactcttctctgatttctcccatgtttacttctcaacccccaccttattttggaag

SEQ ID NO: 28865 - DNA, 600 bp, Chicken  19866894247252_3
tcacgacactgtatgtgtctgtctgtatgtggttacccaccctgtacccactgatgacattttcctgtctcacagttacctggcgctctcagacgcttgagtatcgaaagcaaagtgggattcacagtgckgtttctgtatttctcttgaactctgtagtgtgygttgcagacttggagaagcgtttattgcctgaagtcttctcagttctactgtgtgaactgattcatttgagaagtaagaaattgccattcctgacaagaacaaagaccgctgacacaagtagggctccatccgtaygccttgagaacagmtgtctggtgtcaagcagagctcttgctccacagaaggtgatggctgtggggagtgcattatgctattttttccttattccattcttcattcattcactcttctctgatttctcccatgtttacttctcaacccccaccttattttggaaggaastacactgggaggagtgtctttctgggggacaggaaataggtagctttaaggatgagcatcttgaagaagatgaagtgtcagtgatagtcaccaaagaaggaaggcaaaccggacaagcctgaatgctgcctg

SEQ ID NO: 28866 - DNA, 600 bp, Chicken  19866894247252_4
gtgtctgtctgtatgtggttacccaccctgtacccactgatgacattttcctgtctcacagttacctggcgctctcagacgcttgagtatcgaaagcaaagtgggattcacagtgckgtttctgtatttctcttgaactctgtagtgtgygttgcagacttggagaagcgtttattgcctgaagtcttctcagttctactgtgtgaactgattcatttgagaagtaagaaattgccattcctgacaagaacaaagaccgctgacacaagtagggctccatccgtaygccttgagaacagmtgtctggtgtcaagcagagctcttgctccacagaaggtgatggctgtggggagtgcattatgctattttttccttattccattcttcattcattcactcttctctgatttctcccatgtttacttctcaacccccaccttattttggaaggaastacactgggaggagtgtctttctgggggacaggaaataggtagctttaaggatgagcatcttgaagaagatgaagtgtcagtgatagtcaccaaagaaggaaggcaaaccggacaagcctgaatgctgcctgacgctgggaagctg

SEQ ID NO: 28867 - DNA, 562 bp, Chicken  19866894247252_5
cagacttggagaagcgtttattgcctgaagtcttctcagttctactgtgtgaactgattcatttgagaagtaagaaattgccattcctgacaagaacaaagaccgctgacacaagtagggctccatccgtaygccttgagaacagmtgtctggtgtcaagcagagctcttgctccacagaaggtgatggctgtggggagtgcattatgctattttttccttattccattcttcattcattcactcttctctgatttctcccatgtttacttctcaacccccaccttattttggaaggaastacactgggaggagtgtctttctgggggacaggaaataggtagctttaaggatgagcatcttgaagaagatgaagtgtcagtgatagtcaccaaagaaggaaggcaaaccggacaagcctgaatgctgcctgacgctgggaagctgtggctcaagaactgctcgaattagagatgatatcatcaagtttaatggccctcagtggaataggctttggtaaattcatccagtgagcaatgtgcctgttcacctctcagaaccca

SEQ ID NO: 28868 - DNA, 600 bp, Chicken  19866894247255_1
agtgtgcttcgtttgacctttctcaaggtgtacaaccattgtactgtcatgcgatggtgatctttgattttcttctcacaatgttttatttgacatagttgatgaaaaaaaatccatagttatttagtattgcactgtggtttattctgatgtcaagtttcagccatcaactcaaattttgtttccctgagatcaaatgtccagagacaacagttgtggaaaccttcagactcaatttgatcttccaaatcaattaaaaaatcttgggtgctactggattcagcttttagaaaataaaaygtgtgggktttttttgtttgtttgtttcccatttcccattattttaggggaaaaaaaaaagcacaaagcagattagcatgggcttcaacacagcaatggaaagaattcatagccttccttgtagaaataggtgagcacttcatagaattgacaacactaataaatgagtgcaaaagatgttcatatgttggaggagcagccaaatggtaacacactagcttccaaacagtcacaactgccattcaattagcaattaaactgcactggatgaagaagagacaagtggtggtctcactgaaa

SEQ ID NO: 28869 - DNA, 600 bp, Chicken  19866894247255_2
tcgtttgacctttctcaaggtgtacaaccattgtactgtcatgcgatggtgatctttgattttcttctcacaatgttttatttgacatagttgatgaaaaaaaatccatagttatttagtattgcactgtggtttattctgatgtcaagtttcagccatcaactcaaattttgtttccctgagatcaaatgtccagagacaacagttgtggaaaccttcagactcaatttgatcttccaaatcaattaaaaaatcttgggtgctactggattcagcttttagaaaataaaaygtgtgggktttttttgtttgtttgtttcccatttcccattattttaggggaaaaaaaaaagcacaaagcagattagcatgggcttcaacacagcaatggaaagaattcatagccttccttgtagaaataggtgagcacttcatagaattgacaacactaataaatgagtgcaaaagatgttcatatgttggaggagcagccaaatggtaacacactagcttccaaacagtcacaactgccattcaattagcaattaaactgcactggatgaagaagagacaagtggtggtctcactgaaatttcaggg

SEQ ID NO: 28870 - DNA, 600 bp, Chicken  19866894247258_1
taattgcagaatcattgttcacaagggatatttctaatgaggttctgtaaagacctgagctcagccaagtataattcaatatccttagtaacactgggaaggaaaattaaaataattgctactcaacttaacagatgacacaggatgatggagtagataatgagatatgcacagtcacctgcccagaccagcagggaccacgtggcagctgcagtcagtgcagctcatcagggctctgtgctcactgccacaccatccccatatgggtgcatcagtgacaaaggatgcaaatcctagttwggtgctaaaaaygttgggatgtgcccmagccaagcacatgcacattgcactttatggctaccaaccagcctttatccagcagctsactttgctgctgaggttttcaattcccttttatatcaagttcaarttcacctgaaactctggctgcccctcagttctctgcacccaggcaaacttgctttcattttgtgctactttaggatagttttaccaggacgagatgccttaacccttgctcttctactaagcaaaggccttgcagcccaacaataacagccagcaacttctcctaatgca

SEQ ID NO: 28871 - DNA, 590 bp, Chicken  19866894247258_2
cattgttcacaagggatatttctaatgaggttctgtaaagacctgagctcagccaagtataattcaatatccttagtaacactgggaaggaaaattaaaataattgctactcaacttaacagatgacacaggatgatggagtagataatgagatatgcacagtcacctgcccagaccagcagggaccacgtggcagctgcagtcagtgcagctcatcagggctctgtgctcactgccacaccatccccatatgggtgcatcagtgacaaaggatgcaaatcctagttwggtgctaaaaaygttgggatgtgcccmagccaagcacatgcacattgcactttatggctaccaaccagcctttatccagcagctsactttgctgctgaggttttcaattcccttttatatcaagttcaarttcacctgaaactctggctgcccctcagttctctgcacccaggcaaacttgctttcattttgtgctactttaggatagttttaccaggacgagatgccttaacccttgctcttctactaagcaaaggccttgcagcccaacaataacagccagcaacttctcctaatgcaac

SEQ ID NO: 28872 - DNA, 575 bp, Chicken  19866894247258_3
atatttctaatgaggttctgtaaagacctgagctcagccaagtataattcaatatccttagtaacactgggaaggaaaattaaaataattgctactcaacttaacagatgacacaggatgatggagtagataatgagatatgcacagtcacctgcccagaccagcagggaccacgtggcagctgcagtcagtgcagctcatcagggctctgtgctcactgccacaccatccccatatgggtgcatcagtgacaaaggatgcaaatcctagttwggtgctaaaaaygttgggatgtgcccmagccaagcacatgcacattgcactttatggctaccaaccagcctttatccagcagctsactttgctgctgaggttttcaattcccttttatatcaagttcaarttcacctgaaactctggctgcccctcagttctctgcacccaggcaaacttgctttcattttgtgctactttaggatagttttaccaggacgagatgccttaacccttgctcttctactaagcaaaggccttgcagcccaacaataacagccagcaacttctcctaatgcaac

SEQ ID NO: 28873 - DNA, 517 bp, Chicken  19866894247258_4
tagtaacactgggaaggaaaattaaaataattgctactcaacttaacagatgacacaggatgatggagtagataatgagatatgcacagtcacctgcccagaccagcagggaccacgtggcagctgcagtcagtgcagctcatcagggctctgtgctcactgccacaccatccccatatgggtgcatcagtgacaaaggatgcaaatcctagttwggtgctaaaaaygttgggatgtgcccmagccaagcacatgcacattgcactttatggctaccaaccagcctttatccagcagctsactttgctgctgaggttttcaattcccttttatatcaagttcaarttcacctgaaactctggctgcccctcagttctctgcacccaggcaaacttgctttcattttgtgctactttaggatagttttaccaggacgagatgccttaacccttgctcttctactaagcaaaggccttgcagcccaacaataacagccagcaacttctcctaatgcaac

SEQ ID NO: 28874 - DNA, 472 bp, Chicken  19866894247258_5
acagatgacacaggatgatggagtagataatgagatatgcacagtcacctgcccagaccagcagggaccacgtggcagctgcagtcagtgcagctcatcagggctctgtgctcactgccacaccatccccatatgggtgcatcagtgacaaaggatgcaaatcctagttwggtgctaaaaaygttgggatgtgcccmagccaagcacatgcacattgcactttatggctaccaaccagcctttatccagcagctsactttgctgctgaggttttcaattcccttttatatcaagttcaarttcacctgaaactctggctgcccctcagttctctgcacccaggcaaacttgctttcattttgtgctactttaggatagttttaccaggacgagatgccttaacccttgctcttctactaagcaaaggccttgcagcccaacaataacagccagcaacttctcctaatgcaac

SEQ ID NO: 28875 - DNA, 600 bp, Chicken  19866894247259_1
tgtaaatgttcctttctttagtttaaaactatttccccttgtcctatcactatcagcccgtataaaaagttgatttccctcatgtttataaactccctctaaatattggaaggccataatgaggtctccccacagcattctcttttccaaattgaacaagccagttccttaaaccttcataggagaggtgctccaagctttggatcacttttgtggccctcctctggaccatctccaaaatctctacatcttttctatgttggaagccccagacttggacttactacaccatcagtagakgggggtaatcacttccctcaccctgcttgccacccctcttctgatggaacccaggataagcttttcatctaccaaaaaccataagtccttctcagcatggctactctcaaggacttctcctagtttgtctacatatctcagattactttgacccaagtgaaaaaccttgcactttttgttggacctcactaggtttacaagggcccacctttcaagtttatcataaaggggtttatgataacatttacaatttgtaaataagttggagaatgtgttttgagaggtcttttcataaaccct

SEQ ID NO: 28876 - DNA, 599 bp, Chicken  19866894247262_1
  misc_feature (1)..(95): n is any nucleotide
nnnnnnnnnnnnnnnnnnnnnnnnnnnnnnnnnnnnnnnnnnnnnnnnnnnnnnnnnnnnnnnnnnnnnnnnnnnnnnnnnnnnnnnnnnnnnnnatgctttttagaaaggagtcctatcttgcatttggtgatgtggacagagaagaacttgccaatagatacgcaaccagttgacaccgaagcaccctatcatttgagacatccagctgtgtgcagtcatctctgttgctaacagctgaaggttctggaactgtgtaatggggaaggaggctggcttaaggcctggcttctggttgartcctagctgagtaagtaattaggggctaacctttaaaatcagctttcaattcttcattatgtagataagtatctaaaatgtaatggtatttagtctaggaaatgagtcaccgcagtgtattttattgaaattattgttggaaatagaaaagtttaggcactgttgattatgtcagtgtgattgttgattatggaccatatagatgttgaactggaggcagaagtaggtgtgggctgtgcttatttggcactgctttgttacactctagggctcgagtccaaagagctggtgagcctagc

SEQ ID NO: 28877 - DNA, 600 bp, Chicken  19866894247266_1
ctgtgccaaaggtagcatacagtccatgcttcctcggccaacaaactgctaccctgtgtgtgaccctggccccttcccgccagattattcttttgttttcctgtgagagaagtcttcaagtctcatgtaaaatgaattattagggttgaaagaaatgtttaattttatctgctttttgaaacatttactggtattctgaaatgcccggcaaaccagaattatcaagtaattatttcagtgaggtatgagcatttggttagcttctggtttataaagatactttctacaatacttggaagyaagcacatgaccaaatacttcactgagtaaattcctcatttcttctaatgcagggatcagacaaccacgatgtcacagcactgcagagacatgcaaaaggacctgttcttgggcttcagtttagaggagccttccagagcttcatttctaaaaccagacaaatctctggaaagtgttctgacatgtattacaacaatatataaataatcacatggcattttattacaccaccagagctctcctcacatgggataccaacggctctggatgaagccaaatctaattacagataaaaggttt

SEQ ID NO: 28878 - DNA, 600 bp, Chicken  19866894247268_1
ctactgctgcaatccacccaatcccaggaacaagatcccattattgtgagagggtcattgtaattctttccaggaaattagtcacaaatattatctttacagaaaattgcgtgattatagaacattactgaaaatttcactaattaatgtaaatccaaaagtgcactttattaacactgtaaaggctctagagcttctctgtatacaaggagagagagcgacttttaatcattttttatccacgatacagttttcactatgaagtcttactggcctagataagacgcacagggatggggyaaaaaaaaaaaaggaaaaagaaagaaagaaaaagaaaaaactgaagtattttgccattaatattggagatttggcatattgacacagtggtcaagattactgtatgtgataaaactactgtmctgatcagtttgaatagaacacgctacccaccctttcacagttccatgagaatcttcatctcccatcttcacttgaggccaacatcctgtttagacactgacatggtctttccagtatagattttcttaacaaagtttcattaggsaaaaactgtggaatatattttcctagtgcaca

SEQ ID NO: 28879 - DNA, 600 bp, Chicken  19866894247268_2
tactgctgcaatccacccaatcccaggaacaagatcccattattgtgagagggtcattgtaattctttccaggaaattagtcacaaatattatctttacagaaaattgcgtgattatagaacattactgaaaatttcactaattaatgtaaatccaaaagtgcactttattaacactgtaaaggctctagagcttctctgtatacaaggagagagagcgacttttaatcattttttatccacgatacagttttcactatgaagtcttactggcctagataagacgcacagggatggggayaaaaaaaaaaaggaaaaagaaagaaagaaaaagaaaaaactgaagtattttgccattaatattggagatttggcatattgacacagtggtcaagattactgtatgtgataaaactactgtmctgatcagtttgaatagaacacgctacccaccctttcacagttccatgagaatcttcatctcccatcttcacttgaggccaacatcctgtttagacactgacatggtctttccagtatagattttcttaacaaagtttcattaggsaaaaactgtggaatatattttcctagtgcacag

SEQ ID NO: 28880 - DNA, 600 bp, Chicken  19866894247268_3
cattactgaaaatttcactaattaatgtaaatccaaaagtgcactttattaacactgtaaaggctctagagcttctctgtatacaaggagagagagcgacttttaatcattttttatccacgatacagttttcactatgaagtcttactggcctagataagacgcacagggatggggaaaaaaaaaaaaaggaaaaagaaagaaagaaaaagaaaaaactgaagtattttgccattaatattggagatttggcatattgacacagtggtcaagattactgtatgtgataaaactactgtmctgatcagtttgaatagaacacgctacccaccctttcacagttccatgagaatcttcatctcccatcttcacttgaggccaacatcctgtttagacactgacatggtctttccagtatagattttcttaacaaagtttcattaggsaaaaactgtggaatatattttcctagtgcacagctttgaaagattgcactaggaataaggctttaggcatacaaaataactatgtaaataagaagatgtaagttgttttcaaaataagcgacataaaaattgcactttgtttacggatgttagc

SEQ ID NO: 28881 - DNA, 547 bp, Chicken  19866894247268_4
actggcctagataagacgcacagggatggggaaaaaaaaaaaaaggaaaaagaaagaaagaaaaagaaaaaactgaagtattttgccattaatattggagatttggcatattgacacagtggtcaagattactgtatgtgataaaactactgtmctgatcagtttgaatagaacacgctacccaccctttcacagttccatgagaatcttcatctcccatcttcacttgaggccaacatcctgtttagacactgacatggtctttccagtatagattttcttaacaaagtttcattaggsaaaaactgtggaatatattttcctagtgcacagctttgaaagattgcactaggaataaggctttaggcatacaaaataactatgtaaataagaagatgtaagttgttttcaaaataagcgacataaaaattgcactttgtttacggatgttagcgtatacgtttgctatttaaaataattaattaaaaaatcaaattaaaacacttcttaatccctgcagaagacacagcagagagaaaaaaatatt

SEQ ID NO: 28882 - DNA, 600 bp, Chicken  19866894247272_1
actacaaatcctgccatcaaagaaacattcaaacaaggaaacaaagaaaaacttgcacatacgtggtttaaaaattcaacacaaatcccacctcgatgttatctcacccatgctcattaataaaaaccctcttgctgtgcccacgtttgcagttattcatttccacctcaggaggcagcctggagatgagagtagtacaataaaataattacctgaaacgtttttaaaaaaatacccgttaaacaaattaccttcactggcagcacttaaaattggtaattctccttttttgtcctactsaaaaaaaaagttgcatagctgtaagattttgctttgctgctttttgtttgtttgtttttactcacaagcagtataagagaagttttagttacttaaatagcaatacaatgtgcagatttcaacaatccctatagcttggatcaatataaattagttacctgtctcagatttactctttggactgcattgtgacaaaggtttaattagaaaattttgacgtatagtattcctgtgcagagaagtttatgttttctgttcttgtaaaagtgaagaacataaaatagggtgtgaattcagtaa

SEQ ID NO: 28883 - DNA, 600 bp, Chicken  19866894247272_2
ctacaaatcctgccatcaaagaaacattcaaacaaggaaacaaagaaaaacttgcacatacgtggtttaaaaattcaacacaaatcccacctcgatgttatctcacccatgctcattaataaaaaccctcttgctgtgcccacgtttgcagttattcatttccacctcaggaggcagcctggagatgagagtagtacaataaaataattacctgaaacgtttttaaaaaaatacccgttaaacaaattaccttcactggcagcacttaaaattggtaattctccttttttgtcctactasaaaaaaaagttgcatagctgtaagattttgctttgctgctttttgtttgtttgtttttactcacaagcagtataagagaagttttagttacttaaatagcaatacaatgtgcagatttcaacaatccctatagcttggatcaatataaattagttacctgtctcagatttactctttggactgcattgtgacaaaggtttaattagaaaattttgacgtatagtattcctgtgcagagaagtttatgttttctgttcttgtaaaagtgaagaacataaaatagggtgtgaattcagtaaa

SEQ ID NO: 28884 - DNA, 600 bp, Chicken  19866894247272_3
gcgctactggcaagtaagtggtgtccgcaatgctttttccatgtcaatgtccatctttgcctttttcagccacaaagaacagttattctcaggccaggcacgctgtgttcagcaagggaacctcagatctcctatgttttctgaccagtggaagcagctgttaggaaagcagaaggcaaagtatcagcatttcagctatttcagtatctaacacacagaaaacagcatcaacacgagcacttttacttccccttttccttaagccttcaattatcatcatctctgctgtgagaaaaaaaraaaaagaaagcaatctgtgtttaacacaaggttttacacttatgagcatttacagagacaaatgtgtttataaacagcatgtgggtttcttccacaattcagttgttgggggcagtatggaacatgggttgctttgtttattaattctagctcataccaccctgacttttaaactactgtccctataaagggatacctccccttaggttttctctgctacccattcaacaatcctagtgctgcagtgtgacctggtacgtagattcaggaagcaaagtgaaacaaacaaacagatgaatg

SEQ ID NO: 28885 - DNA, 600 bp, Chicken  19866894247274_1
gatggtgcttatggggtgtgtggtcgtggggatgggagctcgctgatggcccttgtgtgggagcagcaccctgctgccagctgagcctgaatctctctccagagcaccagggctgaacacggcatcattttaatgcaagctgagggcatcccacagtggcaggagccctgagggctggctccttgcagaggcagcgtgcagcaaatcaagtggttacagagctttgttggagccagcagtgcgtggactcctcactgctggctgttggctcaggtctcagcgggccttcaacgtcacctscactgggaaatggtcactgatggccaaagcctgagtgcagggaaagcagaggggtggctttgcttgcccacagccggtctccttgctgcatccagctggggctcaaaggttctgctccagccccaaatgcagaccactccccaaatgttgctttgcagtggtgcacaggtgggagcagagccacccttgggtgcctgtgtatactcacaaggctttgtggcttggatttatgtagcatcaggtgaaaccctcagcccctcagcaggaccctgccatcacccagcccctgccccctcactc

SEQ ID NO: 28886 - DNA, 600 bp, Chicken  19866894247277_1
tcagtaacactgtcactcactgtttaaaaaagtaggagaaaacttttagtggatgaaatacagctttgcatatataatatttcatcttatgctggaattcttaatggttcttaagaaaatttttttgcttaattaactagaaaacacacaaatttcacttatctctaatagcaatcttcacagcactctggcacctcatgctttctgtagtgggatatatgggtgtgtgcacatgtacatacacatacagacatactgtttgacataatgtttgtcttgtcttccaaaatatcttggtgyttttggttgattgtgctataccgtatacttagctggaagggactcaaagcactcatgttcaggtatcacatcctggtggtctgtacttggtgccctagaggatacactgcaccatcctgatgctgcagcactgtgtgggaaagcaaattacactgagcaggacagagccttcttgccttacagacgccttgaatgaaaaatctaaaacccaaatttactaccataagtaagtcttccccactttcatcattgttgaagactaaatcccttggctttatcttcttcccttaggagcaaatc

SEQ ID NO: 28887 - DNA, 599 bp, Chicken  19866894247294_1
  misc_feature (1)..(62): n is any nucleotide
nnnnnnnnnnnnnnnnnnnnnnnnnnnnnnnnnnnnnnnnnnnnnnnnnnnnnnnnnnnnnntcgcgtgggtgggaagggtggaggccccctggagatgcacggccccatccctgtggcttccaggacgctcggagccatggaaagcagtccccatccccgcgtgtgtccccatccacgtctccgtccatcagtgaccccatccatgtccccatccccgctaatgtgtgctcctccccgaggccagcccagctgctttgccttcaccttcctcttcctcccccatgccccacctggcacrgggaggtggctgtcagctgaggccactgggcccctccccggggatgggctctgctataaaagcacagggaggggtgaagggcagtgcacaggagccggaaatctctgcaggtgagtctggagggacttgggctggggggtgagactgggtctgtggggtcattccccccacctcagggtgctgctaccggtcaggatcctgcctggctccagtagtgctyggagcagaggctggaggtgggcgctgatgtttgggtgatgctttttggggcgcagagccgtgcagggcatggggtggag

SEQ ID NO: 28888 - DNA, 593 bp, Chicken  19866894247294_2
taatgtgtgctcctccccgaggccagcccagctgctttgccttcaccttcctcttcctcccccatgccccacctggcacrgggaggtggctgtcagctgaggccactgggcccctccccggggatgggctctgctataaaagcacagggaggggtgaagggcagtgcacaggagccggaaatctctgcaggtgagtctggagggacttgggctggggggtgagactgggtctgtggggtcattccccccacctcagggtgctgctaccggtcaggatcctgcctggctccagtagtgctyggagcagaggctggaggtgggcgctgatgtttgggtgatgctttttggggcgcagagccgtgcagggcatggggtggagggagctggtgggrggctaagggcagcaagaagcagcgatggaggggttttgcccgtgggggatgtctcccatggggacattccccagctgaattttgggaactagaagagcctccgtgggtgcctggggtagccatcacatcacaccaggagcagggcggctgctgggatgcctgtgcttgtgcctggtatgtgccccagctgctgggaagtga

SEQ ID NO: 28889 - DNA, 501 bp, Chicken  19866894247294_3
tcagctgaggccactgggcccctccccggggatgggctctgctataaaagcacagggaggggtgaagggcagtgcacaggagccggaaatctctgcaggtgagtctggagggacttgggctggggggtgagactgggtctgtggggtcattccccccacctcagggtgctgctaccggtcaggatcctgcctggctccagtagtgctyggagcagaggctggaggtgggcgctgatgtttgggtgatgctttttggggcgcagagccgtgcagggcatggggtggagggagctggtgggrggctaagggcagcaagaagcagcgatggaggggttttgcccgtgggggatgtctcccatggggacattccccagctgaattttgggaactagaagagcctccgtgggtgcctggggtagccatcacatcacaccaggagcagggcggctgctgggatgcctgtgcttgtgcctggtatgtgccccagctgctgggaagtga

SEQ ID NO: 28890 - DNA, 600 bp, Chicken  19866894247297_1
acagcatcatagattttgaaaacctcagaaaatgtaggaagatttttgctgccgaatgagttaggacacatttgtctccagtagtcaatcaacagagagctgcaaaaaatcttagtatctaaagaggtgaaggatgtaacacagtaagttttggaatgacagaccacctattgtaaaaagagaacgaaggcttagatctgggacttgggaatcatattctaaaacctttgagagagacagtttaaagaattgcctttcccattatgctagtgaaagcaaatagaagcaacttttgggtgsaaattttgagaattttgggtaagtaaagaggcacaggtgaagctgaagaagagagagacagctgagaggaactttgttatgaagttagaagatgaactgagttatgggaaaagtggagaactctggtgcaataggttttggagcaatttagggaatctaggggaacgggatgataagagagcaacaaatcacatctctttggttgagctccttacactatgcatagcattaatctcaagcacagctcaagctatgctatatatctacatgagaaggactgagcaccttcatgttctcctc

SEQ ID NO: 28891 - DNA, 600 bp, Chicken  19866894247302_1
gaatgtttagagaaatgcttgatttttattgtcaattcaaactgactgtaggttaaaatcctaatgcctttactaatgagctgattcatatttctgtagcatctgatattttcaaaaggaaagaaaattaactatattttaaggtgttttgtttatgtgttgcatgctgttaaaactgaggtgctgcatgcatcccagggctcaagtcatttcataatgctgatactttagctgtaaagttaataatctgtgtgaggaggacaagatttcttaatacgataaagatctaagatatgataytgttatttttatgagatcgaatagtttgtgtctccttaagacactaytcagtaaatgaagagattttctcttgcaaatgctgttactgacttttgcctatttgttgtaaatcttgtctcaattgatattcctctttaatctcttataatgaatgatggattctgagcttttaaaaaggaaagagagtaagaaaggaaatggaataaaatcctaattgtaattttttgtggagaaaagcttgagagagatatgtctgagatcctaaaggtttaacgtagcaagtcaattatttgagatccc

SEQ ID NO: 28892 - DNA, 600 bp, Chicken  19866894247302_2
gtaggttaaaatcctaatgcctttactaatgagctgattcatatttctgtagcatctgatattttcaaaaggaaagaaaattaactatattttaaggtgttttgtttatgtgttgcatgctgttaaaactgaggtgctgcatgcatcccagggctcaagtcatttcataatgctgatactttagctgtaaagttaataatctgtgtgaggaggacaagatttcttaatacgataaagatctaagatatgataytgttatttttatgagatcgaatagtttgtgtctccttaagacactaytcagtaaatgaagagattttctcttgcaaatgctgttactgacttttgcctatttgttgtaaatcttgtctcaattgatattcctctttaatctcttataatgaatgatggattctgagcttttaaaaaggaaagagagtaagaaaggaaatggaataaaatcctaattgtaattttttgtggagaaaagcttgagagagatatgtctgagatcctaaaggtttaacgtagcaagtcaattatttgagatcccattttttaaagtcactgttttcaggctaatctaatgactggggctgg

SEQ ID NO: 28893 - DNA, 600 bp, Chicken  19866894247305_1
acagatttcacttggtaggttgggatgccattattgtttccaataaacaagcagcactcgttaacctcaaactattttttcaatagctcgtgtaactaaatgttaattgctttgtgctatgttgcagcaatttttgatcacagagataggagctctgcatctggaagacggggttaggttcctgtcactgctgtggattcagataagttggttacatgctacattttatcacctagtcagtgaaggtggggtttgtcatctgagggtgagcacctgttgctttgtagctctctagtatgrcagtatgctacaaaatggaaaccttgcggtcatgcaagatcttgcttgataatgctgctgtgaactgttgccctacaaaaaaagtagtctagaacttttccttagaggcttgggcactgtggagttgcttttcagtttcaattttgcagtgatctgatcaaagttgatactgcctgaagtaaactaaaaccttttaaaatcagccacctccaagttatttattccctttgtgtctgtggtgcaaaacaaaacgtgaagctgtcagcaggaactgccaaaaacacgatraaaacaacctgt

SEQ ID NO: 28894 - DNA, 600 bp, Chicken  19866894247305_2
tctctagtatgrcagtatgctacaaaatggaaaccttgcggtcatgcaagatcttgcttgataatgctgctgtgaactgttgccctacaaaaaaagtagtctagaacttttccttagaggcttgggcactgtggagttgcttttcagtttcaattttgcagtgatctgatcaaagttgatactgcctgaagtaaactaaaaccttttaaaatcagccacctccaagttatttattccctttgtgtctgtggtgcaaaacaaaacgtgaagctgtcagcaggaactgccaaaaacacgatraaaacaacctgtggtatttttggaaatgtctcttaagatttcaagcatcttartgtaaaatatggcaaaactgaaagagttgtttaataagctaaaaatgaactgagctgctgatagactgttttctttaaaacatacaagaactcaattccagcacttgagttgatggcttctggtaaagtattactgaagaaaagagaaatgcacagatctgytcatggatctaaacactgaaaactgatagcttttaatatcctttcttaaggatccctcccttttctattagcaggtaatatattt

SEQ ID NO: 28895 - DNA, 561 bp, Chicken  19866894247305_3
ttgcttgataatgctgctgtgaactgttgccctacaaaaaaagtagtctagaacttttccttagaggcttgggcactgtggagttgcttttcagtttcaattttgcagtgatctgatcaaagttgatactgcctgaagtaaactaaaaccttttaaaatcagccacctccaagttatttattccctttgtgtctgtggtgcaaaacaaaacgtgaagctgtcagcaggaactgccaaaaacacgatraaaacaacctgtggtatttttggaaatgtctcttaagatttcaagcatcttartgtaaaatatggcaaaactgaaagagttgtttaataagctaaaaatgaactgagctgctgatagactgttttctttaaaacatacaagaactcaattccagcacttgagttgatggcttctggtaaagtattactgaagaaaagagaaatgcacagatctgytcatggatctaaacactgaaaactgatagcttttaatatcctttcttaaggatccctcccttttctattagcaggtaatatatttttgtaatagcatta

SEQ ID NO: 28896 - DNA, 399 bp, Chicken  19866894247305_4
ccacctccaagttatttattccctttgtgtctgtggtgcaaaacaaaacgtgaagctgtcagcaggaactgccaaaaacacgatraaaacaacctgtggtatttttggaaatgtctcttaagatttcaagcatcttartgtaaaatatggcaaaactgaaagagttgtttaataagctaaaaatgaactgagctgctgatagactgttttctttaaaacatacaagaactcaattccagcacttgagttgatggcttctggtaaagtattactgaagaaaagagaaatgcacagatctgytcatggatctaaacactgaaaactgatagcttttaatatcctttcttaaggatccctcccttttctattagcaggtaatatatttttgtaatagcatta

SEQ ID NO: 28897 - DNA, 599 bp, Chicken  19866894247308_1
  misc_feature (1)..(32): n is any nucleotide
nnnnnnnnnnnnnnnnnnnnnnnnnnnnnnnnacccacggcttctgctcgagctccccctgggccagatgccctccagcactgctcacactgtgccatatccctgctccatgcatgtgaaatccaacagtgtgtatacatgcattgcttgcttgtgtgctggagctctctgggctctgtgctctttgcatgcacctgcgggtagaaggagagctgcaggagtcagggatggagggaggggaaagcagccctgttgtgtgacaggtgacaatgacacctgcttgctgctggctctgatgcrggtgggttgaggacctgctcctgcttccagtgctctgttgaaaactcgagttggcgtttgagacaggagttggtttaatggctgcacgatcctgctcctcaggcagacgaatgtcacgttgcatcagctgtgctgtgctccttgctagatagccagctgagcctgagagtacctgcagctcctgtggcattgcctgtctctgctccagagagattggagtcgtggaaaagcasttccccawcttcaggctggtgtcagggctgccatcatgctctgagttctcctgaatgggaacacac

SEQ ID NO: 28898 - DNA, 600 bp, Chicken  19866894247308_2
ggaggggaaagcagccctgttgtgtgacaggtgacaatgacacctgcttgctgctggctctgatgcrggtgggttgaggacctgctcctgcttccagtgctctgttgaaaactcgagttggcgtttgagacaggagttggtttaatggctgcacgatcctgctcctcaggcagacgaatgtcacgttgcatcagctgtgctgtgctccttgctagatagccagctgagcctgagagtacctgcagctcctgtggcattgcctgtctctgctccagagagattggagtcgtggaaaagcasttccccawcttcaggctggtgtcagggctgccatcatgctctgagttctcctgaatgggaacacacttagcaggaagacaggaaggagcttggaaaataaacaaggggagatacagaagaggctgcacaatgatcgagtctcttttgttcctcctagcacaacagctgtggacactgaattaaatgaagaggagggcattgtaggacaaagaaaatacatatttattggatccaggacataacgatgctcactctaagccggggaccctcttctgtttgaatagaaaggaccctcagcat

SEQ ID NO: 28899 - DNA, 600 bp, Chicken  19866894247308_3
aagcagccctgttgtgtgacaggtgacaatgacacctgcttgctgctggctctgatgcrggtgggttgaggacctgctcctgcttccagtgctctgttgaaaactcgagttggcgtttgagacaggagttggtttaatggctgcacgatcctgctcctcaggcagacgaatgtcacgttgcatcagctgtgctgtgctccttgctagatagccagctgagcctgagagtacctgcagctcctgtggcattgcctgtctctgctccagagagattggagtcgtggaaaagcasttccccawcttcaggctggtgtcagggctgccatcatgctctgagttctcctgaatgggaacacacttagcaggaagacaggaaggagcttggaaaataaacaaggggagatacagaagaggctgcacaatgatcgagtctcttttgttcctcctagcacaacagctgtggacactgaattaaatgaagaggagggcattgtaggacaaagaaaatacatatttattggatccaggacataacgatgctcactctaagccggggaccctcttctgtttgaatagaaaggaccctcagcatcatcacct

SEQ ID NO: 28900 - DNA, 600 bp, Chicken  19866894247312_1
ataaggaatatctgtacaaatgtagaccatttgtaattcacctggttaacaactgggcttcttactgagtctccacaaaagtcagtcaatccttacctgccaacaggtatccattgagacaggctttttgtttaagcattgatgtaagacatgattttacagcacaaattcagcaagcttgttctagggactctgaatgcttaactaaaatgccacacagtggttatgatgggcagcagaaaaagtgcttccaagttttggtgggttttctgttttggtttgcaacctcgtgttttcccrtggcatcccaatctatccagcagaagctatgacagccctattttstcacctatgctcaagctttagcaagaggtcaaacaagaaaaaggccataagaatactgggctggaccactcacagcactttgatgttcagctgacatgatatcatctgattaatgcaaagttctacttgcagtgtcagggctaatttatagctgtaggaatctaagccttctaatgaatggtttaactggttttaacatctgaatgaaactgtgtttygttatcttttaagtccttaaaacattcacgtcttcca

SEQ ID NO: 28901 - DNA, 600 bp, Chicken  19866894247312_2
ttaacaactgggcttcttactgagtctccacaaaagtcagtcaatccttacctgccaacaggtatccattgagacaggctttttgtttaagcattgatgtaagacatgattttacagcacaaattcagcaagcttgttctagggactctgaatgcttaactaaaatgccacacagtggttatgatgggcagcagaaaaagtgcttccaagttttggtgggttttctgttttggtttgcaacctcgtgttttcccrtggcatcccaatctatccagcagaagctatgacagccctattttstcacctatgctcaagctttagcaagaggtcaaacaagaaaaaggccataagaatactgggctggaccactcacagcactttgatgttcagctgacatgatatcatctgattaatgcaaagttctacttgcagtgtcagggctaatttatagctgtaggaatctaagccttctaatgaatggtttaactggttttaacatctgaatgaaactgtgtttygttatcttttaagtccttaaaacattcacgtcttccagatgtatctggacttcccacttcatctgttgccttctgaaataga

SEQ ID NO: 28902 - DNA, 600 bp, Chicken  19866894247312_3
ggttttctgttttggtttgcaacctcgtgttttcccrtggcatcccaatctatccagcagaagctatgacagccctattttstcacctatgctcaagctttagcaagaggtcaaacaagaaaaaggccataagaatactgggctggaccactcacagcactttgatgttcagctgacatgatatcatctgattaatgcaaagttctacttgcagtgtcagggctaatttatagctgtaggaatctaagccttctaatgaatggtttaactggttttaacatctgaatgaaactgtgtttygttatcttttaagtccttaaaacattcacgtcttccagatgtatctggacttcccacttcatctgttgccttctgaaatagaagtgtttgtggcactaccagctcccagcccgctgtgctgccatttaattctattgcagagaacctgaagatggtcgtgggtaactatgtgtaaccgtgtctgcaattcttagaaaagcagggaagaacaccaaagtaggaataaacagaggagygatgaatgcagggggctggaggagcaggggtgagggagaattgactcttaaggcatttctctta

SEQ ID NO: 28903 - DNA, 600 bp, Chicken  19866894247312_4
taggaatctaagccttctaatgaatggtttaactggttttaacatctgaatgaaactgtgtttygttatcttttaagtccttaaaacattcacgtcttccagatgtatctggacttcccacttcatctgttgccttctgaaatagaagtgtttgtggcactaccagctcccagcccgctgtgctgccatttaattctattgcagagaacctgaagatggtcgtgggtaactatgtgtaaccgtgtctgcaattcttagaaaagcagggaagaacaccaaagtaggaataaacagaggagygatgaatgcagggggctggaggagcaggggtgagggagaattgactcttaaggcatttctcttacagcctgtgccaataaagcaccctgcttgttagaaatcaagccaaaattacctagcagcacatcctactgactttgctcaaacttcagagtaagcttcatgtgaagcaggacttgtctgggttaggtgttctatgaaaagggaacaggaagagaggaaaatccatatacacagacattgtcctcccatttcaaacatttgtaaatgatctatctccttttgcagtaataatccatt

SEQ ID NO: 28904 - DNA, 599 bp, Chicken  19866894247318_1
  misc_feature (1)..(36): n is any nucleotide
nnnnnnnnnnnnnnnnnnnnnnnnnnnnnnnnnnnntttttcttagaacagtgatgtaaaaaaacagtatatgtgaaatctgattaatacaacatccaaccgaaaagcagcattttgaatgctttagtgagcatcaggctaaatgccacaagtgctgaaagacttgagccttagaatcctttgttgaataataggttatttattatttataagtgctggcctaaatttctctctcaattgtattcgctcttgcaggcaaaaagaaatttaataaataaataaataaataaataaataaawaaaatcactttggagctgtacttttatacatgagatcaaaatttgtcctgaaagttgttatatcgcttgtgttatatcagtgatcttatttcctctatatattagctgttaagaacttctttatttatttgtacttactatgattttacaccaaaatatatataaacaggatggctgtcatctcttgtgctatcttaatttgtgtgaactattaagccagattgttatacacccttaatagcattcgaatatcagtaataaaccgtacatctatatgctaaaagttcaggccctgacct

SEQ ID NO: 28905 - DNA, 599 bp, Chicken  19866894247320_1
  misc_feature (1)..(13): n is any nucleotide
nnnnnnnnnnnnngctctgtatacaggttatcccagagaaaagttgtttagtcttcattcagccacatccgaaaggaagcagtagctgctgctcttttggcaggaagcaaatcccatcaataaatgctaggtgtaactgggattcagatctcatgggggtttaagcattctgttctgttcatctaaatgctggcttcctccagctaccagttgggtgcctcagcatgcatttagctgcagtggggtaactccagcatgtatagagacagaattgtaaatggttataactgcagcatccayacttgtatctacagttacaatatttaagagcttctgtagctgccatttggttgaagttgagcagtttttagtagatgtgaatactggcttttaaatttagtttaaaatgtattttagatgataatgttccatgttgactctagtctttaatacygattttaatagagaaaatagatccataaactaaactacaacacttccacaactacaaattacaggtaggttaataggacctttatrcaaccaatttatcacttctctactaaaatgaaaagctcyctttctgtcttgtatgggtt

SEQ ID NO: 28906 - DNA, 533 bp, Chicken  19866894247320_2
gggggtttaagcattctgttctgttcatctaaatgctggcttcctccagctaccagttgggtgcctcagcatgcatttagctgcagtggggtaactccagcatgtatagagacagaattgtaaatggttataactgcagcatccayacttgtatctacagttacaatatttaagagcttctgtagctgccatttggttgaagttgagcagtttttagtagatgtgaatactggcttttaaatttagtttaaaatgtattttagatgataatgttccatgttgactctagtctttaatacygattttaatagagaaaatagatccataaactaaactacaacacttccacaactacaaattacaggtaggttaataggacctttatrcaaccaatttatcacttctctactaaaatgaaaagctcyctttctgtcttgtatgggttagtcattaagtaacctttcttgacttacatacacagccttttttatgcttcttgttaaggcaaaatttctatatgctatattcaagtt

SEQ ID NO: 28907 - DNA, 447 bp, Chicken  19866894247320_3
tggggtaactccagcatgtatagagacagaattgtaaatggttataactgcagcatccayacttgtatctacagttacaatatttaagagcttctgtagctgccatttggttgaagttgagcagtttttagtagatgtgaatactggcttttaaatttagtttaaaatgtattttagatgataatgttccatgttgactctagtctttaatacygattttaatagagaaaatagatccataaactaaactacaacacttccacaactacaaattacaggtaggttaataggacctttatrcaaccaatttatcacttctctactaaaatgaaaagctcyctttctgtcttgtatgggttagtcattaagtaacctttcttgacttacatacacagccttttttatgcttcttgttaaggcaaaatttctatatgctatattcaagtt

SEQ ID NO: 28908 - DNA, 408 bp, Chicken  19866894247320_4
ggttataactgcagcatccayacttgtatctacagttacaatatttaagagcttctgtagctgccatttggttgaagttgagcagtttttagtagatgtgaatactggcttttaaatttagtttaaaatgtattttagatgataatgttccatgttgactctagtctttaatacygattttaatagagaaaatagatccataaactaaactacaacacttccacaactacaaattacaggtaggttaataggacctttatrcaaccaatttatcacttctctactaaaatgaaaagctcyctttctgtcttgtatgggttagtcattaagtaacctttcttgacttacatacacagccttttttatgcttcttgttaaggcaaaatttctatatgctatattcaagtt

SEQ ID NO: 28909 - DNA, 599 bp, Chicken  19866894247325_1
  misc_feature (1)..(101): n is any nucleotide
nnnnnnnnnnnnnnnnnnnnnnnnnnnnnnnnnnnnnnnnnnnnnnnnnnnnnnnnnnnnnnnnnnnnnnnnnnnnnnnnnnnnnnnnnnnnnnnnnnnnnacttaagcactctcattttaggttaatggtttgacttgatcatcttaagggtcttgtccgccctaagtaaccctgtgattttcttctataacttcttaaaaccagagtttcattgtactcttccatgaagcttaactttatggtgaaagaaatttatagcaatagttgcttgctaccaaagctgacttctaaattaacwctttagagagaatttttggttttgaaaagggataytggcttgacatccctggagttctgcatttatgcagagtttcagcctagggctgttttcagagaacaagtataatgygaaacatctgtctattccacagcatttgtatttgtgcagtactgaatcttctacagaggttacctatgtatatctaagtagtgggaaaatattaggttgcagcatataggcattctaatatggattaaatctccatgtatttggattattaaatagaaccatcttagagttgttgggagaaatagatt

SEQ ID NO: 28910 - DNA, 599 bp, Chicken  19866894247325_2
  misc_feature (1)..(66): n is any nucleotide
nnnnnnnnnnnnnnnnnnnnnnnnnnnnnnnnnnnnnnnnnnnnnnnnnnnnnnnnnnnnnnnnnnacttaagcactctcattttaggttaatggtttgacttgatcatcttaagggtcttgtccgccctaagtaaccctgtgattttcttctataacttcttaaaaccagagtttcattgtactcttccatgaagcttaactttatggtgaaagaaatttatagcaatagttgcttgctaccaaagctgacttctaaattaacwctttagagagaatttttggttttgaaaagggataytggcttgacatccctggagttctgcatttatgcagagtttcagcctagggctgttttcagagaacaagtataatgygaaacatctgtctattccacagcatttgtatttgtgcagtactgaatcttctacagaggttacctatgtatatctaagtagtgggaaaatattaggttgcagcatataggcattctaatatggattaaatctccatgtatttggattattaaatagaaccatcttagagttgttgggagaaatagatttaagttttctaaatatttttaagtaagttttaaga

SEQ ID NO: 28911 - DNA, 600 bp, Chicken  19866894247325_3
tctcattttaggttaatggtttgacttgatcatcttaagggtcttgtccgccctaagtaaccctgtgattttcttctataacttcttaaaaccagagtttcattgtactcttccatgaagcttaactttatggtgaaagaaatttatagcaatagttgcttgctaccaaagctgacttctaaattaacwctttagagagaatttttggttttgaaaagggataytggcttgacatccctggagttctgcatttatgcagagtttcagcctagggctgttttcagagaacaagtataatgygaaacatctgtctattccacagcatttgtatttgtgcagtactgaatcttctacagaggttacctatgtatatctaagtagtgggaaaatattaggttgcagcatataggcattctaatatggattaaatctccatgtatttggattattaaatagaaccatcttagagttgttgggagaaatagatttaagttttctaaatatttttaagtaagttttaagaacgttttgtaagaaaaaatgtatgtgatttacagcttttacaggtcaccacaaaaacattatgttgttccataatca

SEQ ID NO: 28912 - DNA, 600 bp, Chicken  19866894247325_4
ggcattttactttgagctgaacaagtagctggagtcattatgttggatataaagcaacttgaggtgggaggaaaagatgtggttaatgaatacctgaaagacactcctgacatgtgaagtcttcgggtctcattaatacagccatctatcacgttatgcagactaaattcagactttgaaataaattttcacttgatgtgaaaggcaaagcccactaccctgcttgcagcactgaattgtttttgttggcttcacactcctagcaggttgctaggcctctgtaccaggtgaggcctttcrtctctgctcttccttgtgtttgtcctcaggagttcctgctgggtgcttctgtataaaaactggcatttttggtatcctgttactttcctatagccctctgtagtgactgaagaagtgatctgaacccatctttgttgtaatttcatctcagctcattccacgtgaatttgggggagtctgccgtgttcacaggctttttgttatataggggcttggaaattgttagatcatagggcagacaaaaagtaaaatcagatgctaaatttattggaaaactaacttccagctctgtaggaagtt

SEQ ID NO: 28913 - DNA, 600 bp, Chicken  19866894247325_5
ataaacggaatgtgcacaatgagacatctatgcacttactgtgtatgggccctcagatcatgatctcagaaggagctcttcatcctcgcctgacaagaccctccgaagatgattgcagaagagcagactgcctgcaaatgatcttgaaatggaagggagcaaagctggatgaaggacagtatgaacgagcggccattgatgctgttgataacaaaaaaaatacacctttgcactatgctgctgcctcagggatgaaaacctgtgtcgaggtaaaagttgatatataatcacaagtcttakactgctgtcagtaaattacatgcagcatttcacaaggctgtttcaaggaaaacaatctggtcgaattaastttttaattaacttatattttcattaattraaaaaaaaatgacaaagctaagcagcctggaacatacactgtgtagaagacaatgaaaaaatggattacttttatattaactttatgacataaactcttcagcacaaaataaacagatataggcttataaaagttggaaataattacaagtctgtgacactggtgaaaggactttgaaggtaggcctaggcatacctgta

SEQ ID NO: 28914 - DNA, 600 bp, Chicken  19866894247325_6
aggagctcttcatcctcgcctgacaagaccctccgaagatgattgcagaagagcagactgcctgcaaatgatcttgaaatggaagggagcaaagctggatgaaggacagtatgaacgagcggccattgatgctgttgataacaaaaaaaatacacctttgcactatgctgctgcctcagggatgaaaacctgtgtcgaggtaaaagttgatatataatcacaagtcttakactgctgtcagtaaattacatgcagcatttcacaaggctgtttcaaggaaaacaatctggtcgaattaastttttaattaacttatattttcattaattraaaaaaaaatgacaaagctaagcagcctggaacatacactgtgtagaagacaatgaaaaaatggattacttttatattaactttatgacataaactcttcagcacaaaataaacagatataggcttataaaagttggaaataattacaagtctgtgacactggtgaaaggactttgaaggtaggcctaggcatacctgtatgtgtaaagagaagtaaagtaactacctaaggaaaaattaaagctctaatgctgtctatgtttcaggaac

SEQ ID NO: 28915 - DNA, 600 bp, Chicken  19866894247325_7
ctccgaagatgattgcagaagagcagactgcctgcaaatgatcttgaaatggaagggagcaaagctggatgaaggacagtatgaacgagcggccattgatgctgttgataacaaaaaaaatacacctttgcactatgctgctgcctcagggatgaaaacctgtgtcgaggtaaaagttgatatataatcacaagtcttakactgctgtcagtaaattacatgcagcatttcacaaggctgtttcaaggaaaacaatctggtcgaattaastttttaattaacttatattttcattaattraaaaaaaaatgacaaagctaagcagcctggaacatacactgtgtagaagacaatgaaaaaatggattacttttatattaactttatgacataaactcttcagcacaaaataaacagatataggcttataaaagttggaaataattacaagtctgtgacactggtgaaaggactttgaaggtaggcctaggcatacctgtatgtgtaaagagaagtaaagtaactacctaaggaaaaattaaagctctaatgctgtctatgtttcaggaacaggtttgatgtctttaatttacagtgccca

SEQ ID NO: 28916 - DNA, 600 bp, Chicken  19866894247337_1
atttctcgcggcagcaaatcaaacaaggcgcttggcaaagggatcctcacattaaatccatcactgtgaacaaagaaagagatattagacaaagattcaaaagcatcattctgagaatgtgctatttctatgaagaggactaacatccacaacgcaatccaattattagaaaaagtagtatcagtcaaaactgaggacttgaaagaactgctacagcttgctcccagttacaaaaagctcttctacttcaaatacaaaccagcaacaacctgcaacattaattttatgttctcatgggcrtttcaagccaatctgtcaattttttcacaaaagctgatgttgcttttctcattaacattgctgttctaacatgacctggggacaaaaaagccaaactttggcatgaccccatcttgagtaaagtagatttgattttaaagwgataatggcaggtgacgatgcatacgcagagaaagatttctttttagacacagtaagtattgctgatatttcagagctgaagaacagaggcaatgacaggagtgaccagagcataagccaaagacagagctaacaagagcactgatatggaatgactca

SEQ ID NO: 28917 - DNA, 600 bp, Chicken  19866894247337_2
aacatccacaacgcaatccaattattagaaaaagtagtatcagtcaaaactgaggacttgaaagaactgctacagcttgctcccagttacaaaaagctcttctacttcaaatacaaaccagcaacaacctgcaacattaattttatgttctcatgggcrtttcaagccaatctgtcaattttttcacaaaagctgatgttgcttttctcattaacattgctgttctaacatgacctggggacaaaaaagccaaactttggcatgaccccatcttgagtaaagtagatttgattttaaagwgataatggcaggtgacgatgcatacgcagagaaagatttctttttagacacagtaagtattgctgatatttcagagctgaagaacagaggcaatgacaggagtgaccagagcataagccaaagacagagctaacaagagcactgatatggaatgactcaggttgcaagccagaaggttacgttgggtctactgagccaaggcaaagagtacagtgtgtgttttatgtcatgataaatgtgacgtaacagccataacatcagtgcataccaccttaaatctgctacaagctggcatacggt

SEQ ID NO: 28918 - DNA, 600 bp, Chicken  19866894247340_1
tgggaatgacgtcttgggaaatttgaccttattacagccccacaaagctatgtacaacaagatagtggatcaaagataaataccagtatatctgatgggctggttatgtcaagtttttggaaaatccaaacagtactttttaattctgctacttggagtctcaggaaaccatcttaatgttgaagaaggatagatgtaatgtggcataattgcatttctgaaagcacctatgcacaggaaaaaaattgttttagtggggataataggacttgaggcaatggtctgaagtgctgccagggraggttcaggttagttattaagaaacattttttctccagaagagtggtcaggtgctgcagtggtctgcccagcatttagatgttgtactaagtgatgtggtttagtggggaaacattggtggtagatgaatggttgaacaagatgattgtggaggtcttttccagcctgggagattctaagcttctgtgattctgtgataagtcagtaagactgtgagattcgaaatggcaaatttctgtgcattaatgaaaataaacctgaacttttctcgatcaccttgctattgtgcagttcaaagtt

SEQ ID NO: 28919 - DNA, 600 bp, Chicken  19866894247355_1
aagtgcttggtgctgcccaccatctactagagctgggtttgtgtaagcccgttgcctactgcagagctggctgagcagatgtctgtttgcccagacagggggtgtttctcactgctctttgtctttgtgccagtcatattggcatgagtacaatccccagagtcagaacatgccttcccacgtgttttgcactacggtggctcttttggctttgttagggctgctctgcatcgacactggtgtgacatcaagatcttccccttcttccctcttcttcccagtgtctggctaactagtaayggtttttgaggttgaaattaactgtgattagagaactgaaaactctgactaatgctgcaaacatttgggcaacacctttttgaaaaagtaagtgccattttaaggcttaatataatttccagtccttgttcctggataacacaattgctcctttttgtttctctgaagtgcagtcaataacttagtgcaaggatacctctaatgaaagatctcttgaatattccgagtgattaatttccattttgtacttcaggttaatgggtgattttcaacaacagttcagagggccgaagttcaatt

SEQ ID NO: 28920 - DNA, 600 bp, Chicken  19866894247356_1
cgtgtaattctatttacaatgcattactgtacagaggattggctattatgtgactgtgactgcagtggtttaatttatttttcaccagacagttgcttacagcagtaagcaaaactaaggcctttttatagtggaattccctaaaattaggactactcataaataataataaaaatgtatgaccaaaagaatacaaagggagcaattatagaaatatttgctttaactgacaaaagacatatgatgtgcttttaaattttagtagaattttccagcttaaagactgtgagactttgaagyccggcactgtccyctcttaaatgagatgttccttttgcgatctaaaatcttctaaatytataactcagaaaaattctaccattaatataatgaaagaaacctgtaatacatataagatgacaggagggaggagagagtaaaatgaagagagtttaagtacagacctagrtggatctagactacaagacttgaaagttcagtgtaaccaaatacagtattggttatctactatataataatcctatgaaagattaaaatgcagtaatctaccaaacctgaactttgtaggccaaagaaaag

SEQ ID NO: 28921 - DNA, 600 bp, Chicken  19866894247356_2
ttacaatgcattactgtacagaggattggctattatgtgactgtgactgcagtggtttaatttatttttcaccagacagttgcttacagcagtaagcaaaactaaggcctttttatagtggaattccctaaaattaggactactcataaataataataaaaatgtatgaccaaaagaatacaaagggagcaattatagaaatatttgctttaactgacaaaagacatatgatgtgcttttaaattttagtagaattttccagcttaaagactgtgagactttgaagyccggcactgtccyctcttaaatgagatgttccttttgcgatctaaaatcttctaaatytataactcagaaaaattctaccattaatataatgaaagaaacctgtaatacatataagatgacaggagggaggagagagtaaaatgaagagagtttaagtacagacctagrtggatctagactacaagacttgaaagttcagtgtaaccaaatacagtattggttatctactatataataatcctatgaaagattaaaatgcagtaatctaccaaacctgaactttgtaggccaaagaaaagctgatagattctc

SEQ ID NO: 28922 - DNA, 600 bp, Chicken  19866894247356_3
actgcagtggtttaatttatttttcaccagacagttgcttacagcagtaagcaaaactaaggcctttttatagtggaattccctaaaattaggactactcataaataataataaaaatgtatgaccaaaagaatacaaagggagcaattatagaaatatttgctttaactgacaaaagacatatgatgtgcttttaaattttagtagaattttccagcttaaagactgtgagactttgaagyccggcactgtccyctcttaaatgagatgttccttttgcgatctaaaatcttctaaatytataactcagaaaaattctaccattaatataatgaaagaaacctgtaatacatataagatgacaggagggaggagagagtaaaatgaagagagtttaagtacagacctagrtggatctagactacaagacttgaaagttcagtgtaaccaaatacagtattggttatctactatataataatcctatgaaagattaaaatgcagtaatctaccaaacctgaactttgtaggccaaagaaaagctgatagattctctcagtaggactcttgcatcctttctgcaggcatgttgcttatcaa

SEQ ID NO: 28923 - DNA, 600 bp, Chicken  19866894247356_4
taaaaatgtatgaccaaaagaatacaaagggagcaattatagaaatatttgctttaactgacaaaagacatatgatgtgcttttaaattttagtagaattttccagcttaaagactgtgagactttgaagyccggcactgtccyctcttaaatgagatgttccttttgcgatctaaaatcttctaaatytataactcagaaaaattctaccattaatataatgaaagaaacctgtaatacatataagatgacaggagggaggagagagtaaaatgaagagagtttaagtacagacctagrtggatctagactacaagacttgaaagttcagtgtaaccaaatacagtattggttatctactatataataatcctatgaaagattaaaatgcagtaatctaccaaacctgaactttgtaggccaaagaaaagctgatagattctctcagtaggactcttgcatcctttctgcaggcatgttgcttatcaaagcatgacagctgtttcactttggatctttatacaggaggaaaacagtgaaagtcagaacaagacaataacactgcacaccagctgcatttgttctgcaagggaaatttca

SEQ ID NO: 28924 - DNA, 599 bp, Chicken  19866894247359_1
  misc_feature (1)..(86): n is any nucleotide
nnnnnnnnnnnnnnnnnnnnnnnnnnnnnnnnnnnnnnnnnnnnnnnnnnnnnnnnnnnnnnnnnnnnnnnnnnnnnnnnnnnnnnccttgattcaggatttggcatttacaaagttagcatctttcctgttgggaaatactctggaccagaaggctcacactggaggagaaaatatcttaagaatgttcagaagtggcttctggcaatgcttcttaggctggttctcagttcaagctgtaagcacattggtataggtggcagctacccattccttaattcagatgtgtggcacatggtwcatccaaaatgttgactggctaaaatatcagcaactcagtgaaggaaagcaaagaatggcaacagtgttgaaggtaatttaggctttcctaatggctgcctgtcattacagtctggtagcatgtgagcagatatcaatccagaatattctgggctcatttactgccgcagagcaggctctgaaactgtgatccactcacagagagttgaatagctctgagcctaagactcctcctttttggactgaaagaccactctctgccagtaacatcctctgccagtattatcctatgcccagct

SEQ ID NO: 28925 - DNA, 600 bp, Chicken  19866894247359_2
agaatattctgggctcatttactgccgcagagcaggctctgaaactgtgatccactcacagagagttgaatagctctgagcctaagactcctcctttttggactgaaagaccactctctgccagtaacatcctctgccagtattatcctatgcccagcttggtgagataagtgcagtagaaagccttgtgatgccaggaaagagcaagtgctctgtagatgtaggctcttttaggttgggtctaggctactgagcccattagtaggagaaaataggtagcaaatgaggatatgaatcaaygggcagatgcttctggaggggtctgggcttctggggggccactggcttgtgatgtgctttgccctgtagaggatgctctctgcaagaatagctgaatgctgcaggtaaaatttcaatctctacaaacatgcaccttgcaccaattctgggcttaaacatgtattttccatgaactgcatttactaactgcgttagttttggaatgtgttaaaacaggaggtcttgacttctcgcatttccaaagaagaaataagatcatccatgcaaatatattgtattctgtgggaagtcctgggctgc

SEQ ID NO: 28926 - DNA, 600 bp, Chicken  19866894247361_1
ggagacggacatcggcgcccggagcagaggacaatggcggggtcccatccctccgcgtcgtctctaggtgatgtcacatctatcagagcggccgcaccgaggggagagcagccaacacgcactcacacaaagggctccgctttgaagtcccgcacgggagcgtgcctgctgcccacagcctgcgtgtccccgcggccaacagacgggagggctgcggcccccgcgcctcacagggtgcagagggatggggatgctgcttcccgatgcccttggcatcttggctcgtccaggctcaggacrcatgtagggcagcgtctcaggggctgtggagtttctctgtgccagggatgcttgggggtcacagcccgtggtgctgctcggctactggtcccatcacaggcaggacacgttaaacgcatttgggtccctcccatttctgggccaggtgggaagcctgggagatgaccaaataaaaatggarctcctgcaacgctgcrtggctctgggagctgggatggggtgggacagcaccaccgtggagctgtgtgcactgagaacagtactgctgtgtgccagcatggtgcacgaaagccttcagct

SEQ ID NO: 28927 - DNA, 600 bp, Chicken  19866894247361_2
gcgtgtccccgcggccaacagacgggagggctgcggcccccgcgcctcacagggtgcagagggatggggatgctgcttcccgatgcccttggcatcttggctcgtccaggctcaggacrcatgtagggcagcgtctcaggggctgtggagtttctctgtgccagggatgcttgggggtcacagcccgtggtgctgctcggctactggtcccatcacaggcaggacacgttaaacgcatttgggtccctcccatttctgggccaggtgggaagcctgggagatgaccaaataaaaatggarctcctgcaacgctgcrtggctctgggagctgggatggggtgggacagcaccaccgtggagctgtgtgcactgagaacagtactgctgtgtgccagcatggtgcacgaaagccttcagctccctgcagagcaggaaagaaatgggcctttcagtatctgaagggaggctgtaggaaagaaggggacagactctttagyggggaccattgtggcaggacaaggggaaatggtttcaaactaagagagggaagatttaggttgaacataaggaagaagttctttgctataaagtggtggtgag

SEQ ID NO: 28928 - DNA, 600 bp, Chicken  19866894247361_3
aacagacgggagggctgcggcccccgcgcctcacagggtgcagagggatggggatgctgcttcccgatgcccttggcatcttggctcgtccaggctcaggacrcatgtagggcagcgtctcaggggctgtggagtttctctgtgccagggatgcttgggggtcacagcccgtggtgctgctcggctactggtcccatcacaggcaggacacgttaaacgcatttgggtccctcccatttctgggccaggtgggaagcctgggagatgaccaaataaaaatggarctcctgcaacgctgcrtggctctgggagctgggatggggtgggacagcaccaccgtggagctgtgtgcactgagaacagtactgctgtgtgccagcatggtgcacgaaagccttcagctccctgcagagcaggaaagaaatgggcctttcagtatctgaagggaggctgtaggaaagaaggggacagactctttagyggggaccattgtggcaggacaaggggaaatggtttcaaactaagagagggaagatttaggttgaacataaggaagaagttctttgctataaagtggtggtgaggctctggcacaggttg

SEQ ID NO: 28929 - DNA, 600 bp, Chicken  19866894247361_4
cggctactggtcccatcacaggcaggacacgttaaacgcatttgggtccctcccatttctgggccaggtgggaagcctgggagatgaccaaataaaaatggarctcctgcaacgctgcrtggctctgggagctgggatggggtgggacagcaccaccgtggagctgtgtgcactgagaacagtactgctgtgtgccagcatggtgcacgaaagccttcagctccctgcagagcaggaaagaaatgggcctttcagtatctgaagggaggctgtaggaaagaaggggacagactctttagyggggaccattgtggcaggacaaggggaaatggtttcaaactaagagagggaagatttaggttgaacataaggaagaagttctttgctataaagtggtggtgaggctctggcacaggttgcccagagagatggtgggtgccctgcccaaggtcacgctgggtgggctctgagaactgatggagctgcaggtgtccctgtgcattgcaggaggttggacctgatggcctttaaaggtcccttccaactcaaacaattctgtgttcctacgattccacaattctgtgattctgtatatgtaac

SEQ ID NO: 28930 - DNA, 491 bp, Chicken  19866894247368_1
ttcttttttctttccaagaagttgatcacttcaggcatgaattcctggattaaattttaggggaggaacctcctgttctttgctgcctgatggataattggtaaccagttccagaaatgccataatatgctctggcagcctcacttttagactttataattacgagtttccatgagcaacaagaggcagtcttgggaggagcacaggctgaagaccactgatccctcaccagcaacatccaggaggtgagtttacatattcacaggagtacttttactagcccttaaatctctgatctcytaaagctctactctctaccctactatgtcatctgctttctaggctatgtcctacaagtgcaattgacactacacctgccccacagcaatacctcaagcagagtgacagcagtaggtgtctagactatcccgacacttctccaggtggtggttgccaatgtgttatgcagcagaagcaccatttgatatggg

SEQ ID NO: 28931 - DNA, 600 bp, Chicken  19866894247375_1
tacagtataaattgcagcatctatctttcatataaaaacacttgcttccacatgtccttcttcccttccagagggtcaccacaggcatgtatacttcctatgacattgaggggacacagccatgggcttagcaaacttatatgatccgcaaagagtaacaggagagaaagagagatctgtatcagctgtgcaggcatgtgattaagagatctatcattaacacatgcagattactgtgtacctacgaatgtactaccttgccactatttaatcttcctgggacatattttagtacagcaracatcttggctgccttaaacaggcatatttcagattaaatattccaattttctgctttttacagaattatcaacagcaacatgcaccattccacaaatttttcttcattttatccagagaggggaatgcatatttcagagaagcacagccaaacttctggccctgacaagagatggcctttgcaagcctctracgtgctccgatgtgtatttgaaaggaagaactgaaaaccctctttgcgcatccctgcaaggaaggcagaggtattttttgcataacctgcagtacctcaaataactc

SEQ ID NO: 28932 - DNA, 600 bp, Chicken  19866894247375_2
ggcatgtgattaagagatctatcattaacacatgcagattactgtgtacctacgaatgtactaccttgccactatttaatcttcctgggacatattttagtacagcaracatcttggctgccttaaacaggcatatttcagattaaatattccaattttctgctttttacagaattatcaacagcaacatgcaccattccacaaatttttcttcattttatccagagaggggaatgcatatttcagagaagcacagccaaacttctggccctgacaagagatggcctttgcaagcctctracgtgctccgatgtgtatttgaaaggaagaactgaaaaccctctttgcgcatccctgcaaggaaggcagaggtattttttgcataacctgcagtacctcaaataactcagaagcacagggccttccagaaaggagtttaactctgttactaaaaggtcaaatgaatgttttccctgggtaactgctgtgctaacacctgagtgtgcattaggagcccattcactgttgtgcagagtttctgccttcaaaggctatgagagcaacccgctttaaccctgcagctgaaagacagatgggctg

SEQ ID NO: 28933 - DNA, 600 bp, Chicken  19866894247379_1
ccactcagcaaaaggtaaaataacgcctggggctgcttatggtctgcctgagctcaggaacccatcgtggtaatgaaactctagctgacggaagctatggaggtaataaggcgcctcaaacacctctgtcttgaatcagcttccaaaactttctgtctttgagcactctgtaatgataggatttacacaagcaaagaatgtttgtcatataggtgctaaatattttcagagagtggaaaatgcaaaggggaggctctttgtggacgataaaagttattgtgatactacgcaggggtacgygtaagcaacagctgagtgatcattcctttcaaaacactgaaacttggagatattctgtatctgtagaaagggtctaattgaattttatatttaggtacaaatgttattattatgcaatccatttaaatgtatgtctcctgactaaaggcctcaagctatatttttatatttaattttgtaatttgaaatagggaatattaataacactttttatcaatgttctatctatgttaaaacagccttcagcattaagcagtaatgaatgtggatcagtaaattattaaatttcttgatatttat

SEQ ID NO: 28934 - DNA, 600 bp, Chicken  19866894247383_1
caataaggaacattttcatataaagacttatattttgaaaactttttaaactgatggtactaaggaatatatctattgtctgtttcagtgcctttaacaatacgggcaaagagttggtgggccttatgtctttgctgttctgtctcaagtgttaacttcatggaaggattttccaccatttgacaatcatagcagaagtgagcaacaccacccctgcttaccaagtcccgtagcccagtccagaggttgtcgatggctttttactaggatttgttgtaatgtgttttactttgcagtgasttatttacaccaacatgcagctttgtggcataaaattaatgaatttgaggttgaagaaagcattgacatatccttttttcatttctcttgggtcagaagaggaggttacaaatcactcttgagtggacaaggctcagctctactctgtatcacagtcttgagatgttttatgggtggagtcattaccagtctttgttgatcaatatttaagtgtctataagctgaaaaactacccctctcctataatgcacatatgcactcttttgtctctctccccactctgagcttattaaaaaagac

SEQ ID NO: 28935 - DNA, 599 bp, Chicken  19866894247384_1
  misc_feature (1)..(108): n is any nucleotide
nnnnnnnnnnnnnnnnnnnnnnnnnnnnnnnnnnnnnnnnnnnnnnnnnnnnnnnnnnnnnnnnnnnnnnnnnnnnnnnnnnnnnnnnnnnnnnnnnnnnnnnnnnnntcgattgtcaagtgcaaccacctatagggtaacagtgctatgtactccttcttcttcttactatgtctagactatctggctctctttgagaggagccatctcattaacgccacaaaatgatttgaagggcacttagatcttgaacatgttcaactgatttcaccttgtttagataactacagatgtagttgygatgttagcagaagggrtgcatctctggctgctgtggagaaaatggaagttggaaatgcagggtgctgcgtgacaccagcagggctcagacctaccaattgaaaggcctcagtaatacagctgtggcaaytgtaggccacagtgggcagataactactatttrgtgtaaggatcaagagtttgtttatagctgaactgcaacgatctgaaaaagtccagcaagcaacccagctttcttggtagtgacataagtggtttgctcacagggagcctgtttaatttgaggaaaggaagagaac

SEQ ID NO: 28936 - DNA, 599 bp, Chicken  19866894247384_2
  misc_feature (1)..(91): n is any nucleotide
nnnnnnnnnnnnnnnnnnnnnnnnnnnnnnnnnnnnnnnnnnnnnnnnnnnnnnnnnnnnnnnnnnnnnnnnnnnnnnnnnnnnnnnnnnntcgattgtcaagtgcaaccacctatagggtaacagtgctatgtactccttcttcttcttactatgtctagactatctggctctctttgagaggagccatctcattaacgccacaaaatgatttgaagggcacttagatcttgaacatgttcaactgatttcaccttgtttagataactacagatgtagttgygatgttagcagaagggrtgcatctctggctgctgtggagaaaatggaagttggaaatgcagggtgctgcgtgacaccagcagggctcagacctaccaattgaaaggcctcagtaatacagctgtggcaaytgtaggccacagtgggcagataactactatttrgtgtaaggatcaagagtttgtttatagctgaactgcaacgatctgaaaaagtccagcaagcaacccagctttcttggtagtgacataagtggtttgctcacagggagcctgtttaatttgaggaaaggaagagaactgggaggaaaaaatata

SEQ ID NO: 28937 - DNA, 600 bp, Chicken  19866894247384_3
tatagggtaacagtgctatgtactccttcttcttcttactatgtctagactatctggctctctttgagaggagccatctcattaacgccacaaaatgatttgaagggcacttagatcttgaacatgttcaactgatttcaccttgtttagataactacagatgtagttgygatgttagcagaagggrtgcatctctggctgctgtggagaaaatggaagttggaaatgcagggtgctgcgtgacaccagcagggctcagacctaccaattgaaaggcctcagtaatacagctgtggcaaytgtaggccacagtgggcagataactactatttrgtgtaaggatcaagagtttgtttatagctgaactgcaacgatctgaaaaagtccagcaagcaacccagctttcttggtagtgacataagtggtttgctcacagggagcctgtttaatttgaggaaaggaagagaactgggaggaaaaaatatatttgcgtcaagtttttattgattttaattgaaaaatgtattaataaaaaaatgtatttgaatttggtagactgactcatttgctcaggatattttcctttcccatgtatgaaaa

SEQ ID NO: 28938 - DNA, 600 bp, Chicken  19866894247384_4
tcttactatgtctagactatctggctctctttgagaggagccatctcattaacgccacaaaatgatttgaagggcacttagatcttgaacatgttcaactgatttcaccttgtttagataactacagatgtagttgygatgttagcagaagggrtgcatctctggctgctgtggagaaaatggaagttggaaatgcagggtgctgcgtgacaccagcagggctcagacctaccaattgaaaggcctcagtaatacagctgtggcaaytgtaggccacagtgggcagataactactatttrgtgtaaggatcaagagtttgtttatagctgaactgcaacgatctgaaaaagtccagcaagcaacccagctttcttggtagtgacataagtggtttgctcacagggagcctgtttaatttgaggaaaggaagagaactgggaggaaaaaatatatttgcgtcaagtttttattgattttaattgaaaaatgtattaataaaaaaatgtatttgaatttggtagactgactcatttgctcaggatattttcctttcccatgtatgaaaagcagaggagataaaacgctccaaagaactgaaa

SEQ ID NO: 28939 - DNA, 599 bp, Chicken  19866894247388_1
  misc_feature (1)..(17): n is any nucleotide
nnnnnnnnnnnnnnnnnctttgcccgagccaatttgccacagcaaataaatacgcaaactgccttctctccctgtgaagcgagattacggcgagcaaacacagatgggagggtttgcagggctatggctgctgggctttgctgaccgagggaagattcccttccatgagatttggggctcccattcctttcctggtcccacacctcacagacctgcaggtccctctgccccacagcccacctgcagcccacagccattcctttccctctcactgtaaaactcagcatcactccaactggygtgycatagaggttgggtcagatccattcgccttcagctgaaatgagtgaggaatacacgcaggctgctctgctcatgagctgtagggctggaaagcttaatcagggggtgagtaatatttgcagctctcttggtcatttgctcacagttatcaggagatcaggagctgtgctcccaactcccagcatcacacacatgatctgtagcagcgtcccacttgcaggaatccatattacagattaccaagagcaagcaaagtcctgccagctccgatgcttgctttgggatttcaggggagg

SEQ ID NO: 28940 - DNA, 599 bp, Chicken  19866894247388_2
  misc_feature (1)..(13): n is any nucleotide
nnnnnnnnnnnnnctttgcccgagccaatttgccacagcaaataaatacgcaaactgccttctctccctgtgaagcgagattacggcgagcaaacacagatgggagggtttgcagggctatggctgctgggctttgctgaccgagggaagattcccttccatgagatttggggctcccattcctttcctggtcccacacctcacagacctgcaggtccctctgccccacagcccacctgcagcccacagccattcctttccctctcactgtaaaactcagcatcactccaactggygtgycatagaggttgggtcagatccattcgccttcagctgaaatgagtgaggaatacacgcaggctgctctgctcatgagctgtagggctggaaagcttaatcagggggtgagtaatatttgcagctctcttggtcatttgctcacagttatcaggagatcaggagctgtgctcccaactcccagcatcacacacatgatctgtagcagcgtcccacttgcaggaatccatattacagattaccaagagcaagcaaagtcctgccagctccgatgcttgctttgggatttcaggggaggtgga

SEQ ID NO: 28941 - DNA, 600 bp, Chicken  19866894247388_3
tcacacacatgatctgtagcagcgtcccacttgcaggaatccatattacagattaccaagagcaagcaaagtcctgccagctccgatgcttgctttgggatttcaggggaggtggacatgaagaaaagaaatgtattttttgcccgaataaaagcgaacggagtcctcaattccaaacgcagcactgtgcactgcagcagtgtgcagccttaaaatctgtcccagttccatgcctgcaagtcagagaagctgtgctcatttacacagtgctggctgtctggccctaaaggcgttctatayggcacgaaaccacgagttcttaaatatctcacattaacatgaaaattagtggggatgttttcaaaggcagggggatgcgatcacctccttccacctgagaactgccttcgtaaacccacatccctgccttaaaatgacctttgttgccccacgtgcttccttatgggctgagcggttttgcgtatgaacgctcatcacgttctcttttgttgcaaggagaaaacacccatctgggagcaaagatgtctgtaagtcctcggcttgcaatgtcacccaccatgcaatcccattgggtggaag

SEQ ID NO: 28942 - DNA, 599 bp, Chicken  19866894247394_1
  misc_feature (1)..(78): n is any nucleotide
nnnnnnnnnnnnnnnnnnnnnnnnnnnnnnnnnnnnnnnnnnnnnnnnnnnnnnnnnnnnnnnnnnnnnnnnnnnnnnctgtccttcactttgcacagtttctcctagttaactagaaatttaatcctagaagagaatactgtaggacaaacaaaggggaaaggcaaaaaaaaaagatggtgaacttctgacagagtggccattgaacaatacagctcaaattctgtgctttctagcaaccagtacgtggacctgtaaacttgtgatttcttatagtaaaaattatatgtgcgttgccayggaagattttaatcatatcaagtagacacattatgagagatatcagcttctatgctttggtcctacataagaagtcattgggaggacttcacggtgatatggaataccttgtgggcttcccaaaactaagatttctggaaaaagaaaatcatcacatccaccttcaagacgagcaaaaaaagaggatcaagcctcagtccctgggatagttacagatgaaatcccccagaaaagtacaacaaagatasaaaaaataaggtgcctgggaatagccagcatggatttaccaaggtcgaaac

SEQ ID NO: 28943 - DNA, 533 bp, Chicken  19866894247394_2
ggacctgtaaacttgtgatttcttatagtaaaaattatatgtgcgttgccayggaagattttaatcatatcaagtagacacattatgagagatatcagcttctatgctttggtcctacataagaagtcattgggaggacttcacggtgatatggaataccttgtgggcttcccaaaactaagatttctggaaaaagaaaatcatcacatccaccttcaagacgagcaaaaaaagaggatcaagcctcagtccctgggatagttacagatgaaatcccccagaaaagtacaacaaagatasaaaaaataaggtgcctgggaatagccagcatggatttaccaaggtcgaaacttatctggtccacctaagagctatgaaaacaagattgctttagtgaataaggaattagtagtggatgttttttttccttgactgaatgcagcctatgacatggtctttcacaacatccttagaacaagtagggtgagaaaggcaacaaagccatggtctctgcaccacaccttcgactggat

SEQ ID NO: 28944 - DNA, 599 bp, Chicken  19866894247396_1
  misc_feature (1)..(16): n is any nucleotide
nnnnnnnnnnnnnnnnacacgataaatggtattacaaactgtttccatcctcaaagccaagctattcttctccatcagcacttgcctgacatcggcaccaagcacacaccgaccgccttccctgacacccaaccaaccaactgcaccactgacacgagtcacgaccttcaccatggtccacagatcatgaccttcatcccatggcaacgatggcacgttgagttggggagaggtgggtgagaacagggagaagtcacagctttcagtgatgaaccaaagaagctgattcacaactccacrgcgctgcgatggcgtggggatgatgcaaagtgctcatcatcaagagctccttataaaggtagattggaggaacgggttggagacrtgagatgyggtgtgcttgtagaggtttgggcacaaaacagaattttaacacgagaataacagatggctttgctttttcaartatctttaggctgctcattgagatttgcgtgtgttcttctcttggcattaaaatacattcatattctgtgtgcgagacaccttgtacagcacagcagcacagacagcgtgcttaagtgatcaaagcacctttc

SEQ ID NO: 28945 - DNA, 600 bp, Chicken  19866894247396_2
ctgacatcggcaccaagcacacaccgaccgccttccctgacacccaaccaaccaactgcaccactgacacgagtcacgaccttcaccatggtccacagatcatgaccttcatcccatggcaacgatggcacgttgagttggggagaggtgggtgagaacagggagaagtcacagctttcagtgatgaaccaaagaagctgattcacaactccacrgcgctgcgatggcgtggggatgatgcaaagtgctcatcatcaagagctccttataaaggtagattggaggaacgggttggagacrtgagatgyggtgtgcttgtagaggtttgggcacaaaacagaattttaacacgagaataacagatggctttgctttttcaartatctttaggctgctcattgagatttgcgtgtgttcttctcttggcattaaaatacattcatattctgtgtgcgagacaccttgtacagcacagcagcacagacagcgtgcttaagtgatcaaagcacctttcatagctgtaccaccagcactgacaaacagccctgttttacaaacactttgccttacaatctcagcaagaaatgacattttcctcct

SEQ ID NO: 28946 - DNA, 600 bp, Chicken  19866894247396_3
ggcaccaagcacacaccgaccgccttccctgacacccaaccaaccaactgcaccactgacacgagtcacgaccttcaccatggtccacagatcatgaccttcatcccatggcaacgatggcacgttgagttggggagaggtgggtgagaacagggagaagtcacagctttcagtgatgaaccaaagaagctgattcacaactccacrgcgctgcgatggcgtggggatgatgcaaagtgctcatcatcaagagctccttataaaggtagattggaggaacgggttggagacrtgagatgyggtgtgcttgtagaggtttgggcacaaaacagaattttaacacgagaataacagatggctttgctttttcaartatctttaggctgctcattgagatttgcgtgtgttcttctcttggcattaaaatacattcatattctgtgtgcgagacaccttgtacagcacagcagcacagacagcgtgcttaagtgatcaaagcacctttcatagctgtaccaccagcactgacaaacagccctgttttacaaacactttgccttacaatctcagcaagaaatgacattttcctcctccagcccc

SEQ ID NO: 28947 - DNA, 600 bp, Chicken  19866894247396_4
ttcaccatggtccacagatcatgaccttcatcccatggcaacgatggcacgttgagttggggagaggtgggtgagaacagggagaagtcacagctttcagtgatgaaccaaagaagctgattcacaactccacrgcgctgcgatggcgtggggatgatgcaaagtgctcatcatcaagagctccttataaaggtagattggaggaacgggttggagacrtgagatgyggtgtgcttgtagaggtttgggcacaaaacagaattttaacacgagaataacagatggctttgctttttcaartatctttaggctgctcattgagatttgcgtgtgttcttctcttggcattaaaatacattcatattctgtgtgcgagacaccttgtacagcacagcagcacagacagcgtgcttaagtgatcaaagcacctttcatagctgtaccaccagcactgacaaacagccctgttttacaaacactttgccttacaatctcagcaagaaatgacattttcctcctccagccccaagctggatgctgaagaggcacacgctggcactcacctaggaagccctcttcatccacaatggatgggtgtag

SEQ ID NO: 28948 - DNA, 600 bp, Chicken  19866894247406_1
cagagctagcagggtaccttcaagaactgttatgtaacaaacagccagcctgtgccatgtgcaaggtggcagcactctagccattgaaagactgagaaattactcgggagctatgcgagactaaatatgaagaagaagcactgttgtcttggagagaggatagaactgcttcctcacccatggcagagctgaccactcattgccactgtgtctgatagtgaaatcactgggaaacagaagggagttgctggaataaaagggaaagaagaaagcctaatgcagccgacagtcattgcaccrcaagagcaagtttgctgagcttccctgtaagcctggctgtgccagctccactgctgtctgtggaagcaatgtcagatgacaaatgtagcataacacagtgttgtttgctctgggctgtgtacttcccgaacgtgattatatgtctgtgggaaacaggttcctttggcctttctggccagctatggggaagacaaatgagatgttggatattatttgtatcatgaggtttctagttcaaatgtggctttgttcaggtggcttgtaactaaatacttttaccatttgattagagctcaattg

SEQ ID NO: 28949 - DNA, 425 bp, Chicken  19866894247406_2
tagttcaaatgtggctttgttcaggtggcttgtaactaaatacttttaccatttgattagagctcaattgttaaaacaaactagtcagtgaaaaaggaacttgtggttttactcccatccttagaaggcagatacccacatcataacatgacaaattgttcctgcagcttgcctgtggtgggaagccccagatagaatcatagaatcaaggttggagaagaccactaagatcacctagtccaatcatcaatacttcatcaccatgcccattgacccatgtccctttgtgccatatctacwcatttcttgaatacctccatgtagagaattcaccacctgatgggatgatgatacccagtctggaatgggtgcttgagaatggagataaccatgacatcatacttactgagcactgctgtactgtt

SEQ ID NO: 28950 - DNA, 600 bp, Chicken  19866894247409_1
ctgtagctttgtgtggtgacaaaccttacaaatcccttgagcagaagaagggctgcatagcaaactcatcttaaagacactctgaagagcatactccttgctctgacagttggcacaatggtttaatggggtgcagccagtagagaccactcagtgtaaagaagatgtgttccagtgtgttaaatggcagatagctgtgtgagcccagcagggaatggtgcctgtgtggctgaaagcagggaaatacaaaccccgtccatgtttgggtacctgaccttggctgcaggacagatccaacayctcttgttcgcttccttattctggttatcactgatgaaaaccgacttgcacttgcctgacttctcctgttcaccactccattacctttaggagaattggagctaagtagcattttacctctgtcacccagccaagtcagagcagatataacacagagatgtgaatgtccctcaatgaaatactaagccagcccatttttgtctcctgatcagcatacctgagagttttcccatggattgggtggtctgtagctcccttcttggccttaggtctgttcttggtgtttgcggccaaagtaaa

SEQ ID NO: 28951 - DNA, 600 bp, Chicken  19866894247420_1
atccacttcatgcactggaatttccctgtccccagaccagaggcaaaatttggctggagagatgatagatgttgcttcctagggagcaggacattgttaggcagctgtggctccaaactcccagcagacctcgtgctaattaaaacctgcttctgacatgttattttttgctttgccttgaaatgtcattgtggtttaggaaacttacagagacagccatactcatcttctgtccaagtctaagaggactcaaacttacattttccatctcctatacttcgtctgcctcaatactccttsactccctttctcattctggtcctagaagaataaaagtatatttgcttcctgattagaagaaattattgtaaagttcaccacatgacttttgctgaattagaagtttcctcatagccagacaatactgatagcttcaaatttgctttcaatctggactggaagcatccagattttgaacactgagtggtttctgattttcttcctttctaaagtatcatcccttccacctccggcctgcaacagatttagagttgcaggacatacaasaactctgtgtctcaaacagatgtcaatcttttt

SEQ ID NO: 28952 - DNA, 600 bp, Chicken  19866894247420_2
tctcctatacttcgtctgcctcaatactccttsactccctttctcattctggtcctagaagaataaaagtatatttgcttcctgattagaagaaattattgtaaagttcaccacatgacttttgctgaattagaagtttcctcatagccagacaatactgatagcttcaaatttgctttcaatctggactggaagcatccagattttgaacactgagtggtttctgattttcttcctttctaaagtatcatcccttccacctccggcctgcaacagatttagagttgcaggacatacaasaactctgtgtctcaaacagatgtcaatctttttgatttcagtctccaaagagcgcttgcagaatccctgagcaattgttaataggtaacctgataagccattgaaatcaatacttcttatcctcaaccattacattctctattacaagtgagtacacagagacagatggggctggcttttactgtagcgtagtctatacagattaattagaaaacaggcccagtgcagctgatgccaaaagaaaaagtccaaagcatgaaaaaaaaaaaagaaaagaattacatcatttccttgtatctt

SEQ ID NO: 28953 - DNA, 600 bp, Chicken  19866894247424_1
cagggtacgggttgcacgctctgagtgcttatttttgacatcataatccaaattgacattcggtgcttgaatatacaataagttcattacagctaaaccctccggctcagggatttcctgttggtaagtctcagaaaatcaggattccctgcggtatcgggctgaaaacgtttgcagataaaattcaagttagcaagttatgccaaaatgtttttggagccaaagcggagctgtatttcgtgcagtggtgctttatccttccccgtgctcaggagtggaggcggaggcccctgccccgcrcagctcccaatcaggggctcggtgctgctctcaggaggagctcattaaggagcaatggagaaatccacgatcctttatctgagtgttttttggaacctgaactcttgcctcttatcccrctttctaaagagcaggagaacattttgctccacgtgttaccgaagcagcctgtgagcagccacaaccaacacagtgagagttttgatacccctgttactgccatcagtgggatctcctgaacttctcttgtctatatgagagttgcaacatggtggggtttttgctcaagcccttgacctc

SEQ ID NO: 28954 - DNA, 600 bp, Chicken  19866894247424_2
gttggtaagtctcagaaaatcaggattccctgcggtatcgggctgaaaacgtttgcagataaaattcaagttagcaagttatgccaaaatgtttttggagccaaagcggagctgtatttcgtgcagtggtgctttatccttccccgtgctcaggagtggaggcggaggcccctgccccgcrcagctcccaatcaggggctcggtgctgctctcaggaggagctcattaaggagcaatggagaaatccacgatcctttatctgagtgttttttggaacctgaactcttgcctcttatcccrctttctaaagagcaggagaacattttgctccacgtgttaccgaagcagcctgtgagcagccacaaccaacacagtgagagttttgatacccctgttactgccatcagtgggatctcctgaacttctcttgtctatatgagagttgcaacatggtggggtttttgctcaagcccttgacctcctggttaatcagctgtgatgatgaagtgagaacttgacccagggcttatccgtgcccatctggcgcatggtcagcatctcttctgcttccacctccttcccttgatgaaactgataccc

SEQ ID NO: 28955 - DNA, 600 bp, Chicken  19866894247436_1
ggaaaggacgtcccagcgccactcctgctgtgtgctggtttcccccccagctcgggctgcgcaggggcccatccatggcctggagcacctccagggatggggcactcacagctccgggcagcagtggagcacctcactgccctcagtgaagaacttcctcctcatatctaatctacatctcccctcttttagtttaaatctgtaacctcttgtcatctaactgtgttccctgataaacagtcccttctcagctttcctgtacgccctgttaggggccggaaggctgcagtgaggtctccwctcctctccagrcagaacacccccagctccctcagcctgtctccacagcagaggtgctccagccctctcagcaccctcgtgccctcctctggacccgctccaacagccccacgtctttcttgtgctgggggccccaggcctggacgcaggactccaggtggggcctcacgagggcagagcagagggggacagtcccctccctgcctgctgccacccctctgctgatgcagcccgggctgctggcggctttctgggctgcacactgctggctcaggtcagctttccctcctccagaacccc

SEQ ID NO: 28956 - DNA, 600 bp, Chicken  19866894247436_2
ccagcgccactcctgctgtgtgctggtttcccccccagctcgggctgcgcaggggcccatccatggcctggagcacctccagggatggggcactcacagctccgggcagcagtggagcacctcactgccctcagtgaagaacttcctcctcatatctaatctacatctcccctcttttagtttaaatctgtaacctcttgtcatctaactgtgttccctgataaacagtcccttctcagctttcctgtacgccctgttaggggccggaaggctgcagtgaggtctccwctcctctccagrcagaacacccccagctccctcagcctgtctccacagcagaggtgctccagccctctcagcaccctcgtgccctcctctggacccgctccaacagccccacgtctttcttgtgctgggggccccaggcctggacgcaggactccaggtggggcctcacgagggcagagcagagggggacagtcccctccctgcctgctgccacccctctgctgatgcagcccgggctgctggcggctttctgggctgcacactgctggctcaggtcagctttccctcctccagaaccccaagtccttctct

SEQ ID NO: 28957 - DNA, 600 bp, Chicken  19866894247446_1
tgctgctagataagaaacctctttttctcctagacagagcaatgtaaatgtttcaatgcaagttacactgttgtaatgctataatacgagtgaaaatacagcaataatagtggggtggcacaatcctaggctacagcgaacaagaacaagcccataaacagcatccatcaacaacaacaacaaaaaacaaaggaagaaaaactacttacctttggaaggcctcaagtaagcagggatctccagcaaaacatcctcgtctccactgccagctcttaaatgaggtctgggaaggggtggatyctggcttcaccccttccagtcacccaggtgcattacgttgcatgcacctgagttcctctttgctggccctgccttcccaccaggtgcycagtcaytgtttcatgctatgacttagcatttccactacaactgtgcagttaaagtttctctgctaagcacattcatgagtttagcttgcagatcccttgtgtgtttgcacagtcacgcataattaagctctgtgaaactctgagcattctccagtctagatacatttgcaaaactgcatggggctaatcattatcatcatcatcatgaaaa

SEQ ID NO: 28958 - DNA, 600 bp, Chicken  19866894247446_2
agtgaaaatacagcaataatagtggggtggcacaatcctaggctacagcgaacaagaacaagcccataaacagcatccatcaacaacaacaacaaaaaacaaaggaagaaaaactacttacctttggaaggcctcaagtaagcagggatctccagcaaaacatcctcgtctccactgccagctcttaaatgaggtctgggaaggggtggatyctggcttcaccccttccagtcacccaggtgcattacgttgcatgcacctgagttcctctttgctggccctgccttcccaccaggtgcycagtcaytgtttcatgctatgacttagcatttccactacaactgtgcagttaaagtttctctgctaagcacattcatgagtttagcttgcagatcccttgtgtgtttgcacagtcacgcataattaagctctgtgaaactctgagcattctccagtctagatacatttgcaaaactgcatggggctaatcattatcatcatcatcatgaaaagcacattgctgttcctaactcacaaaaatacatttttacatattggtttgttaaacaagttctcctcagctattccttcagattcctt

SEQ ID NO: 28959 - DNA, 600 bp, Chicken  19866894247446_3
atacagcaataatagtggggtggcacaatcctaggctacagcgaacaagaacaagcccataaacagcatccatcaacaacaacaacaaaaaacaaaggaagaaaaactacttacctttggaaggcctcaagtaagcagggatctccagcaaaacatcctcgtctccactgccagctcttaaatgaggtctgggaaggggtggatyctggcttcaccccttccagtcacccaggtgcattacgttgcatgcacctgagttcctctttgctggccctgccttcccaccaggtgcycagtcaytgtttcatgctatgacttagcatttccactacaactgtgcagttaaagtttctctgctaagcacattcatgagtttagcttgcagatcccttgtgtgtttgcacagtcacgcataattaagctctgtgaaactctgagcattctccagtctagatacatttgcaaaactgcatggggctaatcattatcatcatcatcatgaaaagcacattgctgttcctaactcacaaaaatacatttttacatattggtttgttaaacaagttctcctcagctattccttcagattcctttagtccc

SEQ ID NO: 28960 - DNA, 600 bp, Chicken  19866894247447_1
aattttcactttcacattgttttttacagacatttggattttatttctcttcctgaagacataatggtatttttaaagttcatttaaaaaggcaaaatcactttttatttagcatagtactgaaagtttggagtgaccttagaagaagaaaaaaggatgatgcctgagacaagtagagatgggaataaacagagtaactgacttgtgaaaataccttaaaaattgctaccttaattcattctcatcgggtatacttacacccttcactttgaaagcagaggaatttctgcattaatattkcaattagttttctccacagctgttctgataaaatacatggtggtgcactgttaaactgatccatctgatctatcttaaagaagaaacaatgaaataatacctgtgggacagttgtttaatttatactgctccagtgaaatgccttgtaaatacactgtggcwgagaaggtagtaaagactttaagggaatctggagacagatgaggatggcaacctctgagttctgctgctgaggttagcttgtcctgtaaccacagcttattactttctgaacttcctaatgcataataaaaacttttg

SEQ ID NO: 28961 - DNA, 600 bp, Chicken  19866894247447_2
cctgagacaagtagagatgggaataaacagagtaactgacttgtgaaaataccttaaaaattgctaccttaattcattctcatcgggtatacttacacccttcactttgaaagcagaggaatttctgcattaatattkcaattagttttctccacagctgttctgataaaatacatggtggtgcactgttaaactgatccatctgatctatcttaaagaagaaacaatgaaataatacctgtgggacagttgtttaatttatactgctccagtgaaatgccttgtaaatacactgtggcwgagaaggtagtaaagactttaagggaatctggagacagatgaggatggcaacctctgagttctgctgctgaggttagcttgtcctgtaaccacagcttattactttctgaacttcctaatgcataataaaaacttttgaaaaagttacatattcagaaaatttttaagcatatatctttgtaaggcagagttattaggaaggcagtcatcactgcatttctcaaaactaaccacaaggaaagctgaacatttagattgaagattcattttaaagaaaaagaatcagaacatatcagaaga

SEQ ID NO: 28962 - DNA, 600 bp, Chicken  19866894247455_1
gatgctaaacaaaagataaatgtagtaaaggcaagtcagaggaaaactctttggatagcttcagcaaaactacacactaccagagcacaagaaaagctaagatccagctcttgtgattctttctccaaatagccagtctacctcaccacagcctccagtaaaagctttggcaatgctggctgtgttggccagacactgagcccttgatccaggccttcagtgcatcagtactgtgaacgttcatgtccaagagacagtccaaaatggaactaaccatcactaaagactcagcagccaatygaaaatctcaggaaccaacaagttgatttcccatttgcacaaaagaaaaggcacagagcaatatgaggaccacactcagttccttgtcccatgacatccagggctaggaaggattgttgtttgtggtgaacattaatctattcagatacastcttgaaaataaacctcacacatccctaaattcagagctcctttgcttacccaagcacacagcaataagagctggttgaggatgactttccatgtcatagaggacaaaacratttagcagactgctttccagaggcttaatttcatcct

SEQ ID NO: 28963 - DNA, 600 bp, Chicken  19866894247455_2
cctccagtaaaagctttggcaatgctggctgtgttggccagacactgagcccttgatccaggccttcagtgcatcagtactgtgaacgttcatgtccaagagacagtccaaaatggaactaaccatcactaaagactcagcagccaatygaaaatctcaggaaccaacaagttgatttcccatttgcacaaaagaaaaggcacagagcaatatgaggaccacactcagttccttgtcccatgacatccagggctaggaaggattgttgtttgtggtgaacattaatctattcagatacastcttgaaaataaacctcacacatccctaaattcagagctcctttgcttacccaagcacacagcaataagagctggttgaggatgactttccatgtcatagaggacaaaacratttagcagactgctttccagaggcttaatttcatcctgataatcaggaatatactttgggaagggatatcaaatagaagccactgcatgggaggagaacaagaactgttagaagctgttaaggagacacaagcaatgcagacaggatcatagaattattaaggttggaaaatgtaaaaatgctggccc

SEQ ID NO: 28964 - DNA, 600 bp, Chicken  19866894247455_3
aatggaactaaccatcactaaagactcagcagccaatygaaaatctcaggaaccaacaagttgatttcccatttgcacaaaagaaaaggcacagagcaatatgaggaccacactcagttccttgtcccatgacatccagggctaggaaggattgttgtttgtggtgaacattaatctattcagatacastcttgaaaataaacctcacacatccctaaattcagagctcctttgcttacccaagcacacagcaataagagctggttgaggatgactttccatgtcatagaggacaaaacratttagcagactgctttccagaggcttaatttcatcctgataatcaggaatatactttgggaagggatatcaaatagaagccactgcatgggaggagaacaagaactgttagaagctgttaaggagacacaagcaatgcagacaggatcatagaattattaaggttggaaaatgtaaaaatgctggcccactgtggtgtagtcatagtgggctgagacttatcttgggccacactacctgctggtgggacctggcatcaaagtcaacaaactcaattacttacgcacctcacaggctaaa

SEQ ID NO: 28965 - DNA, 600 bp, Chicken  19866894247458_1
aatgacattgtgggcttagtaggtagaacaagctataaattccttctctgtgttatgcatgagaccgccatcccacagtctttcagagcttgaaagactgaaagaactgtgcagaagatgagcacaacagtaaaaagttaaaacgggaaaaagaaaaaaagaaaaaaaaaaaaaagtgattttcagagcgaactaaaaagaaatcccccagggaggagagagagggcagaacagtcagctagaagagctgggttggcatcacctatttcacagttttccaagcatctcgggaacaagcastgaaacagggggtctggggaaaagcctaaactgaaattctgaccttcaccaacacttcmataaatacygyggttgtctgaagctggggaaattaatgcaggtcaatctcaagccacgagygatagctctttaatgaactgctgagcacctgcaatctattttccatgaatgcatcacaagcttgatggctgttggacaagatgctcttggaagggccttaaaatcccctgcaaagagaggcagagcatccgcacagagccggtaaggaggcatgagcagcccggccctgccacctcctgg

SEQ ID NO: 28966 - DNA, 600 bp, Chicken  19866894247458_10
gcaaagygcctggcagctgtcaakcagccattcaaaaatactcaagaagagcaaaatcacgcaccagctgccaaacctttcagtgaggtgcatttcagggcaaacatctgcagtgttctgctagcacagraggaggcttcatcttctaatttgctgttttatgtactagttcttcaaactcaccactcaaccagtatggcgtagatgtatgacgcctctttcagacagccctggctgcatgtatttcccactgaatgcacacatttgagcttcatctctgccatgagtacaagagtgttyggaaggcttcagtagaactgtgtcaacattcagtacttgtcttgattgaatcaatatcaaaactcctgtttgattttgctagtggcaagatttcatactccttaggatcagagctttatatctattaaatawcacagcatgaattgtgatgtgcaactgtgttactgtgattgtgaaaagatttgcaaaattgatgacttgaagaaattcactgtatgattctgaatcaaaatatgctggaagaattccaaatcaatttgttatctcaccatgaactgaaataaaacaatatcttcatgg

SEQ ID NO: 28967 - DNA, 600 bp, Chicken  19866894247458_11
gaggcttcatcttctaatttgctgttttatgtactagttcttcaaactcaccactcaaccagtatggcgtagatgtatgacgcctctttcagacagccctggctgcatgtatttcccactgaatgcacacatttgagcttcatctctgccatgagtacaagagtgttyggaaggcttcagtagaactgtgtcaacattcagtacttgtcttgattgaatcaatatcaaaactcctgtttgattttgctagtggcaagatttcatactccttaggatcagagctttatatctattaaatawcacagcatgaattgtgatgtgcaactgtgttactgtgattgtgaaaagatttgcaaaattgatgacttgaagaaattcactgtatgattctgaatcaaaatatgctggaagaattccaaatcaatttgttatctcaccatgaactgaaataaaacaatatcttcatggctctttcagctctcagtcagtccaccctagccacctatgtgcccatgttgaaaatgctcgtaagtctactgctgttaagcaaaatcccatttcaaccaggactttagagatccccttaccaggagctgcatt

SEQ ID NO: 28968 - DNA, 600 bp, Chicken  19866894247458_2
tgagaccgccatcccacagtctttcagagcttgaaagactgaaagaactgtgcagaagatgagcacaacagtaaaaagttaaaacgggaaaaagaaaaaaagaaaaaaaaaaaaaagtgattttcagagcgaactaaaaagaaatcccccagggaggagagagagggcagaacagtcagctagaagagctgggttggcatcacctatttcacagttttccaagcatctcgggaacaagcastgaaacagggggtctggggaaaagcctaaactgaaattctgaccttcaccaacacttcmataaatacygyggttgtctgaagctggggaaattaatgcaggtcaatctcaagccacgagygatagctctttaatgaactgctgagcacctgcaatctattttccatgaatgcatcacaagcttgatggctgttggacaagatgctcttggaagggccttaaaatcccctgcaaagagaggcagagcatccgcacagagccggtaaggaggcatgagcagcccggccctgccacctcctggtgcaaagcacaataacaaccgcctgctgctgatcgagtacggaaactgccagcattctg

SEQ ID NO: 28969 - DNA, 600 bp, Chicken  19866894247458_3
catcccacagtctttcagagcttgaaagactgaaagaactgtgcagaagatgagcacaacagtaaaaagttaaaacgggaaaaagaaaaaaagaaaaaaaaaaaaaagtgattttcagagcgaactaaaaagaaatcccccagggaggagagagagggcagaacagtcagctagaagagctgggttggcatcacctatttcacagttttccaagcatctcgggaacaagcastgaaacagggggtctggggaaaagcctaaactgaaattctgaccttcaccaacacttcmataaatacygyggttgtctgaagctggggaaattaatgcaggtcaatctcaagccacgagygatagctctttaatgaactgctgagcacctgcaatctattttccatgaatgcatcacaagcttgatggctgttggacaagatgctcttggaagggccttaaaatcccctgcaaagagaggcagagcatccgcacagagccggtaaggaggcatgagcagcccggccctgccacctcctggtgcaaagcacaataacaaccgcctgctgctgatcgagtacggaaactgccagcattctgtgcttttac

SEQ ID NO: 28970 - DNA, 600 bp, Chicken  19866894247458_4
tcccacagtctttcagagcttgaaagactgaaagaactgtgcagaagatgagcacaacagtaaaaagttaaaacgggaaaaagaaaaaaagaaaaaaaaaaaaaagtgattttcagagcgaactaaaaagaaatcccccagggaggagagagagggcagaacagtcagctagaagagctgggttggcatcacctatttcacagttttccaagcatctcgggaacaagcastgaaacagggggtctggggaaaagcctaaactgaaattctgaccttcaccaacacttcmataaatacygyggttgtctgaagctggggaaattaatgcaggtcaatctcaagccacgagygatagctctttaatgaactgctgagcacctgcaatctattttccatgaatgcatcacaagcttgatggctgttggacaagatgctcttggaagggccttaaaatcccctgcaaagagaggcagagcatccgcacagagccggtaaggaggcatgagcagcccggccctgccacctcctggtgcaaagcacaataacaaccgcctgctgctgatcgagtacggaaactgccagcattctgtgcttttactg

SEQ ID NO: 28971 - DNA, 600 bp, Chicken  19866894247458_5
agcacaacagtaaaaagttaaaacgggaaaaagaaaaaaagaaaaaaaaaaaaaagtgattttcagagcgaactaaaaagaaatcccccagggaggagagagagggcagaacagtcagctagaagagctgggttggcatcacctatttcacagttttccaagcatctcgggaacaagcastgaaacagggggtctggggaaaagcctaaactgaaattctgaccttcaccaacacttcmataaatacygyggttgtctgaagctggggaaattaatgcaggtcaatctcaagccacgagygatagctctttaatgaactgctgagcacctgcaatctattttccatgaatgcatcacaagcttgatggctgttggacaagatgctcttggaagggccttaaaatcccctgcaaagagaggcagagcatccgcacagagccggtaaggaggcatgagcagcccggccctgccacctcctggtgcaaagcacaataacaaccgcctgctgctgatcgagtacggaaactgccagcattctgtgcttttactgccagctgtttgtgttgcggccattcctgccagccacagacacagcccaag

SEQ ID NO: 28972 - DNA, 600 bp, Chicken  19866894247458_6
gcatgagcagcccggccctgccacctcctggtgcaaagcacaataacaaccgcctgctgctgatcgagtacggaaactgccagcattctgtgcttttactgccagctgtttgtgttgcggccattcctgccagccacagacacagcccaaggtgccgagcttggtgccccagcgctgtgaagcctcacgggtaattgtgtcagcctgagtttgccacactgtgcttctggagagggttcaggccataaaaacttgtgtcacggttggaaataagggtatcagtgccattgtaactacagkgatggccaaaactatttatggctgtctaaagcaaagygcctggcagctgtcaakcagccattcaaaaatactcaagaagagcaaaatcacgcaccagctgccaaacctttcagtgaggtgcatttcagggcaaacatctgcagtgttctgctagcacagraggaggcttcatcttctaatttgctgttttatgtactagttcttcaaactcaccactcaaccagtatggcgtagatgtatgacgcctctttcagacagccctggctgcatgtatttcccactgaatgcacacatttgagc

SEQ ID NO: 28973 - DNA, 600 bp, Chicken  19866894247458_7
gcacaataacaaccgcctgctgctgatcgagtacggaaactgccagcattctgtgcttttactgccagctgtttgtgttgcggccattcctgccagccacagacacagcccaaggtgccgagcttggtgccccagcgctgtgaagcctcacgggtaattgtgtcagcctgagtttgccacactgtgcttctggagagggttcaggccataaaaacttgtgtcacggttggaaataagggtatcagtgccattgtaactacagkgatggccaaaactatttatggctgtctaaagcaaagygcctggcagctgtcaakcagccattcaaaaatactcaagaagagcaaaatcacgcaccagctgccaaacctttcagtgaggtgcatttcagggcaaacatctgcagtgttctgctagcacagraggaggcttcatcttctaatttgctgttttatgtactagttcttcaaactcaccactcaaccagtatggcgtagatgtatgacgcctctttcagacagccctggctgcatgtatttcccactgaatgcacacatttgagcttcatctctgccatgagtacaagagtgttyggaaggc

SEQ ID NO: 28974 - DNA, 600 bp, Chicken  19866894247458_8
tgctgctgatcgagtacggaaactgccagcattctgtgcttttactgccagctgtttgtgttgcggccattcctgccagccacagacacagcccaaggtgccgagcttggtgccccagcgctgtgaagcctcacgggtaattgtgtcagcctgagtttgccacactgtgcttctggagagggttcaggccataaaaacttgtgtcacggttggaaataagggtatcagtgccattgtaactacagkgatggccaaaactatttatggctgtctaaagcaaagygcctggcagctgtcaakcagccattcaaaaatactcaagaagagcaaaatcacgcaccagctgccaaacctttcagtgaggtgcatttcagggcaaacatctgcagtgttctgctagcacagraggaggcttcatcttctaatttgctgttttatgtactagttcttcaaactcaccactcaaccagtatggcgtagatgtatgacgcctctttcagacagccctggctgcatgtatttcccactgaatgcacacatttgagcttcatctctgccatgagtacaagagtgttyggaaggcttcagtagaactgtgtc

SEQ ID NO: 28975 - DNA, 600 bp, Chicken  19866894247458_9
ttggtgccccagcgctgtgaagcctcacgggtaattgtgtcagcctgagtttgccacactgtgcttctggagagggttcaggccataaaaacttgtgtcacggttggaaataagggtatcagtgccattgtaactacagkgatggccaaaactatttatggctgtctaaagcaaagygcctggcagctgtcaakcagccattcaaaaatactcaagaagagcaaaatcacgcaccagctgccaaacctttcagtgaggtgcatttcagggcaaacatctgcagtgttctgctagcacagraggaggcttcatcttctaatttgctgttttatgtactagttcttcaaactcaccactcaaccagtatggcgtagatgtatgacgcctctttcagacagccctggctgcatgtatttcccactgaatgcacacatttgagcttcatctctgccatgagtacaagagtgttyggaaggcttcagtagaactgtgtcaacattcagtacttgtcttgattgaatcaatatcaaaactcctgtttgattttgctagtggcaagatttcatactccttaggatcagagctttatatctattaaat

SEQ ID NO: 28976 - DNA, 599 bp, Chicken  19866894247485_1
  misc_feature (1)..(35): n is any nucleotide
nnnnnnnnnnnnnnnnnnnnnnnnnnnnnnnnnnnaggtggcaggtttatcacaagcgagcaaaacaagaaaggcaaaagtccgcgttcgttttgcttttcttcaagcagattaaaaaaaaatgttcatttcttgctcatcgagctacaaaccgcagcgtatttttagaagcgtgctgaatacacggggctctaaatggctctctgggaggcagactcaaatcagggagtgctggaataagtgtgaaatgctcaccggttgggaagggcagggacggagggctgtgaaactcgctagaakaggagatcagcacatgggccggctgcgcatcsgggctgtgtagacatcgggaggcgacggggtttcagccgggctgaacataagctgtagatcttatgcaaacagtcagagctgtttaacaattggtgcacccccagccccctgaaaggagacaggtgaacacgatgccaaatacatttttcatgtttcttaagctaactgtttaaatagttaagtgaacatctgtccaaatttccccatcatttccatttagaaaagtctcctatttgaaggctgaagaaaagcgcctgcttaacaat

SEQ ID NO: 28977 - DNA, 599 bp, Chicken  19866894247485_2
  misc_feature (1)..(3): n is any nucleotide
nnnaggtggcaggtttatcacaagcgagcaaaacaagaaaggcaaaagtccgcgttcgttttgcttttcttcaagcagattaaaaaaaaatgttcatttcttgctcatcgagctacaaaccgcagcgtatttttagaagcgtgctgaatacacggggctctaaatggctctctgggaggcagactcaaatcagggagtgctggaataagtgtgaaatgctcaccggttgggaagggcagggacggagggctgtgaaactcgctagaakaggagatcagcacatgggccggctgcgcatcsgggctgtgtagacatcgggaggcgacggggtttcagccgggctgaacataagctgtagatcttatgcaaacagtcagagctgtttaacaattggtgcacccccagccccctgaaaggagacaggtgaacacgatgccaaatacatttttcatgtttcttaagctaactgtttaaatagttaagtgaacatctgtccaaatttccccatcatttccatttagaaaagtctcctatttgaaggctgaagaaaagcgcctgcttaacaatgcaaatggtgctgtctggggcccctttatttt

SEQ ID NO: 28978 - DNA, 560 bp, Chicken  19866894247485_3
tcccagtctccccgcctaatggattgggctcattttttttgagtttgctgtgactcgggcgctctaaaaacgcacgcctggttttgtgacagtgacaaaaccccacaaagccgtcaggtctcgccgtgctgaagggaggcactcaggcaggggagggggcagggggctgcgccgagcctgatttgtgggcagtgctggatgggggccgagcgctgcagggtgcagagccgggtgcgtctcggcgcggcgtttcccagcccgctgctgcagtgctggcccatgggaaggaaggggctcccrcagtaggttgcatggcctgagtttggcagggcgaggtggccgttggaactgtagagttggggttttcccctctgcttcagtcctcgtatggtggagtctcgggggaagagtgtggactactcccattgcaactttcccatcctgcaacatagtatcatagaatatcccaagttggaagggacttgaaagggtcactgagtccaacttgtggctccatgcaagtagtgcaagtgcttccttttggtttgcattgtttaagt

SEQ ID NO: 28979 - DNA, 600 bp, Chicken  19866894247486_1
aatcacattgagccaacaaatgagagacatgattagcaaactccataaacttgagcgattttaagcacttctgaccgggcattttattccagcacaagatgtatccgggagttctattatgcttgtcagccaaagccagggctgcagaggaagagttaagtgatgcccagtgacacttgctgtaatcagattttcacattgtttgaatagatacagttcctgagctctccagctgtcctgcctcgtaagcaaacacatctccctaatgcaggaggatgcagctttggctctgcacccaaygtgtgcaccaacccagcagcaccccgaggacagggaaagctgctcccccccggctctggtccatcatccaccatcgatttcagcggggacagtgcaaaaaagcagcagtccaaagccagagaggttcttcctaatgcagccaagagctcttgctaccagacagaaaaaagatgcatgggttggtaagtggtgagggcgggcgtagccttccccgagcgccggtctcagagggatctgcttcccagccacttgtctgaaggcaatcatttgcaaaaaggctctgtctgaaatctataagcc

SEQ ID NO: 28980 - DNA, 475 bp, Chicken  19866894247486_2
aagtggtgagggcgggcgtagccttccccgagcgccggtctcagagggatctgcttcccagccacttgtctgaaggcaatcatttgcaaaaaggctctgtctgaaatctataagcctttagttagtgatttctccttcctctctcccggacaaagagtttactggaaaagagtatttaccaaacacacccctttgttccccaacacacaacggcacaaagcaaacctgggacgatgtggggagaaaatcacgcatgccgtgtgggagcaaagaggatcccaagcaaaaaggagctctggrcagargaacgggatggagcggcagaygcggcgtggcggggaaggaggaggtgatgttttccaacagctcagcgggaagctgagaaccagcgctgcgatcgaagccgtcgctgagtcaccaggcaggcacctttgtctcgttgaagcggctcaaagggaacaatagcagcgctcgg

SEQ ID NO: 28981 - DNA, 470 bp, Chicken  19866894247486_3
gtgagggcgggcgtagccttccccgagcgccggtctcagagggatctgcttcccagccacttgtctgaaggcaatcatttgcaaaaaggctctgtctgaaatctataagcctttagttagtgatttctccttcctctctcccggacaaagagtttactggaaaagagtatttaccaaacacacccctttgttccccaacacacaacggcacaaagcaaacctgggacgatgtggggagaaaatcacgcatgccgtgtgggagcaaagaggatcccaagcaaaaaggagctctggrcagargaacgggatggagcggcagaygcggcgtggcggggaaggaggaggtgatgttttccaacagctcagcgggaagctgagaaccagcgctgcgatcgaagccgtcgctgagtcaccaggcaggcacctttgtctcgttgaagcggctcaaagggaacaatagcagcgctcgg

SEQ ID NO: 28982 - DNA, 449 bp, Chicken  19866894247486_4
cccgagcgccggtctcagagggatctgcttcccagccacttgtctgaaggcaatcatttgcaaaaaggctctgtctgaaatctataagcctttagttagtgatttctccttcctctctcccggacaaagagtttactggaaaagagtatttaccaaacacacccctttgttccccaacacacaacggcacaaagcaaacctgggacgatgtggggagaaaatcacgcatgccgtgtgggagcaaagaggatcccaagcaaaaaggagctctggrcagargaacgggatggagcggcagaygcggcgtggcggggaaggaggaggtgatgttttccaacagctcagcgggaagctgagaaccagcgctgcgatcgaagccgtcgctgagtcaccaggcaggcacctttgtctcgttgaagcggctcaaagggaacaatagcagcgctcgg

SEQ ID NO: 28983 - DNA, 600 bp, Chicken  19866894247487_1
aaagaacaatgtaagactggacaagcaacacaagtggaactggcgtgcatacaaatgaataaaatcctggtttgggagagcaagcaagctacgttttgtgagcctgtgttcgcttctgtgtgaaaacacattggaaacagccttgagcaaaacgtcacatgaagggagcctgaagtcacttgtaaaagatagcagggtagcatcagtgagaatgcaaagcacggggtgatacatctgaggtgaaacactaatccctcaactgtttgtggtttttacattgaccagaaaaggtcgacatakggtgtactgggaaaactgccaacagaagtactgctaatttttggaatgtttttaatatgaatttcaaccttttttcttgttattgcagctctgctagagaaaagagtgctgattactacaaggagtgatcactaattatggctcctctgaacatgtaggttgagtctgaatgggcatgagttacacataagtggcaattcaccgaaatagggctgttatgtcgtatgtctgatatttcagtattacttgggcatgggaacctctgactacatctaagtaaactacatggagtgtgggcaa

SEQ ID NO: 28984 - DNA, 599 bp, Chicken  19866894247490_1
  misc_feature (1)..(80): n is any nucleotide
nnnnnnnnnnnnnnnnnnnnnnnnnnnnnnnnnnnnnnnnnnnnnnnnnnnnnnnnnnnnnnnnnnnnnnnnnnnnnnnnaagctgggatctctcgaccttactgcgttactattgcaaagctctggatggttagtttagttaagaaaaacattaatttttggttacaaggctgttacaaatctctcaaggccagctcttgatgacagccgttgtaaataccctggaactgcaacttggtgctattaaaagcaacacacgttttgccactaaaatcagcagcatcttggactggcccacrctcaataacatgaaccaatactgtggtctataaggcagaatgaagaggaggaaagaagtgcgtgaatgggatgtcatgtagtacctgtcaagaagaagacagattaagtgtatgtccctcttccacatgaagaaacattacttccagctttaggaaaacagaaatcttgcacagttttaaaacaaaagcatagattactataaatgtcccaacagaatctattcagaatccagcccatctcctatccatgcaccctatttgtgcctgtgctaagggaccacgctcagtctcacagcrcc

SEQ ID NO: 28985 - DNA, 587 bp, Chicken  19866894247490_2
acrctcaataacatgaaccaatactgtggtctataaggcagaatgaagaggaggaaagaagtgcgtgaatgggatgtcatgtagtacctgtcaagaagaagacagattaagtgtatgtccctcttccacatgaagaaacattacttccagctttaggaaaacagaaatcttgcacagttttaaaacaaaagcatagattactataaatgtcccaacagaatctattcagaatccagcccatctcctatccatgcaccctatttgtgcctgtgctaagggaccacgctcagtctcacagcrccctgcatgcaccccactgccaagcactattgatcacacacktgataataagaacaggatattcacaaataagaagcatgtaatgtgtccacttcaaatgatctgttaatttactaagtataaggtatacaaaacctgctacagagtggttaccctttcaagggcaagggattttaggacagaaaagtacttgcacactcagctcttcttaagtttatagaaatggatataaagagaaaacaaggtccaacactttacagctgcccagtttatgctatgaaaattta

SEQ ID NO: 28986 - DNA, 545 bp, Chicken  19866894247490_3
atgaagaggaggaaagaagtgcgtgaatgggatgtcatgtagtacctgtcaagaagaagacagattaagtgtatgtccctcttccacatgaagaaacattacttccagctttaggaaaacagaaatcttgcacagttttaaaacaaaagcatagattactataaatgtcccaacagaatctattcagaatccagcccatctcctatccatgcaccctatttgtgcctgtgctaagggaccacgctcagtctcacagcrccctgcatgcaccccactgccaagcactattgatcacacacktgataataagaacaggatattcacaaataagaagcatgtaatgtgtccacttcaaatgatctgttaatttactaagtataaggtatacaaaacctgctacagagtggttaccctttcaagggcaagggattttaggacagaaaagtacttgcacactcagctcttcttaagtttatagaaatggatataaagagaaaacaaggtccaacactttacagctgcccagtttatgctatgaaaattta

SEQ ID NO: 28987 - DNA, 600 bp, Chicken  19866894247496_1
gtaggataagaaactcagatttagactagctgatagcaagtagaggcactgtaacttagccttgcgttttctgtgtctccacctacaactgtaatctcctttttgatctctccctttgaaactgtaggtgttggtgatgatctaactagcacctgactctccaaccatctgtctggggaggactgagtagggatgagtgagctgcgctccgtgatgggggcgtggctgttgcactggtgggtcctgatggaggattacttacaatttccttaattttcctttcactcctgaaataccccytgcatccaatyagtgataaatgaacttgaaaggcacagtctgtcaagatgatgtgcagagtagagaaaggtaaacactgtatcaccaagaagtcaagaaaactgatctttctgacacactttctgaagccgtgctgcctatctttacgtatctctacacagtgagtttagatcataatgcaagtaggtcctccattatgggcccaaaacagaataaatatagccagaataaatacaattagatgtttgaaaagattcaccacagagtttaaattgttgacccaacttctgttgtggctga

SEQ ID NO: 28988 - DNA, 600 bp, Chicken  19866894247496_2
aactcagatttagactagctgatagcaagtagaggcactgtaacttagccttgcgttttctgtgtctccacctacaactgtaatctcctttttgatctctccctttgaaactgtaggtgttggtgatgatctaactagcacctgactctccaaccatctgtctggggaggactgagtagggatgagtgagctgcgctccgtgatgggggcgtggctgttgcactggtgggtcctgatggaggattacttacaatttccttaattttcctttcactcctgaaataccccytgcatccaatyagtgataaatgaacttgaaaggcacagtctgtcaagatgatgtgcagagtagagaaaggtaaacactgtatcaccaagaagtcaagaaaactgatctttctgacacactttctgaagccgtgctgcctatctttacgtatctctacacagtgagtttagatcataatgcaagtaggtcctccattatgggcccaaaacagaataaatatagccagaataaatacaattagatgtttgaaaagattcaccacagagtttaaattgttgacccaacttctgttgtggctgattacaccaatc

SEQ ID NO: 28989 - DNA, 582 bp, Chicken  19866894247497_1
atctagtccaactattgacccatcaccgcaatgccaactaaaacaggtccctaaagaagtatgagaagcaagaagtgagttgtagctactgaaatgtatgccccaccctacacccccccccccttttttttcagaaaatttcccttttgtagatgtacatagttattagtatttataaactctgtttttaatgtgtatttttccttatcatacggttataacatgttactgtctgtcactgcatttgtattttcatacatgccccatctgtaaacttctggtcatcttgttttattttgrtaggatttgtatgtatgaagcaaaatgtgtatgtgagagtataaataagcaaaaccatcaggatggtaaaatattcctaagcctgtggtgtcggcctaattttcctcctatgaaaatcagctgtaaagctcctattgccttggggtaaagctaatctgtcgctgaacacctttgaaaatcccatctctggtgcccagaaatctcattatactactgtagggcagaagtaattgctcatagcataaagcaaagttataactgagccataagaaaatatgaaat

SEQ ID NO: 28990 - DNA, 600 bp, Chicken  19866894247503_1
gaattgtgacagtggtgccaaaacgtgaggcctgctctgtgtttgctgaaagcaacagtccagcagattccctgagtagtttcattatcataaaggtaggtactgtcagatgaagcccaagctcatattccatggagagcaaatcatgttagacatttatttgcctccaatactgagatgtccagtgttcaaggaaatgtcggttttcttcattacaaagtgttgtattaggagattaattgaacacatacacagtttctagtatgacatgcagtataagacaaaaccaattatagctawaattgtctcaaggggatgggaagctaacataatttcaattagcttcttctccagcttctaactgtactctaggcctaccagctgtagggagtgaatggcagtaagaatgaaagtcaaataactgtgcccaaatctgaaatattttttgaaaatctctttatttgccagtttgaatatattgtgaacaaagtgctccttacagatacaagaaattctccwgtgaaacatggttattttttttaagatagtcatagatcaacaaaaggaggaggttcttagttcagtacgtactgccttttt

SEQ ID NO: 28991 - DNA, 564 bp, Chicken  19866894247503_2
gtgttgtattaggagattaattgaacacatacacagtttctagtatgacatgcagtataagacaaaaccaattatagctawaattgtctcaaggggatgggaagctaacataatttcaattagcttcttctccagcttctaactgtactctaggcctaccagctgtagggagtgaatggcagtaagaatgaaagtcaaataactgtgcccaaatctgaaatattttttgaaaatctctttatttgccagtttgaatatattgtgaacaaagtgctccttacagatacaagaaattctccwgtgaaacatggttattttttttaagatagtcatagatcaacaaaaggaggaggttcttagttcagtacgtactgcctttttttttttttttcttttttactagagcccaaggcttacaattgtatgttggatcatgttggattcttcttacagtccgttaggtggatttcctacaggaactgtcgtagctttttgtcatcctctgacgctgaagaatctatgaaaaaaaatcatgtttcttatgtccctagttactagagaggg

SEQ ID NO: 28992 - DNA, 600 bp, Chicken  19866894247511_1
cttctttttttctccccattttacaaaatattacatcacagtaccaacatgttatttagtttcctttcctgctgctgtatgtataattcagtgaatggtagggttatgtattcagtggcaatagaaagatttctgcaagctgatttaaattctcaggagagtaagagaatgacgaagatataaaatgatatttatttgactgatacattgggctatggtgagtttaaacagtgcttgcagtgagcacaaacaagcatgttctgtgaattcctttaaattgaagagtacattcttgcagcmttcattgtagaatttcttcctaaattactggtaattttctctactctcagagaactatataatcatacatggtcaaaacattgtactggaaagcctaatagaaaatgagttcagtgtaaccatgtctctgtaaaccccaaactataatatgaggtcagtaataaaaatggagaatttgagataatattttggtggaagggaagtggcttttagtaaactctgtggtttaatgttttgaaggtgcctgttttgccacagagattaagatcataatatggttatcttattcctataacttga

SEQ ID NO: 28993 - DNA, 600 bp, Chicken  19866894247514_1
gcccgcaggcatctgaggcaggagatgtcatatgcaaaagttttctgcttagaaatagcagcgagcagctgcacagaacgcagctccaccacgcacccatctgagcaagcaaagctgaagcttctgtggcagttaagtgacaccggcaggcacgcagccgagccccacgatcagaaatggaacagttttgtcattttttaataacagcagtacctgcgttggtgctggggcggctcattgcacgcagatgctctcagcctggggtcggtttgtcactgaggcggaggtggttgtgatggwggctgtgcagtgctgctcggctgtrgggagccaggggtcagcgaggcagaagccccaaccctgagagcagcacggggcggcagagcagcacaggagtgggtcagggccaacatgggggtctggggcgaacccactgcgcccatcagatgtgcccaaggagctccaggagaggacaggagccccacagctctcccattcccaycccacggggaggctgagcgctcccacacaggtggatggttggcagcaccttgagacagatgacacattcatgatgcagaaggcactgatgtgaggccc

SEQ ID NO: 28994 - DNA, 600 bp, Chicken  19866894247514_2
tgtcatatgcaaaagttttctgcttagaaatagcagcgagcagctgcacagaacgcagctccaccacgcacccatctgagcaagcaaagctgaagcttctgtggcagttaagtgacaccggcaggcacgcagccgagccccacgatcagaaatggaacagttttgtcattttttaataacagcagtacctgcgttggtgctggggcggctcattgcacgcagatgctctcagcctggggtcggtttgtcactgaggcggaggtggttgtgatggwggctgtgcagtgctgctcggctgtrgggagccaggggtcagcgaggcagaagccccaaccctgagagcagcacggggcggcagagcagcacaggagtgggtcagggccaacatgggggtctggggcgaacccactgcgcccatcagatgtgcccaaggagctccaggagaggacaggagccccacagctctcccattcccaycccacggggaggctgagcgctcccacacaggtggatggttggcagcaccttgagacagatgacacattcatgatgcagaaggcactgatgtgaggccctgcagcccatctgcacaaactgcag

SEQ ID NO: 28995 - DNA, 427 bp, Chicken  19866894247514_3
aacagcagtacctgcgttggtgctggggcggctcattgcacgcagatgctctcagcctggggtcggtttgtcactgaggcggaggtggttgtgatggwggctgtgcagtgctgctcggctgtrgggagccaggggtcagcgaggcagaagccccaaccctgagagcagcacggggcggcagagcagcacaggagtgggtcagggccaacatgggggtctggggcgaacccactgcgcccatcagatgtgcccaaggagctccaggagaggacaggagccccacagctctcccattcccaycccacggggaggctgagcgctcccacacaggtggatggttggcagcaccttgagacagatgacacattcatgatgcagaaggcactgatgtgaggccctgcagcccatctgcacaaactgcaggcag

SEQ ID NO: 28996 - DNA, 600 bp, Chicken  19866894247520_1
gcagttctgtacgagcattcgcattctgcgaggtgcttcgaggcattcaccttcaaaagcaagtggcatggaaatgagaggctgctgtaggtggtggggtgattcacggctccactcgcagatcgagctcaaccctttttctttacagagggttcatatccactggttaataactgccactccgccgagcgctcgagtttggaagtgacccctctgaaagctctaccgcatgtttgaaatgagtcagagatgggaggaaggacagcaaacccttcagcaacgagaggctctgaaagcagmatccctgcagagccaggggcccgcagccagccctgctgggctcacctgrggctgtggtgggtgctgaggggtgaacgacaaacccttctcaaaggggcacgaaagctgtccagctccttcctctttctgcccaaggcttttgctgtccatgccctggaatcagcagagccaagccctgccacatcactcagcgtccttaatctgctgcagctcctaagtggagatgaatgtgcattaaccagaaagaagccttactttcctgctccctcggcgcccgcaggtgactcagcccagttctgg

SEQ ID NO: 28997 - DNA, 600 bp, Chicken  19866894247520_2
ccttcaaaagcaagtggcatggaaatgagaggctgctgtaggtggtggggtgattcacggctccactcgcagatcgagctcaaccctttttctttacagagggttcatatccactggttaataactgccactccgccgagcgctcgagtttggaagtgacccctctgaaagctctaccgcatgtttgaaatgagtcagagatgggaggaaggacagcaaacccttcagcaacgagaggctctgaaagcagmatccctgcagagccaggggcccgcagccagccctgctgggctcacctgrggctgtggtgggtgctgaggggtgaacgacaaacccttctcaaaggggcacgaaagctgtccagctccttcctctttctgcccaaggcttttgctgtccatgccctggaatcagcagagccaagccctgccacatcactcagcgtccttaatctgctgcagctcctaagtggagatgaatgtgcattaaccagaaagaagccttactttcctgctccctcggcgcccgcaggtgactcagcccagttctgggccagccctcctgccctgccatcacagggggtgggcagcagtgactctg

SEQ ID NO: 28998 - DNA, 600 bp, Chicken  19866894247523_1
aggcaaaacttaagagttctggaggcccttccagttagaagacatcggcatgaatttttaattgaacgtagtaaccagtttactattaccgattccacaaataacaattaggttttactactagtttcagtgagtactgttaatagagcatcatcccatcccatgcccaccctgctcactggccttgcctcagcagctgcggcacaccgcagggactcttggctcagcctctgccacagccagggaacagaacggggcagccaggcaagaagtgcaaaacttcccctgcagctctgctgytgggagcacagaaacctcctccattgatgtcagatcagttttaggagacttctaactcctgtttgcaggctgcgctcctcaccacagctttgggctcccagctgtgccaaagacaggcactcaacttgtttgagtacttgcactctagctgaagggctagaaacctcccacagagagaaggcagaaaccagaactgactttacactttgtttgtttttcttcttttccctccaatttatcagctatactctcaagataaaactaacaactcgttttacagagcttgatgctttccagctg

SEQ ID NO: 28999 - DNA, 549 bp, Chicken  19866894247523_2
ctctctccttcactcccaacagcagcacccagatgtatgatggtttatgcctgtgcagtgcccttgctagatcacagctttgctggggctgcatttctagttttaaaggtttggtctacgtgatttatgagaaagttgttggttgtctcaagtaccaagcagaacctctagcagatgaagatcacactggcatcaatattgatatctcaagattgtctgctctagtcgaagttacagggaattctctagctttaatgctccgttagctcagccagaatgttcagtaacaatgaactaaaygcccaagttggcctaagttcctttacagcccaaaaagttgcatttccaagtgagaattgggatgctgacatgacagcatgacgaaaacctgcagtataacaggatgtgttgtatctgctctgggggcaaaaagaaagcatcacttccctgaactgctagcatgataccacaagcacgaaattgcctacttttggggggaagaagaaagaaaaggtccctaattactatgccatgttcctcataatgtca

SEQ ID NO: 29000 - DNA, 600 bp, Chicken  19866894247525_1
tctgtcagaagcagagaactagatgaactcatgaatgatcagtcacactgtcttattggcattcattactatccatcttgtttttgataaaatgatttccttcttcacttcattacgttttgattatacctgtctatgtagttggtgatcgctacagtcattgaatacaaaatgattatgatgatgtatagtatttatgatattttccttccatttctcatcagtattgtgtggtgcaaaggtgaaaaaattctcaggtactttgtggactgtgttgacagaaactagttcagactgacyaactccttatgcatatattgttcgaggttacaataagcattaagctaaatatcacctaaaaaagtatcaaaattaaaggaactcagtattaatactaaaggaactcagtatgaagaaattgatttttaacatattttggaaacttagtcatttggaaaaagatttatcaaaggacaagttgtagctgcataggaattaatgggtgtatttacagattgcttaggtgtatcatacacaaattttagtatttctttttcagtaatactcttatatgtacactgtaatgttgtgtctgttaaa

SEQ ID NO: 29001 - DNA, 600 bp, Chicken  19866894247528_1
gaaaataggacacaggtgagagaccaaggaagtagtgcagagagtggcttttcactgattagtgccttcctgggaaatgtgctgggaagtacacagagtccacaagaaacttcctgtaaatattaaggccagcttagactgtgcagctcttccgtggaagaaacgtcaagaaaattttcatttcctgctattgggattgctggaacaaaagctcttacctagatggagggtttccaacagctgctgatcacctgtgaaggagcaatgccctgaaacctggaatgaattagcaaactcacygcacctggcctttcagttgattaggggactggggattttcaagggaaacctctttgcctgagttgttaccatatttctcaaaaacaaacaaacaaacaaacaaaaaacaatccagaactgttaatttggccttggataggaaagagtgaaaggctttggtgaactttttccctttacttccctgcaattcacatgaaatgatattctaaaactctgatttcacactgtgggagctttttagcagtttttgttaagagttattgaaattttaaagttcattatgttacaattctctcttct

SEQ ID NO: 29002 - DNA, 600 bp, Chicken  19866894247529_1
gaaaagatgatactttctgtatggtaagtggaaaaaaatagatttaaattaaattagatagaatgtgaaagatgatcctacctctgttcaagtggttggtactgtactaataaggaaacctatgacaccagatgtaaaaatagctgttacttaatgagctgatctgactggcctcaaacaaaaccatggatatgctggatatattgctaatatggtaattgtgttgctttttatcgatctgggaacattttatcttagttaaagggcacagcctgagaaattggtgtggagggatgctgrggagagaccagytttggctttgcaggcagggtttggggctctaacactgcaatacctttataaataactacacgtgcagacatctcctgtgccaggcgctgtgctgcttgacaggatgaggcaaggggctcagaccaggcttcctcaggctacctccatgtcccagccttacagaacgcgtgytgctggggcagarcatctgtcttttctgtcctacttgcagtgtgactcccttgcactatttgcaaaacagaagtgggtttgtttgtttgtttggcagcggtcaaggtgaccaggatc

SEQ ID NO: 29003 - DNA, 600 bp, Chicken  19866894247529_2
ctttctgtatggtaagtggaaaaaaatagatttaaattaaattagatagaatgtgaaagatgatcctacctctgttcaagtggttggtactgtactaataaggaaacctatgacaccagatgtaaaaatagctgttacttaatgagctgatctgactggcctcaaacaaaaccatggatatgctggatatattgctaatatggtaattgtgttgctttttatcgatctgggaacattttatcttagttaaagggcacagcctgagaaattggtgtggagggatgctgrggagagaccagytttggctttgcaggcagggtttggggctctaacactgcaatacctttataaataactacacgtgcagacatctcctgtgccaggcgctgtgctgcttgacaggatgaggcaaggggctcagaccaggcttcctcaggctacctccatgtcccagccttacagaacgcgtgytgctggggcagarcatctgtcttttctgtcctacttgcagtgtgactcccttgcactatttgcaaaacagaagtgggtttgtttgtttgtttggcagcggtcaaggtgaccaggatcactgaggagctg

SEQ ID NO: 29004 - DNA, 600 bp, Chicken  19866894247529_3
ccatggatatgctggatatattgctaatatggtaattgtgttgctttttatcgatctgggaacattttatcttagttaaagggcacagcctgagaaattggtgtggagggatgctgrggagagaccagytttggctttgcaggcagggtttggggctctaacactgcaatacctttataaataactacacgtgcagacatctcctgtgccaggcgctgtgctgcttgacaggatgaggcaaggggctcagaccaggcttcctcaggctacctccatgtcccagccttacagaacgcgtgytgctggggcagarcatctgtcttttctgtcctacttgcagtgtgactcccttgcactatttgcaaaacagaagtgggtttgtttgtttgtttggcagcggtcaaggtgaccaggatcactgaggagctgtttttgctctctaacgccaggctttctgccagrgtaaattcataaatgctagtggaaggggtttatgcatgcagcagtgaaagcgagaggaatttcaacctgctttatgagaagttgtggttttgaatgtggaaaagaacagatgatgctctgagtatctgacaaggctct

SEQ ID NO: 29005 - DNA, 600 bp, Chicken  19866894247529_4
ggatatattgctaatatggtaattgtgttgctttttatcgatctgggaacattttatcttagttaaagggcacagcctgagaaattggtgtggagggatgctgrggagagaccagytttggctttgcaggcagggtttggggctctaacactgcaatacctttataaataactacacgtgcagacatctcctgtgccaggcgctgtgctgcttgacaggatgaggcaaggggctcagaccaggcttcctcaggctacctccatgtcccagccttacagaacgcgtgytgctggggcagarcatctgtcttttctgtcctacttgcagtgtgactcccttgcactatttgcaaaacagaagtgggtttgtttgtttgtttggcagcggtcaaggtgaccaggatcactgaggagctgtttttgctctctaacgccaggctttctgccagrgtaaattcataaatgctagtggaaggggtttatgcatgcagcagtgaaagcgagaggaatttcaacctgctttatgagaagttgtggttttgaatgtggaaaagaacagatgatgctctgagtatctgacaaggctctggcctttgtgctt

SEQ ID NO: 29006 - DNA, 600 bp, Chicken  19866894247529_5
actgcaatacctttataaataactacacgtgcagacatctcctgtgccaggcgctgtgctgcttgacaggatgaggcaaggggctcagaccaggcttcctcaggctacctccatgtcccagccttacagaacgcgtgytgctggggcagarcatctgtcttttctgtcctacttgcagtgtgactcccttgcactatttgcaaaacagaagtgggtttgtttgtttgtttggcagcggtcaaggtgaccaggatcactgaggagctgtttttgctctctaacgccaggctttctgccagrgtaaattcataaatgctagtggaaggggtttatgcatgcagcagtgaaagcgagaggaatttcaacctgctttatgagaagttgtggttttgaatgtggaaaagaacagatgatgctctgagtatctgacaaggctctggcctttgtgcttctgagcagagagagccagcagggcagggctggtctggggacaccaatgggagcttccttgtatgaaaacacacagtaatgctttggttctctgctcttccaaatttctttttgctagcaaataggcaataaaaatctagatcagtttaa

SEQ ID NO: 29007 - DNA, 600 bp, Chicken  19866894247530_1
aagctgaggagcatgccattactcttataggtaccaagtagctaaaagagagctgcacatgaagataggttgtaaatccacaggattatgagacaggcttttaaacatcaaatgaatgcctaaaattcctaggtagaagtggaatcaaaatcccagggaggagttgttctctgaaagacagtatttagaaatagagcattttcaaagacattcttcccttctctgctaacaaatgcctcaggtccaccaggccatgggatggctgtatccctgagcactgagttactcacgagttgcacrcctcttccatccttatttgcttctcttcaggaggtcaatgccagggacattctgaactgctattttagacctttgtttgttctgctttttgttgtcagaaactttgttcagagtaaaatcttgttgttttctaggtttaaagtcaatatgagtgaaggaaacaatttgcttttaagggaaactctacatttaagtcacaacattacttcaaaccagcaatgacaggaaaaaacagtatgggaacttaaggaaggaatgagtttccaaaagtgctgtaaatccatcaacatgtaccatgaa

SEQ ID NO: 29008 - DNA, 600 bp, Chicken  19866894247533_1
tcattccactgcctcatatacaaaaatgtgaaaaagcaacaaacttctttccttttagtagggttttgctccttctctagacatctttaagaaatcttggccaatttttttcacttgattgtcctgattctaaacttttggtggatgctgcaactacaaggccaacatgttttaaaattactttacccattgtgatttttcaatatgaaacagaaagagattgatttataagatcatagaatcaccaaggtcggaaaagacctttaagatcatccagtccaaccatccacctaccaccartatttcccactaaaccacatccctcagtacaacatctaaacgtttcttgaacatctctaggattggtgactccatcacctccctgggcagcctgttccagtgcctgaccagctctcagagaataagtacttcctaacgtgcaacctgaatctcccctggcacaacttcaggtcattccctctagtcctattgctagttacactggagaagaggctgactcccacctcmycacagtctcccttcaggtagttgtagagagcaataagatcactcctgagcctactcttctccagactgaaa

SEQ ID NO: 29009 - DNA, 600 bp, Chicken  19866894247533_2
taagatcatagaatcaccaaggtcggaaaagacctttaagatcatccagtccaaccatccacctaccaccartatttcccactaaaccacatccctcagtacaacatctaaacgtttcttgaacatctctaggattggtgactccatcacctccctgggcagcctgttccagtgcctgaccagctctcagagaataagtacttcctaacgtgcaacctgaatctcccctggcacaacttcaggtcattccctctagtcctattgctagttacactggagaagaggctgactcccacctcmycacagtctcccttcaggtagttgtagagagcaataagatcactcctgagcctactcttctccagactgaaaaatcccagttctttcaactagccctcataaggcttttctaagacactggccaaaaaacttagcgcattcacctagtattaaggttttcaatccatattcagtctcccttgtgccaattaagctgttctacctcagtaacagacatccatacttcttaatgaacatctgttgtatataacacaactagaattccaacttttaaacatctataactatcattataggttc

SEQ ID NO: 29010 - DNA, 600 bp, Chicken  19866894247533_3
aagatcatagaatcaccaaggtcggaaaagacctttaagatcatccagtccaaccatccacctaccaccartatttcccactaaaccacatccctcagtacaacatctaaacgtttcttgaacatctctaggattggtgactccatcacctccctgggcagcctgttccagtgcctgaccagctctcagagaataagtacttcctaacgtgcaacctgaatctcccctggcacaacttcaggtcattccctctagtcctattgctagttacactggagaagaggctgactcccacctcmycacagtctcccttcaggtagttgtagagagcaataagatcactcctgagcctactcttctccagactgaaaaatcccagttctttcaactagccctcataaggcttttctaagacactggccaaaaaacttagcgcattcacctagtattaaggttttcaatccatattcagtctcccttgtgccaattaagctgttctacctcagtaacagacatccatacttcttaatgaacatctgttgtatataacacaactagaattccaacttttaaacatctataactatcattataggttca

SEQ ID NO: 29011 - DNA, 600 bp, Chicken  19866894247533_4
cttttagctccttgtgtttccttattctatactacttctaagaaaaagaaatgtctcctcctcatctgaacacccataactggaatttagtaccttcatcagcgcaggatgcaacaggcactacagagaacttttggtggtggtgaggcactggcacaggttgcccagagaggtggtagatgctccatccctgaagattctcaaggtcaggctggatgggacccctgagcacctgatggagctgtaggtgtccctgctcaatgaagccagttggactggatggcctgtgagtttcccttycaacacaaacaattctatcagtctatggagcaggcagaagacttaacaaagagaatgccatcagtcaaaaatcaatagcaaaaaaaaaaaaaaaatccagattactctgaatcattcccctgattggccttcatactgccttttacaggctttccaggaataattaaaaacaagtggcacttgcactatttctgtacgtataaagcaagccaagattcagaattgagttactacatattcaactgcagaaaatggtaactatacaagcagtttgcgtgaattcacgcatactttctaagg

SEQ ID NO: 29012 - DNA, 599 bp, Chicken  19866894247539_1
  misc_feature (1)..(123): n is any nucleotide
nnnnnnnnnnnnnnnnnnnnnnnnnnnnnnnnnnnnnnnnnnnnnnnnnnnnnnnnnnnnnnnnnnnnnnnnnnnnnnnnnnnnnnnnnnnnnnnnnnnnnnnnnnnnnnnnnnnnnnnnnnntccttcatcccgagggataaataatttgtgttgttcatgagtatacacatgcaaacatgtcatttggatttgatgtgcatttacaaagccagacctgaagaaattaaatggaaaacaaacgttaatatacaggaagagaagcttcaacgtgtagtcacagcaggtagaaaagcaaayacccctgtgaaatgattctgcagaacagttgtagtgattacattgcatcagagtttgtattcggggactgttctgggtgttatcatttgcatttgcggctgctgtttttgcaagtgcccaccacaagaatgtgtgtgcatgtgcatgtgtatgttattctaagaaatattttgctcatagmagtcacaaactgcccgtgctgcagaattcagatttagatctgagaagggaatgaccagctacagaaacgggacattaaagatttccaaggttgcttatgcttaaaggcctaaagctaa

SEQ ID NO: 29013 - DNA, 600 bp, Chicken  19866894247539_2
gtcatttggatttgatgtgcatttacaaagccagacctgaagaaattaaatggaaaacaaacgttaatatacaggaagagaagcttcaacgtgtagtcacagcaggtagaaaagcaaayacccctgtgaaatgattctgcagaacagttgtagtgattacattgcatcagagtttgtattcggggactgttctgggtgttatcatttgcatttgcggctgctgtttttgcaagtgcccaccacaagaatgtgtgtgcatgtgcatgtgtatgttattctaagaaatattttgctcatagmagtcacaaactgcccgtgctgcagaattcagatttagatctgagaagggaatgaccagctacagaaacgggacattaaagatttccaaggttgcttatgcttaaaggcctaaagctaatgaataggaatatgcttgccttctgtgccccacattggtgtcagtaagcagactggtctcatttccacttctctcagactccattccttcaacctccttgctgaacctttggccacaactggaaggattttgtccttcccagcaggctgggactctcaaattccgagctcatttcctctctg

SEQ ID NO: 29014 - DNA, 600 bp, Chicken  19866894247539_3
gctgccaggggatgaggctcacccctcccgcccaggcaggagctgcagcatcccacagcactcagggctctccctgcttcctcttaaccttcggaaatgacattcccatcctgcctgtcagcagagggccaagtcttgactctgcaaaagacacagcaaaataaccttcgagtgcagtactattccccttgcaagagtcagacgtgtgagaaaccacagaaggttactgtgctttcctttcatttatttttgtctgtctgtggctttactgtgatctttctttttttctttttctttttyttttttttctttttttgtggctgcattaaatgtttcagagtctcctagggtaatgggatctgccatcttttgtcactatccagcacaaaacaggggctaataaactgctctgactggactggagtctgtctgtgctcgtgccttggtatatgacagcccccagtgcccatggggatacagtcacagctctgcaggagccaacagagctgacttgttattatctgctgatctttagtttgatgacagtgttcatctcttaaatgaaatcacagtgcctgtggagcttaaataggaaatggc

SEQ ID NO: 29015 - DNA, 600 bp, Chicken  19866894247541_1
attaagagtaggaatggaagaaaattaataattaataatgaaacaaggggaaatgcaaaattatagtgttaaatagagattacattttaaaaaaagggaagaaagtaatcaaagagagagatttgacaagcagattaaaatcaaataacttttgcagtagaactagcataatatgtgactagtatatgaaatacaacattaataatagttttaaatatacctgctttgtgtttgggaggaaagtattttagggccaactctaatagaaactagatatcctcttttagacaaaacaaatgmaaagttgaaggaggacaatatatagaattcattgattagtagaaaagggaagtggttgaaaaaattgagattgttgtacctgctaaacaaatttgtgatgagaagttaccaaagtcttcctgttttgaaagattatttgttttttttttkaaacataaccagcatagggaaagcagaagaaaccaaagaagaaaaagatctgaaaagagagcccttccctgctttcagtggaaagtttttgccatggcctccctatgccctcacacattatttacccttttcaattcacttcttactctg

SEQ ID NO: 29016 - DNA, 537 bp, Chicken  19866894247541_2
tttgcagtagaactagcataatatgtgactagtatatgaaatacaacattaataatagttttaaatatacctgctttgtgtttgggaggaaagtattttagggccaactctaatagaaactagatatcctcttttagacaaaacaaatgmaaagttgaaggaggacaatatatagaattcattgattagtagaaaagggaagtggttgaaaaaattgagattgttgtacctgctaaacaaatttgtgatgagaagttaccaaagtcttcctgttttgaaagattatttgttttttttttkaaacataaccagcatagggaaagcagaagaaaccaaagaagaaaaagatctgaaaagagagcccttccctgctttcagtggaaagtttttgccatggcctccctatgccctcacacattatttacccttttcaattcacttcttactctgtctttgccacaagaagaaacctcgcaactctccaaaaataagtgatatttgccatccccttgcggaaaattcagttttgtacttaat

SEQ ID NO: 29017 - DNA, 600 bp, Chicken  19866894247552_1
taccaaggaacagaaaaaacagagcagaaggctgtacttctgcactgataagttcaaatgagctgaatttaacccatcatataattcaatgactagaacacaataattaacagcatacttcctttatcattcgtgttgacttccacagtgtttggtttgtatcgaatacctacaccaaaaattctataacattggccagaaagttgaaagatgagaaatgagactgttcctgataaatggcagcacagtcttctggtatgttagccactcctcccagctttgtatcgtcaggaaacttaytgagggcacattatgtccccttatccaggtgaagacattaaacaagaccagacccagcctgtgccactgcctcaccactctctgagtaaagaatttattcttaacatagaacataaacttccccctcttttagtttaaagccatttccccttgtcctatcactattagatagtgaagagttagttcctctcctgcttataagattgcttcaagctctggaaggttgtaaagaggcctccctggagaccttctccagactaaacaagcccagctccctcaacttttcttcaaaggagacat

SEQ ID NO: 29018 - DNA, 600 bp, Chicken  19866894247558_1
gtatcaaatgtgctttgggctccggtagtgtctctggaaggaaagtaccacgtgtgaaggagaggtgctgaccccaagccatgccaccagctctgcacggctcagccagaactgcatgcaaagccatctgggttaggcacccaatgcaaagttattttgaagcagggcagtgcattgtaaaactgttgcacgctctctgtttaattcttcacattttagaacacccgattcattttggaaggcgttctccatgttatggctggggctcgatgcggagtggtgcccctcagccgtttaggrataaagcagtggggaccacagagtgcggctggctctgcagccttaactggcctttattaccatagccataaatagcaaaccgccccaaatattacaggagttttgttggctttaaccaatgaagtagaacaagacctctgaataccccattagttccagtgctgtgctttgacgactttgcattggcagctctttttctatacaagtcactagcctcacccgtgtctcttaacaaataccgttgacaggcaccattgcaatttttctgcatgttctgacagtttaattcagtacctcctg

SEQ ID NO: 29019 - DNA, 600 bp, Chicken  19866894247569_1
tctgcaggaggatatagttcttcccagatcaacaggcaattttagtgagggccaatgcttttgttccgacattaactgctggcaagcacaattgttctgcactctctttggtaatacgaacccttgaaactgagcagcttgttttgcacaggttccaggagctctgaaagcaatgctttttccttgggtgagaccgttcagaggctgcagtgcgtatccagggtatcagggtacccagccctgaaacccgtcaggatttaggcttggtcaggaggggattgctgtcgtggtctgggcccragcttcaaacaaagcacagactcacaaacagctaaacattccagtctgctccccttctcccttgcagggagaaagaaaatctagctgaccaaaagaatagccctttagggaacacaaagcacttctcttgtgaataaaagaaatcctaatccaggaggtaaggaaatggagaactgctccctcttaaacagcaagcaccaagcagctgcaccaaaccaaagaacaaactgcagtcagctccacrtctgagaacyccaacactcagtgtgtttctcgaacccyrgggtggaaatctttccc

SEQ ID NO: 29020 - DNA, 536 bp, Chicken  19866894247569_2
aacccgtcaggatttaggcttggtcaggaggggattgctgtcgtggtctgggcccragcttcaaacaaagcacagactcacaaacagctaaacattccagtctgctccccttctcccttgcagggagaaagaaaatctagctgaccaaaagaatagccctttagggaacacaaagcacttctcttgtgaataaaagaaatcctaatccaggaggtaaggaaatggagaactgctccctcttaaacagcaagcaccaagcagctgcaccaaaccaaagaacaaactgcagtcagctccacrtctgagaacyccaacactcagtgtgtttctcgaacccyrgggtggaaatctttcccataagacccccagaggctctcacactgctttacgatcttgccttaatcacttgcttgctgtctccataactataaaggaaaaacggtggcatgcaaaacttatccaaacgacattcaaatcccagatcatgcagctgaattttaactggatcacattgaagaagccaatctgtcaaacag

SEQ ID NO: 29021 - DNA, 526 bp, Chicken  19866894247569_3
gatttaggcttggtcaggaggggattgctgtcgtggtctgggcccragcttcaaacaaagcacagactcacaaacagctaaacattccagtctgctccccttctcccttgcagggagaaagaaaatctagctgaccaaaagaatagccctttagggaacacaaagcacttctcttgtgaataaaagaaatcctaatccaggaggtaaggaaatggagaactgctccctcttaaacagcaagcaccaagcagctgcaccaaaccaaagaacaaactgcagtcagctccacrtctgagaacyccaacactcagtgtgtttctcgaacccyrgggtggaaatctttcccataagacccccagaggctctcacactgctttacgatcttgccttaatcacttgcttgctgtctccataactataaaggaaaaacggtggcatgcaaaacttatccaaacgacattcaaatcccagatcatgcagctgaattttaactggatcacattgaagaagccaatctgtcaaacag

SEQ ID NO: 29022 - DNA, 498 bp, Chicken  19866894247569_4
tgtcgtggtctgggcccragcttcaaacaaagcacagactcacaaacagctaaacattccagtctgctccccttctcccttgcagggagaaagaaaatctagctgaccaaaagaatagccctttagggaacacaaagcacttctcttgtgaataaaagaaatcctaatccaggaggtaaggaaatggagaactgctccctcttaaacagcaagcaccaagcagctgcaccaaaccaaagaacaaactgcagtcagctccacrtctgagaacyccaacactcagtgtgtttctcgaacccyrgggtggaaatctttcccataagacccccagaggctctcacactgctttacgatcttgccttaatcacttgcttgctgtctccataactataaaggaaaaacggtggcatgcaaaacttatccaaacgacattcaaatcccagatcatgcagctgaattttaactggatcacattgaagaagccaatctgtcaaacag

SEQ ID NO: 29023 - DNA, 497 bp, Chicken  19866894247569_5
gtcgtggtctgggcccragcttcaaacaaagcacagactcacaaacagctaaacattccagtctgctccccttctcccttgcagggagaaagaaaatctagctgaccaaaagaatagccctttagggaacacaaagcacttctcttgtgaataaaagaaatcctaatccaggaggtaaggaaatggagaactgctccctcttaaacagcaagcaccaagcagctgcaccaaaccaaagaacaaactgcagtcagctccacrtctgagaacyccaacactcagtgtgtttctcgaacccyrgggtggaaatctttcccataagacccccagaggctctcacactgctttacgatcttgccttaatcacttgcttgctgtctccataactataaaggaaaaacggtggcatgcaaaacttatccaaacgacattcaaatcccagatcatgcagctgaattttaactggatcacattgaagaagccaatctgtcaaacag

SEQ ID NO: 29024 - DNA, 600 bp, Chicken  19866894247571_1
cagaaagaacaggggtgcgatctcaagcattaggatagccctactgacttcagtcacgcagatagcaggaaagaaaacacatttgaccttcaaccccttaaatgctttttttctttttgtgggtagaccttggtaggatcagaggcataaacagtaggaaagaagaaacttctgataatatgatggttggccaccagagccagggcagtgctgaaagcttagacctcagagcctccagcttactgcagcagaagcctgccttctctctacccctttcatctcctggcctcagccccactkctttcaacctccagtacaatggttacccagtcaccagacccagtraactgtgcttgctttttaagttgtttggctttttattttttcttacaaaggggaagaaaaaccaacacagagaagcgtgatagccccgaggggaattttctgttaaagccgctgccaaaagaatggccaacttgtgagatgttgacacttttacaacacggcaaatatcttcctttagagtaaaaggcttcaagtttttctactttaaagaaataggttttgtcaggatattaaatactaggaggaagtgttgca

SEQ ID NO: 29025 - DNA, 600 bp, Chicken  19866894247571_2
gacttcagtcacgcagatagcaggaaagaaaacacatttgaccttcaaccccttaaatgctttttttctttttgtgggtagaccttggtaggatcagaggcataaacagtaggaaagaagaaacttctgataatatgatggttggccaccagagccagggcagtgctgaaagcttagacctcagagcctccagcttactgcagcagaagcctgccttctctctacccctttcatctcctggcctcagccccactkctttcaacctccagtacaatggttacccagtcaccagacccagtraactgtgcttgctttttaagttgtttggctttttattttttcttacaaaggggaagaaaaaccaacacagagaagcgtgatagccccgaggggaattttctgttaaagccgctgccaaaagaatggccaacttgtgagatgttgacacttttacaacacggcaaatatcttcctttagagtaaaaggcttcaagtttttctactttaaagaaataggttttgtcaggatattaaatactaggaggaagtgttgcaatactcaacacattctctcttcttgccatttccccatttcatgca

SEQ ID NO: 29026 - DNA, 487 bp, Chicken  19866894247577_1
gcggcaatagttaagacttgcttgtctttctcaactcaggacaataaaaaagcactgatgggtttgatctaattacagtgtagtgctgctgggagacctcggtttaattccagtgtgaactgctggacccgtgccttactgctgctgggccatcccagtagctcttcagagatcagcacataccaactacctggtagtaattacaaattgtctgtcattattagaacttcaagtattcatggtgaggagagggaaggacaactgaggaatggcttttgccacgtttcctctttttttttwaaaaaaaaaaaagataagttcaattctcagaaatgtctttgatgaatgtaacagagcctgtgaagtgctgacctctgacataacctacaaaaatgacatcagcatggatcaccaggcagatattttacactttgttgtaacatcgctttgtttctttgaaacccagcaatgatccatcagttcggtt

SEQ ID NO: 29027 - DNA, 600 bp, Chicken  19866894247581_1
aacagaagagctcagttgccatccttataaatgtaaacaaacaaatatattgctgtgttccttcctcagtgcctgtagagttctatcaaaataaattgcactgaatatggttgctagtgagaaccgagcactggaattaaatgtcgtcttacaaagtgccaagattttattctaaagagcaaaataaagccatttaaacatcaagtgaggtcattcttctaaattataattttataccataatgttgtaaaccattgtgatgatgatgtgaaatatcatataaattggattttaagttayagagtttggagataacttttaatagacctaccatgaattctgaagtagggctcaagtgagacttcagtggtatacactttctcctgccagacagcattgaaataatttttctttagttattctaatgtcattaagaactgaaggggacagacaacactttcttgataaaatttatgagaaaaatccctgacttggaatttatgtagttaggaatatgaaggatatcagctttctttccaggcatataatgaaatagagcagcactgacagttacatgaaaaccataaagtttaaaatatg

SEQ ID NO: 29028 - DNA, 600 bp, Chicken  19866894247585_1
taaagaagcttgacgcatttgaactctgaacgttcaatgcgaatgcgcttaacccttggtaacatggtgagtttcttgtgcacgctatccttatgtgaagtacatttaactctctctacgctatggaaacagatatgtccttatcatacatttggtgttcaatcctgacaacatcccccttgggtctatttggttatatatgtatttgcttcattgagaaagaggagtcattttaatgagaaaagaaagaacagtcaatgggagaaaagaaattcttcagtcaagcagcggatggttgakagggcagcacagtggtccagtttcatgggggaagacatttgggattcatcccaagcagcagaagcattcacagaggccatgcaggtgtcaggaaaaacagaaaaggtggctgggagcagcctccaactaacagccactggaaattgttccaggtgactgctgaccaccagagggagccgatatggtgccttgagcagacagattcagagctgaaaactaaatataaatggtaatgtactcacaaagtagaaggaagatgcttaaggagaagttttttcaaataccatatggaagttaacc

SEQ ID NO: 29029 - DNA, 599 bp, Chicken  19866894247586_1
  misc_feature (1)..(247): n is any nucleotide
nnnnnnnnnnnnnnnnnnnnnnnnnnnnnnnnnnnnnnnnnnnnnnnnnnnnnnnnnnnnnnnnnnnnnnnnnnnnnnnnnnnnnnnnnnnnnnnnnnnnnnnnnnnnnnnnnnnnnnnnnnnnnnnnnnnnnnnnnnnnnnnnnnnnnnnnnnnnnnnnnnnnnnnnnnnnnnnnnnnnnnnnnnnnnnnnnnnnnnnnnnnnnnnnnnnnnnnnnnnnnnnnnnnnnnnnnnnnnnnnnnnnnnngcccagcagagctggaatcattattaagaagtttgacttgtttcttgcacacratttgggagttagatctgacattcattacactaacattgtgaattgtatgtccccatcaaggagccaaaacaaacaaactagagttaccctgatgagtcggttcattttacagtgagggtggtgaggcactgcacaaggttgcccagagccaagccatgatggatcccccacccctgcagacacccaaggtcaggatggagaggagcactgatggagctgtgggtgtccctgctcagtgygtggggattggaccagaaggcctgtaatggtcccatycaactcaaaagattctacgatt

SEQ ID NO: 29030 - DNA, 599 bp, Chicken  19866894247586_2
  misc_feature (1)..(7): n is any nucleotide
nnnnnnngcccagcagagctggaatcattattaagaagtttgacttgtttcttgcacacratttgggagttagatctgacattcattacactaacattgtgaattgtatgtccccatcaaggagccaaaacaaacaaactagagttaccctgatgagtcggttcattttacagtgagggtggtgaggcactgcacaaggttgcccagagccaagccatgatggatcccccacccctgcagacacccaaggtcaggatggagaggagcactgatggagctgtgggtgtccctgctcagtgygtggggattggaccagaaggcctgtaatggtcccatycaactcaaaagattctacgattctataaggaaagagctttgtgaaccaattaataggaaaatcactttccatgaaattatttattgcacatctcttgtcattcttctgttaactgtttgtttcaggtcagcccctttaccagaacatctttcttgtaaaagtgaaaccaaggaagtcatctttggcatattcagacaatattaccctgagctttacccatgaaaaataaatcacttatgagaagtaccaatctctgccccag

SEQ ID NO: 29031 - DNA, 600 bp, Chicken  19866894247586_3
gtttgacttgtttcttgcacacratttgggagttagatctgacattcattacactaacattgtgaattgtatgtccccatcaaggagccaaaacaaacaaactagagttaccctgatgagtcggttcattttacagtgagggtggtgaggcactgcacaaggttgcccagagccaagccatgatggatcccccacccctgcagacacccaaggtcaggatggagaggagcactgatggagctgtgggtgtccctgctcagtgygtggggattggaccagaaggcctgtaatggtcccatycaactcaaaagattctacgattctataaggaaagagctttgtgaaccaattaataggaaaatcactttccatgaaattatttattgcacatctcttgtcattcttctgttaactgtttgtttcaggtcagcccctttaccagaacatctttcttgtaaaagtgaaaccaaggaagtcatctttggcatattcagacaatattaccctgagctttacccatgaaaaataaatcacttatgagaagtaccaatctctgccccagtcatgtagagacctcagcttcayactgtgccgtgaaaa

SEQ ID NO: 29032 - DNA, 600 bp, Chicken  19866894247586_4
tgtaatggtcccatycaactcaaaagattctacgattctataaggaaagagctttgtgaaccaattaataggaaaatcactttccatgaaattatttattgcacatctcttgtcattcttctgttaactgtttgtttcaggtcagcccctttaccagaacatctttcttgtaaaagtgaaaccaaggaagtcatctttggcatattcagacaatattaccctgagctttacccatgaaaaataaatcacttatgagaagtaccaatctctgccccagtcatgtagagacctcagcttcayactgtgccgtgaaaaggtcagcagtgtggtttgactgttcattggtctctccattcacagaaagaagtggtgtttcagtgagcactaattttgattactagtttgcaaactaccaaaggctgaagtccagtgctagaaaaatctctgtacctcagcaatcctccattgtgttccccatgagaccagagcttccttcaccccccatccttgctttcttcggtgcttctcagggggaatggatgtgttaggcagcttcaggctgtacatacacatgttgaattattcatgaggtaccttaca

SEQ ID NO: 29033 - DNA, 600 bp, Chicken  19866894247588_1
ggcaaaaaacttaggcatacaaaaactgaaaccatgcagacctttctgtggaataaaatataattcagccagacaatacaacatttcagtacaatcaaggtgtatcagaaatttagtgcctacatggggaagattttattcaaatgacttacacactcagatacacctacgttaacaatgtactggcctgacaccacaattattagaaacgtataagcaaaacagtcatcaggtatggatgggggagtgaagaggtgaaggtgtttttgcctatacacatacatatgtgtcttcagggarcatttgtaatgttttatgtggatatagaactgttgatccagtagagaaacagytctggagtttgaggaagtttcaraacttcctgcttagctgaagaatttgttactcttgtgttggtaggcactaaaaactgagatgacagaacrtttactttgttttcaggcattgtacatgttagatttactttaggtaatctaattttgaaacagtaatacaagaagtgtcaaatggagaaaaggaatttactgaaactgaacactttgtagttaatcagtcacacatgacagaaagaaccagaag

SEQ ID NO: 29034 - DNA, 600 bp, Chicken  19866894247588_10
aaaaagaaaaagaaaatgaaagaaaaaatattaaggaattgcattttaactgtctgcctggcattgcaaaggaagtctggaaacaaaggaaatcaaagattttcaaacccagatgacagcaggacaaccttcattaactctgtcctactctaaccaatgccaatggagtcctatgagaggacttacatgctaagattggtaagaaaactaccctttctggttgagcagccagttctcaaaggatctggaattcataaaaaataattttatcatagcatgcagtggtaaagagaaagattraaaaaaaaaaaaaaaaaaaaagacagcatttctgaagatagttcatttccatcagaaggaagagcaagaaatctgaactcgtagctggtactgatctataacaccatacagggagaaaaaggaattatacaaagcaacagttgctttagcagtccccctatttcttctgctggttagcatttggacgctctgcgcaaagccagtgcactgaatggttcagttaccttttatatcctaacagaagaagtgagtttccacatggagaaaaccctaccaaggggctcttgggagcccaacatt

SEQ ID NO: 29035 - DNA, 600 bp, Chicken  19866894247588_11
aaaagaaaaagaaaatgaaagaaaaaatattaaggaattgcattttaactgtctgcctggcattgcaaaggaagtctggaaacaaaggaaatcaaagattttcaaacccagatgacagcaggacaaccttcattaactctgtcctactctaaccaatgccaatggagtcctatgagaggacttacatgctaagattggtaagaaaactaccctttctggttgagcagccagttctcaaaggatctggaattcataaaaaataattttatcatagcatgcagtggtaaagagaaagattaraaaaaaaaaaaaaaaaaaaagacagcatttctgaagatagttcatttccatcagaaggaagagcaagaaatctgaactcgtagctggtactgatctataacaccatacagggagaaaaaggaattatacaaagcaacagttgctttagcagtccccctatttcttctgctggttagcatttggacgctctgcgcaaagccagtgcactgaatggttcagttaccttttatatcctaacagaagaagtgagtttccacatggagaaaaccctaccaaggggctcttgggagcccaacattg

SEQ ID NO: 29036 - DNA, 600 bp, Chicken  19866894247588_2
taaaatataattcagccagacaatacaacatttcagtacaatcaaggtgtatcagaaatttagtgcctacatggggaagattttattcaaatgacttacacactcagatacacctacgttaacaatgtactggcctgacaccacaattattagaaacgtataagcaaaacagtcatcaggtatggatgggggagtgaagaggtgaaggtgtttttgcctatacacatacatatgtgtcttcagggarcatttgtaatgttttatgtggatatagaactgttgatccagtagagaaacagytctggagtttgaggaagtttcaraacttcctgcttagctgaagaatttgttactcttgtgttggtaggcactaaaaactgagatgacagaacrtttactttgttttcaggcattgtacatgttagatttactttaggtaatctaattttgaaacagtaatacaagaagtgtcaaatggagaaaaggaatttactgaaactgaacactttgtagttaatcagtcacacatgacagaaagaaccagaagatcctcttttaattgcatatcaaatgcttaccatgcccagcagtttctacgtc

SEQ ID NO: 29037 - DNA, 600 bp, Chicken  19866894247588_3
tacaacatttcagtacaatcaaggtgtatcagaaatttagtgcctacatggggaagattttattcaaatgacttacacactcagatacacctacgttaacaatgtactggcctgacaccacaattattagaaacgtataagcaaaacagtcatcaggtatggatgggggagtgaagaggtgaaggtgtttttgcctatacacatacatatgtgtcttcagggarcatttgtaatgttttatgtggatatagaactgttgatccagtagagaaacagytctggagtttgaggaagtttcaraacttcctgcttagctgaagaatttgttactcttgtgttggtaggcactaaaaactgagatgacagaacrtttactttgttttcaggcattgtacatgttagatttactttaggtaatctaattttgaaacagtaatacaagaagtgtcaaatggagaaaaggaatttactgaaactgaacactttgtagttaatcagtcacacatgacagaaagaaccagaagatcctcttttaattgcatatcaaatgcttaccatgcccagcagtttctacgtcgaaacatggtaatgccatgttac

SEQ ID NO: 29038 - DNA, 600 bp, Chicken  19866894247588_4
acttacacactcagatacacctacgttaacaatgtactggcctgacaccacaattattagaaacgtataagcaaaacagtcatcaggtatggatgggggagtgaagaggtgaaggtgtttttgcctatacacatacatatgtgtcttcagggarcatttgtaatgttttatgtggatatagaactgttgatccagtagagaaacagytctggagtttgaggaagtttcaraacttcctgcttagctgaagaatttgttactcttgtgttggtaggcactaaaaactgagatgacagaacrtttactttgttttcaggcattgtacatgttagatttactttaggtaatctaattttgaaacagtaatacaagaagtgtcaaatggagaaaaggaatttactgaaactgaacactttgtagttaatcagtcacacatgacagaaagaaccagaagatcctcttttaattgcatatcaaatgcttaccatgcccagcagtttctacgtcgaaacatggtaatgccatgttactgatcaaaatgtacttgtttgctatcctgtaaacaaagagcttagcacagtgtatagawtttgtttcaaa

SEQ ID NO: 29039 - DNA, 600 bp, Chicken  19866894247588_5
atgacagaacrtttactttgttttcaggcattgtacatgttagatttactttaggtaatctaattttgaaacagtaatacaagaagtgtcaaatggagaaaaggaatttactgaaactgaacactttgtagttaatcagtcacacatgacagaaagaaccagaagatcctcttttaattgcatatcaaatgcttaccatgcccagcagtttctacgtcgaaacatggtaatgccatgttactgatcaaaatgtacttgtttgctatcctgtaaacaaagagcttagcacagtgtatagawtttgtttcaaaaagaaacgcataacagattgtaatatgtaatcattaccagtagctgaaaaaggtgtcaactctatcatctccactgctcacctgagacgatctggcacactgcttaccatgatcaagcaactgctatgtatgctgggacaagcgtgcaggacgatgaagtccactcccagtatgagtctcttcccacactyctttgctcttctcagctgatgtcatccaggtgtatccaatttcctgtgcacatttttttacctgtttgtagcatgtaaggttggtttcatacctaccc

SEQ ID NO: 29040 - DNA, 600 bp, Chicken  19866894247588_6
cagcagtttctacgtcgaaacatggtaatgccatgttactgatcaaaatgtacttgtttgctatcctgtaaacaaagagcttagcacagtgtatagawtttgtttcaaaaagaaacgcataacagattgtaatatgtaatcattaccagtagctgaaaaaggtgtcaactctatcatctccactgctcacctgagacgatctggcacactgcttaccatgatcaagcaactgctatgtatgctgggacaagcgtgcaggacgatgaagtccactcccagtatgagtctcttcccacactyctttgctcttctcagctgatgtcatccaggtgtatccaatttcctgtgcacatttttttacctgtttgtagcatgtaaggttggtttcatacctaccctagttgttttcactttattcccggaggaacagctccatcccttacgatctggaagaaccttacattcctccccttcaagacatggttgcatgtggcaccaccatttctgctccactattgaagctagaagagaagaaaacaactacatttgcatgttcttgaaatggacattttaatatgtcattatattgcatcacctctt

SEQ ID NO: 29041 - DNA, 600 bp, Chicken  19866894247588_7
attcccggaggaacagctccatcccttacgatctggaagaaccttacattcctccccttcaagacatggttgcatgtggcaccaccatttctgctccactattgaagctagaagagaagaaaacaactacatttgcatgttcttgaaatggacattttaatatgtcattatattgcatcacctcttttattttccatgaaaatgttggaaatatattaaccgacatttactctatgatttgcagcagctcgtaatcttcacaaaaaatggagcctcaatttgcacaaggtactacatatwtcaaagacaatctctttaccactttttttttctaatttactgcagttcagaaagtaatagcattcctttccaactctcattttctcttgctcagccagatttcaaagttttaagcaggctctcttcttttgagttagtatattttgcctgatctactctacagtatagcacaggctgattaaatatattccccaaagatgacatatttacagtttctctgacagccaacaacatatcaacagtatcatggaaagggtaagcctattctgctcctctttcagagaaatagaaatgaaaaag

SEQ ID NO: 29042 - DNA, 600 bp, Chicken  19866894247588_8
ttcttaattagaaatgcatcaaacttggatctgtaaggcaatctgccatgcatgaaactagaattacaatggtactaacagtagattgtaaagttgatttcttttccaaatgtagtgtaactatctcaggcagaaaatgctggctaaagaaaagcaattggagaaggctgcatacagaactgatccagtgaagtggaaagcagagacattataaaactaatgtacaaaatgcattaatttctggactcccataagcagctgtatatttctaccaagtgttgtattcttttccctcagggkaagaccttggaagggaagtgtatcaactttaaaattcatacatatgcatgttttcagattctatgtgtccagagtttacgtccactgcaaacgcagtttttcatawgttctcccaaaaccttcgtgcagatggtcagagaagagctggcaggatacaaggaatgccttgaaagaggaaatgaaaaggaaaaagataaagataaaaagaaaaaagaagagaaagacaaagaaaatgggaaagaaaaaagaaaatgaaagaaaaaaaaagaaaaagaaaatgaaagaaaaaatattaaggaa

SEQ ID NO: 29043 - DNA, 600 bp, Chicken  19866894247588_9
caaatgtagtgtaactatctcaggcagaaaatgctggctaaagaaaagcaattggagaaggctgcatacagaactgatccagtgaagtggaaagcagagacattataaaactaatgtacaaaatgcattaatttctggactcccataagcagctgtatatttctaccaagtgttgtattcttttccctcagggkaagaccttggaagggaagtgtatcaactttaaaattcatacatatgcatgttttcagattctatgtgtccagagtttacgtccactgcaaacgcagtttttcatawgttctcccaaaaccttcgtgcagatggtcagagaagagctggcaggatacaaggaatgccttgaaagaggaaatgaaaaggaaaaagataaagataaaaagaaaaaagaagagaaagacaaagaaaatgggaaagaaaaaagaaaatgaaagaaaaaaaaagaaaaagaaaatgaaagaaaaaatattaaggaattgcattttaactgtctgcctggcattgcaaaggaagtctggaaacaaaggaaatcaaagattttcaaacccagatgacagcaggacaaccttcattaactctgtc

SEQ ID NO: 29044 - DNA, 599 bp, Chicken  19866894247589_1
  misc_feature (1)..(168): n is any nucleotide
nnnnnnnnnnnnnnnnnnnnnnnnnnnnnnnnnnnnnnnnnnnnnnnnnnnnnnnnnnnnnnnnnnnnnnnnnnnnnnnnnnnnnnnnnnnnnnnnnnnnnnnnnnnnnnnnnnnnnnnnnnnnnnnnnnnnnnnnnnnnnnnnnnnnnnnnnnnnnnnnnnnnnnnntgtagcagctttagaagtgtattttccttgtttcactccatcatgcatgctagcaatgtgataagtgcattatttaatgaaataacctagcctgtcctctttttgcttgcaggattgcaaaggtgagacatraggaaggcattctggaaaacaaagatcatcatttcagtagtgctttggaaaggaaactgggggtgttgggacttccaaggttgacccgaaccacaaatctatgttttgcatttgattattgtaggcttttttttttctgaggatgggttataatagccaaaggagctggctgcccacactggcctctcctggcactctgtgttggctacagatcctatgaarcctccaaaaacgagcaagttaatgtcatgccctgtgtttctgttgtctcattgcagtggacaaagtaatttcccttc

SEQ ID NO: 29045 - DNA, 600 bp, Chicken  19866894247589_2
aatgtgataagtgcattatttaatgaaataacctagcctgtcctctttttgcttgcaggattgcaaaggtgagacatraggaaggcattctggaaaacaaagatcatcatttcagtagtgctttggaaaggaaactgggggtgttgggacttccaaggttgacccgaaccacaaatctatgttttgcatttgattattgtaggcttttttttttctgaggatgggttataatagccaaaggagctggctgcccacactggcctctcctggcactctgtgttggctacagatcctatgaarcctccaaaaacgagcaagttaatgtcatgccctgtgtttctgttgtctcattgcagtggacaaagtaatttcccttcaggaaggttctgcttttgttctgtctctggcttggagcagtaactgctcccaagsagggggcagaaatagggacatctgagggtccccccaccacagtgctgtcccaggatacactgtcayaacacaaaccaacagttttctccggaatctcgagcaaagcaacttgcctttgtgatattgtcccctctcttgacttgaactcaggcctcccagctgtaaatt

SEQ ID NO: 29046 - DNA, 600 bp, Chicken  19866894247589_3
aactgggggtgttgggacttccaaggttgacccgaaccacaaatctatgttttgcatttgattattgtaggcttttttttttctgaggatgggttataatagccaaaggagctggctgcccacactggcctctcctggcactctgtgttggctacagatcctatgaarcctccaaaaacgagcaagttaatgtcatgccctgtgtttctgttgtctcattgcagtggacaaagtaatttcccttcaggaaggttctgcttttgttctgtctctggcttggagcagtaactgctcccaagsagggggcagaaatagggacatctgagggtccccccaccacagtgctgtcccaggatacactgtcayaacacaaaccaacagttttctccggaatctcgagcaaagcaacttgcctttgtgatattgtcccctctcttgacttgaactcaggcctcccagctgtaaattcaataccaagtgcctgctttctattgaaagctgcttaattggctgctattcttgctcctccagctgaatttgcattaaagaaagacctgcgaactttggcattccctatatgaagctccatatttagtgtat

SEQ ID NO: 29047 - DNA, 600 bp, Chicken  19866894247589_4
gtaggcttttttttttctgaggatgggttataatagccaaaggagctggctgcccacactggcctctcctggcactctgtgttggctacagatcctatgaarcctccaaaaacgagcaagttaatgtcatgccctgtgtttctgttgtctcattgcagtggacaaagtaatttcccttcaggaaggttctgcttttgttctgtctctggcttggagcagtaactgctcccaagsagggggcagaaatagggacatctgagggtccccccaccacagtgctgtcccaggatacactgtcayaacacaaaccaacagttttctccggaatctcgagcaaagcaacttgcctttgtgatattgtcccctctcttgacttgaactcaggcctcccagctgtaaattcaataccaagtgcctgctttctattgaaagctgcttaattggctgctattcttgctcctccagctgaatttgcattaaagaaagacctgcgaactttggcattccctatatgaagctccatatttagtgtatggagctggcagttctcttaacgcccacatctgtctctgcttgccacagctgatttatgtttaatat

SEQ ID NO: 29048 - DNA, 600 bp, Chicken  19866894247591_1
atccagcctggccttgaatgcctccagggatgggcatccacaacctccttgggcaacctgttccagtgtgacatgaccctctgtgtgaaaaagttcctcctactatctaacctaaacctcccctgtctcagtttaaaaccattcccccttaatacataacttgaaatgagattaaaagggagaaatcaaggtggctgaaagaggaacaggatactgaggtcagtagtatgtgacagagagactcgagcatgctggatctgatgcgtcaccatttttcaaaccacgtgattagaaatctgyctcctctgagagtatcagagctcctgtccccattaaacctgatgggagcagggaatgctcatctcatctgaaaataaggcattgtgatctttaatttcagaacattacctagtgttctctaatgtccaggaatatcactgtgttattcctgctattgtgtctcatgccatcactctaagccctkctttaatggtagaactactttgctgcactgattttttttttaatctgtctttcccactacttaagaaaggcaattagtgtgtgggatatactcctctataatagtatggtaaattt

SEQ ID NO: 29049 - DNA, 600 bp, Chicken  19866894247591_2
atcaaggtggctgaaagaggaacaggatactgaggtcagtagtatgtgacagagagactcgagcatgctggatctgatgcgtcaccatttttcaaaccacgtgattagaaatctgyctcctctgagagtatcagagctcctgtccccattaaacctgatgggagcagggaatgctcatctcatctgaaaataaggcattgtgatctttaatttcagaacattacctagtgttctctaatgtccaggaatatcactgtgttattcctgctattgtgtctcatgccatcactctaagccctkctttaatggtagaactactttgctgcactgattttttttttaatctgtctttcccactacttaagaaaggcaattagtgtgtgggatatactcctctataatagtatggtaaatttgtaaatgacagaatagcgaatctaatgagctagcagcttgaatgaggataaatgataattactgagaaaaagaaagcttgtratgtgatattattcagtgaaaattatagcattcattactgttgcaggaaagagacacaaaatgtgtccatgtatgtatttgttctcaattgtaagataaatc

SEQ ID NO: 29050 - DNA, 600 bp, Chicken  19866894247591_3
tgtgatctttaatttcagaacattacctagtgttctctaatgtccaggaatatcactgtgttattcctgctattgtgtctcatgccatcactctaagccctkctttaatggtagaactactttgctgcactgattttttttttaatctgtctttcccactacttaagaaaggcaattagtgtgtgggatatactcctctataatagtatggtaaatttgtaaatgacagaatagcgaatctaatgagctagcagcttgaatgaggataaatgataattactgagaaaaagaaagcttgtratgtgatattattcagtgaaaattatagcattcattactgttgcaggaaagagacacaaaatgtgtccatgtatgtatttgttctcaattgtaagataaatccagtgcttcaaatagcatagacactgtgctgttttgtccgctcatatttgttcatacaaactattggaataaatatcaaatacattttctacattttcacttagtgatttttatgctttttttttttctttttttctttttttttcttcaggctaaaggaggaggctatgagagtgaggatgcctatcaaaatggcag

SEQ ID NO: 29051 - DNA, 599 bp, Chicken  19866894247595_1
  misc_feature (1)..(44): n is any nucleotide
nnnnnnnnnnnnnnnnnnnnnnnnnnnnnnnnnnnnnnnnnnnncccttaccgtacccagcaaggtgagggagtcacccacccccctgaggtgttcaagcactgtggagatgtggcactgagggacatggttggtgggcatgggctgggtttggaccaggtgatcatagttgtcttttccaatcaaaatgattcaatgatagccaagtatttttctggtgtggtcccttcctacgggaggtaaattgcctgactgccatgactcagcccctggaacccatcggtctgggcagagttcacmactcaactttggtcccttgggaatggagcctctgtccccaggctgagtcctgcctacagctgctgcgagttgctaagagacagctcgtcaccgtgcagggcagcaatcagctgcatgcaggtaattaaagccacaactgcttyattattaaccctttgttgatttaaaaagtatatattaaatttaataccttcctctctatagcccaagccaacagcacaatgctccacatgcatccacatccatcaggtgctgtctgtgcgactgttcttcctttggagatggtttccaaaggcttt

SEQ ID NO: 29052 - DNA, 600 bp, Chicken  19866894247595_2
gctgggtttggaccaggtgatcatagttgtcttttccaatcaaaatgattcaatgatagccaagtatttttctggtgtggtcccttcctacgggaggtaaattgcctgactgccatgactcagcccctggaacccatcggtctgggcagagttcacmactcaactttggtcccttgggaatggagcctctgtccccaggctgagtcctgcctacagctgctgcgagttgctaagagacagctcgtcaccgtgcagggcagcaatcagctgcatgcaggtaattaaagccacaactgcttyattattaaccctttgttgatttaaaaagtatatattaaatttaataccttcctctctatagcccaagccaacagcacaatgctccacatgcatccacatccatcaggtgctgtctgtgcgactgttcttcctttggagatggtttccaaaggctttgtctcatgctctsaccatgacctcaccctcctcagctgagtaattcataccaagacaaggctctttcccttctgtgtttgccactgtcctgtgtttcagcaaggcaaataactcagtctgtctcccatcaccagtcagccttgt

SEQ ID NO: 29053 - DNA, 554 bp, Chicken  19866894247595_3
tcccttgggaatggagcctctgtccccaggctgagtcctgcctacagctgctgcgagttgctaagagacagctcgtcaccgtgcagggcagcaatcagctgcatgcaggtaattaaagccacaactgcttyattattaaccctttgttgatttaaaaagtatatattaaatttaataccttcctctctatagcccaagccaacagcacaatgctccacatgcatccacatccatcaggtgctgtctgtgcgactgttcttcctttggagatggtttccaaaggctttgtctcatgctctsaccatgacctcaccctcctcagctgagtaattcataccaagacaaggctctttcccttctgtgtttgccactgtcctgtgtttcagcaaggcaaataactcagtctgtctcccatcaccagtcagccttgtttgctcaattttgctgttctatttcttgctttattcaatcagcatgtatttacgtaccttgtgtcctttttctgcctgcccatttttattggactccctcattgttgggccttcctggcaggg

SEQ ID NO: 29054 - DNA, 599 bp, Chicken  19866894247600_1
  misc_feature (1)..(116): n is any nucleotide
nnnnnnnnnnnnnnnnnnnnnnnnnnnnnnnnnnnnnnnnnnnnnnnnnnnnnnnnnnnnnnnnnnnnnnnnnnnnnnnnnnnnnnnnnnnnnnnnnnnnnnnnnnnnnnnnnnnncatgagctcaactactctgaactgtggaaggggtgtgaagctcacagaagagcaaagagttccagtttgccattactgaccgtactcttaagtcgagatgcacagtttttcaggtttattccacataatggaaatagatgcccattccccattcctcaggtttggaatacagcctcactcacaygcacactgggaaaattaatgacagttgatattagtctagtaacaaacttcttaaagttcctgggcagaatgaatgcatatgtttatacaatgcaaggaaaccgtggcaagaactcccttgccagaacaatcttcaaaaacaaagctatagaagtctgggctagatccacaaaacctttttatgtgagcaatgggcaaaagttccygtaggtgctcaaggtgttactcctccatctaaacacttctcgtgctctgcctcccacmgaaggacactgttcccaactcagaggtcaccaaaaa

SEQ ID NO: 29055 - DNA, 600 bp, Chicken  19866894247600_2
aagtcgagatgcacagtttttcaggtttattccacataatggaaatagatgcccattccccattcctcaggtttggaatacagcctcactcacaygcacactgggaaaattaatgacagttgatattagtctagtaacaaacttcttaaagttcctgggcagaatgaatgcatatgtttatacaatgcaaggaaaccgtggcaagaactcccttgccagaacaatcttcaaaaacaaagctatagaagtctgggctagatccacaaaacctttttatgtgagcaatgggcaaaagttccygtaggtgctcaaggtgttactcctccatctaaacacttctcgtgctctgcctcccacmgaaggacactgttcccaactcagaggtcaccaaaaagaacatgcaaagtcacttaatcctgtgtggagctaatttagttaaagggctaacaaaggtgggtttgaactggaacagcagagtgagagctggagcaaaaatacttttgcttctgctaattctcagagggtaattacsggtactgcagacaaacaaatgcatgcactaacatattactacaggaagattcaccagagctctgtctg

SEQ ID NO: 29056 - DNA, 600 bp, Chicken  19866894247600_3
cccattcctcaggtttggaatacagcctcactcacaygcacactgggaaaattaatgacagttgatattagtctagtaacaaacttcttaaagttcctgggcagaatgaatgcatatgtttatacaatgcaaggaaaccgtggcaagaactcccttgccagaacaatcttcaaaaacaaagctatagaagtctgggctagatccacaaaacctttttatgtgagcaatgggcaaaagttccygtaggtgctcaaggtgttactcctccatctaaacacttctcgtgctctgcctcccacmgaaggacactgttcccaactcagaggtcaccaaaaagaacatgcaaagtcacttaatcctgtgtggagctaatttagttaaagggctaacaaaggtgggtttgaactggaacagcagagtgagagctggagcaaaaatacttttgcttctgctaattctcagagggtaattacsggtactgcagacaaacaaatgcatgcactaacatattactacaggaagattcaccagagctctgtctgtcaaaaccctacgttatggtccagatccaacattaagaaccactgaaatctcatgcaa

SEQ ID NO: 29057 - DNA, 600 bp, Chicken  19866894247600_4
aacaaagctatagaagtctgggctagatccacaaaacctttttatgtgagcaatgggcaaaagttccygtaggtgctcaaggtgttactcctccatctaaacacttctcgtgctctgcctcccacmgaaggacactgttcccaactcagaggtcaccaaaaagaacatgcaaagtcacttaatcctgtgtggagctaatttagttaaagggctaacaaaggtgggtttgaactggaacagcagagtgagagctggagcaaaaatacttttgcttctgctaattctcagagggtaattacsggtactgcagacaaacaaatgcatgcactaacatattactacaggaagattcaccagagctctgtctgtcaaaaccctacgttatggtccagatccaacattaagaaccactgaaatctcatgcaactgttattaagaagaacacagagaatgcagattcccatttaggtacctaaagctgccccaaatcctcccaactctgctcagcctcagcaggctttgtaaccctttattttatttttattattattattaattttgtttggctagcgtataggccagtgcccggctaacatacac

SEQ ID NO: 29058 - DNA, 600 bp, Chicken  19866894247602_1
gaaatggtagaatggacttatattttcagttggtgaacagagttgctcagggtcaagaacatacttctttttataaccttggatgggttttcatccacatcatatgagtctagcagctcacatattcttaatttatttcagaggctggacagactctctgtatctacgtttacgcaggagaaatcgctgcaatcacagagacttacagaacatttcccaaaatggtacgttaagttttttcacctttaaaaagaaatcctattactctgatacttgatgtgactttaataagcatctttyggaaactaagagaaaccccatcctaatcgcctacatgtcttgtggaaaaatagggaccagcacttatttaactcagcatctgtccttgatcacttctatatgcactttaatgaaggacttctgctgacactttttctttgtgtgtccagctgagttacactcatttggcagttttgttgttgttttttttaactcgtagggctgttagtaaagctcaaaaacaatgttttgagtaaatcatcattctgtaagcattgttacatggcataatttgttgttattatgcttctaaggacctaa

SEQ ID NO: 29059 - DNA, 600 bp, Chicken  19866894247604_1
taattgccagctttgcctatttttcttctatctggtgtacaggggaaaaaaaaaaataagcccaacccatcatcctagcgctgttgatattaattctgcacattattgggtacatattattaataataaatacagaataatgtataaatgagaaattcctaagccatttactttagtccaactttccgtgcgtggcgttattagtttatcacgtgccaccattgttaacctatttatgtagcctgccacgaggcctgcctctgccaaagcagcgatgcgtcacttggatgccaaaaagcmctgaaacaggaagagttgctgttgggtcccagcatggtgacttcatcacaggcctcagcttcaaactgtggagtaataaaactgaatagcacaatataaaactccatgtttcataagacaaatattgctttacgcattcatgtcccttgtactatgttaactgtaggaagaaatggaatacagttttagtgaccccctgggacctataaaggctatttctgagtctgaatcttgctgtttaatttaatcatttattatattaatattcaaatgggctgcatcttattagctactgcaaag

SEQ ID NO: 29060 - DNA, 600 bp, Chicken  19866894247605_1
aggagtcctgtgcatgtcattttttgtctttacttttacattaatggcatagcacaagaaaaattttaagtgttctgtttctctttgatgcatggtactacaaccatattcaggaggcacgtgggcctccaaaaacagagcagtgctaaagaaatcaaacaccagatatttgtgtaaataccaacaggcttaagagttttgccataacagcagcatgtgcttgcttgggggacactacaaagagcataactgcactcagatccagatcataacatttttagtgtgatcagtgtatctttktaaatcatgttagtccttttccttcaaacagcagctggacaagaggaaagacagttctcctcaattctgtcatctctacagctccaaagctcatccatacatgcttcctattgaaggataacttgcctgcatcattacagacagctggccaactgtgatgaacaggcactaagactcacatctatgtttgtatatattattaggtccccgtaatttgtatatattatatagtaggtctccgttaagttttggttcatgtatatcaggatatttttccaaacagtagggccaggggccact

SEQ ID NO: 29061 - DNA, 478 bp, Chicken  19866894247605_2
agctccaaagctcatccatacatgcttcctattgaaggataacttgcctgcatcattacagacagctggccaactgtgatgaacaggcactaagactcacatctatgtttgtatatattattaggtccccgtaatttgtatatattatatagtaggtctccgttaagttttggttcatgtatatcaggatatttttccaaacagtagggccaggggccactccacatagatgtaatgtagccacactagttgagggctaagggaaatcagctcggtgggtgcaggccattccatgctagsaaatatttacagtcacttttaatttatgtgcctaaattaaccaaaccaaagctcccacttcctaactatttcatgaaaaccatgctctgcctctggccatgtaatgaactgaactccatgttgcccatgtgctttgtggagctatcaactccagctgcgattctctttacactgggga

SEQ ID NO: 29062 - DNA, 600 bp, Chicken  19866894247608_1
agcgactgcagcgcttcgacgccctgctcctgctgtgcgaccactttgctctcagccagatccagggccgccagtgctaggagaaggcagggaagggacagaggaaattgcaagcactgtgtgtactggtacgggagaggatctggtagccctgtggtcacatcatctccctaacgtgcatgtgggaagtatatggagatggtctttgtattgtggaatagaagcatgcaggcatccttccttggtgaagagcagaggagctggggaggtgacagctccatgcattctcacagctctcamtcctgcgggaggctgtgctcagctcctgcagttcttttttcttcagctgtacttacacccatgtccagcagcatagcaatgtcacagttgctgtgccggtcggtgtgtagtaagcctcgtcctttgcgagttgttggtgctgggatcagttctgtgtggaccttggtcatgccagatctctttcccagctccttcctcttccttccttgcgtgcaacaagccatgagggtctctggaggcctcagggtgtcttccacaccaacagctgatatttgctgacttctcctcagttgtgtactg

SEQ ID NO: 29063 - DNA, 409 bp, Chicken  19866894247615_1
cagagacagagagcagacagagagcgtgcccaagggtgatccccatagagatgcatggttgggaagcaccgagcagcccctacctcaaaggtgaaggggtaggcgttctcgccgagcttcttcagcagcttctcctgcagagaggtgagggttttgggcacctgctcaggcaccggtgggaagatctgcgtggtcaggacgtagaggtccttcctgaaggtcagtccaatgacatccaggtcgtctcggccgtagcggaaggcgcacgtgagcgtcacatacactgggagcagtgagaaygggggggtgccgggagggcaaggcacaggggaagggttgggaaaggaggaaagaaagacaagctgtgtttgtcactcgtggcattaaaagcagatctcagacgccaaga

SEQ ID NO: 29064 - DNA, 600 bp, Chicken  19866894247616_1
tttgtatttattacctttaacaaagctacatgcagtatctgatgaagagcagccaatggtatatatttcaggtatgaccttataatagctgtaaacaaagtttttattttcccatgaatggtaaacttcacagtgtttttccaggtatgtggtttgtgtacataagtgtgtaaggcacagagtcatcacaaataatttaacttgtaatgagacatacaggattatagcagaggatttatgctcttctgcttagataagcacgtggtataagataaacagcttcaggggagttttttataytgcaagtacatgatagtgttttcaatgtataaggtaagctgaatttttaatatggtcttcaaggggtgttgaagcattagagattctcagatcttttttaaattttgaagagaacagttaaaatgaatcatagaatcatggaatgatttgcattgaaagggacctttaagatcacctagttccaacatcctgctgtaggcagggacacctcccgctagaccaggttgctcaaagccccatccagcctggccttgaacgccatcaggaagggggcatccacagccttgctgggccacctgt

SEQ ID NO: 29065 - DNA, 599 bp, Chicken  19866894247617_1
  misc_feature (1)..(61): n is any nucleotide
nnnnnnnnnnnnnnnnnnnnnnnnnnnnnnnnnnnnnnnnnnnnnnnnnnnnnnnnnnnnntggtcccttctgcttttgctgctttttcctgctgattttcctgtgcatttttatatttcatcctttgctggttagactgaatcaagttccctgatgtcagaagatggactgtgctgagtgtgaacaaaacttccttgatgcacttttaaactcagcaaggggccaagttttctcaggcagataatgggacacctggattttgagtccggacattggcattttatatggctcatgatggstttttgagcaagccttagtttttctcttttaaatattttataaccttctttcacctttataatattcaaaaccagcatggtgtaattacctggttggtaatggtattgatacagtactgacagactgataatgactatcttcagcaacccgtgggactgctgtatttattcaggcctcctcacaaggcagctcttggtcccctgctattatctcatagagcaatattgtactgctaccacaagttattgcgtaatagcaatcatggcttccagtatatctcccatgtagttaccacaca

SEQ ID NO: 29066 - DNA, 600 bp, Chicken  19866894247618_1
cagtacctcatctgttgtttatgacagcagcatcagaaacagagtaattccttaaacacatgaagctatttttaatgttttgttaatattcaccaattctagctgataagtattattaaaaagataataaaaagtaatttcagccatcagatttgtcaggattgctccatatatctcaaatggcagacatgcatttctccagagcgctgttgggttggttaccaaaagggaaaagcctttatgatgcccatgaaagattcagaatagtaaactttatcagtctttgaaaccaaatacacrcaaaatgccacaataagcaggagaacaaaggctcatttttgtttagataagggatttcaatttttgctttcagacaacattgcgtgaagtaactaggtcagagctatgctaaaaccgcgcttcgtgtatctggtatgtgcgctacataacagctctgtttwgtagatcagattygacctgaattaaacatgaagctcaaaaaatacagtaaaacaatattaagagatctgacttaccataaagtcaaagcttccatgctatgtgtgcagccatctcctcctcatcgctcagttcagcacc

SEQ ID NO: 29067 - DNA, 585 bp, Chicken  19866894247618_2
ttgctccatatatctcaaatggcagacatgcatttctccagagcgctgttgggttggttaccaaaagggaaaagcctttatgatgcccatgaaagattcagaatagtaaactttatcagtctttgaaaccaaatacacrcaaaatgccacaataagcaggagaacaaaggctcatttttgtttagataagggatttcaatttttgctttcagacaacattgcgtgaagtaactaggtcagagctatgctaaaaccgcgcttcgtgtatctggtatgtgcgctacataacagctctgtttwgtagatcagattygacctgaattaaacatgaagctcaaaaaatacagtaaaacaatattaagagatctgacttaccataaagtcaaagcttccatgctatgtgtgcagccatctcctcctcatcgctcagttcagcaccgctcacggcactcggtgtcccgcggtggtggcaaagccttgctatcggaggtgggtccttcgttgtgaacaggagtggtgttttggcctctctgaagtcacagagtcaaataatcataaagggtggaaaagaccactaagatcttc

SEQ ID NO: 29068 - DNA, 572 bp, Chicken  19866894247618_3
ctcaaatggcagacatgcatttctccagagcgctgttgggttggttaccaaaagggaaaagcctttatgatgcccatgaaagattcagaatagtaaactttatcagtctttgaaaccaaatacacrcaaaatgccacaataagcaggagaacaaaggctcatttttgtttagataagggatttcaatttttgctttcagacaacattgcgtgaagtaactaggtcagagctatgctaaaaccgcgcttcgtgtatctggtatgtgcgctacataacagctctgtttwgtagatcagattygacctgaattaaacatgaagctcaaaaaatacagtaaaacaatattaagagatctgacttaccataaagtcaaagcttccatgctatgtgtgcagccatctcctcctcatcgctcagttcagcaccgctcacggcactcggtgtcccgcggtggtggcaaagccttgctatcggaggtgggtccttcgttgtgaacaggagtggtgttttggcctctctgaagtcacagagtcaaataatcataaagggtggaaaagaccactaagatcttc

SEQ ID NO: 29069 - DNA, 600 bp, Chicken  19866894247620_1
accaagaagttaaataaagcagttttaagcatatgtactatcactgagaaaataaaacaaaagatgcagagaatatgtacttaatactcacaaggcagaacatctttgtatcgattcttgtccatattctgaggtacttttgcacatgtaacagccaatcccggtttctttctatagagttgctggaaaacagaattttacaaaagagtaagatatgattatgctaaatagatccacatgaagacaaagagaaaaaaaatcggaagctacttcagtttttcctagccaactgaaaattcycctgagagtattacttatatttttacatgaaaataacttccattattgctggttcatcatcatccctaggagaatttctagaaggaaatagaaaatgtgagagtcactgatctaaactggttgtttccttgcgtagtcttttattatagcacataccacacaattgcggaaggaagtaggaaaaccaagaaactagaagaactgagcaataaaagacaacaacaaaagaagttacagactgatatcagttattacttggaatcaactgtaatacaaaaattaaaatattctctggactaa

SEQ ID NO: 29070 - DNA, 600 bp, Chicken  19866894247622_1
atatgatccagaaaaaggagagaagaatgtaatcataatccattccaatgaaaatgttttgtgaaatttctcaaattagctgacaattttttataagctgtcttctcagacccataaataagatgaaaatattttttgctaattttattaaattgaagggaaaatatttaagtttattctgaccagttttagaacatgcagaaaatgtgtggtaaatgaatgtgaaagacttatctgcagacaaattctgtgcacaattgactgcatgtttctttgtacctgctgacattaaaacccagstgacaacacatttctgctttacgtgctggttaaaatcaaattaaaaaaaaaaaaaagtagttttacaaatgtttggaagaatgagcattctctggaagcatttcaaatgttaatagtagggctgtaggagagcagaaagagaaattgaacaaaagcattgctcagatttacataacaaaatgtwacagtggctgtgtatcgctttcctttccagtctgtgataaaccacttgtgcaatatctgcatttgttggcagatgaaagatgggagcacagggaggtgtttctcattaaatggagc

SEQ ID NO: 29071 - DNA, 600 bp, Chicken  19866894247622_2
agttttagaacatgcagaaaatgtgtggtaaatgaatgtgaaagacttatctgcagacaaattctgtgcacaattgactgcatgtttctttgtacctgctgacattaaaacccagstgacaacacatttctgctttacgtgctggttaaaatcaaattaaaaaaaaaaaaaagtagttttacaaatgtttggaagaatgagcattctctggaagcatttcaaatgttaatagtagggctgtaggagagcagaaagagaaattgaacaaaagcattgctcagatttacataacaaaatgtwacagtggctgtgtatcgctttcctttccagtctgtgataaaccacttgtgcaatatctgcatttgttggcagatgaaagatgggagcacagggaggtgtttctcattaaatggagctgcccttaatttttttttctaataaccaagaaagaaggtatcattttactgtacttggctgtawgtactttgttatttaacatttccctgagtgtattaatagtatagcacagcatataactgatatcatttgtggtgggcgtgggagggagtgaagacctcatacttgggtttgggaatatct

SEQ ID NO: 29072 - DNA, 600 bp, Chicken  19866894247622_3
acaaatgtttggaagaatgagcattctctggaagcatttcaaatgttaatagtagggctgtaggagagcagaaagagaaattgaacaaaagcattgctcagatttacataacaaaatgtwacagtggctgtgtatcgctttcctttccagtctgtgataaaccacttgtgcaatatctgcatttgttggcagatgaaagatgggagcacagggaggtgtttctcattaaatggagctgcccttaatttttttttctaataaccaagaaagaaggtatcattttactgtacttggctgtawgtactttgttatttaacatttccctgagtgtattaatagtatagcacagcatataactgatatcatttgtggtgggcgtgggagggagtgaagacctcatacttgggtttgggaatatctcccatgggaaatctcctgtgaaataactgttacttcatgcagtgtggtccattccagatgctaaccatttactcttcagatatttttcatgagccttgcagataagatagctcattgggaattgatttagctgtgttcagaaaactaagctctcaccagagatggggaaatcaccccacc

SEQ ID NO: 29073 - DNA, 600 bp, Chicken  19866894247626_1
atcaccctgggaggaaaagggcagtgagggcagcccggggggggggctcagggtgggagtcccacagcccagacccacactcacagcgtgggggggagcccgctccacagggacctgatgccctcgtggcgtgtgatcttcacaaaggcatcctgtggggagaacgcagcacacaggagggtcagacggggtgaagggcacccctcgacccccaccccgggacaggcggtccctgcagcccttaccaatgtgccgttgaagcaggtgggggtcttgtaccaggccgtgcagctgttgccrttctgacagacgtacagatgatccatgagcccgttgcagtagaggaaacacttccctgagagtggaagaagagacrgcatcactgtcagaccgaccccagcccggacacatccctctgcacacccccagaccgtcacatcccccaggacggcactgaagcctcgtgcccgagcgtcacagcagggctgggggaggcagcaaggcgatgtcccattgcctgcaagcatcctgccccaccagcagcacccaggcaccgtcatcacactcagtgggaccaagcagggggaaaggcttgggtcc

SEQ ID NO: 29074 - DNA, 600 bp, Chicken  19866894247626_2
acactcacagcgtgggggggagcccgctccacagggacctgatgccctcgtggcgtgtgatcttcacaaaggcatcctgtggggagaacgcagcacacaggagggtcagacggggtgaagggcacccctcgacccccaccccgggacaggcggtccctgcagcccttaccaatgtgccgttgaagcaggtgggggtcttgtaccaggccgtgcagctgttgccrttctgacagacgtacagatgatccatgagcccgttgcagtagaggaaacacttccctgagagtggaagaagagacrgcatcactgtcagaccgaccccagcccggacacatccctctgcacacccccagaccgtcacatcccccaggacggcactgaagcctcgtgcccgagcgtcacagcagggctgggggaggcagcaaggcgatgtcccattgcctgcaagcatcctgccccaccagcagcacccaggcaccgtcatcacactcagtgggaccaagcagggggaaaggcttgggtccaggacgtccctgcagatgacaccagcggggaagcaagctggagccagggggatctttaacccccacgtactcacat

SEQ ID NO: 29075 - DNA, 528 bp, Chicken  19866894247626_3
aggcttgggtccaggacgtccctgcagatgacaccagcggggaagcaagctggagccagggggatctttaacccccacgtactcacatgtggcatgctgtgagccctggggcaccgaccgcaccaaccacgctgaaacacaacagggacaagctgagatatggcactggggatgtgccaccctcgtgggcccggtgtcctgcatccctgcacccagcacggggccacgcagagcccagggtgttggctgggaggtgtggggtggtcacacagcatagggaccggcacaaaggcggcagcrggaggaaggtggagcggtgccctggagcacaccgagcttccacccagccctaagctgggacaaggtgtgcacggcacccacctgcccccactgctgccacccccagcccagcactgcttggggatgcccgtccccatggaggtacctttggagaagggcgtcctctgggcctgcagtcggatcttcaccacatccaggggtgtcactgcaacagcatcaccctgttag

SEQ ID NO: 29076 - DNA, 600 bp, Chicken  19866894247633_1
gtgccaggcactcttttttgttttaatgttcgaaaaccacacaagatatcactcactgaaagcagcacagtggcagcatggcagcagaaacacagcatggaagtgaaaggaaataatggaggtacggtggatcaacacaggcggtatctgggcatgggtatatgatggtccctaccttgctccaggaccccaagaaccgtcacggcagccagcagatggatctgctccaacatagcgacactataaaacctgatttcccaagcaggagctcctctggccaggtccagtccttgctgacgygttggttggaagtggtgcgggcagcacgggcttgccctaagtgaacagcaaagttctgtacgcagcactacaaagtagggctgcagcttgcccactgcctcgcgcacagtggcaaataaaggtctgatggagaattccactcccacccttttccaggaaaacaatatgaggaagtgggaaagccagcagaaacctcacaggagagataagagaggagaatgaggggacgggtctcagcagcctagctagcttttccctggagtaatgggtctagcaaaggccaatgcacgtccctctttt

SEQ ID NO: 29077 - DNA, 600 bp, Chicken  19866894247642_1
gtcatgagacagtgaaaatcttatttagaaatgtttttacaacttcagaaaaaaataatttaattcacttgtccaaatagtgatctagagaggagctcttccattgtgcagcagtgctctgctgtcagtatcaacagggttccaggttgccagtacctaactaccctgcttctcactaagaataaaactagtattttagcatcagttgttaacacttgtgactcgagacagtcacaagtctcatcaccgctggaaccgattcctctcttacttgcattagaagcacttagttaaaatccycctcaagtgcaaaataaggctcaggtcaattacacacagcttgtattttaaaggacccatttagacmtcacctttacaagcccatatgtcaattcctattatcytcacaatatacaagaccagaatctggcaagcagacgtgcatgttcttatgaaatcattccccatttcaacttggtaagttacttccctgctaaagaatttctgaatgcatttatacacaggaaattcatctacccaggcctcttctgttctaccagcatgtaatcaactaatattttaccatttcctctcctattt

SEQ ID NO: 29078 - DNA, 600 bp, Chicken  19866894247642_2
cttgtccaaatagtgatctagagaggagctcttccattgtgcagcagtgctctgctgtcagtatcaacagggttccaggttgccagtacctaactaccctgcttctcactaagaataaaactagtattttagcatcagttgttaacacttgtgactcgagacagtcacaagtctcatcaccgctggaaccgattcctctcttacttgcattagaagcacttagttaaaatccycctcaagtgcaaaataaggctcaggtcaattacacacagcttgtattttaaaggacccatttagacmtcacctttacaagcccatatgtcaattcctattatcytcacaatatacaagaccagaatctggcaagcagacgtgcatgttcttatgaaatcattccccatttcaacttggtaagttacttccctgctaaagaatttctgaatgcatttatacacaggaaattcatctacccaggcctcttctgttctaccagcatgtaatcaactaatattttaccatttcctctcctatttaaactgttcaaactctgaagatttccttaacagctcactggtcacaaatcatcacagatctcttctt

SEQ ID NO: 29079 - DNA, 600 bp, Chicken  19866894247642_3
tgtgcagcagtgctctgctgtcagtatcaacagggttccaggttgccagtacctaactaccctgcttctcactaagaataaaactagtattttagcatcagttgttaacacttgtgactcgagacagtcacaagtctcatcaccgctggaaccgattcctctcttacttgcattagaagcacttagttaaaatccycctcaagtgcaaaataaggctcaggtcaattacacacagcttgtattttaaaggacccatttagacmtcacctttacaagcccatatgtcaattcctattatcytcacaatatacaagaccagaatctggcaagcagacgtgcatgttcttatgaaatcattccccatttcaacttggtaagttacttccctgctaaagaatttctgaatgcatttatacacaggaaattcatctacccaggcctcttctgttctaccagcatgtaatcaactaatattttaccatttcctctcctatttaaactgttcaaactctgaagatttccttaacagctcactggtcacaaatcatcacagatctcttcttaagaagaccatgaaacttttccattgctgtggattaa

SEQ ID NO: 29080 - DNA, 599 bp, Chicken  19866894247647_1
  misc_feature (1)..(65): n is any nucleotide
nnnnnnnnnnnnnnnnnnnnnnnnnnnnnnnnnnnnnnnnnnnnnnnnnnnnnnnnnnnnnnnnntgctgaacgattacccttctgttactttatattcgcttattaaaatgttattagcagaattgcaattgctgaaagaaaaggtaagtaactgatgatctgtttgatggacattagaaattgaatgaagcctttctcacagtaaaattagtcatcagataattgacaatatgattacagatctgagttcatcattaactgtacgcagaattcaaaaggatccaggaatgaccttttyctgtgtcaataagctatgtggtcatatgataacatcagttaatctaccaaaaaaaaaaaaaaaagacaaaaaaaaaaaagcctaattcttattatgtcacagtagaaaatgtaaattcttctgcttatttgtgcttagtataaagaagtttggttcacatttagaacatctttaagataagttctttattactgagttccaaacagtatctgatcatagaaaggtttgagttggaagggacccttaaaggtcatctggtccaactcccctgcaatgaatatggatacctacagctggat

SEQ ID NO: 29081 - DNA, 600 bp, Chicken  19866894247647_2
tcatatgataacatcagttaatctaccaaaaaaaaaaaaaaaagacaaaaaaaaaaaagcctaattcttattatgtcacagtagaaaatgtaaattcttctgcttatttgtgcttagtataaagaagtttggttcacatttagaacatctttaagataagttctttattactgagttccaaacagtatctgatcatagaaaggtttgagttggaagggacccttaaaggtcatctggtccaactcccctgcaatgaatatggatacctacagctggatcaggttgctaagagccccattragcctgaccttgaactctctatggatggggcatccactggctctaggggcaacctgttccagtgtctcatcactcttaagggggaaaaacaaacaaacaaacttatttcttatattcaatcaaacatattgtaaatatatataaaatacacaatatacggtttacaggactgtttctgcacctaactgaaacactgcttctggaaattcttattaaaatgctctaacaatgaggaatataccacacaatggctaactgcttctgataatgaagtaaaagtatgaacagaagtttgtgtca

SEQ ID NO: 29082 - DNA, 600 bp, Chicken  19866894247650_1
tgtacagccattttcagtacagaaatttgttctttaaagtaagggtaattgcaaaacagctcaccagaaaggtaaacacgttctaaaatttcacatctgattgatgcacttgacaagtggaaaataaaattaggatctactcagaacgatttggaataattgatttggtttatgactgaccaaaatatgcaaaaatggaacattctttcatagcgtcaccgtaactattcatactcctgagaaaacatgaaagggaaaaaacagctattagagttttgttatgaaaactgctaattatakattctgaataggatatttgaaatagcacaacgtccacaggctctgtgcagtgcatatcaaatacacacactgccactgactagtagacctaattgtgyacagagttttagccaagcctctgactttaaactcygcagccattgtggctacaaatgacacaacagaaatgctcaatttcctctcctacgcttctccaaggcagctgagaccaaatgatatgcttgatttgacaatttttaggctctgtgcctagaggaacatcgtaatcagcaaaaggtccttaactccatggttcacatc

SEQ ID NO: 29083 - DNA, 600 bp, Chicken  19866894247650_2
gattgatgcacttgacaagtggaaaataaaattaggatctactcagaacgatttggaataattgatttggtttatgactgaccaaaatatgcaaaaatggaacattctttcatagcgtcaccgtaactattcatactcctgagaaaacatgaaagggaaaaaacagctattagagttttgttatgaaaactgctaattatakattctgaataggatatttgaaatagcacaacgtccacaggctctgtgcagtgcatatcaaatacacacactgccactgactagtagacctaattgtgyacagagttttagccaagcctctgactttaaactcygcagccattgtggctacaaatgacacaacagaaatgctcaatttcctctcctacgcttctccaaggcagctgagaccaaatgatatgcttgatttgacaatttttaggctctgtgcctagaggaacatcgtaatcagcaaaaggtccttaactccatggttcacatcttgtaaactaaagagcaaaattagctgactggcaaaaccagacagggctgaccccaatgtgtgtatactcagctgaggctttcatgctctcaacaggg

SEQ ID NO: 29084 - DNA, 600 bp, Chicken  19866894247650_3
gatctactcagaacgatttggaataattgatttggtttatgactgaccaaaatatgcaaaaatggaacattctttcatagcgtcaccgtaactattcatactcctgagaaaacatgaaagggaaaaaacagctattagagttttgttatgaaaactgctaattatakattctgaataggatatttgaaatagcacaacgtccacaggctctgtgcagtgcatatcaaatacacacactgccactgactagtagacctaattgtgyacagagttttagccaagcctctgactttaaactcygcagccattgtggctacaaatgacacaacagaaatgctcaatttcctctcctacgcttctccaaggcagctgagaccaaatgatatgcttgatttgacaatttttaggctctgtgcctagaggaacatcgtaatcagcaaaaggtccttaactccatggttcacatcttgtaaactaaagagcaaaattagctgactggcaaaaccagacagggctgaccccaatgtgtgtatactcagctgaggctttcatgctctcaacagggcatgaacactgtctgcttccgcagcaaggcatata

SEQ ID NO: 29085 - DNA, 599 bp, Chicken  19866894247652_1
  misc_feature (1)..(48): n is any nucleotide
nnnnnnnnnnnnnnnnnnnnnnnnnnnnnnnnnnnnnnnnnnnnnnnnttcttaaatccctttagtaagctgtcattgctttgtaaatcatgcatttaggaaaaaaaaaaaaatgggggggggttgggggagagaaaaacatgtaatgatggtggttaatccatgaacttatgcaactccatgtgcagctgggacaatttgtgatcattgtttctggggccagaagaagccccctgaaacacccaccatgtagggcttagctagcttgttatgccctgaacattgcaggcattgactcakctgaggatgaacagttttgccccaaagctgcaataagtggcttgccacacagcaaagccttgcctttagggaccggctggagctgagaagattttgtatggcagctacagaaccttgagccttgcaaacagagacaacacccagtgcatctccaggaccatctggggacttttaggtggagaggactggtggtatcccagacctatgagctggactctggggtttatctgggttttgtttatgcattgtgtttgtgtgtaaagttttgccttgctgaatcagggaagaatttccgtcat

SEQ ID NO: 29086 - DNA, 368 bp, Chicken  19866894247652_2
cttgagccttgcaaacagagacaacacccagtgcatctccaggaccatctggggacttttaggtggagaggactggtggtatcccagacctatgagctggactctggggtttatctgggttttgtttatgcattgtgtttgtgtgtaaagttttgccttgctgaatcagggaagaatttccgtcatctctgcctacagtcagagccggcattattaggtgtgttaactactgaagctttgtgctgagtgtttgatctcacctgttttcttacttctcttgtttgtttatttggtttaccsattctctcatggcctgaatcaacacttcatttaagcaccagccctgcacgagttcagtgagattttgt

SEQ ID NO: 29087 - DNA, 568 bp, Chicken  19866894247655_1
aagcccaagaacttcttcttgtgcctggaacatctcatggaggtgtgcatgtgactcttaacatatacagaagaatataatctgatatgtccatgatggcgccagctctattttgtgctgtaatgatggttcactgggtacctatgaccttctcccgctcctcagttccagatggacaacaagatatcccaaacattcaaaatcttcaaactcttgctggatgagattctcagaaagaagaggaatgcccaagaaaaaaacacatttggcagcgggtagaataatgctgaaacgttaccraggctcagctccatttccctgccattagacacatccttattgcaaagtgggcaggtcagagcttagcttcaraggcagcctgggccctaatctgcctagccaggtggatgagagaacacacactacaagtgtgtgagcattggcataaaggttctttgtctcagcggtcaaaggatttagggacatttccaggataagcctacaacacagtaccaagcacaggggagtcacacacatgcaagaggcttttgttttttttgaccactgt

SEQ ID NO: 29088 - DNA, 496 bp, Chicken  19866894247655_2
gaatataatctgatatgtccatgatggcgccagctctattttgtgctgtaatgatggttcactgggtacctatgaccttctcccgctcctcagttccagatggacaacaagatatcccaaacattcaaaatcttcaaactcttgctggatgagattctcagaaagaagaggaatgcccaagaaaaaaacacatttggcagcgggtagaataatgctgaaacgttaccraggctcagctccatttccctgccattagacacatccttattgcaaagtgggcaggtcagagcttagcttcaraggcagcctgggccctaatctgcctagccaggtggatgagagaacacacactacaagtgtgtgagcattggcataaaggttctttgtctcagcggtcaaaggatttagggacatttccaggataagcctacaacacagtaccaagcacaggggagtcacacacatgcaagaggcttttgttttttttgaccactgt

SEQ ID NO: 29089 - DNA, 600 bp, Chicken  19866894247657_1
aggccaggcaaggccaggccaggccggacaaggctaggacaggcaagtcatgtccaggccagggaaggcaaggctcagcaaggcaatgccaggcaaggccaggccatgccaggcaaggccagggcaggcagggcaaggggagtcaaggcaaggtacagcaaggcaaggcacagcaaggcaaagcaatgcaaagcaaaggaaggcaaggcaaggcaaggcaagacaaggcaaggcatagcaaggccaggcaaggcaaggaaaggaaaggcaaagcaaggccaggcaaggcaaagcaaggcmaggmaaggcaaagcaagaaaagacaaggcaaggcaaggccattgaaggaaaggggaggcaaggagaggcctggaaatgccagggaaggcaaggcaaggccaagccaggcaaggcctggccaggctaggcaaggccatgcaatggaaggccaggccaggcaaggcaaggccaggccaggcaagacattccaggcaaggcaaggacaggcaagaccaggccaggccaagtcaggccaggccgaggaaggccaaaccaggcaaggcatgtccaggccaggcaatggtaggctaggccaggcaa

SEQ ID NO: 29090 - DNA, 600 bp, Chicken  19866894247657_2
caggcaaggccaggccaggccggacaaggctaggacaggcaagtcatgtccaggccagggaaggcaaggctcagcaaggcaatgccaggcaaggccaggccatgccaggcaaggccagggcaggcagggcaaggggagtcaaggcaaggtacagcaaggcaaggcacagcaaggcaaagcaatgcaaagcaaaggaaggcaaggcaaggcaaggcaagacaaggcaaggcatagcaaggccaggcaaggcaaggaaaggaaaggcaaagcaaggccaggcaaggcaaagcaaggcmaggmaaggcaaagcaagaaaagacaaggcaaggcaaggccattgaaggaaaggggaggcaaggagaggcctggaaatgccagggaaggcaaggcaaggccaagccaggcaaggcctggccaggctaggcaaggccatgcaatggaaggccaggccaggcaaggcaaggccaggccaggcaagacattccaggcaaggcaaggacaggcaagaccaggccaggccaagtcaggccaggccgaggaaggccaaaccaggcaaggcatgtccaggccaggcaatggtaggctaggccaggcaaggca

SEQ ID NO: 29091 - DNA, 600 bp, Chicken  19866894247661_1
ggtataaaacaaaatgtcaaaaaaaaaacaatcttccttctcactcttgtcgaaaaaacacaccctcctgccctgttcccccaccaccattctcaccttaaaaataaatgcaataaagaggaaaagaaaataaacccccttctgaccactttggagaatgaaagctttgaaagcaaaacaattccataaaatgatccaactgcaattcaaactgagctgatcacacagaataaattgggttacagtatttgcaaaaaccactgcatacattcctacccgaggtctggtaaagggcagccrcaaattgtctgatcacaaagaaggaatttcaccctcactggtttgtggcaagtgtacgtgagcctaagagtgacgctcaaatgagacaatctgagcacaagctcaaataaatgattctgttgcagtctccagattcactgacagtaaaaatggagtatggagggaggaggagacagcaccatacctcaactgagasrgaagccagcacagacagagatgatcagggacagcacttactagaggggaattctattctttcaagatttgactaatatcagataggaaytgggtgctgagagg

SEQ ID NO: 29092 - DNA, 600 bp, Chicken  19866894247661_2
caactgcaattcaaactgagctgatcacacagaataaattgggttacagtatttgcaaaaaccactgcatacattcctacccgaggtctggtaaagggcagccrcaaattgtctgatcacaaagaaggaatttcaccctcactggtttgtggcaagtgtacgtgagcctaagagtgacgctcaaatgagacaatctgagcacaagctcaaataaatgattctgttgcagtctccagattcactgacagtaaaaatggagtatggagggaggaggagacagcaccatacctcaactgagasrgaagccagcacagacagagatgatcagggacagcacttactagaggggaattctattctttcaagatttgactaatatcagataggaaytgggtgctgagaggttgatgtgaagaggtttcccatcccctacagctctgatgaaccaagtcaacagaagaattcacacagtgagatcccctttgtatagccatttgggttcacttatagaaggcactgagtatcttcaatccctgctaacaatgcatcacatcaagggttgctcagcagcaaatagtagactcatgttcttgctgaagt

SEQ ID NO: 29093 - DNA, 600 bp, Chicken  19866894247661_3
aactgcaattcaaactgagctgatcacacagaataaattgggttacagtatttgcaaaaaccactgcatacattcctacccgaggtctggtaaagggcagccrcaaattgtctgatcacaaagaaggaatttcaccctcactggtttgtggcaagtgtacgtgagcctaagagtgacgctcaaatgagacaatctgagcacaagctcaaataaatgattctgttgcagtctccagattcactgacagtaaaaatggagtatggagggaggaggagacagcaccatacctcaactgagasrgaagccagcacagacagagatgatcagggacagcacttactagaggggaattctattctttcaagatttgactaatatcagataggaaytgggtgctgagaggttgatgtgaagaggtttcccatcccctacagctctgatgaaccaagtcaacagaagaattcacacagtgagatcccctttgtatagccatttgggttcacttatagaaggcactgagtatcttcaatccctgctaacaatgcatcacatcaagggttgctcagcagcaaatagtagactcatgttcttgctgaagtc

SEQ ID NO: 29094 - DNA, 600 bp, Chicken  19866894247661_4
gtaaagggcagccrcaaattgtctgatcacaaagaaggaatttcaccctcactggtttgtggcaagtgtacgtgagcctaagagtgacgctcaaatgagacaatctgagcacaagctcaaataaatgattctgttgcagtctccagattcactgacagtaaaaatggagtatggagggaggaggagacagcaccatacctcaactgagasrgaagccagcacagacagagatgatcagggacagcacttactagaggggaattctattctttcaagatttgactaatatcagataggaaytgggtgctgagaggttgatgtgaagaggtttcccatcccctacagctctgatgaaccaagtcaacagaagaattcacacagtgagatcccctttgtatagccatttgggttcacttatagaaggcactgagtatcttcaatccctgctaacaatgcatcacatcaagggttgctcagcagcaaatagtagactcatgttcttgctgaagtcacaggtattggcaacattctttatctttcaggttcattcatcaagtggaaaacagtagctcactttccatgctatctgacacctatgct

SEQ ID NO: 29095 - DNA, 600 bp, Chicken  19866894247661_5
cagaagaattcacacagtgagatcccctttgtatagccatttgggttcacttatagaaggcactgagtatcttcaatccctgctaacaatgcatcacatcaagggttgctcagcagcaaatagtagactcatgttcttgctgaagtcacaggtattggcaacattctttatctttcaggttcattcatcaagtggaaaacagtagctcactttccatgctatctgacacctatgctatcaatccctagagccttcttgagcttgtgtaatatcaacctatatagcagaaatggaatcaaktgaagcaaaagcagcatcatatgcatcccatctggaatcctccactgttttgacggctaaatgggaggtactgtgattaatctgtgattatgtgactcaccataattatgtcttgttgaaattgaatttattgaagcatgaatcattctacccaaagtagaacctaattgctctagtgctgtggcagccatttaaagtttagaggagaggttgttgtgctgggtaaagatttcacctccattcaagcaatgagaaattctgtcttgggacttacaagatggtgaaatttgcctctgaaat

SEQ ID NO: 29096 - DNA, 600 bp, Chicken  19866894247662_1
ccaggctcagtcccagggccccagccaagatccacacgaggaggctgtcaggctccagctgatggagagacagaggtacaccgagtgacaaggggatcctgccagtgccagccccactgcactgcagccagcagccttaccttcaccaccatctggctgttggtcatctgcagcaggcagcccagccccacacccaccagaatatctgaggccagttcagggtgaagaaacagtgcagcatccctccccagccctgggggtggggacagcaccatccctctctcccagcctgggtaaagycatcgaagttcagagtgcttgagaacaggggactttggcacagtctggggccccctggggaggcacagcctcttcccttgccctgtgtcagattctaggatggatcctgtgcagctcaggtcccttagaagcaggcccaagtagcaccccaccctgccacccagcacccagctccctgaaggatactgaagatgatgcctccaaagcaggcggagaaggccatgcgggggtagccctgccgtgccatggtgaggtcagagaaggtgtctgcagggcaagaacagaagatgctgggggtgc

SEQ ID NO: 29097 - DNA, 565 bp, Chicken  19866894247669_1
tttctacttgtttaacacaaatcttttttattgtatcctacaaaagaaaaaaaaaatcttatattgcaccagttatgaaatattggcatgtaattcctgatacttctgtccagctggagctcccttcttttattctaaaatgggattacctggaaccttctttacatcattcattcatatagctttatcatctaagtatcactgcagctaaaattcagatgaatttacatatgcttgtctcccaaagacacaatgaacttcagaactcccaataatacagctctgaagcagaaagcatgrttgctgaatagtcagacatatgacacagctatatgatctcatgactaggaccacaaggaccacctctgtctccttgccagcatttaaacaggaatgacctcctctcccacctgtacaattaatgagccatcagggacatccaaagaaacagatgggaaatcttgtcagtgaaataagaaggataaaagagagtgttcagcagatgcttagctgctgtttaatgatggagattcacaatgcctaatttcctgtaagccctttaaag

SEQ ID NO: 29098 - DNA, 600 bp, Chicken  19866894247671_1
agttactttaatactgttaaacagcttgactgcaaagaatcatgtgaactttttctataggattgtataacttcaaaagcagatgtttctaaccacgtcatctatgctggagggaagaatcttgctgttaataagctaaggcactgtccggacgtgtttacaggacagatgcagtggtaaaagggatttatgcaggcagtgaaattatgcccagtaagctaaaagcttgaatatcatatacaaaagacttctctcatgactgtctccctcaaacatttcattgcaaatttttatattacracagcgtggtattgtatgattctggataaatgaatttctttcattttctttcatttctcttccctgtrtatctatttgatagtgcaattttgttgtacatggaaaayacacagcttgttctgtatagcagtcaggtaactcagcatggagtgctggaggggcagcactgatcttcagtaatggaactctgccatctttctgttgaatggcagtaaagtgcttgtattttgcacgaacaaatggttttcaccacattttagaaaatgaagctcatgggtgggtagcacataggcagacagt

SEQ ID NO: 29099 - DNA, 600 bp, Chicken  19866894247671_2
aacttcaaaagcagatgtttctaaccacgtcatctatgctggagggaagaatcttgctgttaataagctaaggcactgtccggacgtgtttacaggacagatgcagtggtaaaagggatttatgcaggcagtgaaattatgcccagtaagctaaaagcttgaatatcatatacaaaagacttctctcatgactgtctccctcaaacatttcattgcaaatttttatattacracagcgtggtattgtatgattctggataaatgaatttctttcattttctttcatttctcttccctgtrtatctatttgatagtgcaattttgttgtacatggaaaayacacagcttgttctgtatagcagtcaggtaactcagcatggagtgctggaggggcagcactgatcttcagtaatggaactctgccatctttctgttgaatggcagtaaagtgcttgtattttgcacgaacaaatggttttcaccacattttagaaaatgaagctcatgggtgggtagcacataggcagacagttcattggaagaatttctgcctttgtagctctaagtttagggcaccttagtgactctgggtcactgtat

SEQ ID NO: 29100 - DNA, 600 bp, Chicken  19866894247671_3
tggagggaagaatcttgctgttaataagctaaggcactgtccggacgtgtttacaggacagatgcagtggtaaaagggatttatgcaggcagtgaaattatgcccagtaagctaaaagcttgaatatcatatacaaaagacttctctcatgactgtctccctcaaacatttcattgcaaatttttatattacracagcgtggtattgtatgattctggataaatgaatttctttcattttctttcatttctcttccctgtrtatctatttgatagtgcaattttgttgtacatggaaaayacacagcttgttctgtatagcagtcaggtaactcagcatggagtgctggaggggcagcactgatcttcagtaatggaactctgccatctttctgttgaatggcagtaaagtgcttgtattttgcacgaacaaatggttttcaccacattttagaaaatgaagctcatgggtgggtagcacataggcagacagttcattggaagaatttctgcctttgtagctctaagtttagggcaccttagtgactctgggtcactgtatcttgacgtctgcctgaggttcctgggataactcagggag

SEQ ID NO: 29101 - DNA, 600 bp, Chicken  19866894247672_1
gataacttaactaaaatggacttgtgtaactaaatagaattcattttagatttatgttagatttacattagttttataacactaatgataattaacctcaatcaagcatgatgctgttaatctatgtaatagattaatattgcagttgctttagtaaaagacagaaaatatttacctcaatcaccagataacaaattttatattataaaaattccaccatccttttctctttgaatacaatcagtgttttttctacaatttattagtacccacgctgtccccttttgtattttttgtcamctcgcctgtgtgaggaagagaaaattgatacttaaaaacaagttccatattctgaagaaagtccactctcaataaagaatccatgtgtaaaaaagaatctacagaagtgctgttttcagattatttttaataaaaatagcagaatttaaatctggagatatctcagaagggaaggaatatgctcctgtgcattgctactgctactgcctagtagctactaaattcagaccatgtttacttcaatactccttcctcagccttgtttctgcacagatgtattcacaatcttaattgtacata

SEQ ID NO: 29102 - DNA, 599 bp, Chicken  19866894247677_1
  misc_feature (1)..(64): n is any nucleotide
nnnnnnnnnnnnnnnnnnnnnnnnnnnnnnnnnnnnnnnnnnnnnnnnnnnnnnnnnnnnnnnntcttgctgtctgtttctataggtgtgagcccacagcggctcagagttgggaggagtctttctgttctgttggcacagcacagcttggtgtgctgccgtgtttcttcaagtcagatgaagaactctgttgaatgccctctgataattttattaatactgtttagttctgtttcattttaaattccagacttcagtaattgcctgtgaaaattaaaaaaagctatcccatgttcccckttggctggataatgcttctgacccatcccaactcgttcctttgttctgttgcgcttatttattattrctgctgccacaatcaggttatctcttytcttctttttgatacctgatactgcagacttttgatctctggccctggggaacgtcatttgtaattcccaagtgcggagcctgctgtgatgagagctgctattgtttatatacygccactgcaattcccttaccagcagaaaatcctgtggtggggcaggaatagaaagaatataatttcttgcctcatcagccatggatcactg

SEQ ID NO: 29103 - DNA, 600 bp, Chicken  19866894247677_2
tgctgtctgtttctataggtgtgagcccacagcggctcagagttgggaggagtctttctgttctgttggcacagcacagcttggtgtgctgccgtgtttcttcaagtcagatgaagaactctgttgaatgccctctgataattttattaatactgtttagttctgtttcattttaaattccagacttcagtaattgcctgtgaaaattaaaaaaagctatcccatgttcccckttggctggataatgcttctgacccatcccaactcgttcctttgttctgttgcgcttatttattattrctgctgccacaatcaggttatctcttytcttctttttgatacctgatactgcagacttttgatctctggccctggggaacgtcatttgtaattcccaagtgcggagcctgctgtgatgagagctgctattgtttatatacygccactgcaattcccttaccagcagaaaatcctgtggtggggcaggaatagaaagaatataatttcttgcctcatcagccatggatcactgttactgcagtgaatccagtygcactgtcaaagcaaggagtgaaaggggagaaaaatgctgaagatttt

SEQ ID NO: 29104 - DNA, 600 bp, Chicken  19866894247677_3
cacagcggctcagagttgggaggagtctttctgttctgttggcacagcacagcttggtgtgctgccgtgtttcttcaagtcagatgaagaactctgttgaatgccctctgataattttattaatactgtttagttctgtttcattttaaattccagacttcagtaattgcctgtgaaaattaaaaaaagctatcccatgttcccckttggctggataatgcttctgacccatcccaactcgttcctttgttctgttgcgcttatttattattrctgctgccacaatcaggttatctcttytcttctttttgatacctgatactgcagacttttgatctctggccctggggaacgtcatttgtaattcccaagtgcggagcctgctgtgatgagagctgctattgtttatatacygccactgcaattcccttaccagcagaaaatcctgtggtggggcaggaatagaaagaatataatttcttgcctcatcagccatggatcactgttactgcagtgaatccagtygcactgtcaaagcaaggagtgaaaggggagaaaaatgctgaagattttagatcaatgacttccactgcacacaag

SEQ ID NO: 29105 - DNA, 600 bp, Chicken  19866894247677_4
ttttattaatactgtttagttctgtttcattttaaattccagacttcagtaattgcctgtgaaaattaaaaaaagctatcccatgttcccckttggctggataatgcttctgacccatcccaactcgttcctttgttctgttgcgcttatttattattrctgctgccacaatcaggttatctcttytcttctttttgatacctgatactgcagacttttgatctctggccctggggaacgtcatttgtaattcccaagtgcggagcctgctgtgatgagagctgctattgtttatatacygccactgcaattcccttaccagcagaaaatcctgtggtggggcaggaatagaaagaatataatttcttgcctcatcagccatggatcactgttactgcagtgaatccagtygcactgtcaaagcaaggagtgaaaggggagaaaaatgctgaagattttagatcaatgacttccactgcacacaagtgtgtgctgtgtaactttaggaatcccttggaaatgatgcagagagaagctgaaattgccgacacaaattctagaagctttaatttttttctcatgtacttggtggaacccagc

SEQ ID NO: 29106 - DNA, 600 bp, Chicken  19866894247677_5
gacccatcccaactcgttcctttgttctgttgcgcttatttattattrctgctgccacaatcaggttatctcttytcttctttttgatacctgatactgcagacttttgatctctggccctggggaacgtcatttgtaattcccaagtgcggagcctgctgtgatgagagctgctattgtttatatacygccactgcaattcccttaccagcagaaaatcctgtggtggggcaggaatagaaagaatataatttcttgcctcatcagccatggatcactgttactgcagtgaatccagtygcactgtcaaagcaaggagtgaaaggggagaaaaatgctgaagattttagatcaatgacttccactgcacacaagtgtgtgctgtgtaactttaggaatcccttggaaatgatgcagagagaagctgaaattgccgacacaaattctagaagctttaatttttttctcatgtacttggtggaacccagctgactttttcatctccttggttatccacctgacctgaacggctccagagcaagcacatgatgcttgctagagggagaatttctctgctgtgtgccattgatgttgctcggt

SEQ ID NO: 29107 - DNA, 600 bp, Chicken  19866894247678_1
ggacttccccacagcctgcagatcagtgggatttcctacataaaacatctaaaatttgagcagctgaaactgggaacaaacagggatctgaacgtggcaatttgaatgggctcagtccatgacctcactgctactaaaaactggcacgaggaggttactggatgagggagaataaaagctttaattgaggcatttggcactgtgacttccagtccaatggtattgtggtgtgtcacaccactactatggttcaagccctaaatctaccctcagttttgactcctaaaacacaggcagccrgaataaccggagatgacttttttaaacctatcagcttttcctggtcactttagttgggataaaagcatccctttgtgttcactgcatggtaactgttgagtcacggaggacccggtcarccctgggagcacaggtgaaggcaattcacgtgtgtgactggaaggggtggagtctgcctgcacttctcttagactccatttaagggctgactgccatgggaraaggcttctggagatccctccttggtgaagctttcctctgtgaacctggaatcttctgatatgggtgagcaatcttctt

SEQ ID NO: 29108 - DNA, 600 bp, Chicken  19866894247678_2
tgacctcactgctactaaaaactggcacgaggaggttactggatgagggagaataaaagctttaattgaggcatttggcactgtgacttccagtccaatggtattgtggtgtgtcacaccactactatggttcaagccctaaatctaccctcagttttgactcctaaaacacaggcagccrgaataaccggagatgacttttttaaacctatcagcttttcctggtcactttagttgggataaaagcatccctttgtgttcactgcatggtaactgttgagtcacggaggacccggtcarccctgggagcacaggtgaaggcaattcacgtgtgtgactggaaggggtggagtctgcctgcacttctcttagactccatttaagggctgactgccatgggaraaggcttctggagatccctccttggtgaagctttcctctgtgaacctggaatcttctgatatgggtgagcaatcttcttccctttctttatggcacctttctattgtgctggtccttctgtcatcacgcctttgttgttgcctttcttatcatattgctcttcttgtctctgaatattttgctaattaccacttttga

SEQ ID NO: 29109 - DNA, 600 bp, Chicken  19866894247678_3
attgtggtgtgtcacaccactactatggttcaagccctaaatctaccctcagttttgactcctaaaacacaggcagccrgaataaccggagatgacttttttaaacctatcagcttttcctggtcactttagttgggataaaagcatccctttgtgttcactgcatggtaactgttgagtcacggaggacccggtcarccctgggagcacaggtgaaggcaattcacgtgtgtgactggaaggggtggagtctgcctgcacttctcttagactccatttaagggctgactgccatgggaraaggcttctggagatccctccttggtgaagctttcctctgtgaacctggaatcttctgatatgggtgagcaatcttcttccctttctttatggcacctttctattgtgctggtccttctgtcatcacgcctttgttgttgcctttcttatcatattgctcttcttgtctctgaatattttgctaattaccacttttgatagaggtgaagcagtgactggaatagtagatgtgtaggaaagagaagaagtgtgctttgctgggtcctctgttgcttttattagtttagttaatggtggaga

SEQ ID NO: 29110 - DNA, 600 bp, Chicken  19866894247686_1
aaatgaaacagcagtatttttgttgttttagaacacttttagagatatgtacttgtcagacctgctacctctacctaaaaataattttggaatattcttgcttttattttgttaataggtagatcagaagataataagtttcttggtatcaaaatgtgtataacttaggatataaattttacttcccaaacagtgcaacttttatctggatatcagttataaatattttaacacttacagtctattcatatggttctgctgagtgactaccttttcctgtagaatttatatattcctcaygcactgtatcacacatcttctgttttttatatccattaaaacacctattctcctgtaactgagttgaactagcaagaaaatattttctcctgtccttaggcttttatttgaataattgtgttactctgtccatgttccagctcttcaaaatatttctcgagctaaatgagtattaagtaaagtcatcactttcagtgaagacactatcaattaagtgtccaattgatattcctgttagtcagaagtcccatatgatttcttaatctacctatattacctcataaaatatcatacactgtt

SEQ ID NO: 29111 - DNA, 600 bp, Chicken  19866894247688_1
gttggatcatgacatcagaggctgatgttggtggtatgacagtagagactgaaccttcccatcagtatcccgttactgtgcaggagatggcagcagaaaggcagtctgacatggaagcatgtatgaggcaaaggtgtgtcattgaattcctccatgtggaaaaaaattcacccgctgacatacatcagtgcatgctgagtgtttatggagaccaaacagtggatgtgagcacaatgaggcagtgggtggtgcgtttcagcaatagcaacagcgctgtgaaagacaagccacattctagamaagccatgaagatctttatgagtgcagaatgcaggctcttgttcattggtggcaaaaatgcagagctaatggtggtgactattgttgaaaaacagtgcttcgtagctgaggatttgctctatcaaacagtgttattgtgctctttgttgtagtttccatggaaataagtaggaagcattactttcagagtgaaatatatttgccaaaatatacttcctagtaatgatacaaccaattaaaggatttgatattaaactacatcaaaacaggcaagaacttagctaatgaaagcttccatgc

SEQ ID NO: 29112 - DNA, 498 bp, Chicken  19866894247688_2
tgggagtttccatgtaattttaagctacagggcaaacacgacctcaaatttgttcagtagaagaggtgtgagaagctggaacatacatttttttttcaaattccctcacacatgaatgacttgctttctcgctttcaacgtgttgcttaagtttcttgtacctgtgtcccattataaaacacagacaatgacagcttactttgagattgttgatcttcagtattttttttttttaggaattttaagtctatacatgaaaaaaaagctctgtacaacatcatatatcattgcaattagcasgaatctgataatagagggttttcaggagtctattttcatggtttagatcaggattagcagtgcttgttctggaacagagtatgcatactggatctcctaaactgtttttacagcatgtcgttgcattatcttcttcttctattaagaacacggaaggacagagataaaaacagagaagaagagggtaggatgcttcct

SEQ ID NO: 29113 - DNA, 599 bp, Chicken  19866894247692_1
  misc_feature (1)..(177): n is any nucleotide
nnnnnnnnnnnnnnnnnnnnnnnnnnnnnnnnnnnnnnnnnnnnnnnnnnnnnnnnnnnnnnnnnnnnnnnnnnnnnnnnnnnnnnnnnnnnnnnnnnnnnnnnnnnnnnnnnnnnnnnnnnnnnnnnnnnnnnnnnnnnnnnnnnnnnnnnnnnnnnnnnnnnnnnnnnnnnnnnntaagataaaatgtaagattctcataagtgtttaaggttactgccttcttaaaaaaaatctactgcacagtcaaaattcacagaattataatactgaagaacatggcactgaactttactgatscaatctgctctgcatggatagacatacgacattgatttaagtgagttcactaaagtattcttcaagcatgcaatttccaggttggttgtacaccaaagaattcatctgaacttgactttctgacgtttatcaaaaccagactctaaaactttaagaactttttttataagatactttaaatgcttaaatatatatagatgtatatattttcaaaactaggtttgttgtacagtttgataaagcctgtacttgccattcatttattgagagtgccaatgtcactaagcaatgtctatcag

SEQ ID NO: 29114 - DNA, 599 bp, Chicken  19866894247694_1
  misc_feature (1)..(94): n is any nucleotide
nnnnnnnnnnnnnnnnnnnnnnnnnnnnnnnnnnnnnnnnnnnnnnnnnnnnnnnnnnnnnnnnnnnnnnnnnnnnnnnnnnnnnnnnnnnnnnattaacagctacagtagctaaacaattgctgtgcagagcatataacatagttacttgctttattcttttgctagatgtcagtaatgattttcaaaagagcagtatatgaatccagaagaaagccaaaaagctattttcgacctaagttaagagttaacttgaaagaagcacaaaatgtaagtttaacattttatataacccttatmtttgcttattctttgcaggtgatgagtatgtaatatagttctgcttaatgcatatggtgctatttacaaagagaatgtattagtgtttcagttttataatyaatgcaatttatcattaaaatgcagaataaacttgaaaaagagagaaaatgtaacagttctatgagaaatgctgacttttgtacctttttttttccttagcaatgaaactaagaaaaatcttgctcaaattcataccaaatgcatggacttttgccctgctctgttcaattactctgatgatgaagggataccttgaa

SEQ ID NO: 29115 - DNA, 600 bp, Chicken  19866894247694_2
gctacagtagctaaacaattgctgtgcagagcatataacatagttacttgctttattcttttgctagatgtcagtaatgattttcaaaagagcagtatatgaatccagaagaaagccaaaaagctattttcgacctaagttaagagttaacttgaaagaagcacaaaatgtaagtttaacattttatataacccttatmtttgcttattctttgcaggtgatgagtatgtaatatagttctgcttaatgcatatggtgctatttacaaagagaatgtattagtgtttcagttttataatyaatgcaatttatcattaaaatgcagaataaacttgaaaaagagagaaaatgtaacagttctatgagaaatgctgacttttgtacctttttttttccttagcaatgaaactaagaaaaatcttgctcaaattcataccaaatgcatggacttttgccctgctctgttcaattactctgatgatgaagggataccttgaacaaaagttacaggggttttatttttatttatttatttttaatttgcttattaagaccacttttctgaaagatgccattagttagagaaagctaaagagaaag

SEQ ID NO: 29116 - DNA, 600 bp, Chicken  19866894247695_1
gtggctggaaagctacatggaggaaatggatctaggagtattagttggcagcaggctgaacaggagccagcagtgtgcccaggtggcaaagaaggccagtggcatcctggcttgtaccagaaatagtgttgccagcagaagcagggaggtgattgtcttcctgtactctagtgaagccataccttgagtaatgtgttcagttttgggcccctcacaacaagaaagacactgaggccctggagcatgtccaaagaagggcaacaaaggtggaaaagggtctagaacaccagtcttgtagcragaagctgagggttctgggattgtttagtctggagaagaggagactcaagggagacattattatctctacaacttcctgaaaggaggttgtggcgagttaagggtcagcctcttctcccaggtaacatcaataggatgagagccttaagttgtgccaggggaggttcaggttggatattaggaaaaaattmttctcagaaagagtggtcaagcattggaacaggctgctagggaggtggtctccatttctggagactttcaagtaaagagtacatgtggcatgtagggacatggtttagt

SEQ ID NO: 29117 - DNA, 584 bp, Chicken  19866894247695_2
tgtgttcagttttgggcccctcacaacaagaaagacactgaggccctggagcatgtccaaagaagggcaacaaaggtggaaaagggtctagaacaccagtcttgtagcragaagctgagggttctgggattgtttagtctggagaagaggagactcaagggagacattattatctctacaacttcctgaaaggaggttgtggcgagttaagggtcagcctcttctcccaggtaacatcaataggatgagagccttaagttgtgccaggggaggttcaggttggatattaggaaaaaattmttctcagaaagagtggtcaagcattggaacaggctgctagggaggtggtctccatttctggagactttcaagtaaagagtacatgtggcatgtagggacatggtttagtaagcatgatggtgatggtttgatggttcaactagatgatcttagtggtcttttccaaccttaatgattatattattccaaagaaagagaaaaagaggagaaaattcaaatactactctgtattttcccartctatatcatccttatctatccaagtgtaaaataacataagttat

SEQ ID NO: 29118 - DNA, 345 bp, Chicken  19866894247695_3
ataggatgagagccttaagttgtgccaggggaggttcaggttggatattaggaaaaaattmttctcagaaagagtggtcaagcattggaacaggctgctagggaggtggtctccatttctggagactttcaagtaaagagtacatgtggcatgtagggacatggtttagtaagcatgatggtgatggtttgatggttcaactagatgatcttagtggtcttttccaaccttaatgattatattattccaaagaaagagaaaaagaggagaaaattcaaatactactctgtattttcccartctatatcatccttatctatccaagtgtaaaataacataagttat

SEQ ID NO: 29119 - DNA, 599 bp, Chicken  19866894247699_1
  misc_feature (1)..(4): n is any nucleotide
nnnntctatacttaaaatagatttactgccagagaaaaaaaaaaagaggggggggtggtgtaggaacagaaggaaagtatatattagtatatattattaataaataaacaacttacagcaataagctggtaagaattattcatcatggctattagcatgttgagtagaacaaccagagagattacgttataggtaccaaacatggtggccccaacaaattcagtaaattcatgctttggttgcacattggtcacatacagattgataagtccaaatatagaccagaataatgactgcagmgtttcaaataatctgaaagacaaagtccaaaaggaaaagctgtttaataccaacacatatacttttcagatcattcagtttttcccaagacacacaaagtccttcacttgacgcaggtggatggtgttcattrcaataaaggcaatatatatagaatactattttggagaaacgttatctatrtgtttcagatttgaacctatagatatccaacacaccaataaaataagtaagcctgtatgtgcaagattgagtctgttcaaacctccaaaggatatattttggagatatttttttgg

SEQ ID NO: 29120 - DNA, 600 bp, Chicken  19866894247699_2
aattattcatcatggctattagcatgttgagtagaacaaccagagagattacgttataggtaccaaacatggtggccccaacaaattcagtaaattcatgctttggttgcacattggtcacatacagattgataagtccaaatatagaccagaataatgactgcagmgtttcaaataatctgaaagacaaagtccaaaaggaaaagctgtttaataccaacacatatacttttcagatcattcagtttttcccaagacacacaaagtccttcacttgacgcaggtggatggtgttcattrcaataaaggcaatatatatagaatactattttggagaaacgttatctatrtgtttcagatttgaacctatagatatccaacacaccaataaaataagtaagcctgtatgtgcaagattgagtctgttcaaacctccaaaggatatattttggagatatttttttggacatctgtctttgaagaattttgtctctgtgctttgactttagagggtagaacaaggatccaaaagtaactcactgattgcgctttagcaacatgttaaagtagttatggtatgcttgtatttgtttgattata

SEQ ID NO: 29121 - DNA, 560 bp, Chicken  19866894247699_3
acgttataggtaccaaacatggtggccccaacaaattcagtaaattcatgctttggttgcacattggtcacatacagattgataagtccaaatatagaccagaataatgactgcagmgtttcaaataatctgaaagacaaagtccaaaaggaaaagctgtttaataccaacacatatacttttcagatcattcagtttttcccaagacacacaaagtccttcacttgacgcaggtggatggtgttcattrcaataaaggcaatatatatagaatactattttggagaaacgttatctatrtgtttcagatttgaacctatagatatccaacacaccaataaaataagtaagcctgtatgtgcaagattgagtctgttcaaacctccaaaggatatattttggagatatttttttggacatctgtctttgaagaattttgtctctgtgctttgactttagagggtagaacaaggatccaaaagtaactcactgattgcgctttagcaacatgttaaagtagttatggtatgcttgtatttgtttgattataccaacttacg

SEQ ID NO: 29122 - DNA, 599 bp, Chicken  19866894247712_1
  misc_feature (1)..(5): n is any nucleotide
nnnnnaaccgcttcactcagtgtcacatccacatggttcctgaacacctccaggcacggtgacttttccatctcgctgggcagcatgttcctacgcatcaccactctaagaaatgtttccttatatccaactcgagcctcctctggcgcaacttaaatacattacctcttgtcctactgctagttacttgcatttattgcctccatagtcatacgatagtggagaaaaaaaaaaacaaaacactggaggtatacaaatataatatcaggaaaagatgctgtggcatcaggtgttagggamaaatgtgcgtaacgaaaccacagaacaatgaaatacagtgccrttatattaatgtcctttgtgaccttctgttttggtcatcatctctaaatgggagtggaaacttataagtaaattgaaggaatgggagattataaatatatttaaagaagtctggtgaaatgcctggaacaaaagttgtatgaggagtggctgagagaactgagactgtttagtctggagaagaggaggctcaggggagaccgtaccactctctgcaacaacctgaaagaagactgtagcaaggtgggagtcggtca

SEQ ID NO: 29123 - DNA, 600 bp, Chicken  19866894247712_2
acacctccaggcacggtgacttttccatctcgctgggcagcatgttcctacgcatcaccactctaagaaatgtttccttatatccaactcgagcctcctctggcgcaacttaaatacattacctcttgtcctactgctagttacttgcatttattgcctccatagtcatacgatagtggagaaaaaaaaaaacaaaacactggaggtatacaaatataatatcaggaaaagatgctgtggcatcaggtgttagggamaaatgtgcgtaacgaaaccacagaacaatgaaatacagtgccrttatattaatgtcctttgtgaccttctgttttggtcatcatctctaaatgggagtggaaacttataagtaaattgaaggaatgggagattataaatatatttaaagaagtctggtgaaatgcctggaacaaaagttgtatgaggagtggctgagagaactgagactgtttagtctggagaagaggaggctcaggggagaccgtaccactctctgcaacaacctgaaagaagactgtagcaaggtgggagtcggtcacttctcccacttaacagcaataggatgagaggtgatggcttaag

SEQ ID NO: 29124 - DNA, 600 bp, Chicken  19866894247713_1
aaaagcctctgtgtaccacgtaacaagatggggataccaagagggatgagcagtgcccttcagaacctctcccagcatacctaaaaactgactccacacggggctgtgctccatcacataccaattgagtcagacttccccattaggctttactaatggcatgaacataagagttaatatatctccaggcacaatgtgttgcggagagttacgaaataacgtcaatagagaatctcacacaagtccattataaccagcttaatgccctctttagtatttactgggtatggattccttaartgttttatgggtatggattttctgtttaatgataaccatttgttattaaaggaatttagcagaaagtgggacatacagataaacgttcaaagttaaggcacacagtccttcccacagagcacagccactggtgtgcagcagtgctggcagagaggggtgaaatctgggctgcaagagcccacttgtcctttattcccrgaggccaagcttccctccstggctttcctcctgtactgcctaccttgtttcctacatatggcaaatgaggtcaggctgatccagaacagccttaattcrtag

SEQ ID NO: 29125 - DNA, 600 bp, Chicken  19866894247713_2
ttgcggagagttacgaaataacgtcaatagagaatctcacacaagtccattataaccagcttaatgccctctttagtatttactgggtatggattccttaartgttttatgggtatggattttctgtttaatgataaccatttgttattaaaggaatttagcagaaagtgggacatacagataaacgttcaaagttaaggcacacagtccttcccacagagcacagccactggtgtgcagcagtgctggcagagaggggtgaaatctgggctgcaagagcccacttgtcctttattcccrgaggccaagcttccctccstggctttcctcctgtactgcctaccttgtttcctacatatggcaaatgaggtcaggctgatccagaacagccttaattcrtagaatcatagaatggcctgggttgaaaagccacatccagcctggccttgaatgcctgcagggatggggcatccacagcctcctttggcaacctgttgcccatgctggcacatccaagcactgttgtgtaagttaaattaattttggccacagagcagtgctgaaggcagggcattgggcctctgagacctctgtgagcgc

SEQ ID NO: 29126 - DNA, 600 bp, Chicken  19866894247713_3
aacgtcaatagagaatctcacacaagtccattataaccagcttaatgccctctttagtatttactgggtatggattccttaartgttttatgggtatggattttctgtttaatgataaccatttgttattaaaggaatttagcagaaagtgggacatacagataaacgttcaaagttaaggcacacagtccttcccacagagcacagccactggtgtgcagcagtgctggcagagaggggtgaaatctgggctgcaagagcccacttgtcctttattcccrgaggccaagcttccctccstggctttcctcctgtactgcctaccttgtttcctacatatggcaaatgaggtcaggctgatccagaacagccttaattcrtagaatcatagaatggcctgggttgaaaagccacatccagcctggccttgaatgcctgcagggatggggcatccacagcctcctttggcaacctgttgcccatgctggcacatccaagcactgttgtgtaagttaaattaattttggccacagagcagtgctgaaggcagggcattgggcctctgagacctctgtgagcgcttccagagtgaaggattag

SEQ ID NO: 29127 - DNA, 600 bp, Chicken  19866894247713_4
aartgttttatgggtatggattttctgtttaatgataaccatttgttattaaaggaatttagcagaaagtgggacatacagataaacgttcaaagttaaggcacacagtccttcccacagagcacagccactggtgtgcagcagtgctggcagagaggggtgaaatctgggctgcaagagcccacttgtcctttattcccrgaggccaagcttccctccstggctttcctcctgtactgcctaccttgtttcctacatatggcaaatgaggtcaggctgatccagaacagccttaattcrtagaatcatagaatggcctgggttgaaaagccacatccagcctggccttgaatgcctgcagggatggggcatccacagcctcctttggcaacctgttgcccatgctggcacatccaagcactgttgtgtaagttaaattaattttggccacagagcagtgctgaaggcagggcattgggcctctgagacctctgtgagcgcttccagagtgaaggattaggaaggacttcagcactgatgtgttcaagtggcattctatcaagacgggttcctacaaaaccaccaggcttccttagctag

SEQ ID NO: 29128 - DNA, 600 bp, Chicken  19866894247720_1
ctttcattttgtttcacttacggaaattatggaaaatggctttagtaattgggaaaaatatgcagaggtaggaggaaagcatgcaagcatgggtcttgtgatcaggcactaacagtcagcctctgttgggctgcttggggatgaagcaggagctcccaggatgctttatattgtcatataaaagagggtagaatggctgggggaagaacctaggcatcaaccgcctgacaactttttccaaaggggatagggattaaggactcgtttcatttactggtcaacgagtgattgttacttgtytgttcttattctgtggaggattgggaagtccttgggacagaggtttaggaagattaactaaactgaagaatcctgtmttygcttctgagagcaagggctgacgtgtgaggatccctcagcctgagccctgctcttgcagggtgttggttgcctctgcgagtgtcccaaaggttgctgtcacagggaggtctctgtgtgctgatagggtgtgcaggggctcagcctcgcaagatgcagcacggtgggtgacttgctttggtttcttttccaccttttttcccacctacgcctgacaaaaag

SEQ ID NO: 29129 - DNA, 600 bp, Chicken  19866894247720_2
agcatgcaagcatgggtcttgtgatcaggcactaacagtcagcctctgttgggctgcttggggatgaagcaggagctcccaggatgctttatattgtcatataaaagagggtagaatggctgggggaagaacctaggcatcaaccgcctgacaactttttccaaaggggatagggattaaggactcgtttcatttactggtcaacgagtgattgttacttgtytgttcttattctgtggaggattgggaagtccttgggacagaggtttaggaagattaactaaactgaagaatcctgtmttygcttctgagagcaagggctgacgtgtgaggatccctcagcctgagccctgctcttgcagggtgttggttgcctctgcgagtgtcccaaaggttgctgtcacagggaggtctctgtgtgctgatagggtgtgcaggggctcagcctcgcaagatgcagcacggtgggtgacttgctttggtttcttttccaccttttttcccacctacgcctgacaaaaagaattcagagggaagtatgtttcttatttaatgcccctgatgtaatcatcttacattgtgtcatttgtgcttggcccc

SEQ ID NO: 29130 - DNA, 600 bp, Chicken  19866894247720_3
atgcaagcatgggtcttgtgatcaggcactaacagtcagcctctgttgggctgcttggggatgaagcaggagctcccaggatgctttatattgtcatataaaagagggtagaatggctgggggaagaacctaggcatcaaccgcctgacaactttttccaaaggggatagggattaaggactcgtttcatttactggtcaacgagtgattgttacttgtytgttcttattctgtggaggattgggaagtccttgggacagaggtttaggaagattaactaaactgaagaatcctgtmttygcttctgagagcaagggctgacgtgtgaggatccctcagcctgagccctgctcttgcagggtgttggttgcctctgcgagtgtcccaaaggttgctgtcacagggaggtctctgtgtgctgatagggtgtgcaggggctcagcctcgcaagatgcagcacggtgggtgacttgctttggtttcttttccaccttttttcccacctacgcctgacaaaaagaattcagagggaagtatgtttcttatttaatgcccctgatgtaatcatcttacattgtgtcatttgtgcttggccccatg

SEQ ID NO: 29131 - DNA, 600 bp, Chicken  19866894247726_1
gaaattcagaaaatctgtctgttgttgctgtgtcaaagaaatacagccatccctggcaaattaggagactggagtccaacttgaaagctttttcctggctttaccttagttgagtaagaatctttctcttttcccctggggttctatctgtagtaatccatagccaaggcacatttgaaaaaggacgtgttcccattgttgctttttccatctgaatataactagatttattaaaataaaattgacttcatgatcatttatttaaaagctttaaattaggtgagagtgcaaataagtgaygctttgatgatagctgctgaggtagccccattgattggcctatgtggttatggcatcacagggtgagaaacctcgttttctttttcatttgcaggagcccacagtggacctttccccaaggatacttgcgagcrtgacagctttatcaccatacattgtgtagaaagcaacatgttgaagtatgttattgtagaacaggttgttgttcacaaattctttatttccagcagtagcacacgattagtacataaattctggttattccagttatttttcttagctgttgtctaaatgtttaat

SEQ ID NO: 29132 - DNA, 600 bp, Chicken  19866894247726_2
cctggggttctatctgtagtaatccatagccaaggcacatttgaaaaaggacgtgttcccattgttgctttttccatctgaatataactagatttattaaaataaaattgacttcatgatcatttatttaaaagctttaaattaggtgagagtgcaaataagtgaygctttgatgatagctgctgaggtagccccattgattggcctatgtggttatggcatcacagggtgagaaacctcgttttctttttcatttgcaggagcccacagtggacctttccccaaggatacttgcgagcrtgacagctttatcaccatacattgtgtagaaagcaacatgttgaagtatgttattgtagaacaggttgttgttcacaaattctttatttccagcagtagcacacgattagtacataaattctggttattccagttatttttcttagctgttgtctaaatgtttaatgttggacacaatctgtcttttggaaactgctcgtccaattttcaggctcctcttcatgttaacaagtgcagtcaatgtgcatakgctttcctgagctactgagtggcttgaaggttgagctgcttatgcagctg

SEQ ID NO: 29133 - DNA, 600 bp, Chicken  19866894247726_3
tcatttgcaggagcccacagtggacctttccccaaggatacttgcgagcrtgacagctttatcaccatacattgtgtagaaagcaacatgttgaagtatgttattgtagaacaggttgttgttcacaaattctttatttccagcagtagcacacgattagtacataaattctggttattccagttatttttcttagctgttgtctaaatgtttaatgttggacacaatctgtcttttggaaactgctcgtccaattttcaggctcctcttcatgttaacaagtgcagtcaatgtgcatakgctttcctgagctactgagtggcttgaaggttgagctgcttatgcagctgaagtctctacagtatctgctgtggtaggtgggcagggctctggaaacgtgggtgtttgcaatgaggggggagaagtacagtggcattttctatttgaagttaagtaccttgttgatgctcacataacgctggtactgcgcagtcaagaatagttgtagtttgaggattgacgttttgatgaactttaagcttttgttaaagcatttaaaaaaaaaagcacatgcttgaatttaaaagaaaatgttaaaac

SEQ ID NO: 29134 - DNA, 600 bp, Chicken  19866894247726_4
ctgagtggcttgaaggttgagctgcttatgcagctgaagtctctacagtatctgctgtggtaggtgggcagggctctggaaacgtgggtgtttgcaatgaggggggagaagtacagtggcattttctatttgaagttaagtaccttgttgatgctcacataacgctggtactgcgcagtcaagaatagttgtagtttgaggattgacgttttgatgaactttaagcttttgttaaagcatttaaaaaaaaaagcacatgcttgaatttaaaagaaaatgttaaaaccatctgcatacccycagaagaaaaatagacttagtccatacttcacaaaagccactgtaagtcttccagcagcattatgcactactggagagctgataagagtcgatgtgattacaggattagctaggccacaggcaccttctcgcttttattttcacctaggagcctgtcactgtaggaggcagttgctgtcctgtgcgctcagcatctctgtgctggctgccccatagcatagccatggatgaacctgctgcctgcactgctgtgctggcgctgctcagctctgggctccactgtgctgcaaagaaagggga

SEQ ID NO: 29135 - DNA, 600 bp, Chicken  19866894247726_5
aaagccactgtaagtcttccagcagcattatgcactactggagagctgataagagtcgatgtgattacaggattagctaggccacaggcaccttctcgcttttattttcacctaggagcctgtcactgtaggaggcagttgctgtcctgtgcgctcagcatctctgtgctggctgccccatagcatagccatggatgaacctgctgcctgcactgctgtgctggcgctgctcagctctgggctccactgtgctgcaaagaaaggggaagatctcaggttagggtgcccgcactggggttyggagcaattttccctgccttgggtagagaagtatttgatagtcatccaaaagccgctgctgtgygtttaacgggacaactgtggtctctgctcttggatattcgtgaggattttccagacatctgggaagggaggatggaacaggatatccagcttgcgcttctgtagagaagccaacgctgaatttaaggtgtgtctcaatattttctcagtgagtcagttgtaaagtattcaagctagatgcatgcaaggagattctctcttcgcagcaccattgagctttttccttcttccttcttg

SEQ ID NO: 29136 - DNA, 600 bp, Chicken  19866894247726_6
ttacaggattagctaggccacaggcaccttctcgcttttattttcacctaggagcctgtcactgtaggaggcagttgctgtcctgtgcgctcagcatctctgtgctggctgccccatagcatagccatggatgaacctgctgcctgcactgctgtgctggcgctgctcagctctgggctccactgtgctgcaaagaaaggggaagatctcaggttagggtgcccgcactggggttyggagcaattttccctgccttgggtagagaagtatttgatagtcatccaaaagccgctgctgtgygtttaacgggacaactgtggtctctgctcttggatattcgtgaggattttccagacatctgggaagggaggatggaacaggatatccagcttgcgcttctgtagagaagccaacgctgaatttaaggtgtgtctcaatattttctcagtgagtcagttgtaaagtattcaagctagatgcatgcaaggagattctctcttcgcagcaccattgagctttttccttcttccttcttggctgcagagagctcctggattttgctttgttaatgaagagtgagcaaagagcatggctgataat

SEQ ID NO: 29137 - DNA, 600 bp, Chicken  19866894247730_1
caagagcttgcaaggaatggatcacacgttgtgcttggggcacatctccgtcttgctggacgatgcctggtgtgcaaagcaaaccgttcctttcctacccatcccaaatgcacctctcattacggtatggggcccgtgggctctgctctggcagtgagaaggagtgccaggaggtgctcccctcctcaccccgagcttttcagaggctcagcccatgtcctcaatacctacccaagcttctgtcagcatttttggaagaagtgcaccaaaagtgatgtgtgttggctgagttttcaggcygaggtggcccagcagcgggcagaggaggctccctgtttgcctttctctcctctcggtgctgcagccgctcatcgggtgggccagcaaatggaccagcaaagtttggacacactccgtatccgagcacatcttcccctccatcactccttggggtctcgtttggtgctttgttgatgagtgttcggaggttcggctccggctgcaccrggttaattgtcctggtggggaaaagcagaacggtgattttaagcagaaaaactcttccgtagtttggcttcgtagcagtggggatggagtgca

SEQ ID NO: 29138 - DNA, 600 bp, Chicken  19866894247730_2
tcagcccatgtcctcaatacctacccaagcttctgtcagcatttttggaagaagtgcaccaaaagtgatgtgtgttggctgagttttcaggcygaggtggcccagcagcgggcagaggaggctccctgtttgcctttctctcctctcggtgctgcagccgctcatcgggtgggccagcaaatggaccagcaaagtttggacacactccgtatccgagcacatcttcccctccatcactccttggggtctcgtttggtgctttgttgatgagtgttcggaggttcggctccggctgcaccrggttaattgtcctggtggggaaaagcagaacggtgattttaagcagaaaaactcttccgtagtttggcttcgtagcagtggggatggagtgcaggaaaatagagagaaatcaaaaggcttttaagaggaaaagggraaaaaaatcacttaggctggaaagaagtcttcccagcaggagcacaaggcaagaacacataaatgtccatggcggttaaactaatgtttcacatttccttctctgggggtatttgcacaggtgggggtgaggatggaaggagcctcggccgtttgctgagcggt

SEQ ID NO: 29139 - DNA, 600 bp, Chicken  19866894247730_3
tctctcctctcggtgctgcagccgctcatcgggtgggccagcaaatggaccagcaaagtttggacacactccgtatccgagcacatcttcccctccatcactccttggggtctcgtttggtgctttgttgatgagtgttcggaggttcggctccggctgcaccrggttaattgtcctggtggggaaaagcagaacggtgattttaagcagaaaaactcttccgtagtttggcttcgtagcagtggggatggagtgcaggaaaatagagagaaatcaaaaggcttttaagaggaaaagggraaaaaaatcacttaggctggaaagaagtcttcccagcaggagcacaaggcaagaacacataaatgtccatggcggttaaactaatgtttcacatttccttctctgggggtatttgcacaggtgggggtgaggatggaaggagcctcggccgtttgctgagcggtttattgaacgacacattggatggcacaagaggggaaaaaatgaaccacgaggaactgcagggggaaaatcaattggcacgtgcactgtcagagagaacaagggggagatgctgctttttcattccagggtatggag

SEQ ID NO: 29140 - DNA, 600 bp, Chicken  19866894247730_4
gagcacaaggcaagaacacataaatgtccatggcggttaaactaatgtttcacatttccttctctgggggtatttgcacaggtgggggtgaggatggaaggagcctcggccgtttgctgagcggtttattgaacgacacattggatggcacaagaggggaaaaaatgaaccacgaggaactgcagggggaaaatcaattggcacgtgcactgtcagagagaacaagggggagatgctgctttttcattccagggtatggagggctttggaaaccgccgtgtaaggaagtagaaatcttcrcaagtggccaaaatgtggagtgagtctcattgatagcatcgtgctgcaggaggtaggggctggagaggggtggtggcagcaggagaggagctgctggaccatgcagaaaggtgttgttgcagaggggagatgctttccctatggatgagtgtgagccttcacctgatgctggtgctccccagttcagaagagctcatgtctctgcttgagcccgtagatggcaaaacagggtaggtgcggcagcaactggaattcaaaggtgaggagagctcagaagaagtcaggaagggtagaaatgaa

SEQ ID NO: 29141 - DNA, 486 bp, Chicken  19866894247730_5
gcggcagcaactggaattcaaaggtgaggagagctcagaagaagtcaggaagggtagaaatgaatgaagaataaggcaactggaggggaaagaggagagaaggaaagcccggagacttgtacaacaaagggaagagagaacgaagtgtgtgcatgcagaaaagcacccagaaaaaaaagagcagaaggcaacaaaggagaaaaatgaaagaataatgaaggcataaagagggggggaagtgttgaaagagaaagagcctggctcacagggagacccaccaccccggtgtgaatggctgcrctgggaagggaaatgggcaatgggattgccaagggtggtactgtgagatgccctcraggaggtgggatttcagctgtacagagggtttgggtcttgttcwgtgggattaaggacatgggggcttgtgaatttgcgtctgcaaatgcattggcagtctgggtgttggagcaggaaagctcacacatg

SEQ ID NO: 29142 - DNA, 430 bp, Chicken  19866894247730_6
gaaatgaatgaagaataaggcaactggaggggaaagaggagagaaggaaagcccggagacttgtacaacaaagggaagagagaacgaagtgtgtgcatgcagaaaagcacccagaaaaaaaagagcagaaggcaacaaaggagaaaaatgaaagaataatgaaggcataaagagggggggaagtgttgaaagagaaagagcctggctcacagggagacccaccaccccggtgtgaatggctgcrctgggaagggaaatgggcaatgggattgccaagggtggtactgtgagatgccctcraggaggtgggatttcagctgtacagagggtttgggtcttgttcwgtgggattaaggacatgggggcttgtgaatttgcgtctgcaaatgcattggcagtctgggtgttggagcaggaaagctcacacatg

SEQ ID NO: 29143 - DNA, 386 bp, Chicken  19866894247730_7
aggaaagcccggagacttgtacaacaaagggaagagagaacgaagtgtgtgcatgcagaaaagcacccagaaaaaaaagagcagaaggcaacaaaggagaaaaatgaaagaataatgaaggcataaagagggggggaagtgttgaaagagaaagagcctggctcacagggagacccaccaccccggtgtgaatggctgcrctgggaagggaaatgggcaatgggattgccaagggtggtactgtgagatgccctcraggaggtgggatttcagctgtacagagggtttgggtcttgttcwgtgggattaaggacatgggggcttgtgaatttgcgtctgcaaatgcattggcagtctgggtgttggagcaggaaagctcacacatg

SEQ ID NO: 29144 - DNA, 600 bp, Chicken  19866894247731_1
tgtacttcagaagtctcactaagggtagttttcatgtttgcggtagccaaaattttactagctttgctaagttaccggttcttttagcgctggtgataccaccagaatgtagcatttgaatttatttttaagattctccatcttttaaacacatttaaaactattcctgtgggatacctctgccagacagtgttaaaggagttattttctgtgcttctgtgctgttagaagaggacttgggagcttttccttttctgtcacacttggagtgtggttgttctttcaagaagctggtctgcrcttgtattcataataataaaaatgccagcaaatagtgacattcagcagacttttggcacctatagttgagtttctgaattggttttcaatttgcggcttgggcagtctacgcttattcctttcttcaatmaaatatagtcgtatgttctgaaagtcagggttttcaaaaattactagtgaaccataagagatgcaaggtacagtttgttaygcatgcaacatttgattggatgcaggccgtgtccacagctgtttactagtttggagaaaacatgagctgactgattcggatgactacat

SEQ ID NO: 29145 - DNA, 600 bp, Chicken  19866894247731_2
agattctccatcttttaaacacatttaaaactattcctgtgggatacctctgccagacagtgttaaaggagttattttctgtgcttctgtgctgttagaagaggacttgggagcttttccttttctgtcacacttggagtgtggttgttctttcaagaagctggtctgcrcttgtattcataataataaaaatgccagcaaatagtgacattcagcagacttttggcacctatagttgagtttctgaattggttttcaatttgcggcttgggcagtctacgcttattcctttcttcaatmaaatatagtcgtatgttctgaaagtcagggttttcaaaaattactagtgaaccataagagatgcaaggtacagtttgttaygcatgcaacatttgattggatgcaggccgtgtccacagctgtttactagtttggagaaaacatgagctgactgattcggatgactacatttttatttgactgtattaaacagttgtctgcrcatcgattacattttgttatgctgtctttgctgttaatgtacctttggcaaacttgaagcraagctatgtaatagaagatagtggtaaatgtagggta

SEQ ID NO: 29146 - DNA, 600 bp, Chicken  19866894247731_3
tgcttctgtgctgttagaagaggacttgggagcttttccttttctgtcacacttggagtgtggttgttctttcaagaagctggtctgcrcttgtattcataataataaaaatgccagcaaatagtgacattcagcagacttttggcacctatagttgagtttctgaattggttttcaatttgcggcttgggcagtctacgcttattcctttcttcaatmaaatatagtcgtatgttctgaaagtcagggttttcaaaaattactagtgaaccataagagatgcaaggtacagtttgttaygcatgcaacatttgattggatgcaggccgtgtccacagctgtttactagtttggagaaaacatgagctgactgattcggatgactacatttttatttgactgtattaaacagttgtctgcrcatcgattacattttgttatgctgtctttgctgttaatgtacctttggcaaacttgaagcraagctatgtaatagaagatagtggtaaatgtagggtagggggaaagcagtttttgagtagccagggattcctcaaaaattttgtaagtcaggtgcaaatcatcaaaaggctgatggtt

SEQ ID NO: 29147 - DNA, 600 bp, Chicken  19866894247731_4
tagtgacattcagcagacttttggcacctatagttgagtttctgaattggttttcaatttgcggcttgggcagtctacgcttattcctttcttcaatmaaatatagtcgtatgttctgaaagtcagggttttcaaaaattactagtgaaccataagagatgcaaggtacagtttgttaygcatgcaacatttgattggatgcaggccgtgtccacagctgtttactagtttggagaaaacatgagctgactgattcggatgactacatttttatttgactgtattaaacagttgtctgcrcatcgattacattttgttatgctgtctttgctgttaatgtacctttggcaaacttgaagcraagctatgtaatagaagatagtggtaaatgtagggtagggggaaagcagtttttgagtagccagggattcctcaaaaattttgtaagtcaggtgcaaatcatcaaaaggctgatggttttacatgatttgacttgaagagctgcatatgagcagaacttcaagggcagggtgcattctgctttgaatcaagtctgtgctggaatttcacatgagaaatccatatgtcataaagaggttg

SEQ ID NO: 29148 - DNA, 553 bp, Chicken  19866894247731_5
cggcttgggcagtctacgcttattcctttcttcaatmaaatatagtcgtatgttctgaaagtcagggttttcaaaaattactagtgaaccataagagatgcaaggtacagtttgttaygcatgcaacatttgattggatgcaggccgtgtccacagctgtttactagtttggagaaaacatgagctgactgattcggatgactacatttttatttgactgtattaaacagttgtctgcrcatcgattacattttgttatgctgtctttgctgttaatgtacctttggcaaacttgaagcraagctatgtaatagaagatagtggtaaatgtagggtagggggaaagcagtttttgagtagccagggattcctcaaaaattttgtaagtcaggtgcaaatcatcaaaaggctgatggttttacatgatttgacttgaagagctgcatatgagcagaacttcaagggcagggtgcattctgctttgaatcaagtctgtgctggaatttcacatgagaaatccatatgtcataaagaggttgcatttagcaaggat

SEQ ID NO: 29149 - DNA, 599 bp, Chicken  19866894247740_1
  misc_feature (1)..(151): n is any nucleotide
nnnnnnnnnnnnnnnnnnnnnnnnnnnnnnnnnnnnnnnnnnnnnnnnnnnnnnnnnnnnnnnnnnnnnnnnnnnnnnnnnnnnnnnnnnnnnnnnnnnnnnnnnnnnnnnnnnnnnnnnnnnnnnnnnnnnnnnnnnnnnnnnnnnnnnntgggttattatctcttatctgtatagcatcagaactgtccactgctaattccatttctgcattccagtagctgtgaccacataagctaagcagtttcagaataaagttaactactaaaatgcagctgatgttatgtcataaaaaagttrtaacgataatggtgcagaattcaatcttggttctttatttccacacaatatattccatatttctaaaatccttatttttgccctgaacctaacctgctgcatggaaccaatctacatatgagccataaaacataycaatgcatctataaaatcagcaagatactcttaagcttttttcctccctaagtaaaaaaatcacatgattctaaataaatatcctccaagtagtagagcctgaactggaaggtttaataacagtacattaggacaacatattgctattaagagaattagcctgg

SEQ ID NO: 29150 - DNA, 599 bp, Chicken  19866894247740_2
  misc_feature (1)..(65): n is any nucleotide
nnnnnnnnnnnnnnnnnnnnnnnnnnnnnnnnnnnnnnnnnnnnnnnnnnnnnnnnnnnnnnnnntgggttattatctcttatctgtatagcatcagaactgtccactgctaattccatttctgcattccagtagctgtgaccacataagctaagcagtttcagaataaagttaactactaaaatgcagctgatgttatgtcataaaaaagttrtaacgataatggtgcagaattcaatcttggttctttatttccacacaatatattccatatttctaaaatccttatttttgccctgracctaacctgctgcatggaaccaatctacatatgagccataaaacataycaatgcatctataaaatcagcaagatactcttaagcttttttcctccctaagtaaaaaaatcacatgattctaaataaatatcctccaagtagtagagcctgaactggaaggtttaataacagtacattaggacaacatattgctattaagagaattagcctggtgctttgaagttcttaccactctgctttgtatccaaaacttgtctttcttctaaggcctcatatattctaaagtaacagkatttag

SEQ ID NO: 29151 - DNA, 599 bp, Chicken  19866894247740_3
  misc_feature (1)..(16): n is any nucleotide
nnnnnnnnnnnnnnnntgggttattatctcttatctgtatagcatcagaactgtccactgctaattccatttctgcattccagtagctgtgaccacataagctaagcagtttcagaataaagttaactactaaaatgcagctgatgttatgtcataaaaaagttrtaacgataatggtgcagaattcaatcttggttctttatttccacacaatatattccatatttctaaaatccttatttttgccctgaacctaacctgctgcatggaaccaatctacatatgagccataaaacataycaatgcatctataaaatcagcaagatactcttaagcttttttcctccctaagtaaaaaaatcacatgattctaaataaatatcctccaagtagtagagcctgaactggaaggtttaataacagtacattaggacaacatattgctattaagagaattagcctggtgctttgaagttcttaccactctgctttgtatccaaaacttgtctttcttctaaggcctcatatattctaaagtaacagkatttagtctttgtttcctccggaaccaaaagtctcttacacacaagctcctgttt

SEQ ID NO: 29152 - DNA, 600 bp, Chicken  19866894247740_4
gccctgaacctaacctgctgcatggaaccaatctacatatgagccataaaacataycaatgcatctataaaatcagcaagatactcttaagcttttttcctccctaagtaaaaaaatcacatgattctaaataaatatcctccaagtagtagagcctgaactggaaggtttaataacagtacattaggacaacatattgctattaagagaattagcctggtgctttgaagttcttaccactctgctttgtatccaaaacttgtctttcttctaaggcctcatatattctaaagtaacagkatttagtctttgtttcctccggaaccaaaagtctcttacacacaagctcctgtttcacttgctcacatagacatgtgcactcctcctaatagagacttaataagcagatttgctctaattctaagatgaaaccactataagacttcagctgtattctagaatttagtgtagaattatgcacacaaccatataagtcagctcatgcagactaataaggcctcraaacattacatttctggaaggaacaaaggcactgctgattaaaaaggctaataaaagaaggagtttaaactgtcaacc

SEQ ID NO: 29153 - DNA, 512 bp, Chicken  19866894247740_5
ctttgaagttcttaccactctgctttgtatccaaaacttgtctttcttctaaggcctcatatattctaaagtaacagkatttagtctttgtttcctccggaaccaaaagtctcttacacacaagctcctgtttcacttgctcacatagacatgtgcactcctcctaatagagacttaataagcagatttgctctaattctaagatgaaaccactataagacttcagctgtattctagaatttagtgtagaattatgcacacaaccatataagtcagctcatgcagactaataaggcctcraaacattacatttctggaaggaacaaaggcactgctgattaaaaaggctaataaaagaaggagtttaaactgtcaaccacaaaagctttgcattatacatggtaacagcacaaacaaggcaataaaataaacaaaggacaaaaggtaattggacgtcattatacttctttctgtcttcttatgttggcactatctgtgacaggaagtgggag

SEQ ID NO: 29154 - DNA, 599 bp, Chicken  19866894247754_1
  misc_feature (1)..(20): n is any nucleotide
nnnnnnnnnnnnnnnnnnnnacgtgagcacaaccaaaacaacagagtgatctcaacagcgttatccgattagcagcacctgcaaccaacagaaacagatcttcaaatggagctgtcagccgccgttgcaacaccgaagtgtgctacaacacactgagtgggaataaggagcagtggtgtaagaggtgcaattgcaagagcactgaagggacacttggcagcgcttgcgtgcctgaaattagatctgcccatctcgtgcatgggtgcgtggggggtgccaggtgggattacaatgaggctmtgctttcctgtaaggcaaaaaatgtattcaagttcagccaagatatatgggtttatatacaatgatattattactgttgttattgtgatacatggcataataactgccttttacacacatacccagacacgtgtaccgccatgcacttattttctttgttacgaaaaatattcagcatattgaaatgtcaccaaagtatagtttatctgatcgtatttcttccatgaagggtaagtggtaaaaataaagagtattgataaatcggaaagaccatgtagggtttttcatggctagggatt

SEQ ID NO: 29155 - DNA, 600 bp, Chicken  19866894247756_1
tagagcaggactttgatgagtaagaatggtccattgcctgtcactctgtgcttggtagaaggttattgctctcccaagtatttctgcagttttacagggtcagactctagacaccaaaattcagcctgtggcatgtcaaaactatgggagaagaaaggaaacagttatttcagaaaccaccccattgcatgggtatttaaagccctggttttgtgctactgttctaccttgtgcaaaagcagagacttgaatcttagtcttcagagtggtgcaagcaccagcactcctgcagcagtgtgytttcttgctcttctggcatttcctagttatctccaaaaggtctcattttcattccytgtggggaacagacataacttggaaacctcagggttttctgcagagtggctttctgttcctgtccactccgggtgctgcctgatgcaaggtgaggccctgcagtcaggtggagaggattggctgtgattgcactgctgggtctcctgctttgctcaggtcaggacagcacagtaagtcctgtgtgacaggaatatcaatagagcaagaaacttctagatgagtgagatttggatgaggtgttag

SEQ ID NO: 29156 - DNA, 600 bp, Chicken  19866894247756_2
agaaggttattgctctcccaagtatttctgcagttttacagggtcagactctagacaccaaaattcagcctgtggcatgtcaaaactatgggagaagaaaggaaacagttatttcagaaaccaccccattgcatgggtatttaaagccctggttttgtgctactgttctaccttgtgcaaaagcagagacttgaatcttagtcttcagagtggtgcaagcaccagcactcctgcagcagtgtgytttcttgctcttctggcatttcctagttatctccaaaaggtctcattttcattccytgtggggaacagacataacttggaaacctcagggttttctgcagagtggctttctgttcctgtccactccgggtgctgcctgatgcaaggtgaggccctgcagtcaggtggagaggattggctgtgattgcactgctgggtctcctgctttgctcaggtcaggacagcacagtaagtcctgtgtgacaggaatatcaatagagcaagaaacttctagatgagtgagatttggatgaggtgttaggaagggctgttcacagatgagagtggtgcagagccacgttcccatggggactgtgg

SEQ ID NO: 29157 - DNA, 545 bp, Chicken  19866894247756_3
aatccatcacaactcttgccatatcattctcttgatgaattgcctttgctattaacaataaacgcgagccttgccttgacttatagcctccggatctcatcctgactttgctggattgaagagttccttcttttgaaaatgttcttactgagaggtgagagatttatcagtcagcgccaagtcatctttgtcattctcctggtgcagagcatctcaaacgtttttcttctgtgtccagacttgcagcaacagcaaactatcagcggccacagtattaccaggctacgtacaaccgattgrcaagagtgagctggccaccagcctttgcatcattgagggcatttgcaacattgggtacaacagtagcagcatttctgctcctgctctctattgctctgctggtgcaccccgtgtgggtgttggactctccccgttgcattcccattcagtcatctctctcccatggcttccagttcccagagtcgctgctctctggaaaagtgtgccccattttgaagtaatatatcctgcactctttgttcctg

SEQ ID NO: 29158 - DNA, 600 bp, Chicken  19866894247762_1
cacagggtcaatgaggagattcctaaagagccccaggagcagacctgggtctgtcggcgttgcctgtccttcccacacaacagccctgcagcctcctgcagacgtagactttccctccagacagtggcaacatggaggaatctgctccaggcacaacagcagtataaatagcaagccatctgcaccgtgctggtgtaccagcctggcagctggagccttgctggtaaacacgctatcagaatgtgcacattctcacaatatctctgatgttgcaagtcagcagagaattattactggaastcattactacacgtccagaaatttgcatggaaaacttgctggatgcttactcacatgatgcatggctcctacacaacatccataatgttccctcaatgccccaaagggaagaacatttccagaactgatctctgcagcctcacatcctcctaagccccacctcccgcagatggaactcactctatttccactgctgccattccacaccacccttctcctttgaaaacccccatgctggcacccagagagcaatcccttgcgattgatgttgtggcacatcaatatgcacatctgggtact

SEQ ID NO: 29159 - DNA, 600 bp, Chicken  19866894247762_2
aactgatctctgcagcctcacatcctcctaagccccacctcccgcagatggaactcactctatttccactgctgccattccacaccacccttctcctttgaaaacccccatgctggcacccagagagcaatcccttgcgattgatgttgtggcacatcaatatgcacatctgggtactgggatggatgctgcctcccacctgtcctgggcaccacctgcatgtggccgtgctgacagctcctgccatgtgggtacagccaaatcccctcctttctaccgttgcaattacatcaagtttcyccattcaggcaaagaagagagcttacaaggcatctttgcactattttcagtgatacctgttgaaatccagaggttggtttgcaacaagtctgagcaacgcaagaaagatgacagcaggcgtagggttattggtggtggttagccttgggtttgcttttttttttttggaaagacagcttaagaaaaagaggaagattgctggagaagagcagatggaagagcagggctctggagccctctaatggcagcttgctatcagcttcccagagcagaacccccacgcacatgcccatagcagct

SEQ ID NO: 29160 - DNA, 600 bp, Chicken  19866894247770_1
aatcttttgtaggccaagaagttaagaaggcaagatcacagatcctatatctaggactacaagtaagaaagatttccttgtagcttctcatgtaaggttattttaacaacaacaacaaaaattaacatggaagatgaggtaccacttgaacaaaaacaaactaacaaacaaaaccatgcaaaataacctaccaaaaaaaaaaaaaatttgaagtaattagaaattgcttcatatgtcctaggactaaatacagaaaattgctgaactaagtagtttttcaaaccaaacacaacaagccgragtaaatctgaagtaggtccaagtcacggtcttgttctgtaatatctgcatgaagattttaaaatgctgtatgttattaaacatgttgatgtctaaaaatgtgcagaagggctgtctgcttatagatcatacagcacaaggagatactagctacataacaaattagtaacagctggatgatttgaaactagaagacctaacatgacagtacagggcaaattccactcagtttacgaaagaagactactttaccttgggcaataaaacaatgcctctaaattggattttgcagaacctggg

SEQ ID NO: 29161 - DNA, 599 bp, Chicken  19866894247773_1
  misc_feature (1)..(92): n is any nucleotide
nnnnnnnnnnnnnnnnnnnnnnnnnnnnnnnnnnnnnnnnnnnnnnnnnnnnnnnnnnnnnnnnnnnnnnnnnnnnnnnnnnnnnnnnnnnngggcttctggctgctgctgctgctcaccgtccacgttgaaagcttcggagatgagcacccctttcctgggggggacggatggagcgctgtgcccgcggctggagccaagccttgaactggaatcggtcctcggtgccaccgttctcgtggtgcgcgtacaccaggcgcccagcagccaggtctgactgcaggaagaagggctgtgagygctccagaggcctatcagccacccagagctcaccgtgcaccggcagctccgtcaccaggaagatgacatcgtgtgcgtcccgctcgggggccgggatctggctcaggaggttggatgcatccagcagcgaggtgccgatctctgcccgctgagcctctacgagatggaggcctggggaaaaagggggaagccaaagctcagttggagcagaagagttgcaaagcaacggggaaggcagatgggatttgttagcttggcattgtctcccatcctttttcacctgcatttctccatagctg

SEQ ID NO: 29162 - DNA, 599 bp, Chicken  19866894247775_1
  misc_feature (1)..(23): n is any nucleotide
nnnnnnnnnnnnnnnnnnnnnnngataggttacagtgctggtgaggtctcgatgctgtcagccctcagagtgctgggattcagctgtaagtcagaggttgaatgtggccatcagcatgcagcagtcccagggagcggtgtgcctttaaaccaagcgcttattgcaggcagcacatcttgtgcctgcggtgcgcctggttcatccatgcagtgaaaataagggcaacaataaaagaaatgaagtgatgctttgttaggaagacatttttagtccaaaaaatcaggtaactggttgaagtcrttgttcaattaatgcttgataaagcaataagccagtttaaaatgyacttgcagttacaggaagaggaatatattacgctcacctgttgagaggattatctctgctaaacacacacattttacrtgagaccaaaatagatccttaaaaaattaatactaaaataggtttacagccgagagagattcctttccagcctgttttgtggtgtgctcatctgctttttcaggaatttgaagcactgaaggaatgaagtcaaagctgctgcttgtctttgaaatggatgcctctttgataagcct

SEQ ID NO: 29163 - DNA, 600 bp, Chicken  19866894247775_2
gtctcgatgctgtcagccctcagagtgctgggattcagctgtaagtcagaggttgaatgtggccatcagcatgcagcagtcccagggagcggtgtgcctttaaaccaagcgcttattgcaggcagcacatcttgtgcctgcggtgcgcctggttcatccatgcagtgaaaataagggcaacaataaaagaaatgaagtgatgctttgttaggaagacatttttagtccaaaaaatcaggtaactggttgaagtcrttgttcaattaatgcttgataaagcaataagccagtttaaaatgyacttgcagttacaggaagaggaatatattacgctcacctgttgagaggattatctctgctaaacacacacattttacrtgagaccaaaatagatccttaaaaaattaatactaaaataggtttacagccgagagagattcctttccagcctgttttgtggtgtgctcatctgctttttcaggaatttgaagcactgaaggaatgaagtcaaagctgctgcttgtctttgaaatggatgcctctttgataagcctctgatctccgtacccagagttgtagcagcagattcaaacgctgatt

SEQ ID NO: 29164 - DNA, 600 bp, Chicken  19866894247775_3
gtcccagggagcggtgtgcctttaaaccaagcgcttattgcaggcagcacatcttgtgcctgcggtgcgcctggttcatccatgcagtgaaaataagggcaacaataaaagaaatgaagtgatgctttgttaggaagacatttttagtccaaaaaatcaggtaactggttgaagtcrttgttcaattaatgcttgataaagcaataagccagtttaaaatgyacttgcagttacaggaagaggaatatattacgctcacctgttgagaggattatctctgctaaacacacacattttacrtgagaccaaaatagatccttaaaaaattaatactaaaataggtttacagccgagagagattcctttccagcctgttttgtggtgtgctcatctgctttttcaggaatttgaagcactgaaggaatgaagtcaaagctgctgcttgtctttgaaatggatgcctctttgataagcctctgatctccgtacccagagttgtagcagcagattcaaacgctgattgtaaaattgggagactaaaacgtagccacgacagcttcaaacactctgtctctctgtcagattcaatgcacaggacat

SEQ ID NO: 29165 - DNA, 600 bp, Chicken  19866894247776_1
gtaagaaaagaagggcagtggctgagtttaaacacgagtttgtgttaggagcttttgcagatacagtttttcagctacagttgcctgaagatgctgtctttactaaatcagagtaaataaacacactgtatttactctctgaggtctctaatgggaattttctgactcaagactattcctgccctggctgtgacacggcatggttagtgcagacagcagtgtgagtgcatcctccccgtttcctttagaagtatgccgtggtcgtgatgtttgttagctctaggtgaaaagttgttaaartctactggaatttaggaaaccagccactggcaagattacagctttgcagggagaayctgtgaccttatctagtttctgatgtaatacagggcagctgctgcactattaataacctgaactgtgtgaaatacaagtaccagcaccacaagtaacaagttaagctgtctgtggtttgatcgatacttcttgccattaatcactggcaagaaaaacctgactttatwaacattaaacctcagttactttgtgctttcacttgtgcaggcagaayggaatgctgtgataactaagaaaaaagtg

SEQ ID NO: 29166 - DNA, 600 bp, Chicken  19866894247776_2
gcagatacagtttttcagctacagttgcctgaagatgctgtctttactaaatcagagtaaataaacacactgtatttactctctgaggtctctaatgggaattttctgactcaagactattcctgccctggctgtgacacggcatggttagtgcagacagcagtgtgagtgcatcctccccgtttcctttagaagtatgccgtggtcgtgatgtttgttagctctaggtgaaaagttgttaaartctactggaatttaggaaaccagccactggcaagattacagctttgcagggagaayctgtgaccttatctagtttctgatgtaatacagggcagctgctgcactattaataacctgaactgtgtgaaatacaagtaccagcaccacaagtaacaagttaagctgtctgtggtttgatcgatacttcttgccattaatcactggcaagaaaaacctgactttatwaacattaaacctcagttactttgtgctttcacttgtgcaggcagaayggaatgctgtgataactaagaaaaaagtgtgkaaaaaaaaaaggtgcaaatatcagaacttccaaatattctatgagtgtattcc

SEQ ID NO: 29167 - DNA, 600 bp, Chicken  19866894247776_3
gtgcatcctccccgtttcctttagaagtatgccgtggtcgtgatgtttgttagctctaggtgaaaagttgttaaartctactggaatttaggaaaccagccactggcaagattacagctttgcagggagaayctgtgaccttatctagtttctgatgtaatacagggcagctgctgcactattaataacctgaactgtgtgaaatacaagtaccagcaccacaagtaacaagttaagctgtctgtggtttgatcgatacttcttgccattaatcactggcaagaaaaacctgactttatwaacattaaacctcagttactttgtgctttcacttgtgcaggcagaayggaatgctgtgataactaagaaaaaagtgtgkaaaaaaaaaaggtgcaaatatcagaacttccaaatattctatgagtgtattccctgtaaacatcgtttctggccctgaattttcaaaacttctttcaataaatggaggggattctcgtcatattattgaagtatttagaactctctgaagtcattaggcatactttaggtggagcactgagcwatgagggagatagtactggtaggtgatttagagagtgg

SEQ ID NO: 29168 - DNA, 600 bp, Chicken  19866894247776_4
tgttagctctaggtgaaaagttgttaaartctactggaatttaggaaaccagccactggcaagattacagctttgcagggagaayctgtgaccttatctagtttctgatgtaatacagggcagctgctgcactattaataacctgaactgtgtgaaatacaagtaccagcaccacaagtaacaagttaagctgtctgtggtttgatcgatacttcttgccattaatcactggcaagaaaaacctgactttatwaacattaaacctcagttactttgtgctttcacttgtgcaggcagaayggaatgctgtgataactaagaaaaaagtgtgkaaaaaaaaaaggtgcaaatatcagaacttccaaatattctatgagtgtattccctgtaaacatcgtttctggccctgaattttcaaaacttctttcaataaatggaggggattctcgtcatattattgaagtatttagaactctctgaagtcattaggcatactttaggtggagcactgagcwatgagggagatagtactggtaggtgatttagagagtggtaacactgtagatttgcaggaacgcagtttatgaacaaacaacattt

SEQ ID NO: 29169 - DNA, 600 bp, Chicken  19866894247776_5
actggaatttaggaaaccagccactggcaagattacagctttgcagggagaayctgtgaccttatctagtttctgatgtaatacagggcagctgctgcactattaataacctgaactgtgtgaaatacaagtaccagcaccacaagtaacaagttaagctgtctgtggtttgatcgatacttcttgccattaatcactggcaagaaaaacctgactttatwaacattaaacctcagttactttgtgctttcacttgtgcaggcagaayggaatgctgtgataactaagaaaaaagtgtgkaaaaaaaaaaggtgcaaatatcagaacttccaaatattctatgagtgtattccctgtaaacatcgtttctggccctgaattttcaaaacttctttcaataaatggaggggattctcgtcatattattgaagtatttagaactctctgaagtcattaggcatactttaggtggagcactgagcwatgagggagatagtactggtaggtgatttagagagtggtaacactgtagatttgcaggaacgcagtttatgaacaaacaacatttgggggaagagtttaggaaatggcctggcgaag

SEQ ID NO: 29170 - DNA, 600 bp, Chicken  19866894247776_6
ttgccattaatcactggcaagaaaaacctgactttatwaacattaaacctcagttactttgtgctttcacttgtgcaggcagaayggaatgctgtgataactaagaaaaaagtgtgkaaaaaaaaaaggtgcaaatatcagaacttccaaatattctatgagtgtattccctgtaaacatcgtttctggccctgaattttcaaaacttctttcaataaatggaggggattctcgtcatattattgaagtatttagaactctctgaagtcattaggcatactttaggtggagcactgagcwatgagggagatagtactggtaggtgatttagagagtggtaacactgtagatttgcaggaacgcagtttatgaacaaacaacatttgggggaagagtttaggaaatggcctggcgaaggattccgagttggattttattctcatctgacagtgatcactttgagtccattcagtccatctcaaatgcagctgattttttctcccaatttactagctgccttacatgaaacaagtctgagcagcccagtcccatttcccaggtgataaatgggctattgcaaaaattccccgtttagtgggt

SEQ ID NO: 29171 - DNA, 600 bp, Chicken  19866894247776_7
caggtagaaacacagacccacaacttaagtaggcacggcagcagctgagcagcagagcagagcaggaggagctgtgtggaacagcagcacttcattgaattttagcccctcagtggatgtagtggagatcttagatgaccatcctttagattttggcacctgcagtaaggacagaacaaggcttaggtgatacagtttgacgtagttcttgtgtcagcaggggcggtagaaagagtttgatgaactctcagcagactttgctcctggagaaaatgagtggaaaaacacttctcaacctgyatggccttttgtgcttcccagcttgagagtatttctaagacgacccgttcattaatctgtctcaatcagtcctacagttcagtggattaactgtctgacggcactttgttaacggagaaaatgtctttattttctgagtaaccacaacatcagcagtacaaatagaagcttatcttagagttttcgggaggacaatttaagtaatgaaaaactgtgagggaagatgcatttattttctaaattctgtacatagactttaaagggcttttctgggtacttgcagttttctggacttactca

SEQ ID NO: 29172 - DNA, 600 bp, Chicken  19866894247783_1
aaagcatgcacagtggtagaactattcatttcacagctgagcacaaaagactgaaatgtttcaagttaagcaagagtagtatcaatgattaaccacaagctgggagaccttcatcagtaacaacacatggaaatgctgaaaagcctgaaagaactcattaggaaagactgactaataaaccctggctgaccttggctgctcttttagactgcaactcagtgtcaccagacagaagcatacaccatatagagattttatttgtacatgttgggacacgaaaatccagcaaagaatgcacaragcaactagctacatcacacatgcatttaatcttrtaaaggttaaaaacattaatctttgcatcctgaagcattaagaaaagtcggcatattgtccagtccttcaagattgttttgttaagtactccagcgtatcagagctttcaacactattcatcactgaccccartagattaaatgtagatttcaaaacacggtgacttctgacaaattgtggagtccctatccctaagaaaggattcatgtaagcacatgtaacaatgggcggaggagcawtggtaaaaatttgagatccctacct

SEQ ID NO: 29173 - DNA, 600 bp, Chicken  19866894247783_2
gctgagcacaaaagactgaaatgtttcaagttaagcaagagtagtatcaatgattaaccacaagctgggagaccttcatcagtaacaacacatggaaatgctgaaaagcctgaaagaactcattaggaaagactgactaataaaccctggctgaccttggctgctcttttagactgcaactcagtgtcaccagacagaagcatacaccatatagagattttatttgtacatgttgggacacgaaaatccagcaaagaatgcacaragcaactagctacatcacacatgcatttaatcttrtaaaggttaaaaacattaatctttgcatcctgaagcattaagaaaagtcggcatattgtccagtccttcaagattgttttgttaagtactccagcgtatcagagctttcaacactattcatcactgaccccartagattaaatgtagatttcaaaacacggtgacttctgacaaattgtggagtccctatccctaagaaaggattcatgtaagcacatgtaacaatgggcggaggagcawtggtaaaaatttgagatccctacctatgagcatcagaaacttttcaacttcattggtata

SEQ ID NO: 29174 - DNA, 600 bp, Chicken  19866894247783_3
tgactaataaaccctggctgaccttggctgctcttttagactgcaactcagtgtcaccagacagaagcatacaccatatagagattttatttgtacatgttgggacacgaaaatccagcaaagaatgcacaragcaactagctacatcacacatgcatttaatcttrtaaaggttaaaaacattaatctttgcatcctgaagcattaagaaaagtcggcatattgtccagtccttcaagattgttttgttaagtactccagcgtatcagagctttcaacactattcatcactgaccccartagattaaatgtagatttcaaaacacggtgacttctgacaaattgtggagtccctatccctaagaaaggattcatgtaagcacatgtaacaatgggcggaggagcawtggtaaaaatttgagatccctacctatgagcatcagaaacttttcaacttcattggtatagactctttcaaaaaagagtagatttaggggaaaaaaaaatcaagtatgttaaaatgttttgatcaagtgttaaaaaatccaacttctgctgttgcttctgaggctggaattctacttgtctatgtaaataaaa

SEQ ID NO: 29175 - DNA, 600 bp, Chicken  19866894247783_4
cgaaaatccagcaaagaatgcacaragcaactagctacatcacacatgcatttaatcttrtaaaggttaaaaacattaatctttgcatcctgaagcattaagaaaagtcggcatattgtccagtccttcaagattgttttgttaagtactccagcgtatcagagctttcaacactattcatcactgaccccartagattaaatgtagatttcaaaacacggtgacttctgacaaattgtggagtccctatccctaagaaaggattcatgtaagcacatgtaacaatgggcggaggagcawtggtaaaaatttgagatccctacctatgagcatcagaaacttttcaacttcattggtatagactctttcaaaaaagagtagatttaggggaaaaaaaaatcaagtatgttaaaatgttttgatcaagtgttaaaaaatccaacttctgctgttgcttctgaggctggaattctacttgtctatgtaaataaaaagcattttaaatgtcaaaagtgaaattacccactttcacaagaggtttttttttttttttttttcctttgataagcattctgtcacacagcaactttcaatattatt

SEQ ID NO: 29176 - DNA, 600 bp, Chicken  19866894247788_1
agcacttcagtgcgctgagctcctcactacagtgtttcttcagagcagaatactatgaagtaaaggaatcttgacatacctttaacctagctctgataagattctttgtctcccttatcccaaataatctactcactacaaatctactcacagaacagtttggcttttacacatcatggagccctgtcacagcaacctgctccataatcatccccggcctgacttgccctgcaaatgggagccacaggaccaggcattcacaatgcacttggcatccagttggtgcaactttgtcactgygctcttcttccacaaaagtttgttctcacactggcctgatacagatcaaagaccacatttaatgaatttgtactcataagcccttctccaactgtgaggatctctgtctactcagcctaaagaaaagacttcttcatggtgttccattccagccttcagtattacttcttagccttgcagtcagtgctgtgtgtaatagggcgtagccctgaagacaacctcatagcttaatgttaaaaaattgaaatcttcagttcttttgatagaaactactagccaaattgattcagcagtagtcca

SEQ ID NO: 29177 - DNA, 600 bp, Chicken  19866894247790_1
tatttttgcagccaatatcttaatatgagcactgacaagaaagtcaacgttgccatgaagaaattcatcacttcttccgcaagtttacaagccgtaccaatacttaatgaggcaatcaaaggactataaacatttgttaatgacaaaatattgacttagtatagctcagaattatcatacatgtatgcaagttaagtagtacagatgcagctcaactgctttaatccatttgctttgggattattctgaattccaaactgaattcctcttatgcttagaaataccttacaatattactgrgtggcacggaagtacaggaggaaacatttgacaatgcttaccagctcatgtaaacaaaaatgtcccttgaatcacaacttagcagtcatttgtcaatagaattagtcaattttaatgtttttacactgaaatgttttcactgtgaaatcatgacactacaaataataaaataccaattcattctccacaaagagaggcacaggtatatctcgattcaaataaactgctgtttggaaactctaagcacataaaacagaaagtttccataaaagcatttttgctgtaatattcagaataaca

SEQ ID NO: 29178 - DNA, 387 bp, Chicken  19866894247790_2
ttacctccacatctactgctgtctgcagaactgagcctgtcccttctacatagtgcccataccttaacaaaaacaatcttagatgagtattttcattggaccttggtattagcaactgcaaagatgcaggatgaacttcatttgctgtaattaacaaacagccttctggattgattaaggaaaaggccttgttatcaacaatgctaattcttgaaatgcggtagcctctaaagataacctctggggatgagtctgcaatcaatgcacgagggtttaaccacgctaatgcctcatataagraaaggaactcaagcacagcatcatcagaaaggcccatctacattgcaaacattgattttacactaaggcaaaatatgtcaaaggcca

SEQ ID NO: 29179 - DNA, 600 bp, Chicken  19866894247796_1
tgcagtactgtgtccaagtatggagcccccagtacaagaaagacagagagctgttggagagggtccagaggagggccacaaagatggtcagaggtctggagcacctcccctgcgaagacaggctgagggagctgggcttattcagcctggagaagagaaggctgtggggtgacctcattgcagcgtttcagtacctgaaggaagcgtataaacaagaagggagtaaactctttgaaagggcagataacagcaggacaagggggaatggttttaagttcaaagagggaagatttaggttgratgttagagggaagttctttaccagtagagtggtgaggtgctggaacaggctgtccagagaggttgtkgatgccccgtccctggaggtgttcaaggctaggttggatggggccctgggcaacctggtctagtaactggggagcttggtggtcctgcctggcaaggggattggagattcatgatccttgaggtctcttccaacccaggccattctgtgattctcagttttctactgttactgttggcctcagattctgcttcatcttcatgctgaaacagggactggggaattttagtaat

SEQ ID NO: 29180 - DNA, 600 bp, Chicken  19866894247796_2
aggagggccacaaagatggtcagaggtctggagcacctcccctgcgaagacaggctgagggagctgggcttattcagcctggagaagagaaggctgtggggtgacctcattgcagcgtttcagtacctgaaggaagcgtataaacaagaagggagtaaactctttgaaagggcagataacagcaggacaagggggaatggttttaagttcaaagagggaagatttaggttgratgttagagggaagttctttaccagtagagtggtgaggtgctggaacaggctgtccagagaggttgtkgatgccccgtccctggaggtgttcaaggctaggttggatggggccctgggcaacctggtctagtaactggggagcttggtggtcctgcctggcaaggggattggagattcatgatccttgaggtctcttccaacccaggccattctgtgattctcagttttctactgttactgttggcctcagattctgcttcatcttcatgctgaaacagggactggggaattttagtaataaaaatgtttattgggcttatatgttaatatatgagggtgctgctggggtggtctttgtgagaagaga

SEQ ID NO: 29181 - DNA, 600 bp, Chicken  19866894247796_3
ggaattttagtaataaaaatgtttattgggcttatatgttaatatatgagggtgctgctggggtggtctttgtgagaagagaccagatactgcctcatattagataaaagccggctctagatggctcaaaatgggatctgctgctggcaaaagctgagacagtgaccctggttgcactctgtgagtccagatttaagaaaggaaaaaataaaatactgtgcagctgggagggaggagtgagaaaatgtgagagaaatggaccaacagacaccgaggtcagtgcaggaggatggctggggrtgctccaggtgcacrgcaraagctctgtgcagctcaggagaggcccctggaggagcaggctgtcccactacagcccatgggcaccaggcggagcagatctccatgtgcagccatggaggaggccacaatgcaacagtggatgtgttckgaaggaactgcagcccatggagagcccccrtagaagcagccttgggccagagatgcagcccatggggacctgtgatggagcagctcctgaagggtggacactgtggtatgaagccttctggagaagtgcttggaaggctgcagcctatggga

SEQ ID NO: 29182 - DNA, 600 bp, Chicken  19866894247796_4
aaaatgtttattgggcttatatgttaatatatgagggtgctgctggggtggtctttgtgagaagagaccagatactgcctcatattagataaaagccggctctagatggctcaaaatgggatctgctgctggcaaaagctgagacagtgaccctggttgcactctgtgagtccagatttaagaaaggaaaaaataaaatactgtgcagctgggagggaggagtgagaaaatgtgagagaaatggaccaacagacaccgaggtcagtgcaggaggatggctggggrtgctccaggtgcacrgcaraagctctgtgcagctcaggagaggcccctggaggagcaggctgtcccactacagcccatgggcaccaggcggagcagatctccatgtgcagccatggaggaggccacaatgcaacagtggatgtgttckgaaggaactgcagcccatggagagcccccrtagaagcagccttgggccagagatgcagcccatggggacctgtgatggagcagctcctgaagggtggacactgtggtatgaagccttctggagaagtgcttggaaggctgcagcctatgggaagcccatgcaggatc

SEQ ID NO: 29183 - DNA, 600 bp, Chicken  19866894247796_5
tgtttattgggcttatatgttaatatatgagggtgctgctggggtggtctttgtgagaagagaccagatactgcctcatattagataaaagccggctctagatggctcaaaatgggatctgctgctggcaaaagctgagacagtgaccctggttgcactctgtgagtccagatttaagaaaggaaaaaataaaatactgtgcagctgggagggaggagtgagaaaatgtgagagaaatggaccaacagacaccgaggtcagtgcaggaggatggctggggrtgctccaggtgcacrgcaraagctctgtgcagctcaggagaggcccctggaggagcaggctgtcccactacagcccatgggcaccaggcggagcagatctccatgtgcagccatggaggaggccacaatgcaacagtggatgtgttckgaaggaactgcagcccatggagagcccccrtagaagcagccttgggccagagatgcagcccatggggacctgtgatggagcagctcctgaagggtggacactgtggtatgaagccttctggagaagtgcttggaaggctgcagcctatgggaagcccatgcaggatcagct

SEQ ID NO: 29184 - DNA, 600 bp, Chicken  19866894247796_6
aaaagctgagacagtgaccctggttgcactctgtgagtccagatttaagaaaggaaaaaataaaatactgtgcagctgggagggaggagtgagaaaatgtgagagaaatggaccaacagacaccgaggtcagtgcaggaggatggctggggrtgctccaggtgcacrgcaraagctctgtgcagctcaggagaggcccctggaggagcaggctgtcccactacagcccatgggcaccaggcggagcagatctccatgtgcagccatggaggaggccacaatgcaacagtggatgtgttckgaaggaactgcagcccatggagagcccccrtagaagcagccttgggccagagatgcagcccatggggacctgtgatggagcagctcctgaagggtggacactgtggtatgaagccttctggagaagtgcttggaaggctgcagcctatgggaagcccatgcaggatcagctggggaaggatggagtcccatggaagggatttcatgttggagtatgggcaggccatgaaggagcaacagacctgcagygtcatggtctgacagcagccaccattccatgttctcctgtactatcctggtg

SEQ ID NO: 29185 - DNA, 600 bp, Chicken  19866894247796_7
ctgtgagtccagatttaagaaaggaaaaaataaaatactgtgcagctgggagggaggagtgagaaaatgtgagagaaatggaccaacagacaccgaggtcagtgcaggaggatggctggggrtgctccaggtgcacrgcaraagctctgtgcagctcaggagaggcccctggaggagcaggctgtcccactacagcccatgggcaccaggcggagcagatctccatgtgcagccatggaggaggccacaatgcaacagtggatgtgttckgaaggaactgcagcccatggagagcccccrtagaagcagccttgggccagagatgcagcccatggggacctgtgatggagcagctcctgaagggtggacactgtggtatgaagccttctggagaagtgcttggaaggctgcagcctatgggaagcccatgcaggatcagctggggaaggatggagtcccatggaagggatttcatgttggagtatgggcaggccatgaaggagcaacagacctgcagygtcatggtctgacagcagccaccattccatgttctcctgtactatcctggtgaagtaagtggaagagggtgaatgaaaagaa

SEQ ID NO: 29186 - DNA, 505 bp, Chicken  19866894247796_8
atctccatgtgcagccatggaggaggccacaatgcaacagtggatgtgttckgaaggaactgcagcccatggagagcccccrtagaagcagccttgggccagagatgcagcccatggggacctgtgatggagcagctcctgaagggtggacactgtggtatgaagccttctggagaagtgcttggaaggctgcagcctatgggaagcccatgcaggatcagctggggaaggatggagtcccatggaagggatttcatgttggagtatgggcaggccatgaaggagcaacagacctgcagygtcatggtctgacagcagccaccattccatgttctcctgtactatcctggtgaagtaagtggaagagggtgaatgaaaagaaaatgttttgagtttgcttttagtttctcaccattctaatctgttagcaataggtaataaactagattcatctccctctggtgagtgtgttttgtctatgatgcaatccatgagtgatctcaat

SEQ ID NO: 29187 - DNA, 600 bp, Chicken  19866894247797_1
tttacatggcatgatcttgtaagctttgtccaaaataagtttcctgactatacttactaatctaatggaaaaaaaataaatacagagtaaatttgatctgtatgtgtatttataattctcttgttctccagcagtgatgggaaaaaaggaaaacagcccctagcttttaaacagaataaggttgttcaacagttttatgagaagtcacttcctactggtattaggtctaccattttcataaaatattgaccaagtgctgagctgctttctataagcaagtggctttcctaactgaaggtrgagatctataagagagtatgttttctcctagtgaaaaatacatgttctgtggcaaaaaaataccacttcaggaatactcaaaaataatttatagaatgagagcttattggtacactgaaacttcacataagcaaagctaaacactgcaaagaatagaagcaatggaaaactatgcactgagtcaacatatttggactataaatagtgatctgcattgtctgttatgcctcacttgatggaatacaacaaatgtatatttgttgcaggcacaacagatgtaaarcggatatcctggaagca

SEQ ID NO: 29188 - DNA, 600 bp, Chicken  19866894247797_2
tttcctaactgaaggtrgagatctataagagagtatgttttctcctagtgaaaaatacatgttctgtggcaaaaaaataccacttcaggaatactcaaaaataatttatagaatgagagcttattggtacactgaaacttcacataagcaaagctaaacactgcaaagaatagaagcaatggaaaactatgcactgagtcaacatatttggactataaatagtgatctgcattgtctgttatgcctcacttgatggaatacaacaaatgtatatttgttgcaggcacaacagatgtaaarcggatatcctggaagcaagacatgaagaagcacattagcaaagatgtaaaatatagcaagttctttcaagaatccattttttgttgcattcttctacgtgataactctcctttctacagttttcatgctggatttgaaaattgctttaattctgcagaatgcttcagtgccaaatccatgcaaattatgttactgtaaccattttatttgattccagacaccagtttcttatttgcatccctactctacatcagtgattaatcagtcattaaagattaaagcatgtctcacttgatattt

SEQ ID NO: 29189 - DNA, 600 bp, Chicken  19866894247805_1
cttttcagtatcttgatggagtatgactaaatgacttcagcccctgcttcaagcttccccaatattacatggagttagaattctggtgggcttttgctctcttgtgaaaaatctacttggggtttccatggtgaatatatgcagaaaacaggccaaataactgtcagaaataattagatgtgttttgattgagaataaaaactttcttattcctattctttctagccagaattcttacaagaggctaacctacttatggccaagttgaactatgtggaaggtgattacaaggaagctctraacacatatgccagagttggagttgatgatttgcagctagctgctgtgccaccatataggttacggatgattgctgaagcatactctactaaaggtaagattactctttccagtacaataatgtggaacaagtatttaagaagttaatccatatcttgtccaaagttaaagaaattattagtgtgtgtatcaataacacagtggtagagtgccatatttgcagatgagtaagagaacgggttagcttcgttaaactaatcagtttgtctaggtgtgactctcacctctattaagatttcc

SEQ ID NO: 29190 - DNA, 597 bp, Chicken  19866894247808_1
gatccacattagaaattgcctattttgtatctacttttgtacttcagggggttttatcttggtcactttggctggtggcagctggttcattatggcacaaaggactaaatgttttctcagtctgagcactgtaagaggcatgcaggcagactgtacacttcagtggactcatgtaatccagatcatgagtatagaatgtgttccctctggtgtagagagccatgagcttgtggcagtttttgtatacgtttgagccgtagctcaagggcagccacaggtgtcatgttccaacagccatgygagatgaaggtacctcagtgttagaagatgagttgcacaagttactgtgagaacaatgaggatagtggtttggggttgtgaccgcctgacgaacgtcagacctgcgctgtcctacaagtgggaagtgcagggcagctcacccaatgtgggtagagcagctgcctcctgcagtctggctgtggcttactgctgtgcagcgcttctgcacgctcacacccaaacagcattgaaccttctgggtctgtaataaacctctcaggaatgatcacgggctagagaagagcgtggcaatgtggg

SEQ ID NO: 29191 - DNA, 600 bp, Chicken  19866894247819_1
gtttttaaatttcaagaaacaaaattgaacacacacaatggaaatagatacaaaatgcacagactgaaaaataaaatggcagtgtacatactaacacgtgtcttctgcagtagatttaggcagggataaggatgacaaatggaaagagcaaaggacttcagttggagggagaaggaaaaaaaagcacaaacatagtagagctgagtgaaaggaggagtaccagatgcatacgaacagcccaaggctgaggtcagtgcactcattcttacatggcaacagtccctcttcagacaatttccrcagctgatcccattgatccaatagtctggcttgaccttcatgacattttctctcaaagttagataacagtgagtgaagaaaggcaacrtgcaagtccaacctccccagaatagcatgccttctttgcatcaggaaaaattaccttttaacaatctacaacacaacaaaaatccaagtctattaaaaatttccactactccaactgcaagcatctgatttggaggataatccccttaatcatgagctgtggcttgtattctccatatagtttggtttgatgacttaactacattaaaacca

SEQ ID NO: 29192 - DNA, 600 bp, Chicken  19866894247819_2
tactaacacgtgtcttctgcagtagatttaggcagggataaggatgacaaatggaaagagcaaaggacttcagttggagggagaaggaaaaaaaagcacaaacatagtagagctgagtgaaaggaggagtaccagatgcatacgaacagcccaaggctgaggtcagtgcactcattcttacatggcaacagtccctcttcagacaatttccrcagctgatcccattgatccaatagtctggcttgaccttcatgacattttctctcaaagttagataacagtgagtgaagaaaggcaacrtgcaagtccaacctccccagaatagcatgccttctttgcatcaggaaaaattaccttttaacaatctacaacacaacaaaaatccaagtctattaaaaatttccactactccaactgcaagcatctgatttggaggataatccccttaatcatgagctgtggcttgtattctccatatagtttggtttgatgacttaactacattaaaaccaatccaatccctacaatacaccaatctcctggaattttatagcagattaycaatgtgcaccattcctgctttaatgagttacatcatcc

SEQ ID NO: 29193 - DNA, 600 bp, Chicken  19866894247819_3
ctctcaaagttagataacagtgagtgaagaaaggcaacrtgcaagtccaacctccccagaatagcatgccttctttgcatcaggaaaaattaccttttaacaatctacaacacaacaaaaatccaagtctattaaaaatttccactactccaactgcaagcatctgatttggaggataatccccttaatcatgagctgtggcttgtattctccatatagtttggtttgatgacttaactacattaaaaccaatccaatccctacaatacaccaatctcctggaattttatagcagattaycaatgtgcaccattcctgctttaatgagttacatcatccttcagccacagcaccacctgcaggacaaacagtactctcaggtccagaggaagccttgtttgagaatcactagcagagcgtggcttgtattgattaactaatgactgcggtatatgaagcttgaaaggctgtattaataacttgccatggctttgctctcatttatcagtgaattacaggggggatgtaactctgcatctcaatatatcacacctttcacaaatctctgggcaaatcaacatgcacacagattctcactct

SEQ ID NO: 29194 - DNA, 343 bp, Chicken  19866894247826_1
tctacagagaattcattccttttccaccttaagtgctgtcctcagcaaattttcattcgcaccatctccaggagtctcaagaagcagccgctctcatgtaatagttaatatagtactcagaactgttcataatgctgactgttgtaggctaaaatgaccttcatatgcatgaagtacttttgtaagagggtcagcgcacagaatttgtgccaccgggattgcagtgctgttttcctgtttggataatgtaatacaatagctagattattttttcaaataatgaagcaatgtagtccaaamttctaggtgtaatgataaggaactcgggaagcagcagcccacg

SEQ ID NO: 29195 - DNA, 550 bp, Chicken  19866894247834_1
cctccctcactccttccccagacccaaaatacataccagctcttagggatcgttaatatctggatactgaccaaaggagaaagcttaatttactagccaggaactgcagcttccttttggaaatggtactggattctctgcttattctccaggtgtaaatagaacagtgagcagtggttttttgtagacagttttagtactcacttgttattagtagaggtgggaagaatcagtcgctgactggtctgaagagagtgaatctctacaacgtgttcatttctgcttggaaccagtttgttycttttaaagcagttaccaccaattccattacttctgttaatcctctctacttagcaatgaaaattttatttctcctgttatttggagctttgttaacagaggagttgatgtcaggaatagagctgggaaagcacacccaatagcaaggggaagcatacgcccatgggaagtcaaacctctgaagcgtgggagaggattaatatagagatctgttctggcttgtttccaaacagcaggggagggttctcag

SEQ ID NO: 29196 - DNA, 600 bp, Chicken  19866894247838_1
gtacaatctctgcataatttctgataaacatatctttgagcattttaaagtaaagcacgaaaggaacaaatccaagctcctgctcaatagccccgcactcaaggcattcacatagaaggagacaagtaatgaaattcagcttaggtccatgacctgcctgaggaatagctggaattcagctcccacctctccaggcagtgatgagcacagcaattcagagagccaaagtcattccctggctttgatctagcttttgtctgtcatttaaaagagacaaaagaaatctggagaaaaacttgstctagaaaagtccatgctagccaatcagatgaacagaatcactggaaaagatctcaaatctatcttattctgtctcgaacaaaccttgcttgattctaagtttacttagaaaagaattctaccgacttaatgacagcaagcagcttctctttcagtctggattagagatctgatagacaaagtgaaataagaatagaaacagcataaaatgatcacacgtcgggaaagtcctttttgcctaaagtgacatctttaaaaaacagctctcagatgagtaggtggcttgcttttatctgtatg

SEQ ID NO: 29197 - DNA, 600 bp, Chicken  19866894247838_2
tcactggaaaagatctcaaatctatcttattctgtctcgaacaaaccttgcttgattctaagtttacttagaaaagaattctaccgacttaatgacagcaagcagcttctctttcagtctggattagagatctgatagacaaagtgaaataagaatagaaacagcataaaatgatcacacgtcgggaaagtcctttttgcctaaagtgacatctttaaaaaacagctctcagatgagtaggtggcttgcttttatctgtatgcaacatgaactattttaacgaacaacattcctttcctmcaagtttcactgctcctgtatttaatcccaactggtttttgcccctaatcaaagcatggtgctggatcaaatcccactatagttaagatcgatgctcacttgaaaaaatttcagcaaaagcaggatttggtcagtagattcagggaacacacttcaatgtgtttttgaagttaagcatcgtatttattatcaaatgacactaattgtctacatatcgaaaaggggacttaaaataaatccctttcagcactgacacttgtggggtttttttttttcaggaactatttaacatcgtatagg

SEQ ID NO: 29198 - DNA, 600 bp, Chicken  19866894247839_1
ctggaggctcagcaaaatccctattttgttccgtgacattaattttacgatgtccctggagcagttccaaagcaaagttttatgtgatatgattacacaaggtgaattgtcctgtatctgtttaatgaaagagatactgtgtttaatgattctttggggaattaaatgcagttcagctattaatcaggcattggtttcttggggaagagaggaagaggcagatacccggagcttcatgcatcacgagccacgtgcagagagcatctccaggagagtcgttgcttgttatcgatgtttcawtatccttttttatcccaatttttatgcgaagatcaattagccaagaaactggggataagtgagacatgccagtgtcccaggagaggtcttgccttgcgaagtccctatagactgagccaccagagcagggagatagcgacaccgaggatcccagggccacctgttgctcaccctcactgtccctgtgctccttgcagagtggccggagtttgtggccaactatcccccgtggtgggcgacccacaccctggactggctgcgctttggcaggaaggtgctggtggtgcacttcgaggacct

SEQ ID NO: 29199 - DNA, 599 bp, Chicken  19866894247849_1
  misc_feature (1)..(62): n is any nucleotide
nnnnnnnnnnnnnnnnnnnnnnnnnnnnnnnnnnnnnnnnnnnnnnnnnnnnnnnnnnnnnnattaatctcactgcagtgacccaggtcctaaagcaagggcagcctcaagctcaaaacccatgtcttgcaagtggacactacagatgaaacacatttcttatgctcattttgctgagcttgttagcgtagtcattgcttgtggtcattagttatcaactgtttaaatctggaactgaatgggatctctgaaacaaggctgtcctcagctattcccaagggtgcacttatttttattctmtctctccaaatcactcttcaagaaatacttccactcatcatgcctaaaatagaccacaactgagctcaaaacccaaggcaattaaacttatcttagctctcagtagttcatagatttaaaacactcagggtgaaaccttggaccatagaagccaatgatgaaattccatgggagctkggattccaacatacagcttctcactgtacagcctctatcattcaaggaacataaggatgacttcagggcacatcagtcaggcatgaaattgcacagaggaaccccactaaatgatttcgaaa

SEQ ID NO: 29200 - DNA, 600 bp, Chicken  19866894247849_2
gcttgttagcgtagtcattgcttgtggtcattagttatcaactgtttaaatctggaactgaatgggatctctgaaacaaggctgtcctcagctattcccaagggtgcacttatttttattctmtctctccaaatcactcttcaagaaatacttccactcatcatgcctaaaatagaccacaactgagctcaaaacccaaggcaattaaacttatcttagctctcagtagttcatagatttaaaacactcagggtgaaaccttggaccatagaagccaatgatgaaattccatgggagctkggattccaacatacagcttctcactgtacagcctctatcattcaaggaacataaggatgacttcagggcacatcagtcaggcatgaaattgcacagaggaaccccactaaatgatttcgaaattgcatgttacagaagataagaattcagggcatgaggtgtacgaatggatcagagctgcgtgcagccagatgaaaatgggcacagatttgtactaagaattttacacaaaaagatatcagtaattaaaatatagtcagtyattattaggtcatggtagagttaaaccaacacacagat

SEQ ID NO: 29201 - DNA, 600 bp, Chicken  19866894247849_3
ggaccatagaagccaatgatgaaattccatgggagctkggattccaacatacagcttctcactgtacagcctctatcattcaaggaacataaggatgacttcagggcacatcagtcaggcatgaaattgcacagaggaaccccactaaatgatttcgaaattgcatgttacagaagataagaattcagggcatgaggtgtacgaatggatcagagctgcgtgcagccagatgaaaatgggcacagatttgtactaagaattttacacaaaaagatatcagtaattaaaatatagtcagtyattattaggtcatggtagagttaaaccaacacacagattggtactcttccatgagctttgcaatgagaagtaaacagaacaaataaggcagcattagtcctctccacacagacacacagcacaatggattcataatggctttatgtcacactgtatttgaattttaacactcttttatatatctcagattgctgatgttaccttaacacattgtaaactcagtactttaaagctgcaatcttatttagagagccttttcccagttatgtgcagactgcatgttagttgttgaaatccagt

SEQ ID NO: 29202 - DNA, 600 bp, Chicken  19866894247849_4
aaagccacaatagtttaattgttttcttctgctttctattttactttaccacactattaagctataatgcttggggaaagtaaaaccctcttccatacacacagacacctccagctccatcactttctgaccaacacctggcccatgctttggaagtcttgcagctaatggaaagtttacctaatattttaatcaccaaagaagtcagctttcctctgctttctatcacagaaattttcctatccttttaataaacggggaggaaggactgagggtgtcctgcagttagcatgcaagaartctgctgctcccttttgtagcactgcctcacacaatgctaaagtgcctgtgggagaaggtgacagcagaggtgtgtcatgtatctcacttcaggcacaaaaggaaatgccacatcagcagcacaaatgactcttgacaccagcagactgttgtcctggagggtgctggaagacagccttgccacaggctgtgcctgcactccttccctgagccaccccatcttgctaacaagatgctccaaagcaactcctaagcacagatctctggagaaataagtcctttggtaaaacgttgccctct

SEQ ID NO: 29203 - DNA, 600 bp, Chicken  19866894247849_5
tgcctgtgggagaaggtgacagcagaggtgtgtcatgtatctcacttcaggcacaaaaggaaatgccacatcagcagcacaaatgactcttgacaccagcagactgttgtcctggagggtgctggaagacagccttgccacaggctgtgcctgcactccttccctgagccaccccatcttgctaacaagatgctccaaagcaactcctaagcacagatctctggagaaataagtcctttggtaaaacgttgccctctgaagtgcagcttcctgctgctttcagtacatgtgcctacagaracaaaagtgagacttcgatgtttggataaatatctggttgctgaaacataatgcacaagtgcttctccagagctctttattttcctttaagataaactttgttccagggctctttatttcccttccacataagctgtgcttgttttaatgacagtttaccaaaataagaatcctgtagataatctgctacaaagggtaatccagctttctggtaacaagcaataattttaggccaaccactcctgctgaaatccaggatgcactactctaggtttgggggactgtggaaagctttataaa

SEQ ID NO: 29204 - DNA, 600 bp, Chicken  19866894247853_1
ataagtaaatatccctaaggaaggaaaaacctgtaaaatacatcacataaaaaacctttccttttcaacaatactgcatctattttgttattgcttttcagtctaccgatgtctcctctaagcaacttctattcaaataagcggagaaagctgctgaatgatagttttacagttaaaaaatgaaaacaaaagattagtgtcagaaagataaaagtatttatataagattgttttgtattttagccttttgagtcacatagtcttttttctctctttcctatattgtgatccacattactycaaagtaatgtgcttcttttgcaaaagacatctttacttacagggatgcctgtagtttttaggcaagaaaaatggtatctggaaaccatgacatgaacwgctcctctcaagaaaacaaaaagtaaaacaagaaaccctatatctgagtatcttcttatgcatgtaactaattgtagggtttgcaacaatacatccacaaagttatccacactgtttaatgctagatatttaactttgtatgttatattgtagggttgaattccctgtacaaacagttaaggggaaaattcaccgatggta

SEQ ID NO: 29205 - DNA, 600 bp, Chicken  19866894247853_2
agtctaccgatgtctcctctaagcaacttctattcaaataagcggagaaagctgctgaatgatagttttacagttaaaaaatgaaaacaaaagattagtgtcagaaagataaaagtatttatataagattgttttgtattttagccttttgagtcacatagtcttttttctctctttcctatattgtgatccacattactycaaagtaatgtgcttcttttgcaaaagacatctttacttacagggatgcctgtagtttttaggcaagaaaaatggtatctggaaaccatgacatgaacwgctcctctcaagaaaacaaaaagtaaaacaagaaaccctatatctgagtatcttcttatgcatgtaactaattgtagggtttgcaacaatacatccacaaagttatccacactgtttaatgctagatatttaactttgtatgttatattgtagggttgaattccctgtacaaacagttaaggggaaaattcaccgatggtacactaggagctgacttgtcctattaactgaaatctaatgctttaacatgaagtatataaccccttgcttgtggcttgtttctacagaaaatgcctgtgg

SEQ ID NO: 29206 - DNA, 600 bp, Chicken  19866894247855_1
ttctaccaaaagatacataaatcgaatgctcacatcttggcatgtgcaaaagctggtatgagagactgacttacttcttagctttgtatacataggcacatctcttgcctaagtagaactctgtctcctggcgagcataaacaccttcaattttcagcagggcagtgtgctcccgctggtttcggaggccacgtttgtagccagcaaaagtggccttgcaccacaacctatggacacggaaaacatacacattaactcagttcaaaacattaaacctttgtaggaagggacctcaaagcycacccascccaccccgtgccatgggctggctgcctccaccagctcaggctgcccagggcccatccaatggccttgggcacctgcagggatggggcacccacagctctgggcagcactgccagcgcctcactgctttccragcaaagaatttcctccaaacacctaacagaaacctcccctctttcagtttaaaaccttccccccttgtcctatcgctattaggccgtgtaaaaagtcggtccccccctcctgcttataagctcccttcagggatgaactactacagccatttcaaggcag

SEQ ID NO: 29207 - DNA, 600 bp, Chicken  19866894247855_2
aaaagatacataaatcgaatgctcacatcttggcatgtgcaaaagctggtatgagagactgacttacttcttagctttgtatacataggcacatctcttgcctaagtagaactctgtctcctggcgagcataaacaccttcaattttcagcagggcagtgtgctcccgctggtttcggaggccacgtttgtagccagcaaaagtggccttgcaccacaacctatggacacggaaaacatacacattaactcagttcaaaacattaaacctttgtaggaagggacctcaaagcycacccascccaccccgtgccatgggctggctgcctccaccagctcaggctgcccagggcccatccaatggccttgggcacctgcagggatggggcacccacagctctgggcagcactgccagcgcctcactgctttccragcaaagaatttcctccaaacacctaacagaaacctcccctctttcagtttaaaaccttccccccttgtcctatcgctattaggccgtgtaaaaagtcggtccccccctcctgcttataagctcccttcagggatgaactactacagccatttcaaggcaggggtttc

SEQ ID NO: 29208 - DNA, 600 bp, Chicken  19866894247855_3
aacaccttcaattttcagcagggcagtgtgctcccgctggtttcggaggccacgtttgtagccagcaaaagtggccttgcaccacaacctatggacacggaaaacatacacattaactcagttcaaaacattaaacctttgtaggaagggacctcaaagcycacccascccaccccgtgccatgggctggctgcctccaccagctcaggctgcccagggcccatccaatggccttgggcacctgcagggatggggcacccacagctctgggcagcactgccagcgcctcactgctttccragcaaagaatttcctccaaacacctaacagaaacctcccctctttcagtttaaaaccttccccccttgtcctatcgctattaggccgtgtaaaaagtcggtccccccctcctgcttataagctcccttcagggatgaactactacagccatttcaaggcaggggtttcaaagagggccacataaccgtagtaacgtaacagatgcacacagtacccagtgggtgcaccgggcagagctgtgctgggaaaggagagcagccacagaaatcagatcgccgcccgcggcgtcaacgcggctct

SEQ ID NO: 29209 - DNA, 600 bp, Chicken  19866894247856_1
taatgtgtacatgctaaagattggtcaagatgaatactctcatccagaagtcctgtagatacatcttcacaatgggaagtattccactgaagctacctgtccatattaacatggcacagaatccacaaatgcttcactccacttctcaggcaagcagtggaagaattcttgtatctttcatctgttgctgcaaagtggtgcacaagtcaaaatcacaattgaaaagttaacagttgatcaaccttactataagcctactgatacaagatctgcagaaaggaaggactggattatttgggkgaagaaagcaaaaacattcagatcctacatccagaagaattgctgttaatgtttacaggtttcatgtatgttcttttgcctgagctgtgctttggggtgcattggctcttttctctggagtaaaacatgaaaaatcttcctttctttggtgatctccagagctttttaaaggtacggtagaacaatagtactctcacagtagttttaatgggacagaagtgttgctgtgttgtcttacagattttatcaaattgtgcttagaattcattcattttgatcactcatattatagacaaaatt

SEQ ID NO: 29210 - DNA, 600 bp, Chicken  19866894247856_2
ggacagaagtgttgctgtgttgtcttacagattttatcaaattgtgcttagaattcattcattttgatcactcatattatagacaaaattcttcttgtaggatgtttatatgtcccagagcattcataatgcactgtgttcagccatctacaagcatttaattacagaccgtctgtttcatgtaaaaaatatttgccaagactcttttggcagagtaaggagtgaacttcgtaaaggaaaaccaagttgctcatcggtggtggcagcaaaaatggggaaaagaactacccaagagtttcytgaagattccagttgatggatcctggcctgattgggtctcttatataaaccttgatggaatggtgctaaattttgcatggaaacctttatttttttccccacttcaacaactgtagctgaatgtacatttaaaaatggtatttgaaaattaaactcataagacatcattatacaagacatragcacaaacttagtacagaaagggagaaagcatccagtctttgaaaataatgtttgtgccttgtgcttttttaaaacataaacatagattatcagcacgctactaaagtgaggctgcat

SEQ ID NO: 29211 - DNA, 600 bp, Chicken  19866894247856_3
gtaaaaaatatttgccaagactcttttggcagagtaaggagtgaacttcgtaaaggaaaaccaagttgctcatcggtggtggcagcaaaaatggggaaaagaactacccaagagtttcytgaagattccagttgatggatcctggcctgattgggtctcttatataaaccttgatggaatggtgctaaattttgcatggaaacctttatttttttccccacttcaacaactgtagctgaatgtacatttaaaaatggtatttgaaaattaaactcataagacatcattatacaagacatragcacaaacttagtacagaaagggagaaagcatccagtctttgaaaataatgtttgtgccttgtgcttttttaaaacataaacatagattatcagcacgctactaaagtgaggctgcatctcaccttccacagtctcacagcataaaaatagcatatttgaacttaccagaagattgatgtttctttgctttcgtattactttttcctttgtattttatgaaaatgtatgccttgctgtccaatgttgaaaatatccactgaggtgattttaaagttaaacctgaagattcaagttggaa

SEQ ID NO: 29212 - DNA, 600 bp, Chicken  19866894247874_1
ttttgttttgtgcttttaaatatctggaaacatctggaaagtctgcttggagcactgcacactcagaggtctgacttctgttccaaaacatctgcggcacagaccgtccccaggcggagcacggtgttctctcatgggctcctgaaggcaccacctcactcactgtcaccacagcaggaggtgggaagtcagctcacagcctccactgagcttaaaggaaattacagggcagaagaggccaggagaaaagctgttagccaaggtcagggaggcaaacagagctgaagcagggagtgctgmgggaggtgtgggtttcatcctgctgacgaatgcctgcctctgctgactcagctctttccaggagagccaccagcagcgcrgctgtcagcagcacccagctgtgttagagccctccaaatgaagcgtgggctgagtgattgacctcaccctgacccactttatccatcctcactgctgctcagccrggcaaatctgcacagttgctatgaaataaatgtttccccgttgatgtcctcatagcagtttcccacctgggaaacaggaagggcacagacagggacctrttagatccccacccag

SEQ ID NO: 29213 - DNA, 600 bp, Chicken  19866894247874_2
ttccaaaacatctgcggcacagaccgtccccaggcggagcacggtgttctctcatgggctcctgaaggcaccacctcactcactgtcaccacagcaggaggtgggaagtcagctcacagcctccactgagcttaaaggaaattacagggcagaagaggccaggagaaaagctgttagccaaggtcagggaggcaaacagagctgaagcagggagtgctgmgggaggtgtgggtttcatcctgctgacgaatgcctgcctctgctgactcagctctttccaggagagccaccagcagcgcrgctgtcagcagcacccagctgtgttagagccctccaaatgaagcgtgggctgagtgattgacctcaccctgacccactttatccatcctcactgctgctcagccrggcaaatctgcacagttgctatgaaataaatgtttccccgttgatgtcctcatagcagtttcccacctgggaaacaggaagggcacagacagggacctrttagatccccacccaggaatgctcagrgcctcaggcctcactgactctcccatttgtcacacctttgaatcactgcaaaggaaagcaccccttggg

SEQ ID NO: 29214 - DNA, 600 bp, Chicken  19866894247874_3
aagtcagctcacagcctccactgagcttaaaggaaattacagggcagaagaggccaggagaaaagctgttagccaaggtcagggaggcaaacagagctgaagcagggagtgctgmgggaggtgtgggtttcatcctgctgacgaatgcctgcctctgctgactcagctctttccaggagagccaccagcagcgcrgctgtcagcagcacccagctgtgttagagccctccaaatgaagcgtgggctgagtgattgacctcaccctgacccactttatccatcctcactgctgctcagccrggcaaatctgcacagttgctatgaaataaatgtttccccgttgatgtcctcatagcagtttcccacctgggaaacaggaagggcacagacagggacctrttagatccccacccaggaatgctcagrgcctcaggcctcactgactctcccatttgtcacacctttgaatcactgcaaaggaaagcaccccttgggtgcttccaaagcaggaaagaaagaaggatggggcccacctgcttgaggcagtccgagcatatacaggagccactgaggcaaccactggaggaaaaacccaagagg

SEQ ID NO: 29215 - DNA, 600 bp, Chicken  19866894247874_4
aagcagggagtgctgmgggaggtgtgggtttcatcctgctgacgaatgcctgcctctgctgactcagctctttccaggagagccaccagcagcgcrgctgtcagcagcacccagctgtgttagagccctccaaatgaagcgtgggctgagtgattgacctcaccctgacccactttatccatcctcactgctgctcagccrggcaaatctgcacagttgctatgaaataaatgtttccccgttgatgtcctcatagcagtttcccacctgggaaacaggaagggcacagacagggacctrttagatccccacccaggaatgctcagrgcctcaggcctcactgactctcccatttgtcacacctttgaatcactgcaaaggaaagcaccccttgggtgcttccaaagcaggaaagaaagaaggatggggcccacctgcttgaggcagtccgagcatatacaggagccactgaggcaaccactggaggaaaaacccaagaggsaaactagggggaaatgtgatctcagtggatattccagcgcccatttcccatagggtctatatttaaacctgctccttcctctgcccccacaggtgggg

SEQ ID NO: 29216 - DNA, 600 bp, Chicken  19866894247874_5
gtttcatcctgctgacgaatgcctgcctctgctgactcagctctttccaggagagccaccagcagcgcrgctgtcagcagcacccagctgtgttagagccctccaaatgaagcgtgggctgagtgattgacctcaccctgacccactttatccatcctcactgctgctcagccrggcaaatctgcacagttgctatgaaataaatgtttccccgttgatgtcctcatagcagtttcccacctgggaaacaggaagggcacagacagggacctrttagatccccacccaggaatgctcagrgcctcaggcctcactgactctcccatttgtcacacctttgaatcactgcaaaggaaagcaccccttgggtgcttccaaagcaggaaagaaagaaggatggggcccacctgcttgaggcagtccgagcatatacaggagccactgaggcaaccactggaggaaaaacccaagaggsaaactagggggaaatgtgatctcagtggatattccagcgcccatttcccatagggtctatatttaaacctgctccttcctctgcccccacaggtggggaccagctgggagaggggctgctgccac

SEQ ID NO: 29217 - DNA, 532 bp, Chicken  19866894247874_6
gcaaatctgcacagttgctatgaaataaatgtttccccgttgatgtcctcatagcagtttcccacctgggaaacaggaagggcacagacagggacctrttagatccccacccaggaatgctcagrgcctcaggcctcactgactctcccatttgtcacacctttgaatcactgcaaaggaaagcaccccttgggtgcttccaaagcaggaaagaaagaaggatggggcccacctgcttgaggcagtccgagcatatacaggagccactgaggcaaccactggaggaaaaacccaagaggsaaactagggggaaatgtgatctcagtggatattccagcgcccatttcccatagggtctatatttaaacctgctccttcctctgcccccacaggtggggaccagctgggagaggggctgctgccacctgcttcccctcaaacagctttccaaaaaatactgaaacatacagttgtgctgggcttaaattttccaaaaacaaaacaataccccccccccccacacacacatttt

SEQ ID NO: 29218 - DNA, 516 bp, Chicken  19866894247878_1
ctgcaggaaaaataatctccttaagaaaaatgcatatagttactggaaggtgagcaattctaatttatttgtccttgaccatcctactcctgctttttagccccactttacagccaatactttttcattttttttatcataatgttaataaatatgcaaaagattgatggattggactcctacttccatgtttttttttcagtttttttttcagtcttgtgtctggcaaatagttctgcccctttaaaaccactttcttgtgtggtatctatgaatgtacaacaccatactggtacagastgcagaaaaaaataagttacaggaaagatgacattaagtgctttgtcttcacttggaacttatcttaaaactattgacattaataaagattttcggttgctgactttgttggattttgtctctatagtccagctttgcaatatgctgatactatctccttgttaagggtagtattgagagcatttctaggcattgcgtggtaggatttggtgccaa

SEQ ID NO: 29219 - DNA, 600 bp, Chicken  19866894247881_1
ctggacctccctggattattataaagtatcccctgcaggatagcgttcttggatgaagtacagaaaaaggccgctctgcataataaaaacaatgtgaaggagtcattcattagattggcatgttgttgtttttgctgcttgaatggcagatttactggtcttctctgtgtaggtatttattgcttagatgggggaggaaactgaatcataaacatctcagtgactttgaataaaagctaaagaagtgctgaggtcattctagcagcttgtgtttgtggagtgcaacagaaggtgttcagmagaagataaatacttgcttcagccagctacaccagaaatctgctcratccacatattagttattagttgtttctacaaatgacagaacggaaagcagtgatcttctcagtmagttactctgygtgcaatttgctcttcccaggaagatctctctggttccaatgttgaaaaaaatgtggcagtggccaaagtgcaattgagacatcccaacagccagcccactagccagccaaaaatagtattttatataattctcaacctgagaagcatagaaatatctatattaagttgcttatccac

SEQ ID NO: 29220 - DNA, 600 bp, Chicken  19866894247881_2
tcttggatgaagtacagaaaaaggccgctctgcataataaaaacaatgtgaaggagtcattcattagattggcatgttgttgtttttgctgcttgaatggcagatttactggtcttctctgtgtaggtatttattgcttagatgggggaggaaactgaatcataaacatctcagtgactttgaataaaagctaaagaagtgctgaggtcattctagcagcttgtgtttgtggagtgcaacagaaggtgttcagmagaagataaatacttgcttcagccagctacaccagaaatctgctcratccacatattagttattagttgtttctacaaatgacagaacggaaagcagtgatcttctcagtmagttactctgygtgcaatttgctcttcccaggaagatctctctggttccaatgttgaaaaaaatgtggcagtggccaaagtgcaattgagacatcccaacagccagcccactagccagccaaaaatagtattttatataattctcaacctgagaagcatagaaatatctatattaagttgcttatccaccacgaatagttgagyaggaggtggaattaggacaggagtgagaatg

SEQ ID NO: 29221 - DNA, 600 bp, Chicken  19866894247881_3
agattggcatgttgttgtttttgctgcttgaatggcagatttactggtcttctctgtgtaggtatttattgcttagatgggggaggaaactgaatcataaacatctcagtgactttgaataaaagctaaagaagtgctgaggtcattctagcagcttgtgtttgtggagtgcaacagaaggtgttcagmagaagataaatacttgcttcagccagctacaccagaaatctgctcratccacatattagttattagttgtttctacaaatgacagaacggaaagcagtgatcttctcagtmagttactctgygtgcaatttgctcttcccaggaagatctctctggttccaatgttgaaaaaaatgtggcagtggccaaagtgcaattgagacatcccaacagccagcccactagccagccaaaaatagtattttatataattctcaacctgagaagcatagaaatatctatattaagttgcttatccaccacgaatagttgagyaggaggtggaattaggacaggagtgagaatgaaacccaacaaagaagctgttcttcaggcttcggagtgctttcctggggcactcttctcataaaa

SEQ ID NO: 29222 - DNA, 600 bp, Chicken  19866894247881_4
ttgttgtttttgctgcttgaatggcagatttactggtcttctctgtgtaggtatttattgcttagatgggggaggaaactgaatcataaacatctcagtgactttgaataaaagctaaagaagtgctgaggtcattctagcagcttgtgtttgtggagtgcaacagaaggtgttcagmagaagataaatacttgcttcagccagctacaccagaaatctgctcratccacatattagttattagttgtttctacaaatgacagaacggaaagcagtgatcttctcagtmagttactctgygtgcaatttgctcttcccaggaagatctctctggttccaatgttgaaaaaaatgtggcagtggccaaagtgcaattgagacatcccaacagccagcccactagccagccaaaaatagtattttatataattctcaacctgagaagcatagaaatatctatattaagttgcttatccaccacgaatagttgagyaggaggtggaattaggacaggagtgagaatgaaacccaacaaagaagctgttcttcaggcttcggagtgctttcctggggcactcttctcataaaacatgagatacc

SEQ ID NO: 29223 - DNA, 581 bp, Chicken  19866894247881_5
gcttcagccagctacaccagaaatctgctcratccacatattagttattagttgtttctacaaatgacagaacggaaagcagtgatcttctcagtmagttactctgygtgcaatttgctcttcccaggaagatctctctggttccaatgttgaaaaaaatgtggcagtggccaaagtgcaattgagacatcccaacagccagcccactagccagccaaaaatagtattttatataattctcaacctgagaagcatagaaatatctatattaagttgcttatccaccacgaatagttgagyaggaggtggaattaggacaggagtgagaatgaaacccaacaaagaagctgttcttcaggcttcggagtgctttcctggggcactcttctcataaaacatgagatacctttgtgcaaaaggtgaagcatagaccaaaaactgatgtagaaagtcaatttctgtacaatccactgtttttgtttcaaggttcttctgtatcttaccagaagtcaagaataatcttcagttgcgctgtccaagggttgtaacatattatttcaagtcatcttaaaatccagcag

SEQ ID NO: 29224 - DNA, 599 bp, Chicken  19866894247884_1
  misc_feature (1)..(45): n is any nucleotide
nnnnnnnnnnnnnnnnnnnnnnnnnnnnnnnnnnnnnnnnnnnnncaacatgcaggactgaaatgtacagcttctgcaggattaaatcaatgtgttttgctatccttgtttcagtaacgtgctcccactaatgcaggaaggacagctgtgctatttttatgtaactcttcttattttattttttctctaatactagaattctttatgacgctactttctattctggttcgctcttctgcttcttctgcagaagagtcctttacatgtaaataagtatgacacacaacagctcaccaagamcaccagtaagaaatggtggttttcttatgactgaaaagcccacattaaaaacaataatgtttggtattctttatctaaagtgtagagaaattatgcaccttgaggtattatacaaaaaagcccagagtcatattgctactatatttagaaaatacctgagcatgaggaaggctgtgtttagcttcacagaccctaattctctgagctttgatgattatatttgagcttgtagtgatgtcatgagtaaagagaggaggcagctgggggacaagactcatgttatcacaggagccaagagt

SEQ ID NO: 29225 - DNA, 600 bp, Chicken  19866894247887_1
tgatttagcaggtgttttttaatggaaatattctaaatagatgcatgactcaagcctgttgcttccttggaaacaattgcctacaaaagcagcctgttcccatcagctcacaaagaagatgaccatccccagagatcaaagccagacaagtgtaccacctggccagaaaagctttgaccacctgagcgatccccatggcaataaggcatggtgaccgaaggaccatgggaagctggtaggttgggaggactcattgaaatggcagcagctaaagagtaatttgctagtgagggggagggygtaggaaaagggggaagatgtcacaggatcccgacagctgttcctccgtatgtacaaggaagcagagcgagggggcagcaagctgaaacttgcagggtgctgggaatgcgtcagccctattcctggagaaaagaaatcacgtactggtggcaccctgtcgacagatccccagagcactggaggccacaaggttcctctctcattctttgaggcccccgaaagcagtgtcaaggtgaagcccaactctccagcagttgctggagacttcacctctgtcagattctgtcccaagccagattt

SEQ ID NO: 29226 - DNA, 600 bp, Chicken  19866894247889_1
taggagatagcaagctccagcctagtgtgtgagtctgccccttggcaatcataagtttgcactggaggctggggccctcctaaacctcagttacatggtttatctgtacactatgaaaagtaaagctattatctagaaactcaagtatgaatgagggaataggaaatctaaataactaacaaatctaggtttggtcaaagatattccatatcacaacttcctctcttctcctgtgtttggatatatgatgcatgcattgcatgaagggaatataacaataagaaaaataaataaataaayaaataaataaataaataaaaccaaagaaacaaaaaatccttactctagaatatagacttttatcttggagattcatatatatagataaatatttatttatttaacaatttccgcctgaaagacaaacaggaattcaggacttctctcagaaggtactaattaaatactttattatctgtgttgtttgaaatttgtttgaaatttgttttcacggatgtctgtgaattaagttttaggacaagaggagatggtttcaaactaaaagagaggagattttgattggatataataaaaaagttt

SEQ ID NO: 29227 - DNA, 599 bp, Chicken  19866894247894_1
  misc_feature (1)..(109): n is any nucleotide
nnnnnnnnnnnnnnnnnnnnnnnnnnnnnnnnnnnnnnnnnnnnnnnnnnnnnnnnnnnnnnnnnnnnnnnnnnnnnnnnnnnnnnnnnnnnnnnnnnnnnnnnnnnnntctcatgcttctttaaagaaggtctcagcacctagagttgacaactggagtttttgcctacaagaaatttccatcttcctcttcgaaacacagcctgaatgtaaagctagtttcttacgcttcaggactctgagtcatgcctgactcatgtggttcttgcaaacacagctgggagctggcatgggtgaggkaaactgaggcagggtgagtgtgggcagccccagtgcagcagctcgagctgctgctttgtctgttgtctgtccaactggaagccacagcttaaacccaaggttaactgctgcctctggagcgtggtgcgggcctgaagcagctctgtggcagcaaggctgcctccacatccctgacagcatgactgctcygtaaatcttagtaagagatctcacggcagcaggcgtcccccagagactgggaggggaaggaaatgatatatgagagaaacctgtctccagagtcctgccatctatttctc

SEQ ID NO: 29228 - DNA, 600 bp, Chicken  19866894247894_2
cttcgaaacacagcctgaatgtaaagctagtttcttacgcttcaggactctgagtcatgcctgactcatgtggttcttgcaaacacagctgggagctggcatgggtgaggkaaactgaggcagggtgagtgtgggcagccccagtgcagcagctcgagctgctgctttgtctgttgtctgtccaactggaagccacagcttaaacccaaggttaactgctgcctctggagcgtggtgcgggcctgaagcagctctgtggcagcaaggctgcctccacatccctgacagcatgactgctcygtaaatcttagtaagagatctcacggcagcaggcgtcccccagagactgggaggggaaggaaatgatatatgagagaaacctgtctccagagtcctgccatctatttctcaactcttaagaaaatgttgccactgagctgtctccatttatctcaagtaaatatggagagaaacttttaaaacgagaagcctttttattttttttcccaacagaggttatttttaacatcaagagctttttctttcctcagcacattttccagttgtgctgttatttatttcagaaagcaccttctcatc

SEQ ID NO: 29229 - DNA, 600 bp, Chicken  19866894247900_1
ccttaacagttggtttaaaaactgaacaatgaacatgctgattaacttgccacagaagacacacacacattgaatctccactggttatctggcaacgttgtgaatattttcttcaaattgatttcatgactaaacactgtctggaatagcaaccagtccttcagagaaaaacgtaatttttaggacttcagtcctcttattgttcacattgttccccgaaattctgttcagcttttggccaacattattcatgaggaaaaaaaaaaaaaatgcttttttggatgatgctgagatcttaaraagtcctgctgaactttttggttttattatattttttttaatttgaaaattattttaatttgtaattcagaactcaaatcacctgatcaatttttattttcagttttcccaaattcaagcagcgttattcagtgcaagatgatacattttgactaatcagtcattaagagcatcatgcccaacaggaagaaatagaacgaaygttcaaaatgttcaatgacctgaaaaaatctattttgcaccagctctgttcatcgagctttaaaaccagggctggcagtgggaggatcccaaaggaat

SEQ ID NO: 29230 - DNA, 600 bp, Chicken  19866894247900_10
acactgtcatctcagggaaatttgagagggacaaggttatttaaaaaaagaaaaaaagaaaaaacaacaaacagaagaggttgaaagataaattrcagttgctgatgggacctccaaagmtttacargcttttctccttaccatttacctcctcagttctaccttcttttgccaaaaatgttactttgctggtctacatttttwctgttgtgggcaggatgtctataaactgatcttataagtcctggtagaatatccatattttatcctgtaagtatttctaagtttatataacaccartgcagttcaccttggcagatggacctccctcaacttaaaggttgtgcccctgggcttctgatcactgaacacatgacaaatctttgaagagaaatggagctgatgacaysagatggcacactgaggagggctttaagaggagctgtgcacactgggctgggtgcactctcctcttttttgaatcattggctgacttgaacaacatttcaggctaacctgagcaaacatttctcctcctcgttgcctcaaaatgaatcagaaacatcaaactagaagaggaatccatttcaggttgaaata

SEQ ID NO: 29231 - DNA, 600 bp, Chicken  19866894247900_11
acctccaaagmtttacargcttttctccttaccatttacctcctcagttctaccttcttttgccaaaaatgttactttgctggtctacatttttwctgttgtgggcaggatgtctataaactgatcttataagtcctggtagaatatccatattttatcctgtaagtatttctaagtttatataacaccagtgcagttcaccttggcagatggacctccctcaacttaaaggttgtgcccctgggcttctgatcactgaacacatgacaaatctttgaagagaaatggagctgatgacaysagatggcacactgaggagggctttaagaggagctgtgcacactgggctgggtgcactctcctcttttttgaatcattggctgacttgaacaacatttcaggctaacctgagcaaacatttctcctcctcgttgcctcaaaatgaatcagaaacatcaaactagaagaggaatccatttcaggttgaaatatatatatatatttcagttatttttctgccactgtttttgtttttaaccttcttaaaagggaacttgaattcaatttctgaattaaaagtttcttccaaatgaaaaatcc

SEQ ID NO: 29232 - DNA, 600 bp, Chicken  19866894247900_12
cctccaaagmtttacargcttttctccttaccatttacctcctcagttctaccttcttttgccaaaaatgttactttgctggtctacatttttwctgttgtgggcaggatgtctataaactgatcttataagtcctggtagaatatccatattttatcctgtaagtatttctaagtttatataacaccagtgcagttcaccttggcagatggacctccctcaacttaaaggttgtgcccctgggcttctgatcactgaacacatgacaaatctttgaagagaaatggagctgatgacaysagatggcacactgaggagggctttaagaggagctgtgcacactgggctgggtgcactctcctcttttttgaatcattggctgacttgaacaacatttcaggctaacctgagcaaacatttctcctcctcgttgcctcaaaatgaatcagaaacatcaaactagaagaggaatccatttcaggttgaaatatatatatatatttcagttatttttctgccactgtttttgtttttaaccttcttaaaagggaacttgaattcaatttctgaattaaaagtttcttccaaatgaaaaatcca

SEQ ID NO: 29233 - DNA, 600 bp, Chicken  19866894247900_2
ttcacattgttccccgaaattctgttcagcttttggccaacattattcatgaggaaaaaaaaaaaaaatgcttttttggatgatgctgagatcttaaraagtcctgctgaactttttggttttattatattttttttaatttgaaaattattttaatttgtaattcagaactcaaatcacctgatcaatttttattttcagttttcccaaattcaagcagcgttattcagtgcaagatgatacattttgactaatcagtcattaagagcatcatgcccaacaggaagaaatagaacgaaygttcaaaatgttcaatgacctgaaaaaatctattttgcaccagctctgttcatcgagctttaaaaccagggctggcagtgggaggatcccaaaggaatctcacccaattgaactgaattgaccattgtcttcttaaggggccagtcgtcttccaaacagattttttgcacatcactcccaatttaagaagcrtgcaaacatgcagctgatagcaatctttgactgaattgtctgtaggaaagaagcagaaaccttgctgytcttgatcagatrtattttcaaggctacagtgtattttcc

SEQ ID NO: 29234 - DNA, 600 bp, Chicken  19866894247900_3
tattttcagttttcccaaattcaagcagcgttattcagtgcaagatgatacattttgactaatcagtcattaagagcatcatgcccaacaggaagaaatagaacgaaygttcaaaatgttcaatgacctgaaaaaatctattttgcaccagctctgttcatcgagctttaaaaccagggctggcagtgggaggatcccaaaggaatctcacccaattgaactgaattgaccattgtcttcttaaggggccagtcgtcttccaaacagattttttgcacatcactcccaatttaagaagcrtgcaaacatgcagctgatagcaatctttgactgaattgtctgtaggaaagaagcagaaaccttgctgytcttgatcagatrtattttcaaggctacagtgtattttccaataactgtgcagaatttaacactgtcatctcagggaaatttgagagggacaaggttatttaaaaaaagaaaaaaagaaaaaacaacaaacagaagaggttgaaagataaattrcagttgctgatgggacctccaaagmtttacargcttttctccttaccatttacctcctcagttctaccttcttttgcc

SEQ ID NO: 29235 - DNA, 600 bp, Chicken  19866894247900_4
attaagagcatcatgcccaacaggaagaaatagaacgaaygttcaaaatgttcaatgacctgaaaaaatctattttgcaccagctctgttcatcgagctttaaaaccagggctggcagtgggaggatcccaaaggaatctcacccaattgaactgaattgaccattgtcttcttaaggggccagtcgtcttccaaacagattttttgcacatcactcccaatttaagaagcrtgcaaacatgcagctgatagcaatctttgactgaattgtctgtaggaaagaagcagaaaccttgctgytcttgatcagatrtattttcaaggctacagtgtattttccaataactgtgcagaatttaacactgtcatctcagggaaatttgagagggacaaggttatttaaaaaaagaaaaaaagaaaaaacaacaaacagaagaggttgaaagataaattrcagttgctgatgggacctccaaagmtttacargcttttctccttaccatttacctcctcagttctaccttcttttgccaaaaatgttactttgctggtctacatttttwctgttgtgggcaggatgtctataaactgatcttataa

SEQ ID NO: 29236 - DNA, 600 bp, Chicken  19866894247900_5
tgcccaacaggaagaaatagaacgaaygttcaaaatgttcaatgacctgaaaaaatctattttgcaccagctctgttcatcgagctttaaaaccagggctggcagtgggaggatcccaaaggaatctcacccaattgaactgaattgaccattgtcttcttaaggggccagtcgtcttccaaacagattttttgcacatcactcccaatttaagaagcrtgcaaacatgcagctgatagcaatctttgactgaattgtctgtaggaaagaagcagaaaccttgctgytcttgatcagatrtattttcaaggctacagtgtattttccaataactgtgcagaatttaacactgtcatctcagggaaatttgagagggacaaggttatttaaaaaaagaaaaaaagaaaaaacaacaaacagaagaggttgaaagataaattrcagttgctgatgggacctccaaagmtttacargcttttctccttaccatttacctcctcagttctaccttcttttgccaaaaatgttactttgctggtctacatttttwctgttgtgggcaggatgtctataaactgatcttataagtcctggtagaat

SEQ ID NO: 29237 - DNA, 600 bp, Chicken  19866894247900_6
gaattgaccattgtcttcttaaggggccagtcgtcttccaaacagattttttgcacatcactcccaatttaagaagcrtgcaaacatgcagctgatagcaatctttgactgaattgtctgtaggaaagaagcagaaaccttgctgytcttgatcagatrtattttcaaggctacagtgtattttccaataactgtgcagaatttaacactgtcatctcagggaaatttgagagggacaaggttatttaaaaaaagaaaaaaagaaaaaacaacaaacagaagaggttgaaagataaattrcagttgctgatgggacctccaaagmtttacargcttttctccttaccatttacctcctcagttctaccttcttttgccaaaaatgttactttgctggtctacatttttwctgttgtgggcaggatgtctataaactgatcttataagtcctggtagaatatccatattttatcctgtaagtatttctaagtttatataacaccagtgcagttcaccttggcagatggacctccctcaacttaaaggttgtgcccctgggcttctgatcactgaacacatgacaaatctttgaagagaaat

SEQ ID NO: 29238 - DNA, 600 bp, Chicken  19866894247900_7
gccagtcgtcttccaaacagattttttgcacatcactcccaatttaagaagcrtgcaaacatgcagctgatagcaatctttgactgaattgtctgtaggaaagaagcagaaaccttgctgytcttgatcagatrtattttcaaggctacagtgtattttccaataactgtgcagaatttaacactgtcatctcagggaaatttgagagggacaaggttatttaaaaaaagaaaaaaagaaaaaacaacaaacagaagaggttgaaagataaattrcagttgctgatgggacctccaaagmtttacargcttttctccttaccatttacctcctcagttctaccttcttttgccaaaaatgttactttgctggtctacatttttwctgttgtgggcaggatgtctataaactgatcttataagtcctggtagaatatccatattttatcctgtaagtatttctaagtttatataacaccagtgcagttcaccttggcagatggacctccctcaacttaaaggttgtgcccctgggcttctgatcactgaacacatgacaaatctttgaagagaaatggagctgatgacaysagatggcaca

SEQ ID NO: 29239 - DNA, 600 bp, Chicken  19866894247900_8
gtcttccaaacagattttttgcacatcactcccaatttaagaagcrtgcaaacatgcagctgatagcaatctttgactgaattgtctgtaggaaagaagcagaaaccttgctgytcttgatcagatrtattttcaaggctacagtgtattttccaataactgtgcagaatttaacactgtcatctcagggaaatttgagagggacaaggttatttaaaaaaagaaaaaaagaaaaaacaacaaacagaagaggttgaaagataaattrcagttgctgatgggacctccaaagmtttacargcttttctccttaccatttacctcctcagttctaccttcttttgccaaaaatgttactttgctggtctacatttttwctgttgtgggcaggatgtctataaactgatcttataagtcctggtagaatatccatattttatcctgtaagtatttctaagtttatataacaccagtgcagttcaccttggcagatggacctccctcaacttaaaggttgtgcccctgggcttctgatcactgaacacatgacaaatctttgaagagaaatggagctgatgacaysagatggcacactgagga

SEQ ID NO: 29240 - DNA, 600 bp, Chicken  19866894247900_9
tgaattgtctgtaggaaagaagcagaaaccttgctgytcttgatcagatrtattttcaaggctacagtgtattttccaataactgtgcagaatttaacactgtcatctcagggaaatttgagagggacaaggttatttaaaaaaagaaaaaaagaaaaaacaacaaacagaagaggttgaaagataaattrcagttgctgatgggacctccaaagmtttacargcttttctccttaccatttacctcctcagttctaccttcttttgccaaaaatgttactttgctggtctacatttttwctgttgtgggcaggatgtctataaactgatcttataagtcctggtagaatatccatattttatcctgtaagtatttctaagtttatataacaccagtgcagttcaccttggcagatggacctccctcaacttaaaggttgtgcccctgggcttctgatcactgaacacatgacaaatctttgaagagaaatggagctgatgacaysagatggcacactgaggagggctttaagaggagctgtgcacactgggctgggtgcactctcctcttttttgaatcattggctgacttgaacaaca

SEQ ID NO: 29241 - DNA, 599 bp, Chicken  19866894247905_1
  misc_feature (1)..(131): n is any nucleotide
nnnnnnnnnnnnnnnnnnnnnnnnnnnnnnnnnnnnnnnnnnnnnnnnnnnnnnnnnnnnnnnnnnnnnnnnnnnnnnnnnnnnnnnnnnnnnnnnnnnnnnnnnnnnnnnnnnnnnnnnnnnnnnnnnnnaatggtttgggttggaagggtcctttaaggtcatccagttccaacctcctgctataggcagggacgcctccctctataccaggttgctgaaagccccatccagcctggccttgaatgcttccagggaagcatccacatctctctgggcaacctgttccagtgtctcacyaccctcacagtaaagaattttgttctaatatctagtctaaatctaccctcttctggtttaaagccatttctcccccatcttgtcgctacctgtccttataaaattccctccccagctttcctgtaggtccccttcaggtactggaaggctgctatgtgttccccccagagccttctccaggctgaagcgccccagccctctcagcctgtcctctttggggaggtgctccaaccctctgatcatcttcatggccctcctctggacccactccaacagctccatgtccagttctgaagccc

SEQ ID NO: 29242 - DNA, 600 bp, Chicken  19866894247905_2
agctccatgtccagttctgaagcccccaattcaagaaggacagagtactccagatggggtctcatgagaacagagtagaggggcagagtcacctccctcgacttgctggtcacacttctcttgatgcaacccatctgttgcatctgatgcaactgttggccttctgggctgcaagtacacactgccagctcatgttgagtctttcatcaaccagcactcccaattccttctcctcagggctgctctcaagccattctctgcccaagctgtaactgtgcttgggattgcaacccaggtgcrggaccttgcactcggccttgctgaacttcatgagggtggcatgggcccacctctcaagcctgtccaggtccctctggatagcatcccttccatctagcgtgttaactgcaccactcagcttggtgttgtctgcaaacttgatgagggtcttattgtccatgttgtctgcaaaggtgttaaataacactggttccagcaccattccctgaggaacaccactcgtcaatgggctccacttggacactgagccattgaccacatctctctgagcgtgaccatccagccagttctttatcgagt

SEQ ID NO: 29243 - DNA, 455 bp, Chicken  19866894247905_3
tccaggtccctctggatagcatcccttccatctagcgtgttaactgcaccactcagcttggtgttgtctgcaaacttgatgagggtcttattgtccatgttgtctgcaaaggtgttaaataacactggttccagcaccattccctgaggaacaccactcgtcaatgggctccacttggacactgagccattgaccacatctctctgagcgtgaccatccagccagttctttatcgagtgaatggtccatccatcaaatctacttttctccaatttggtgactaggatgtcatgcaagacrgtgtcaaatgctttgctcaagtccaggtagatgatgtcattgctcttcctttatccacagatgctttaactccatcatagaaggccacaaagtttgtcaggcctggcttgcccttggtgaagcaggttcaagaagcagtgagattctgcaaaaag

SEQ ID NO: 29244 - DNA, 600 bp, Chicken  19866894247915_1
gcgggttcggccttcagagaggtggtggctgagggctgatggatctcacaccacgacccgccgtggtggctttgttggggatttggtgaagtctgtgagctcggtgcacggagcaccggtcgtggggtcctttccattggaaaaagctggagaatgggctggttttaggggacgatgaagtgagccaggtggtgcaagcgcatcctaccctggcaccatcccactgatgggcacctggatgcatccagcagagcccatcctgcaccactccctccaaaaggccacgtccaacagcaccgrcccccagcccccgctgccccacatcccctcttgctttccaggctcgccgacatcccttcctgccgcagtgacaagtcataacatatttgggagcagctgcaggcggcggggagatgcttggcttgctccccgctcctggacgaggaatgcagagcagacctctctcctccgacacccgggatttccgacgtgccttctcggcagagatttgggatggtgacagctgctcggccacggtggggccgcggcactgcctccccttcggccccagcactgcgagccggtggctttgcagggcca

SEQ ID NO: 29245 - DNA, 599 bp, Chicken  19866894247927_1
  misc_feature (1)..(9): n is any nucleotide
nnnnnnnnntaacaacaaataccctctcaattcttcctcttctccaaagtaactggtccatacatgagctcagtttttgtggtaacccttagggtgagtgcaaacatcagagctctcatgaaaagcattcgatatactttatggtcagagagggggaagagaagtaagcctggagcgcctgcagacctgcaatacctaggaaagtgttcccagttccctctagacctgtaggcagactgggtttctccaagctcttcaaaacttgtctgtgaaggattacttcccagaatatgtcctcamraagctgcctggccaggctgggatgaaggtggcagtggagcaggagtgatcccctttggtgagtcctgattcaatgtcagtctgaaatggaaagtattgggctttcagactatggtggtggaagtttaatcttccagggctaaatctacacatcagagagcagagcatgcctctacaggatttgtgctgctaccctgcgatgagaggctgggaaagagtttggaaatatccatctaatgcctggtaaatgagtgtctacattgaacaaagcaaacattgccacacttgccagttttgcc

SEQ ID NO: 29246 - DNA, 599 bp, Chicken  19866894247927_2
  misc_feature (1)..(8): n is any nucleotide
nnnnnnnntaacaacaaataccctctcaattcttcctcttctccaaagtaactggtccatacatgagctcagtttttgtggtaacccttagggtgagtgcaaacatcagagctctcatgaaaagcattcgatatactttatggtcagagagggggaagagaagtaagcctggagcgcctgcagacctgcaatacctaggaaagtgttcccagttccctctagacctgtaggcagactgggtttctccaagctcttcaaaacttgtctgtgaaggattacttcccagaatatgtcctcamraagctgcctggccaggctgggatgaaggtggcagtggagcaggagtgatcccctttggtgagtcctgattcaatgtcagtctgaaatggaaagtattgggctttcagactatggtggtggaagtttaatcttccagggctaaatctacacatcagagagcagagcatgcctctacaggatttgtgctgctaccctgcgatgagaggctgggaaagagtttggaaatatccatctaatgcctggtaaatgagtgtctacattgaacaaagcaaacattgccacacttgccagttttgcca

SEQ ID NO: 29247 - DNA, 600 bp, Chicken  19866894247931_1
aaccaggattcttttttcataagaaagagaaaagcacgataaagagcagaatcaaaatacagcagagaaagacagattttgattgtcatgtttcctaagagcggtatattttaagtattttaagaagtggggatcttaccttttgtatcttttgtgttcagaaacaaaagcatcagcctgtctttggatgtcacgtttctcactaccactttgcagatggcagagaaccaaaagatgtacagtctgagataaatccacgtggtgctacattatggtgctttatttatgcatgcatccagrcaaagtctgaccattttgtgaagaaaagcagatggaaagagagatttttagtaatggcagtggtgggtctgagaaatacttgctaaagatacttcctctaaaaatcagtttattatccaagagacctactgatttgcttgctggttatattctagtaaatatttaacttgctgcataagaaacttgggtctgtgtgatttgtaagcaggtgcagcccttactttggcatttattggggccctttgttctggacaaagcctaactaaattagtgggtgaggtaaagcatgatgacttgctg

SEQ ID NO: 29248 - DNA, 599 bp, Chicken  19866894247937_1
  misc_feature (1)..(260): n is any nucleotide
nnnnnnnnnnnnnnnnnnnnnnnnnnnnnnnnnnnnnnnnnnnnnnnnnnnnnnnnnnnnnnnnnnnnnnnnnnnnnnnnnnnnnnnnnnnnnnnnnnnnnnnnnnnnnnnnnnnnnnnnnnnnnnnnnnnnnnnnnnnnnnnnnnnnnnnnnnnnnnnnnnnnnnnnnnnnnnnnnnnnnnnnnnnnnnnnnnnnnnnnnnnnnnnnnnnnnnnnnnnnnnnnnnnnnnnnnnnnnnnnnnnnnnnnnnnnnnnnnnnnttaatgagtttaaagagaacccacaaaaataaggcacaaraattgcattttcatcatacatgaatggttataaataaattacttgaggtatatgttaaaaaaaaaaaaaaaaagtgtgtgagaacaacatgaacaacatgaaaaagagatcatgtttcaagaaactagcatctgtgggcaattctgagtctgatctgcaaagcaggactttggactctagcccttgagagtgcattcaagttcattaaytgaacacatgtctaattttagtgatatgtaaacacccttctgacactaaatttaagtatatgcatatttttgtttattgcgaatggattt

SEQ ID NO: 29249 - DNA, 599 bp, Chicken  19866894247937_2
  misc_feature (1)..(51): n is any nucleotide
nnnnnnnnnnnnnnnnnnnnnnnnnnnnnnnnnnnnnnnnnnnnnnnnnnnttaatgagtttaaagagaacccacaaaaataaggcacaaraattgcattttcatcatacatgaatggttataaataaattacttgaggtatatgttaaaaaaaaaaaaaaaaagtgtgtgagaacaacatgaacaacatgaaaaagagatcatgtttcaagaaactagcatctgtgggcaattctgagtctgatctgcaaagcaggactttggactctagcccttgagagtgcattcaagttcattaaytgaacacatgtctaattttagtgatatgtaaacacccttctgacactaaatttaagtatatgcatatttttgtttattgcgaatggatttctgaaggaagacccaagaagatgacaaacggctactatgatggctctcagcctggaaatcaaatgtttattttacttcggagcattttgcaagtggttaccaaatggctctctctttgactgcaatctgtatttaattcctcaaaattgagactaggatcccttgctatgtatttaatttatttttcatggcagcacttttatgtttaa

SEQ ID NO: 29250 - DNA, 600 bp, Chicken  19866894247937_3
atgctaatgattttgtttttagtcattccaaatctcagaagaaaaaaaaaggagaaaactgcttcagatgtccatcttagataaaaaaaatctactgtatttttttttgttctgacattgcatgttgcactagtatccttagtatcagaatatcagcattatgaaaatatggaattgagagtagtgagcatattgatgggtcctaacacagctaaatagctcatttaatcatgacttgagataacactgtgtcaaatgctgtaccatcccattagattctgaagctgggtctccagagaygaaaaagtaatgcatatattagtctattctgatttattttgtccttggtgaaatgacaccaaatgcttttcttgaaaaagcaaataaaaatatgtaaacaatcttaattcttaactacagttaacatatttctggggagattatatttcttcattacatttttcataaccgaagaaaagtagcaacaattttagaaactggcaaggaagttgatcaaaagtcatccacttgtacacagctgtgattatttctccctccttggatcatctcataccagaagtagactcgttctcatctgac

SEQ ID NO: 29251 - DNA, 600 bp, Chicken  19866894247938_1
tttgctaaatcttttaacaaacccgcagaaaccatccccagttccaaaatgctacccagtctgagtcttgtcttacagaccatgtcacacaaacccctccaattgccaagcagcatcttaggaaagaccatttccaaaagcaatcagatgctagtcccgttgaaccattttggatagcgacatctaaatctacaaatccctaaacaaaaccttctggcattagtatttacctgattgtgccagaatagtactggtgagttgagcatttctgaccatagctgacacattttctatggagcraaatgctgtctctcagctcagaccagmtcaggctttgtagcttgaaagcaacaagctgaattttgcctagaagtcaatagatagtggccactgtggttcatcagggattacagtctgcagtgcctccatttcctgtgtggtcctgcagtgaaagccctataggtgcaaatatcttagctccaaaggcaaaggcagatatgatcttgatcagctcatatgcttatgaaaatatgtcttcctgctaagcaaaagtagtgaggagagctctcagtagtcactgttacctgaatacctaataca

SEQ ID NO: 29252 - DNA, 600 bp, Chicken  19866894247938_2
gaaaccatccccagttccaaaatgctacccagtctgagtcttgtcttacagaccatgtcacacaaacccctccaattgccaagcagcatcttaggaaagaccatttccaaaagcaatcagatgctagtcccgttgaaccattttggatagcgacatctaaatctacaaatccctaaacaaaaccttctggcattagtatttacctgattgtgccagaatagtactggtgagttgagcatttctgaccatagctgacacattttctatggagcraaatgctgtctctcagctcagaccagmtcaggctttgtagcttgaaagcaacaagctgaattttgcctagaagtcaatagatagtggccactgtggttcatcagggattacagtctgcagtgcctccatttcctgtgtggtcctgcagtgaaagccctataggtgcaaatatcttagctccaaaggcaaaggcagatatgatcttgatcagctcatatgcttatgaaaatatgtcttcctgctaagcaaaagtagtgaggagagctctcagtagtcactgttacctgaatacctaatacaggcaattattctccaaataaacaggct

SEQ ID NO: 29253 - DNA, 600 bp, Chicken  19866894247948_1
catgattctatgaatttgctctatagggaacttttaggaaacaagcagaattggcatccctccgtgataccactggatttctgaccaactaaaagtttttacctttccctcaatctctataattaattatctctctcctatgtgacttgcagtgaaaaattaagctagagggaactgaatgtaaagaaactgatgtaagaacagtttaaacactcacaagaagagcacaaaaacacacggggaaaggtatcgctcccagcagcctcccatttgttccaacataaaattgtccctaacaayggcaaagraggcacgaagatggtccagctctgcttcagaacactgatctgtggtgctcctgtgtagaaagacacagttacatgtctgtcttcagaaggactcctascattctaaaaatactgtcccacagctgtttaaaatttatttttttagaccatagcaccactgtttggttgtttccaatttctgaaaccacaaatagtaaaagtgtactcagtctactgcaaacataaatagcaaatgcacgcttcagcacttttaaaaggatatggaaattggcaacaaaaatgcagttcatgt

SEQ ID NO: 29254 - DNA, 600 bp, Chicken  19866894247948_2
tatgaatttgctctatagggaacttttaggaaacaagcagaattggcatccctccgtgataccactggatttctgaccaactaaaagtttttacctttccctcaatctctataattaattatctctctcctatgtgacttgcagtgaaaaattaagctagagggaactgaatgtaaagaaactgatgtaagaacagtttaaacactcacaagaagagcacaaaaacacacggggaaaggtatcgctcccagcagcctcccatttgttccaacataaaattgtccctaacaayggcaaagraggcacgaagatggtccagctctgcttcagaacactgatctgtggtgctcctgtgtagaaagacacagttacatgtctgtcttcagaaggactcctascattctaaaaatactgtcccacagctgtttaaaatttatttttttagaccatagcaccactgtttggttgtttccaatttctgaaaccacaaatagtaaaagtgtactcagtctactgcaaacataaatagcaaatgcacgcttcagcacttttaaaaggatatggaaattggcaacaaaaatgcagttcatgttgaaaatt

SEQ ID NO: 29255 - DNA, 600 bp, Chicken  19866894247948_3
ccctcaatctctataattaattatctctctcctatgtgacttgcagtgaaaaattaagctagagggaactgaatgtaaagaaactgatgtaagaacagtttaaacactcacaagaagagcacaaaaacacacggggaaaggtatcgctcccagcagcctcccatttgttccaacataaaattgtccctaacaayggcaaagraggcacgaagatggtccagctctgcttcagaacactgatctgtggtgctcctgtgtagaaagacacagttacatgtctgtcttcagaaggactcctascattctaaaaatactgtcccacagctgtttaaaatttatttttttagaccatagcaccactgtttggttgtttccaatttctgaaaccacaaatagtaaaagtgtactcagtctactgcaaacataaatagcaaatgcacgcttcagcacttttaaaaggatatggaaattggcaacaaaaatgcagttcatgttgaaaatttacgagggccctgccatatttcttcagaaatacaatcaggtaaaaattaggaagatctctaccagctgggtggcatttttgtgttttctttacttata

SEQ ID NO: 29256 - DNA, 600 bp, Chicken  19866894247951_1
gattttgattgattttaaaataccaataaaaggaaatataaacaatccaaaagcctgaatcaatttttacttatatttgttttaaactagatctaactttactgcatccatgaaggtcaactgtcatttacagtaaaatcatgaaatcatcaggcccctgtgggcatcatcctaagacagtacactgctccattaaagcaaatgctatactcacaattttgaaaatgcactttgtgtgacagtggaatattagcacagcacttgctctgtgtaggtaatattagttctacatcaagctgmtgaaagaagagtttgatagttcatatttcaggaacgagtgttttgattttactgaaacatgagaagagatgataaagatcaagttaagcaagattttagcagtttccayatcaccagatgttcaattaagtgatgcaatcttttttaactggtacgtctgaaatctgttctttaactaaaaaacaaaactcatgtataattggtataaacataattcactgcattcaattcacaaagctctacagcttaggagtaacacaggattatatcactacatatatattctttgatatttagctc

SEQ ID NO: 29257 - DNA, 600 bp, Chicken  19866894247951_2
atgaaggtcaactgtcatttacagtaaaatcatgaaatcatcaggcccctgtgggcatcatcctaagacagtacactgctccattaaagcaaatgctatactcacaattttgaaaatgcactttgtgtgacagtggaatattagcacagcacttgctctgtgtaggtaatattagttctacatcaagctgmtgaaagaagagtttgatagttcatatttcaggaacgagtgttttgattttactgaaacatgagaagagatgataaagatcaagttaagcaagattttagcagtttccayatcaccagatgttcaattaagtgatgcaatcttttttaactggtacgtctgaaatctgttctttaactaaaaaacaaaactcatgtataattggtataaacataattcactgcattcaattcacaaagctctacagcttaggagtaacacaggattatatcactacatatatattctttgatatttagctcccattcattgtttactttagtggcagcttaatgatgcctacatgatgataatccttgtaaaataacccaatggtcatatattccagagcataacaacagattttatgaa

SEQ ID NO: 29258 - DNA, 599 bp, Chicken  19866894247956_1
  misc_feature (1)..(68): n is any nucleotide
nnnnnnnnnnnnnnnnnnnnnnnnnnnnnnnnnnnnnnnnnnnnnnnnnnnnnnnnnnnnnnnnnnnncttacaggccgggactgtgagcatgataagctgatggcacaggttttgctggcagcaggagcaaacccctgcctagggcctgcactgatgtccctcaagcacattgctcctggtggcatggtcaacaaaaaatatggccttaatcttgccagggtttgcatacgtttttcattggatgctctgtccctcttgacttattaagcacattcctaaatcttagcaggattgtackttatgtgttagcaccagcactacaggacatacagggcatgtagccgctgtccatgaacagctctatgactgcagggcatgaatcaatctcccttctggcttcctgtctgaaactaattgtctgtgttatcatccaaactgtacgtgttaaatatttaggagatcttaatctctgttatggctgtagaatttaccctggatttatcggttgggtcagcagctgatggaggcaatttactcctctgagattaagagcagaatatggcctgtctatctgagcattagtaccattgatatagc

SEQ ID NO: 29259 - DNA, 600 bp, Chicken  19866894247958_1
atatacacatactgctaagattctttgtataacgcttcttggcaaaaagctaaatataaatatatttttaagtgcaaacgagtataaaaatgacttatctatccctttggctagatattagcatacgtgaagatgctacagctggacaaccaggtcttactgtagctgtccctgctcactgcagagaactcgatgacctttaagggccccttgcagctcagatgattgtgttattctgtgctagcaaaatactcctcccttgctttggtagcatcctcattcttcagaggccacgcaagygtgggagcggtggaggatgctggtctgtgggttgtcctggggcagctcgaggcatcctgaggctgtggctgccccaggttcctaacagcaccaacaaacgctctattgtcttctcaacaagggtgttgttttattttaaatctgattgtgtaaagttccctttcggattaagtgttgaaaacaaaacagaaaccacaccaatacctcattgtgtttattaaacaacgacaaaaaatcctgatgtccctgccgatttaaaaggcttttgtgtttggtgggaactctatctaagctttgggc

SEQ ID NO: 29260 - DNA, 600 bp, Chicken  19866894247962_1
cccgaaaagcaaaatcaaacccaaccagtgaaaaaaaagctctatttgctcttcacagtcagcatctggggcacaacagatccatcttcacactgagaggggcaccatgctgcctggcaggatgacagcccagcccttccttcctacttaccccattgaaaccacttgtcccaaagcaatccttactttctgtagctccactacccagagtctctgcatttcccaggtgaggcaggtgtaatgctataatgggatgataatagcagggtggtgaaggctttggctacagcaaatgagaaygagcccaaacgcagcagccacagatgcaaaaatgaaggaaaagagctgcttacccttgggaggcctcaggatctccagcaagaaatgccctcacctctactgccaacccgtaaatgagggctgggaaggggtggatcctggctccatcccttccatcactcagctacattgcatgcacctgagccccctggaytggccctgccttcccaccaggtgctccatcactgcttcagtctgtgactgagcatttcctctacagcaggagggctctgtcactcagataaagcacagactggggag

SEQ ID NO: 29261 - DNA, 600 bp, Chicken  19866894247962_2
agctccactacccagagtctctgcatttcccaggtgaggcaggtgtaatgctataatgggatgataatagcagggtggtgaaggctttggctacagcaaatgagaaygagcccaaacgcagcagccacagatgcaaaaatgaaggaaaagagctgcttacccttgggaggcctcaggatctccagcaagaaatgccctcacctctactgccaacccgtaaatgagggctgggaaggggtggatcctggctccatcccttccatcactcagctacattgcatgcacctgagccccctggaytggccctgccttcccaccaggtgctccatcactgcttcagtctgtgactgagcatttcctctacagcaggagggctctgtcactcagataaagcacagactggggagtgatgcaaccagtgctctgagcagcattactgcaatgcacacatgggctggagatgtgctcaggcagcacggagtcacacagggtgcaagagaatttaatctggagaaagagcagcacataaacacggtgcctacagaagcaaagagccgcggaaagaaaaaagaagacaggttgcagacaggctggcagggg

SEQ ID NO: 29262 - DNA, 600 bp, Chicken  19866894247970_1
aattaatgtataatgagttaagagatttaaaaaacaaaacaaacaaaaacacaaacaaaaatctgatggaataaatgttatgtttgagagcctttctactggatttaatggcaggtcatcaaacttgatctttcctgatacagtcctagtggaatttctcttccttcagctgacttttggtcttcaaaatactaaaagactattactaattttgtagatctctctgatttccatcataattctgtatggaaaatgtatgtattgaagtagacttcttgcagatagactttatgctgcacrgaaaatagtgaagctgtggcaattaatgattgctgaggagcaactctatttttatctgtttattatttctgtraagcttcttcctcagttatcccactcccttaattccaagcaaagctgcatttcttcttgtagcttgtgcttttgccttcttaagcagactggagcttctgggaagccatgtgcctctatcctccaaaaactcctgtgactcttgggcctgtccccaagtgcagcctttcatcccttctcccattccatcatattccacttaccttaacgagagcagtggttgtctga

SEQ ID NO: 29263 - DNA, 600 bp, Chicken  19866894247970_2
aatgttatgtttgagagcctttctactggatttaatggcaggtcatcaaacttgatctttcctgatacagtcctagtggaatttctcttccttcagctgacttttggtcttcaaaatactaaaagactattactaattttgtagatctctctgatttccatcataattctgtatggaaaatgtatgtattgaagtagacttcttgcagatagactttatgctgcacrgaaaatagtgaagctgtggcaattaatgattgctgaggagcaactctatttttatctgtttattatttctgtraagcttcttcctcagttatcccactcccttaattccaagcaaagctgcatttcttcttgtagcttgtgcttttgccttcttaagcagactggagcttctgggaagccatgtgcctctatcctccaaaaactcctgtgactcttgggcctgtccccaagtgcagcctttcatcccttctcccattccatcatattccacttaccttaacgagagcagtggttgtctgagaagtctggcaatggtagaagattttcaggtcaccccaaggtgttttcattaaatggaattgagagatagaaa

SEQ ID NO: 29264 - DNA, 599 bp, Chicken  19866894247972_1
  misc_feature (1)..(172): n is any nucleotide
nnnnnnnnnnnnnnnnnnnnnnnnnnnnnnnnnnnnnnnnnnnnnnnnnnnnnnnnnnnnnnnnnnnnnnnnnnnnnnnnnnnnnnnnnnnnnnnnnnnnnnnnnnnnnnnnnnnnnnnnnnnnnnnnnnnnnnnnnnnnnnnnnnnnnnnnnnnnnnnnnnnnnnnnnnnngaatgaatttattacatatattaacaactatgtttccgatttataaggatgttatttttaagctcaaattttgcttcaaagtgaaaaattaattcagttaaagcatctgctttctggtattacttccragcaggatgagcttttcaccaaatacatatacagaagcctatatatatgcacccaaatgcacttacagggaaagttttcaacagtgcattacacacaagagcaagcagcagattgcttaagattaccccgacatcctggaccagtcttggagcagtaatatcttcatgtttgctgtcaaggcccgtcacccctgctgaccagcggggatgccaaggcaacccacattactcaatcaactttaagtgttataaatactaaggtccataaaaaagtacaatgtaatgatgacttaaacaaa

SEQ ID NO: 29265 - DNA, 600 bp, Chicken  19866894247981_1
tttagctgagatgatagtgtggatatacctcagcttcatttggaatggctgtagccatcaaaccacttgttatactcctatggacatttttaatactctgcattactacctgccttctagaaactattactgaatagaaactagtactgaaaaaagcacgggttttatttccttctgtttttttgtttgctgtccagagaagtaactttctatctgaattttcacttttgaaggacgttacatacttcagacacctggtctttagagctaaaatactgcaggatcacttggttttttaaygctcaaaatacagatgcacgtaaagctgctagaataaattgctcttaatattcaagcctgtaytatgaattccactgacagtgcttatcagttttataaaggtgcaaaaaactaaatgttgttcatctgtgcaaaagttctggtcactcacaattctattcccagtcaaaagtagaattaattcaaatcaatatgaacttaacacacttattaaaaaatgagacggtaggcccagatgtacgtgtgagtttctttcagtgtgctgactagttttgaactctccctggagctgattatttg

SEQ ID NO: 29266 - DNA, 600 bp, Chicken  19866894247981_2
cacttgttatactcctatggacatttttaatactctgcattactacctgccttctagaaactattactgaatagaaactagtactgaaaaaagcacgggttttatttccttctgtttttttgtttgctgtccagagaagtaactttctatctgaattttcacttttgaaggacgttacatacttcagacacctggtctttagagctaaaatactgcaggatcacttggttttttaaygctcaaaatacagatgcacgtaaagctgctagaataaattgctcttaatattcaagcctgtaytatgaattccactgacagtgcttatcagttttataaaggtgcaaaaaactaaatgttgttcatctgtgcaaaagttctggtcactcacaattctattcccagtcaaaagtagaattaattcaaatcaatatgaacttaacacacttattaaaaaatgagacggtaggcccagatgtacgtgtgagtttctttcagtgtgctgactagttttgaactctccctggagctgattatttgtttctatgtgatagtgcagctgagttggcaaatttctgctcttttgtcctctttctgcaggaa

SEQ ID NO: 29267 - DNA, 600 bp, Chicken  19866894247984_1
ggagtgtactgtgatgatgtgcaaagtggtctgcgaagttcctgaaggacaaacagcagcagcatcctgcactactctttttgctattaataaggtgtgagccggatccatctaaagatccattgatgcacagccagggagcaaccccggccagggagcagccccatgggcagggaccagctgggacctggtggtcctccaatgcaggttaatgtgtcctcactgacaaaagtgcagtcctgctgcatggagacagagcagtctcagtcaaggagaggtgaagatccagatccaaggtcmatttagggaacccaaccagaagcagcagatgagatagggagggctagcaacaccataccatgggtctgaggcccatcgacaagctgtgtcacctttgtttgcacacctgtgtgctgctctgataagggcacttaccacagtgatggtactatgagtaacagctctgtcatgcatgggatgtctgcagacagaaggaagggagacggagcttgctgagtgtatgttcctagagattttcctggaatactgaatgtgtgactcgatcctggaagtcagtttattgttagttgcaagaggcag

SEQ ID NO: 29268 - DNA, 600 bp, Chicken  19866894247987_1
agaacagctcaagatagtatctagagcttgccaaacctcagcaagagattcagcttggatagcctggcaccccaaatgcagctgtggtcaaatgatgcctctgtatccctattcttgatgggagccgtgtactgaactcctggttatccccacatttcctctcggcatgatgtgtaccacacctgggatacatgggtgtttgagttgtgtgcgataccaagctgaaatgggacccctgggccacaggcaggagttggagggggcactcggggctgctcagtaccaccaaggccacaaatrccctctgggctgcaacaaacagaactgcagagcacacaaggcatcattaaaacaacaggtttgaccaaaaagatttttctactgccagaacatcactgtcccaatgtctgccttgccttctgtaatcagcactgccatccttctgaccaggacctggtctcgcaggtctctaactaaactggccagcagagtcagcaggagagtccatgtgagataaccaggcaactactgctggcacagaccagctttgcacagcattcatgtccctaaatagcagtatgaataaaaatagtttggaca

SEQ ID NO: 29269 - DNA, 599 bp, Chicken  19866894247989_1
  misc_feature (1)..(13): n is any nucleotide
nnnnnnnnnnnnncacagcagggtcctggcagcttagagaagggtcctttcagctcatggtagcatagtgaccataggggtgtgttggaaaggtccttgcagctcatggaagggtccttgcagctcactcaaacgcagcttcagtagagatgggttggaagggtccttgcagctcacggaagggtccttgcagctcacggttccatagtgaccataggggcgtgtcggaagggtcctggcagctcacagcagggtcctggaagctcacggaagggtccttgcagctcccaactccctttscaycccatggcagtgcaccaacgggcacctgatgtgcgccggctgcttcatccacctgctggcggacgcgcggctgaaggaggagcaggccacgtgcccacagcagggtcctggcagcttagagaagggtccttgcagctcacagaagggtccttgcagctcacggttccatagtgaccataggggcgtgtcggaagggtcctggcagctcacagctgggtccttgcagctcaaagaagcatagcctctgtatggcagggttggaagggtcctggcagctcacagcagggtccttgcag

SEQ ID NO: 29270 - DNA, 599 bp, Chicken  19866894247989_2
  misc_feature (1)..(10): n is any nucleotide
nnnnnnnnnncacagcagggtcctggcagcttagagaagggtcctttcagctcatggtagcatagtgaccataggggtgtgttggaaaggtccttgcagctcatggaagggtccttgcagctcactcaaacgcagcttcagtagagatgggttggaagggtccttgcagctcacggaagggtccttgcagctcacggttccatagtgaccataggggcgtgtcggaagggtcctggcagctcacagcagggtcctggaagctcacggaagggtccttgcagctcccaactccctttscaycccatggcagtgcaccaacgggcacctgatgtgcgccggctgcttcatccacctgctggcggacgcgcggctgaaggaggagcaggccacgtgcccacagcagggtcctggcagcttagagaagggtccttgcagctcacagaagggtccttgcagctcacggttccatagtgaccataggggcgtgtcggaagggtcctggcagctcacagctgggtccttgcagctcaaagaagcatagcctctgtatggcagggttggaagggtcctggcagctcacagcagggtccttgcagctc

SEQ ID NO: 29271 - DNA, 600 bp, Chicken  19866894247997_1
ggtggaaaaaaagtatttgtgtgtaggcacacatatctcgtgcatgcacacaggcatatgcattatatttatgcatgcttatggtgtgatttctcctttatactgaataaagtgtatcggttcctaagaactgtcggttaattacagactgccagctgtaacttcagatatataccacatctgccaaatgacagagagatggattgatcaccacagactttttacttatttgatgtggatgtaatttatatcaggagcagagctggaatgcccactcggagcaaaggccgtccgcggtcycaacgcgctgactccccattccctccgctagttgtgtgcatctgtagatctatcaacctgtcaggcccaactgctgggctgctttcatgtgctccaaagataaacactcctatacttacgggaggaaatgaaagacttcttttgctgataaaaatatgatttacaacaggmgttaggacagaaccattccaattaaaagcaacacttaagcattttttgtcctcagtatcagtgaaatcagaatgtcagtgtaattctgttagttaattttaagttgatttactaggaataatccccttg

SEQ ID NO: 29272 - DNA, 600 bp, Chicken  19866894247997_2
ataccacatctgccaaatgacagagagatggattgatcaccacagactttttacttatttgatgtggatgtaatttatatcaggagcagagctggaatgcccactcggagcaaaggccgtccgcggtcycaacgcgctgactccccattccctccgctagttgtgtgcatctgtagatctatcaacctgtcaggcccaactgctgggctgctttcatgtgctccaaagataaacactcctatacttacgggaggaaatgaaagacttcttttgctgataaaaatatgatttacaacaggmgttaggacagaaccattccaattaaaagcaacacttaagcattttttgtcctcagtatcagtgaaatcagaatgtcagtgtaattctgttagttaattttaagttgatttactaggaataatccccttgagccggtagctgacctcccaaacattccagcttcctgtgggataacaaggagtaataagaaacacattactgtaaagtaagcatggctggtgtggtgtgaagtttgttcctgtgctgtcagatagacaagcctacagcaagtactcagcaatagccaaataatgtccagag

SEQ ID NO: 29273 - DNA, 600 bp, Chicken  19866894248000_1
tctgtgcagtgctatgaaatggcacatttgcagttggctattacagtatctttaccattttttttcattttcataatgatcaactttaaaggctcattttttttccaaacaacattatctagcccatatcacagtaacaacacttaaagtttcttgcacaactgtatagctaatattttattttataggggaaaaaaaaatgtgccttttaaatcttctgaattggtgcttatattcataaaaatacaataattacaacaacaatcaaacgactaaaccaaaatttaatattttagtaaygtttatttttagtacgtttcagtgggatcctgctgaatatgtttcagtgacacactcatcctgaatctattttcttccttctttcctttttttttttcttttctttgtaaaacagaaataaaataaattctactgaaatcaagatacacagtgcactaacttggggatgctactccagctactccacatggaggaagggaccaatgagtttcttactcagttttggatgtccttcttcattatgagtagagcatagctcagagatacatcagttttactggcaggaaaaaagttttttca

SEQ ID NO: 29274 - DNA, 600 bp, Chicken  19866894248002_1
gataaattaaatattcaatattatcaaaatgttttactgagatgaaaataatcctgtcatgttgaactgcattcaatactaagacatcataataataatgtttcaatactgtaacacctgaaatattttaattgctatttaaatatttgaagattgaacttctcttaatgaagaccttctatgatttttcaatctgtgtcatgataaacccttgcaagtttccagattttcttcatttactttatggtacaaaatacttatgcaagagaataaattagtctttccatgagaactttgacmacttctgtctctaatgtaatattattcaggctccaatgttgttgcagcatgtgctaatactgtgctctgggatattatattttgacatctaaaagctttggtaaatccattttaaagcctggagaatactgaaattttatggattgatattcatatccttttgcattcagcagattatgctgcttaggtgtattttktttaatcagtttttgattttggctcagtcttggttctacattaaatctctatacgtgatatgtttacttcatattcagtggttaggatgcgtatgagcttcca

SEQ ID NO: 29275 - DNA, 600 bp, Chicken  19866894248002_2
gtcatgataaacccttgcaagtttccagattttcttcatttactttatggtacaaaatacttatgcaagagaataaattagtctttccatgagaactttgacmacttctgtctctaatgtaatattattcaggctccaatgttgttgcagcatgtgctaatactgtgctctgggatattatattttgacatctaaaagctttggtaaatccattttaaagcctggagaatactgaaattttatggattgatattcatatccttttgcattcagcagattatgctgcttaggtgtattttktttaatcagtttttgattttggctcagtcttggttctacattaaatctctatacgtgatatgtttacttcatattcagtggttaggatgcgtatgagcttccaaaaacatcaaatgtgtgggggatttctataattttaagcatatgagcagttcagttaatttaagtgttcttatggcccaagacattccagctctacaggaatatagaaaatgcaatggtaaatttcaagtatgaaacaaggccaatatttaattttaccctatttcagtatactcttccttccttgcatgaggttta

SEQ ID NO: 29276 - DNA, 599 bp, Chicken  19866894248005_1
  misc_feature (1)..(214): n is any nucleotide
nnnnnnnnnnnnnnnnnnnnnnnnnnnnnnnnnnnnnnnnnnnnnnnnnnnnnnnnnnnnnnnnnnnnnnnnnnnnnnnnnnnnnnnnnnnnnnnnnnnnnnnnnnnnnnnnnnnnnnnnnnnnnnnnnnnnnnnnnnnnnnnnnnnnnnnnnnnnnnnnnnnnnnnnnnnnnnnnnnnnnnnnnnnnnnnnnnnnnnnnnnnnnnnnnnnnnnatttgtcttcttaagcttttaaaagctgtagcatattgtggtacagaagagcctacttgtggcaatctgaatgctgctgaatattwtgtggtatgctgaccatcaggtgtgggtgtccgacccaggtgtggaactaaatctggtctgtgattgctgcagtcaggaaaaggctctgtaaatagagtagatgttctgtgggacttatcagagcttagtgaaggtatgatggatattactttctccagcagttatycttctgatcaagcttgttgaagccctttgcttttgaaaaccaacaacaatcaaagtctcatctcaccrggcaccaaggcaccaggagcacactgcttttcatattacrctgctacactgaagcgtaacattt

SEQ ID NO: 29277 - DNA, 599 bp, Chicken  19866894248005_2
  misc_feature (1)..(47): n is any nucleotide
nnnnnnnnnnnnnnnnnnnnnnnnnnnnnnnnnnnnnnnnnnnnnnnatttgtcttcttaagcttttaaaagctgtagcatattgtggtacagaagagcctacttgtggcaatctgaatgctgctgaatattwtgtggtatgctgaccatcaggtgtgggtgtccgacccaggtgtggaactaaatctggtctgtgattgctgcagtcaggaaaaggctctgtaaatagagtagatgttctgtgggacttatcagagcttagtgaaggtatgatggatattactttctccagcagttatycttctgatcaagcttgttgaagccctttgcttttgaaaaccaacaacaatcaaagtctcatctcaccrggcaccaaggcaccaggagcacactgcttttcatattacrctgctacactgaagcgtaacatttgcacaaagcaatggctgtgttattgggtggatcygttgcaatttgcttaataaaatcaactttttcttctaattgcatttgtgaagataaagcattcttcacacgttggtggaagaactatgaaggtgacagtaaaaccccatgtctttggaagcaggtgagataga

SEQ ID NO: 29278 - DNA, 600 bp, Chicken  19866894248005_3
aaagctgtagcatattgtggtacagaagagcctacttgtggcaatctgaatgctgctgaatattwtgtggtatgctgaccatcaggtgtgggtgtccgacccaggtgtggaactaaatctggtctgtgattgctgcagtcaggaaaaggctctgtaaatagagtagatgttctgtgggacttatcagagcttagtgaaggtatgatggatattactttctccagcagttatycttctgatcaagcttgttgaagccctttgcttttgaaaaccaacaacaatcaaagtctcatctcaccrggcaccaaggcaccaggagcacactgcttttcatattacrctgctacactgaagcgtaacatttgcacaaagcaatggctgtgttattgggtggatcygttgcaatttgcttaataaaatcaactttttcttctaattgcatttgtgaagataaagcattcttcacacgttggtggaagaactatgaaggtgacagtaaaaccccatgtctttggaagcaggtgagatagatgatagctgttggtctgtgctatccggatggtgatccggtgctctgacagtccagctgcattggaattg

SEQ ID NO: 29279 - DNA, 600 bp, Chicken  19866894248005_4
gcaatctgaatgctgctgaatattwtgtggtatgctgaccatcaggtgtgggtgtccgacccaggtgtggaactaaatctggtctgtgattgctgcagtcaggaaaaggctctgtaaatagagtagatgttctgtgggacttatcagagcttagtgaaggtatgatggatattactttctccagcagttatycttctgatcaagcttgttgaagccctttgcttttgaaaaccaacaacaatcaaagtctcatctcaccrggcaccaaggcaccaggagcacactgcttttcatattacrctgctacactgaagcgtaacatttgcacaaagcaatggctgtgttattgggtggatcygttgcaatttgcttaataaaatcaactttttcttctaattgcatttgtgaagataaagcattcttcacacgttggtggaagaactatgaaggtgacagtaaaaccccatgtctttggaagcaggtgagatagatgatagctgttggtctgtgctatccggatggtgatccggtgctctgacagtccagctgcattggaattgtcccctctgtcagcatccagacaagcaggaactcatctgt

SEQ ID NO: 29280 - DNA, 600 bp, Chicken  19866894248005_5
acccaggtgtggaactaaatctggtctgtgattgctgcagtcaggaaaaggctctgtaaatagagtagatgttctgtgggacttatcagagcttagtgaaggtatgatggatattactttctccagcagttatycttctgatcaagcttgttgaagccctttgcttttgaaaaccaacaacaatcaaagtctcatctcaccrggcaccaaggcaccaggagcacactgcttttcatattacrctgctacactgaagcgtaacatttgcacaaagcaatggctgtgttattgggtggatcygttgcaatttgcttaataaaatcaactttttcttctaattgcatttgtgaagataaagcattcttcacacgttggtggaagaactatgaaggtgacagtaaaaccccatgtctttggaagcaggtgagatagatgatagctgttggtctgtgctatccggatggtgatccggtgctctgacagtccagctgcattggaattgtcccctctgtcagcatccagacaagcaggaactcatctgtctggagttctgtctgcatctactgatgtggtaatatgcagaccttttgagtatgggag

SEQ ID NO: 29281 - DNA, 595 bp, Chicken  19866894248008_1
ttgtctcatggcacctggcacaggggtctctatcgtaactccacattcctttcacctactcccatcgttgttctgtgtgagacagtgatccatagcagctgttttgcttgcactgacccaaggggagataaacatgacctccctgggtcagctgtccatccacataatgccagtttacacacatgagtatctgaaaaatttctgtgagatgaagtacctgtaatgcactaggctgtcagtgcacccaagttcatgacattaaacaagaagttcacataaaacaataacagaatctagaamaagattcaaaagatgacaatgataaaaacagatgtgctgaactacaagaaggtaaacaatcatgaaatgaaaaccagtctcacagattaactactgtgcaacttcatagttccaaataaattggagcccattgctctatcttcatctttctgttctccacgtgcctttcatatcggtcacataatgaccaaattccccttcattctagtaagtcattctcaacattaacatcacctcatcttgctgcaccaactcctttctttcatttcacagttcaataccttttgttccattt

SEQ ID NO: 29282 - DNA, 600 bp, Chicken  19866894248013_1
ctatttgattaaacttgccatttcaaatcaatacgacatccaaaagttgtgacccaggctgctgcgtaaggctgcagcacagcactgggagctgatgtttcacctcagacacagctgtccttcagaggcaaatgaaacgatccctgcatatttatttattttcctatttttattccatcaatagacccccctgagatccattaaaggtcttgtatgaaaagaatcatgaattcatcaaggttagaaaagatcttcaagatcctcaagtccaaccatcaacctagtatttatcctgaaatycccatattcatttctctggatagggaagactttttgttgaatgtttagaaataaaattcataygcacagctcactttaaaatgtcaagcatttttaatttgtgatggtttattgagccagatggaaataattctggtagaattttgcctctggaaaaggtttgttttataacttttcagagctgaagttaaggtaaatgcacttctaaatgaaggggcaggtattgatacacttacaggctaaaatgccaaatgcagaaaaagaacaatgctcactgctgtgtggtgttgcatagatcat

SEQ ID NO: 29283 - DNA, 600 bp, Chicken  19866894248013_2
gcgtaaggctgcagcacagcactgggagctgatgtttcacctcagacacagctgtccttcagaggcaaatgaaacgatccctgcatatttatttattttcctatttttattccatcaatagacccccctgagatccattaaaggtcttgtatgaaaagaatcatgaattcatcaaggttagaaaagatcttcaagatcctcaagtccaaccatcaacctagtatttatcctgaaatycccatattcatttctctggatagggaagactttttgttgaatgtttagaaataaaattcataygcacagctcactttaaaatgtcaagcatttttaatttgtgatggtttattgagccagatggaaataattctggtagaattttgcctctggaaaaggtttgttttataacttttcagagctgaagttaaggtaaatgcacttctaaatgaaggggcaggtattgatacacttacaggctaaaatgccaaatgcagaaaaagaacaatgctcactgctgtgtggtgttgcatagatcatatctggaaacttgtgtctcagacatctgggaggagagtgctggtgctagaggaggctgcagag

SEQ ID NO: 29284 - DNA, 600 bp, Chicken  19866894248013_3
tttccccgaggcaagtggggtgcagcagcaggcagaacccttctgcatgtggggcagtgcatgaggcatctgctgcatttggctttctttttcacaatgggacacctagagatatgctcagccctgttttaattcaggaaaaagtgtccttctttacacaatgtgaagtatttccttggaagctgaagccttgatgaggaaagaaccagtgtcccatacagcctttgcttatcccaccaggggatcctggacaacctcactaactcatccatctcttatttaagtttttccctataatcwcacccatgcagagtgcagacataagaagcccatgttragcatagatccccttgcatttgcacgaagtttctccttgggctgcttttctttctgctattttacttggtctcttcctgttacatcaaatcccatctttaaaggacactacatgtagaatctaagatctttcagatatttaccactcataaatgacatgtaatacataatagcagtaagggcttagctgctgagaaaggcataaaatacatccatgtctcagttgttacagtaatttccagtgtcccccttcccttatctgtc

SEQ ID NO: 29285 - DNA, 600 bp, Chicken  19866894248013_4
cccttctgcatgtggggcagtgcatgaggcatctgctgcatttggctttctttttcacaatgggacacctagagatatgctcagccctgttttaattcaggaaaaagtgtccttctttacacaatgtgaagtatttccttggaagctgaagccttgatgaggaaagaaccagtgtcccatacagcctttgcttatcccaccaggggatcctggacaacctcactaactcatccatctcttatttaagtttttccctataatcwcacccatgcagagtgcagacataagaagcccatgttragcatagatccccttgcatttgcacgaagtttctccttgggctgcttttctttctgctattttacttggtctcttcctgttacatcaaatcccatctttaaaggacactacatgtagaatctaagatctttcagatatttaccactcataaatgacatgtaatacataatagcagtaagggcttagctgctgagaaaggcataaaatacatccatgtctcagttgttacagtaatttccagtgtcccccttcccttatctgtctctaaatccattttttgtgttcttttattgcccctta

SEQ ID NO: 29286 - DNA, 600 bp, Chicken  19866894248017_1
agtggtcttgtaagcacttttcacctcaaaatacatttcttcagtaaaactgagagcaattctgactagagctctgcagttcatggtgagagattgatgtctcaactttctacacttatgggaatgtttgttctctagtttaaaattgcagccttgttgttgtattggcccccagctgatgtaaaagcacattgatagacatatcagatctcagtaattcaaccactgaattggctgtcctccccactaacccttaagaaaatgagtatgaaattataatgtggagagaaagataattaytgacagtgacatctttgtagttcccttctcctcccttgatgaagtatgaagtttcattggaactgcaaataatctcagttcaggcataaatattcttcagggcaatgccttatgttcagagtagcaaaactggccaatgggagtgacacagaaattttagttttaattagagttccttaaatttgttagaaaatttgcaatagcttttgttgtctgtgctgacatcttcatctaaggacataaaatcacaaataacagaagactgaatcttgtatactattycaagctgacatttacact

SEQ ID NO: 29287 - DNA, 600 bp, Chicken  19866894248017_2
ggagagaaagataattaytgacagtgacatctttgtagttcccttctcctcccttgatgaagtatgaagtttcattggaactgcaaataatctcagttcaggcataaatattcttcagggcaatgccttatgttcagagtagcaaaactggccaatgggagtgacacagaaattttagttttaattagagttccttaaatttgttagaaaatttgcaatagcttttgttgtctgtgctgacatcttcatctaaggacataaaatcacaaataacagaagactgaatcttgtatactattycaagctgacatttacactgtgttctcattgaggtgctctttgtatcatttaatatatttatatttacagtcatgatttcctggacatgatctcttgagttacacacaacctagagcatagaacttgtgactttgtgagcatttaaccattaacatgtaggttgtccacattatcataagtagaataaaatatccaaatccaaactctaaaagtaatcatgttttgaaccaagggaagcatctggtaaaatgttcttaacaatatttgcattttaactaaatacgcaagtgtttactaggc

SEQ ID NO: 29288 - DNA, 599 bp, Chicken  19866894248020_1
  misc_feature (1)..(41): n is any nucleotide
nnnnnnnnnnnnnnnnnnnnnnnnnnnnnnnnnnnnnnnnncccaccttcatctcatgcatgtccagcaggacagccaagagcctgagccatcccattccctgtgtcctgcagcgacccgagcacaaaggctgtgctttcccctttcccccagcaccctgctgggaactctgtctgcctgggaggtcagttcccaatatttctgaagggagtgagcgttaagcatcttcagctctgacagctggtcctgtgcagagccaggtctggaggtttgggttggccccacggcctgccagctctrggggatgccagaggtgctggagcccgagtcactccgtgttcacactaagtaactggaaagcaaacctggctcccggacagggacagggaggctgccccagctaggaggaactgatttgcaagtgatcttttgaaaaccatttctacatgtgccttaactaatgatgttagttcacgaaggagaaatctttgttccccgttcccctctgcaaagcttccccttcgctccattaacttttcccatgtcattccgtaaacactcagcaaagtacagcttggagtctgcacaacacctttgtt

SEQ ID NO: 29289 - DNA, 600 bp, Chicken  19866894248020_2
tggctcccggacagggacagggaggctgccccagctaggaggaactgatttgcaagtgatcttttgaaaaccatttctacatgtgccttaactaatgatgttagttcacgaaggagaaatctttgttccccgttcccctctgcaaagcttccccttcgctccattaacttttcccatgtcattccgtaaacactcagcaaagtacagcttggagtctgcacaacacctttgttgttagggccaaagcaacagcaaacatcagtgggagggcagagcctcctctgaccttggtttacgagyagcactgacccctgctgcagcaccagcccttcgctgccttggggatatttcatgtgctgaacacaagggtgttttcttcttgcaagtgtgcactgtgtttgtaattacaaatgcttgaagccttcatcatagaatacgacctggttgcgttgccaagcttttaggtgcctttgtcatgtgtcaagtgtgattttaagcgttctgtgtcgcttgccatcagagagtgataaaagaaccgtgaggagaaacattgccaagagactctgtacttcttctcttcttcccttcggggaatctggg

SEQ ID NO: 29290 - DNA, 599 bp, Chicken  19866894248021_1
  misc_feature (1)..(210): n is any nucleotide
nnnnnnnnnnnnnnnnnnnnnnnnnnnnnnnnnnnnnnnnnnnnnnnnnnnnnnnnnnnnnnnnnnnnnnnnnnnnnnnnnnnnnnnnnnnnnnnnnnnnnnnnnnnnnnnnnnnnnnnnnnnnnnnnnnnnnnnnnnnnnnnnnnnnnnnnnnnnnnnnnnnnnnnnnnnnnnnnnnnnnnnnnnnnnnnnnnnnnnnnnnnnnnnnnnagaatataaaaaacccagatcctgtttggtcttctattcagcaggacttttcattttgtttagcaggactaatgtttttctacccccctragacctgcatattatctgggagactctagccttcccaaaaacaaaaaagaaatcccaatacctttgccaaaaatagaccagactggcaggactatttatattctgcactgtttatactctgcatgtgaaaatgagaaagcgactggcaaggctcattcagataatgcaattctgtgctctcaatccagatggcttgtatggcagcagcgagaagtctaggtagtcgtgcttgcctcaggataatttcaactgaaaacaattactgaatggaatgacatcaatcaccaagcacgttgctc

SEQ ID NO: 29291 - DNA, 600 bp, Chicken  19866894248023_1
gcccttatctgttgctcatttaataaatccccctcctctggtttttcatcttccaaggagattcacacacaaaaggcaccagccctgtgttcgctctgtgagattaccagtgtgaacacaatgactgatctctggcagggatgctcatacgttacattttccaggggacgtgttggcagggctggctaagcaccaggtgtgagagcaatcaaacagtcctgctagctagtgcaaagaagacagacaacaacgctaggggtgctatgaacaaaaagtgaaggctcggtacagaagccctcyggatgcaactgagagctcagtggtgggaaatcttcatctggtagccttccatcctgcatttcctataggtgttggccctttgtcagctggtccatcccacgttctcttctctgccctgcctttctttgccatgacttgctgggttcccttggctgctgtaaccactcccatggttccttctgggatctttccttttggcaaacttctcctgatggaatctgagtacagtgagtacaaggaagactgtgccacagtccagagtgggatggttgtgctttgtttgggtctctctgcatgaaa

SEQ ID NO: 29292 - DNA, 600 bp, Chicken  19866894248024_1
ggcagaacaaagttgtactggcaatgctagggcattcgtgcagcttttcctcctgacaaatgcagcagttctaacagcagtagtgacaaacagtccatgcaagaagttgggctgtgtaattgtgatgtatacccatgcagaaaaattgatgtaaatgtttctgttttaccatccaggaatacgttattctgatccaaaggactgaaaagtccagagaactaaaagccaattctggcttaccttaatttgaataactgataactatcgtccctggataatgtaatactttttgccatacaygataagaccactgacagatctttctcctcttttatatctttcaccttgcactgcaacttcatgtgatactaaatgctgtgtctgggagatcaaagagttacatgcaattctacttgacatttatcaggtacctcacgacttatttgaaaatagctgtctgactgctgagttaatcaaagtggggcgaggaagggaaatgtcaacaggaaatgagataaggtacgtcgtgtcagcgtcagttgtgtgatgtttctgtctatgctcacactgttaaaaagcagaattgtttactcctctcac

SEQ ID NO: 29293 - DNA, 492 bp, Chicken  19866894248030_1
atcagaagactaaagagagaacatccgagatctgaagagaaaacactatttgtgaatgacagattactggggattctcatgccctccagagcttttggagatgtgcaactaaaatggagtaaagaactgcaacacagcgttcttgagaatagctgtgatgttggggctttaaatatttatcattacgttcctccaaactaccatacacccccatatttaacagcagagcctgaagtcacgtaccacaaactaagaggcaaggataagtttctcattattgcttcggatggactatgggaratgctcagtaacgaagaggttgtaaaactagcagctggacaccttacagagcttaatgtacagaaaccacaactggcatttgagaaaccagttaatttgggttatttgcacaacctgttacttcagaggaaaaacaggggtattacctcactggaccagaacatagcgacgcatttaatacggcatgcattg

SEQ ID NO: 29294 - DNA, 577 bp, Chicken  19866894248033_1
gtgctgccggcaccgctgaaccgcgccagcgcccgcggtgccaccgggggacagggcagcatctccaagcagggaacgaagcagggggtcggcggggggagagcgccggtgccaaaattcacctcctctctcagcacagctagggctgagggtcgggacgcagggcaatgcaccaagccctgggcaaggattaactatcaaataactctgcatttaaaccctttccagcagggctgaaggtcaggaggggaagggcagaggttaaacccggcacggccaggcgctgaccccaacgcaggrggggacgccagggacaggacggggcggcacgggggcacccatcgccctgccacccaccgacaccacactgaccccgtcccctttcccctcgcacccagcggggcatccccagggcgcccaccccgcagcccagcacttactgaggctctgcagcagggacgaccagctcatcatctccggcacggggagggtccccccggcgctcagccccgccagcagctgctctcccctgcggcgggctgcgcgccgcccgagagccggccgcgggagatagcaa

SEQ ID NO: 29295 - DNA, 463 bp, Chicken  19866894248035_1
ctggcctgtaaattactccatatgattgcatttcccacaagatccatataaagctctggaatgaaaaagcagtggaaacagacatacctgtaatataaaacaatctaataaaacaaatccttctctacggaataggctggctacttcccagttgctgtccattctgacagttttatgtgaacaatttcacgtaagtagcagacataaaataagcctttttataaacataactgtccatttcactgtagatatagtagttctatttatactgaaggaaggcaaaggagggacaggaaatckactacttcattttgtgagcttttataatgaagaacaaagggcgactctgttgtcagaggatgtttggaatgagtcaggtttaaaggcaggatcccagaacgtgctgtatgtgcacacctctgcttaccatgctttgttttattcaagatacgggctcctctgg

SEQ ID NO: 29296 - DNA, 600 bp, Chicken  19866894248038_1
tctttgcattcatgttattttttttaatgtttacatccataatccttttctcagattcaatggctgacatcagacaattttatctcagctttataggaaaaaaatataggataaaaatattcatgtatctaaatgtttcatatgcctaagttctgttttctacccaatctaattgattgccagtgggtctttggattctactcaagtaattaatttataattatgagacttaggctcctaagacacataagaacctttagaaagtttctattaaaagttaatgaataattgcattcacaragattagacgaaagattatgtcacagatacactaggggatgaatagttattagcacagtttgcttttagttgtctgctgatgtaaatctatcctcatctctgaaccaccacttccacgaaaaacatttccaagtaataaccttttcagaaatacatagatgattttaccgtatcaatagaaaactatggctgaccttatttctagttttttttgaggggacgtaaaaaaamaaagaggatcaagagactgcaattatgatgatgatttcagtgaagcaaaagcaagttccagatttaaac

SEQ ID NO: 29297 - DNA, 600 bp, Chicken  19866894248038_2
aggctcctaagacacataagaacctttagaaagtttctattaaaagttaatgaataattgcattcacaragattagacgaaagattatgtcacagatacactaggggatgaatagttattagcacagtttgcttttagttgtctgctgatgtaaatctatcctcatctctgaaccaccacttccacgaaaaacatttccaagtaataaccttttcagaaatacatagatgattttaccgtatcaatagaaaactatggctgaccttatttctagttttttttgaggggacgtaaaaaaamaaagaggatcaagagactgcaattatgatgatgatttcagtgaagcaaaagcaagttccagatttaaacaaaggaaattcaagatttaacatgtgctaagacccatacagatcaaaatacacagtgaaaacagttatcaccaggtgaaatcttaactcaataaatttataccacttttaaagaagaaatttcacttgcttccattactcaaatgactgcctatgtgacaaggaagagaagatgaaagggaaaaaaaacccttgaagtataaccagctttcttattttgtgttcacagtca

SEQ ID NO: 29298 - DNA, 600 bp, Chicken  19866894248039_1
tctggcgtaagttttcctttggtgtatcctatcagcaaaggcctactcaaaatgccaggaaaaagacattcttgtggtaattctggcatccttgaagataggaagtattggaaaatttgtaagtgagtctgctttcataaaatgtccaagccagttttgtgtaagtgaaacgcttggaaagttcagatatgaagccagaggttggctcaagtgtgtgaaattaacttgtgtggatcaaatttggccttacagcgtgcttcagatttaattctggaacgtgcaattccggcatcagtcagmtgtttgtttgtttatttatttattttcatttcattctgcwttgcttttgctcattcatcactattaagcaatttcctggggccactcaggcttaagggtgtgtttgcatgactaccagaattgtctgcggttatacagacaggacagaaactattaaagagggctgtaagatatttttttccctgtctacagcactgtatacactttgttacagtcatcgtgggtttctcaacgttttccagaaaatgtaatgtgaagaatggtcccagtaaggaaagagatgggagctttatgctaaca

SEQ ID NO: 29299 - DNA, 600 bp, Chicken  19866894248039_2
ctggcgtaagttttcctttggtgtatcctatcagcaaaggcctactcaaaatgccaggaaaaagacattcttgtggtaattctggcatccttgaagataggaagtattggaaaatttgtaagtgagtctgctttcataaaatgtccaagccagttttgtgtaagtgaaacgcttggaaagttcagatatgaagccagaggttggctcaagtgtgtgaaattaacttgtgtggatcaaatttggccttacagcgtgcttcagatttaattctggaacgtgcaattccggcatcagtcagtmgtttgtttgtttatttatttattttcatttcattctgcwttgcttttgctcattcatcactattaagcaatttcctggggccactcaggcttaagggtgtgtttgcatgactaccagaattgtctgcggttatacagacaggacagaaactattaaagagggctgtaagatatttttttccctgtctacagcactgtatacactttgttacagtcatcgtgggtttctcaacgttttccagaaaatgtaatgtgaagaatggtcccagtaaggaaagagatgggagctttatgctaacat

SEQ ID NO: 29300 - DNA, 600 bp, Chicken  19866894248039_3
tggcgtaagttttcctttggtgtatcctatcagcaaaggcctactcaaaatgccaggaaaaagacattcttgtggtaattctggcatccttgaagataggaagtattggaaaatttgtaagtgagtctgctttcataaaatgtccaagccagttttgtgtaagtgaaacgcttggaaagttcagatatgaagccagaggttggctcaagtgtgtgaaattaacttgtgtggatcaaatttggccttacagcgtgcttcagatttaattctggaacgtgcaattccggcatcagtcagttmtttgtttgtttatttatttattttcatttcattctgcwttgcttttgctcattcatcactattaagcaatttcctggggccactcaggcttaagggtgtgtttgcatgactaccagaattgtctgcggttatacagacaggacagaaactattaaagagggctgtaagatatttttttccctgtctacagcactgtatacactttgttacagtcatcgtgggtttctcaacgttttccagaaaatgtaatgtgaagaatggtcccagtaaggaaagagatgggagctttatgctaacata

SEQ ID NO: 29301 - DNA, 600 bp, Chicken  19866894248039_4
ggcgtaagttttcctttggtgtatcctatcagcaaaggcctactcaaaatgccaggaaaaagacattcttgtggtaattctggcatccttgaagataggaagtattggaaaatttgtaagtgagtctgctttcataaaatgtccaagccagttttgtgtaagtgaaacgcttggaaagttcagatatgaagccagaggttggctcaagtgtgtgaaattaacttgtgtggatcaaatttggccttacagcgtgcttcagatttaattctggaacgtgcaattccggcatcagtcagttgmttgtttgtttatttatttattttcatttcattctgcwttgcttttgctcattcatcactattaagcaatttcctggggccactcaggcttaagggtgtgtttgcatgactaccagaattgtctgcggttatacagacaggacagaaactattaaagagggctgtaagatatttttttccctgtctacagcactgtatacactttgttacagtcatcgtgggtttctcaacgttttccagaaaatgtaatgtgaagaatggtcccagtaaggaaagagatgggagctttatgctaacatag

SEQ ID NO: 29302 - DNA, 600 bp, Chicken  19866894248039_5
gcctactcaaaatgccaggaaaaagacattcttgtggtaattctggcatccttgaagataggaagtattggaaaatttgtaagtgagtctgctttcataaaatgtccaagccagttttgtgtaagtgaaacgcttggaaagttcagatatgaagccagaggttggctcaagtgtgtgaaattaacttgtgtggatcaaatttggccttacagcgtgcttcagatttaattctggaacgtgcaattccggcatcagtcagttgtttgtttgtttatttatttattttcatttcattctgcwttgcttttgctcattcatcactattaagcaatttcctggggccactcaggcttaagggtgtgtttgcatgactaccagaattgtctgcggttatacagacaggacagaaactattaaagagggctgtaagatatttttttccctgtctacagcactgtatacactttgttacagtcatcgtgggtttctcaacgttttccagaaaatgtaatgtgaagaatggtcccagtaaggaaagagatgggagctttatgctaacatagtcatatagagtaaattcctttttctgatgtttttagg

SEQ ID NO: 29303 - DNA, 599 bp, Chicken  19866894248042_1
  misc_feature (1)..(213): n is any nucleotide
nnnnnnnnnnnnnnnnnnnnnnnnnnnnnnnnnnnnnnnnnnnnnnnnnnnnnnnnnnnnnnnnnnnnnnnnnnnnnnnnnnnnnnnnnnnnnnnnnnnnnnnnnnnnnnnnnnnnnnnnnnnnnnnnnnnnnnnnnnnnnnnnnnnnnnnnnnnnnnnnnnnnnnnnnnnnnnnnnnnnnnnnnnnnnnnnnnnnnnnnnnnnnnnnnnnnncccagaactattttatagactggacttattcttagccagtgaaaatattccctgtgggctttttgaagagcttagatcagtcttaaytggttcaactcaatccagatgtgtgtaagttgctccaaaagtaatgctttctatttatttccatggagactaaaacagggacaaaacacagtaacactatttgatagtgttctattctagctgagaatttgctctatgctttcaagagccacaactattagctgatttgacagatttgctgatcgagatgatattccttttgtggtgtgtgacaactgtgcatgatcgactggaacagcgattgtctttcactttgcagtttgcactgtcaaaatacaccacycactgcctcactatgc

SEQ ID NO: 29304 - DNA, 600 bp, Chicken  19866894248042_2
cttagatcagtcttaaytggttcaactcaatccagatgtgtgtaagttgctccaaaagtaatgctttctatttatttccatggagactaaaacagggacaaaacacagtaacactatttgatagtgttctattctagctgagaatttgctctatgctttcaagagccacaactattagctgatttgacagatttgctgatcgagatgatattccttttgtggtgtgtgacaactgtgcatgatcgactggaacagcgattgtctttcactttgcagtttgcactgtcaaaatacaccacycactgcctcactatgctcatatccactctttggtttccagaaacattcagaaagtatcagtgtctgtcagtgggagccacttttatctcatcgaaaacttcagtgacacacctttgtttcatgtgctcttccatgtcagataacgttctgtcagactgcccctctgttgccatctgttacacagcaacatgatttaatggaatattggtgggaaggtacgatccctactgccatcccaccaacatctgctgctcatgttgagagccaacagaatacaataggaggtgttagttttggaac

SEQ ID NO: 29305 - DNA, 600 bp, Chicken  19866894248042_3
gctcatatccactctttggtttccagaaacattcagaaagtatcagtgtctgtcagtgggagccacttttatctcatcgaaaacttcagtgacacacctttgtttcatgtgctcttccatgtcagataacgttctgtcagactgcccctctgttgccatctgttacacagcaacatgatttaatggaatattggtgggaaggtacgatccctactgccatcccaccaacatctgctgctcatgttgagagccaacagaatacaataggaggtgttagttttggaacagtccttgcaaatmtgttgaattcaagctattcaaagcatgagtctgggtctagattaaacagtctagtgaagaattctgagctgtagttctttaagtaatttggatagaaaagaatatattaatgaacagccttggatcaattaattcacagacagtataagatggaaagtattttgtgagaaatgtattttgatttcaacttatttcatctgccttcagagtttacatctttctttataatacatatttaaatgttgaatgggaatctgtaagctgcgtaaatcaggattttctttgaaaaatttgacacag

SEQ ID NO: 29306 - DNA, 600 bp, Chicken  19866894248042_4
tgtagttctttaagtaatttggatagaaaagaatatattaatgaacagccttggatcaattaattcacagacagtataagatggaaagtattttgtgagaaatgtattttgatttcaacttatttcatctgccttcagagtttacatctttctttataatacatatttaaatgttgaatgggaatctgtaagctgcgtaaatcaggattttctttgaaaaatttgacacagaatatgattataaaagcattatttgtcttttcctttctttactttattccattgtttactacggggggraaaaaaaagcacaagtataaaaatacaagatattttacttgtgactgcattgtcaaaatgtttgttttatggtagagctctttcagatatttcatttgatatttggtaaccagaagcctaagacatggggtagtgattgcctctatcaactttcttgtactgtgctttataaacagtttatagtgacattgtattttaggagtggaatagattcttttgaaaatttcataggttttagaaaagtggcctccatattttatatgtatttaggaagatactgtggaaaacaatgtggtttag

SEQ ID NO: 29307 - DNA, 600 bp, Chicken  19866894248043_1
ttttggaaatgtatcagcaaagccagcgggaacattaaatcagaattgagcaagaaataccaagtaattgaagaacctaatcctaattagtactgtgaacaataaatgtcaatcatagcaaacacaatgttttccgtgatgcattttctaaagagacatgaaatgtgaagtaactcaacaggaacatcaagtcaagaagtcagattaactttttatttgtctccttatgcaggatccatttcctgttacacatatccaagtggtgccaacatggctgagtttacagcctagccatattcwcagtcatcgttcttttgtgttgacaaagacacatggaaattttatttttctacagagggaaaaatgctgtcacctaccacatatgtctctgcatcgcttactaccagattccatcatctacatcaccactgctgaaggggctggggcactttcttgggaaggtcattaatgcgcagcacctaaagtctaggggtaggttagatggttccatgggagagatctcattgtaggatgacatcccacccagagtgctaataaaatggttccttttacaggggagctcatgctggcaaattgtct

SEQ ID NO: 29308 - DNA, 600 bp, Chicken  19866894248052_1
cttgtttgtttctgtcaggcaggcttgaatatccaatttagcttctacataggaaattccttcttttcctttgttcaacaccactttctctttcaagaccaactcatggaattttgaaggaggcatcaaaagcacggcagctgacattgaaatgcaggccctggctcacagttccatagctatgtgtggtgtttagcttcaccagaattacaaggctatcagtgtttccaaattaattttacataacttcaaggaaacgtgagtttctattagaaagcatacctacggctggcctcctcwtcctcatgaaggattcaatctaagaataaacaagggggaaattctgccatttcattcactctgtggatctcaggtagtggattttaagaacactgtacttagtatcgaacattcaaggaagmatctcaggagctctccctcttatcagtgtttgacttcacctgtctcctgctccagaagtcccaaagaaagcaraacatggctcagcaaggggtttccaacatgagcattgcggtctaactagtttctgccctgctattttcccactccagctcatgtgggtggaagtgccaggctact

SEQ ID NO: 29309 - DNA, 600 bp, Chicken  19866894248052_2
gcatcaaaagcacggcagctgacattgaaatgcaggccctggctcacagttccatagctatgtgtggtgtttagcttcaccagaattacaaggctatcagtgtttccaaattaattttacataacttcaaggaaacgtgagtttctattagaaagcatacctacggctggcctcctcwtcctcatgaaggattcaatctaagaataaacaagggggaaattctgccatttcattcactctgtggatctcaggtagtggattttaagaacactgtacttagtatcgaacattcaaggaagmatctcaggagctctccctcttatcagtgtttgacttcacctgtctcctgctccagaagtcccaaagaaagcaraacatggctcagcaaggggtttccaacatgagcattgcggtctaactagtttctgccctgctattttcccactccagctcatgtgggtggaagtgccaggctactctgctcactaaccagggaaaaagaaacagtggggaccaatggataaagttgacagcctgccatttgggacccaagaattcactgaaatctatggggtttaagattgtaaatgcttctggata

SEQ ID NO: 29310 - DNA, 600 bp, Chicken  19866894248052_3
gcttcaccagaattacaaggctatcagtgtttccaaattaattttacataacttcaaggaaacgtgagtttctattagaaagcatacctacggctggcctcctcwtcctcatgaaggattcaatctaagaataaacaagggggaaattctgccatttcattcactctgtggatctcaggtagtggattttaagaacactgtacttagtatcgaacattcaaggaagmatctcaggagctctccctcttatcagtgtttgacttcacctgtctcctgctccagaagtcccaaagaaagcaraacatggctcagcaaggggtttccaacatgagcattgcggtctaactagtttctgccctgctattttcccactccagctcatgtgggtggaagtgccaggctactctgctcactaaccagggaaaaagaaacagtggggaccaatggataaagttgacagcctgccatttgggacccaagaattcactgaaatctatggggtttaagattgtaaatgcttctggatatggcagatggagtcgatctgctgcaaatgtggcatccagagccctgatattccaaccttgatctttaaattgt

SEQ ID NO: 29311 - DNA, 600 bp, Chicken  19866894248054_1
ctgcatgttatattttacttcctatgtagccttcttaatgtcaataataactcatagaaggaaagcattttaattttctttgcaaaactgtgtgaaaaataccccactgataaatgaaactgcaggactgcagtgcagtcagtctttagcacatatttagatacctacagtgctgaaacctgatgcaacagaaaggagagcatccatttctcaccctgtttgttgcaggctgatcttcaagcagggagcaagaggagctctgttattttctggtttcgctcagaacaaatctaataataycagtctcacagctcctgtggcagcaggagctttacgtgggttatgagggtgtgaacctggctaycacagctacatttcccttggttcagctggataacycacagaccacagtcacctagaatgttctctgctcttcattcaaraaatggcacaacagtcttctatggcagtgctctctttacatcttaaaagatagagtgcatgtgtattttctttaccaatggctgcagtagtaactcatcagaagaaatgaaatgctcagactacagcagtgtcttttatatgcttttagagatgtct

SEQ ID NO: 29312 - DNA, 600 bp, Chicken  19866894248054_2
gcattttaattttctttgcaaaactgtgtgaaaaataccccactgataaatgaaactgcaggactgcagtgcagtcagtctttagcacatatttagatacctacagtgctgaaacctgatgcaacagaaaggagagcatccatttctcaccctgtttgttgcaggctgatcttcaagcagggagcaagaggagctctgttattttctggtttcgctcagaacaaatctaataataycagtctcacagctcctgtggcagcaggagctttacgtgggttatgagggtgtgaacctggctaycacagctacatttcccttggttcagctggataacycacagaccacagtcacctagaatgttctctgctcttcattcaaraaatggcacaacagtcttctatggcagtgctctctttacatcttaaaagatagagtgcatgtgtattttctttaccaatggctgcagtagtaactcatcagaagaaatgaaatgctcagactacagcagtgtcttttatatgcttttagagatgtctggtggctcaaagatgttttgcatgcagactgcctggtttaaacgcccacatgaaagacacagtt

SEQ ID NO: 29313 - DNA, 600 bp, Chicken  19866894248054_3
taccccactgataaatgaaactgcaggactgcagtgcagtcagtctttagcacatatttagatacctacagtgctgaaacctgatgcaacagaaaggagagcatccatttctcaccctgtttgttgcaggctgatcttcaagcagggagcaagaggagctctgttattttctggtttcgctcagaacaaatctaataataycagtctcacagctcctgtggcagcaggagctttacgtgggttatgagggtgtgaacctggctaycacagctacatttcccttggttcagctggataacycacagaccacagtcacctagaatgttctctgctcttcattcaaraaatggcacaacagtcttctatggcagtgctctctttacatcttaaaagatagagtgcatgtgtattttctttaccaatggctgcagtagtaactcatcagaagaaatgaaatgctcagactacagcagtgtcttttatatgcttttagagatgtctggtggctcaaagatgttttgcatgcagactgcctggtttaaacgcccacatgaaagacacagtttgtatgtgaaatcacaatctgcagtagaaagagct

SEQ ID NO: 29314 - DNA, 573 bp, Chicken  19866894248054_4
ctttagcacatatttagatacctacagtgctgaaacctgatgcaacagaaaggagagcatccatttctcaccctgtttgttgcaggctgatcttcaagcagggagcaagaggagctctgttattttctggtttcgctcagaacaaatctaataataycagtctcacagctcctgtggcagcaggagctttacgtgggttatgagggtgtgaacctggctaycacagctacatttcccttggttcagctggataacycacagaccacagtcacctagaatgttctctgctcttcattcaaraaatggcacaacagtcttctatggcagtgctctctttacatcttaaaagatagagtgcatgtgtattttctttaccaatggctgcagtagtaactcatcagaagaaatgaaatgctcagactacagcagtgtcttttatatgcttttagagatgtctggtggctcaaagatgttttgcatgcagactgcctggtttaaacgcccacatgaaagacacagtttgtatgtgaaatcacaatctgcagtagaaagagctcatcagatttctaaaag

SEQ ID NO: 29315 - DNA, 520 bp, Chicken  19866894248058_1
tccaggtctggccttgcctgactttgcattgccttgcctggcattgcattgccttgcctggcctggcctggcttggcctggcattctctagccttgcctggcctggccttgcattgcctggcctggccttcctgtcctagcttggtctattcttccttgtactttgcttcccttgccttgccttaccatgccatgccttgccttgcctgacatggcgttgcctggacttgccttgccttgccttgtctggcctggactgcactaaccaggcctggcgttttcttgctttctcttgcatgmcctgacctggcctggcctggtctagcctggccttccctttttttgtcttgcctaacctggcctgtcctagccaggccttgcctgtcctggacttgccttgcctttcctggcctggcgttgcctgtcatggcgttgcctgtcatggccttgcctgtcctggacttgccttgccttgcctggcctggcctggcctcgcgttgcctttcacggccttgccttc

SEQ ID NO: 29316 - DNA, 599 bp, Chicken  19866894248059_1
  misc_feature (1)..(238): n is any nucleotide
nnnnnnnnnnnnnnnnnnnnnnnnnnnnnnnnnnnnnnnnnnnnnnnnnnnnnnnnnnnnnnnnnnnnnnnnnnnnnnnnnnnnnnnnnnnnnnnnnnnnnnnnnnnnnnnnnnnnnnnnnnnnnnnnnnnnnnnnnnnnnnnnnnnnnnnnnnnnnnnnnnnnnnnnnnnnnnnnnnnnnnnnnnnnnnnnnnnnnnnnnnnnnnnnnnnnnnnnnnnnnnnnnnnnnnnnnnnnnncctagcattcattcatttaacaaaaaaaaagaagccataaatgaaggttcagagtggctgaraaggagacactatcctgtggtttattgcattctgagccagggaacacagcctttatagcactattaccaatgaattttaaatcagcctaaagttcaaacttcactgaagcatcacattgtatgttgaaatcagatgaccattttgtctggcaaatgccatctatatttcagaaaacatccatgttctcatcaaaaatgaattaaaagacatgagaacttcaagcatcatttgtcatctaaagatcgtgttcattaatacgcctcatatctgtaactctgagaaaagcaaagtcaatttc

SEQ ID NO: 29317 - DNA, 599 bp, Chicken  19866894248068_1
  misc_feature (1)..(97): n is any nucleotide
nnnnnnnnnnnnnnnnnnnnnnnnnnnnnnnnnnnnnnnnnnnnnnnnnnnnnnnnnnnnnnnnnnnnnnnnnnnnnnnnnnnnnnnnnnnnnnnnncctgaaggtgcacaaatctgcaaaatctttgcctctgtgtgtaaggtttaagtaaaagaaatcactgaatcattgaatcatagaatggcttgggttggaagggacctcaaggatcatcaagctccaatccccctgccatatgcagggccaccaacctccatatctaactccagacaaggctgcccagggccccatccaacccrgctttgaacacctccagggacggggcatccacaacctctctgggcagcctgtgccagcacctcaccactctcttggtaaagaaatttcccctgatatccaacctaaatcttccctccctcaatttaaaaccatttccccttgtcctgcctgtttcctgaaatgttaattctatgaatagcatgtcagaagkgtactcagcagctggttgaacacaacatgagaaccaaatgctacaattattcaaaagccttcagcttgcatctacaggccagctgtttcccagcacacgtctacattc

SEQ ID NO: 29318 - DNA, 600 bp, Chicken  19866894248068_2
ttggaagggacctcaaggatcatcaagctccaatccccctgccatatgcagggccaccaacctccatatctaactccagacaaggctgcccagggccccatccaacccrgctttgaacacctccagggacggggcatccacaacctctctgggcagcctgtgccagcacctcaccactctcttggtaaagaaatttcccctgatatccaacctaaatcttccctccctcaatttaaaaccatttccccttgtcctgcctgtttcctgaaatgttaattctatgaatagcatgtcagaagkgtactcagcagctggttgaacacaacatgagaaccaaatgctacaattattcaaaagccttcagcttgcatctacaggccagctgtttcccagcacacgtctacattcactacaaaagtcatcttccatagctatccttctgaagaggcgtctgtttccttatggaaagcacttggtcagtgtacatagatctaacttcagatgcagaagcaggggaatacttgagaagtgaatcaaaatccatttctctgagcaaagggctatctctgttttgaatacagtctggtgcatctaaattaa

SEQ ID NO: 29319 - DNA, 600 bp, Chicken  19866894248072_1
aggggttggaagggacctctagagatcatcgagtccaaccccaaatgtactgtgtcggtcagagcacctagccagcctttcccaggcagtgcttctcaaacaaactcccaaatgagaacctccaggacctgttggagagataatagtcttcctgcagcagttcaacatatccatccagtgccaccactaggcctgagaagctgaagagcactgcagagaatgggcttctgcacttccctgcagggattcccttgggctttgggaagctgtctgttctctacctgcctgcagtacaggccytgttaccttccagcttctggctcttgaaaagatttctgatgactggaaacgctggttggagatagttggcatttctccttttgggagaataggggacttcttttcagtatctacttcttccgtgtttcttgaaatagcataagcttcgctcctgtggaggtgataaaaagaaagcaagtaaagttgcacattcataatttataaaggagagctcacaatcagttaacgcataacaagcagtgtgtggccaactcttctgtaccttacagctgcgagctcaacytcctgatggcagggaag

SEQ ID NO: 29320 - DNA, 600 bp, Chicken  19866894248072_2
gcctgcagtacaggccytgttaccttccagcttctggctcttgaaaagatttctgatgactggaaacgctggttggagatagttggcatttctccttttgggagaataggggacttcttttcagtatctacttcttccgtgtttcttgaaatagcataagcttcgctcctgtggaggtgataaaaagaaagcaagtaaagttgcacattcataatttataaaggagagctcacaatcagttaacgcataacaagcagtgtgtggccaactcttctgtaccttacagctgcgagctcaacytcctgatggcagggaagggtttcaatcttcacattcttctctttcatatttatcctggcatcaaatttcattgtagtgttggcactgaactctgcatgaagttcaagaccactctgaaggtactgtgtattagtacccatcatagcaatcatatgaatatatactctgaaagtgtgaaataaaaacatgcataattacaaatcaatatacgcatttttatctttgaaatgcagaattgaattttcacagtgttcagtttattgcaagaactactgctggcagattaaaaagatgtaacac

SEQ ID NO: 29321 - DNA, 600 bp, Chicken  19866894248075_1
actggagcaagttgcccagagagctggtggatgccctatccctgcagatattcaaggttgggccagaccatgctatgaggaacgtgatctagttttatgagccatatgcttatgctatctaagtgttcttcctataacgtcagtttcttaccatcagtgttttcttccatgttataagaaggctataaaagtgatcactttttgttcccagtgattttgtttttagcttgagaatttcccaggtgtctgccacaatagcgtatgggttcttgcgaatgctttctgaagccatttttcttraaatgctcagacagggcttgttttagtatttggagaggtgtcagtttgaatgtcttagccaaattgaaatgtggctgtctgcctttttagctcccccatccatgtgagctggtttcttcaccccagacctgaaggcattttgtcattaaatgaaatgttttcacctgcagtgaaatgctttgggatgaaaggtatcatacaaatgaatgattataacaagagaaataaatgtagtgaagatacagtttctgtgtttagtagttaaatggacaagcggtacttttcccaggcaaataagtg

SEQ ID NO: 29322 - DNA, 600 bp, Chicken  19866894248076_1
ggaaaggctggcagtttggctgcaagggtttattttagctcaggagatgctgtctgcccttcctcgctgacatctttttggttcattaagggcaggaatgctgacaaagctgtaaatgctgcagacaggacttcctcttatccatatggcacctgcaagaaaagaggcacatgggtggttggaagggaggaaaggggtgatagtgtgacctggggtggtggacaagccaacactatctgtgagacatccaaactctctgtacctgttctgtgaggatgtgctgtgctgggtgcaagtctrtgggcagsagacatccatcattacgacatatgcacrcttaaactactttttctgtgattaattttttcagtgcagggattagttggtaccgtgagagtttggagtcagatatattttaggaagacctttagccttacaaattttccctgcttagattagtttttctcctccagttctggcatggatgagctcttcctatggcatgccagcccctccatacatagcaaggcacacctccttacagctcaggcactgagtgaggaacgggcagtttggggggttcaggggaccaaagcagca

SEQ ID NO: 29323 - DNA, 600 bp, Chicken  19866894248076_2
tggcagtttggctgcaagggtttattttagctcaggagatgctgtctgcccttcctcgctgacatctttttggttcattaagggcaggaatgctgacaaagctgtaaatgctgcagacaggacttcctcttatccatatggcacctgcaagaaaagaggcacatgggtggttggaagggaggaaaggggtgatagtgtgacctggggtggtggacaagccaacactatctgtgagacatccaaactctctgtacctgttctgtgaggatgtgctgtgctgggtgcaagtctrtgggcagsagacatccatcattacgacatatgcacrcttaaactactttttctgtgattaattttttcagtgcagggattagttggtaccgtgagagtttggagtcagatatattttaggaagacctttagccttacaaattttccctgcttagattagtttttctcctccagttctggcatggatgagctcttcctatggcatgccagcccctccatacatagcaaggcacacctccttacagctcaggcactgagtgaggaacgggcagtttggggggttcaggggaccaaagcagcatacagcct

SEQ ID NO: 29324 - DNA, 600 bp, Chicken  19866894248076_3
agctcaggagatgctgtctgcccttcctcgctgacatctttttggttcattaagggcaggaatgctgacaaagctgtaaatgctgcagacaggacttcctcttatccatatggcacctgcaagaaaagaggcacatgggtggttggaagggaggaaaggggtgatagtgtgacctggggtggtggacaagccaacactatctgtgagacatccaaactctctgtacctgttctgtgaggatgtgctgtgctgggtgcaagtctrtgggcagsagacatccatcattacgacatatgcacrcttaaactactttttctgtgattaattttttcagtgcagggattagttggtaccgtgagagtttggagtcagatatattttaggaagacctttagccttacaaattttccctgcttagattagtttttctcctccagttctggcatggatgagctcttcctatggcatgccagcccctccatacatagcaaggcacacctccttacagctcaggcactgagtgaggaacgggcagtttggggggttcaggggaccaaagcagcatacagcctctggaagggtgggagagcatagttattt

SEQ ID NO: 29325 - DNA, 600 bp, Chicken  19866894248077_1
tcacggaattactgctctcatactttcttcctctatcctgttttctcactcactttctctttaaagctttttttgttgctgttgttctttataaacacagcagtaggaaagaagactcgtggtgataaaaagacagtgctgtgtgaaactattattaaaacaccacaagagacactgaaccaactgtggcatctgagtgggatcagtctctgttcacaaaaaggctaaattgttacaaaaagcataacaaatcagcaaaaccaagacagagatgtcttagttcttggtaagctaggataygtttgtctaaaatgaggctggaaaaaaagcacagaaaataattttaattaacaaaactggtaacattcagatctgaaaaaataaagcacaaaataaatctaaatgtgtcttttggaataagttcacatttcattagataacactctctataaattatcagactataattgaagacagtatggaaatacaaaatcacagatttggttattcccagacttctcagtgggatgggttgctccctcaatgtgagtgccatttctcaatgaacaacaaccsagaaatgttagaaacatgtgtcta

SEQ ID NO: 29326 - DNA, 600 bp, Chicken  19866894248077_2
ttagttcttggtaagctaggataygtttgtctaaaatgaggctggaaaaaaagcacagaaaataattttaattaacaaaactggtaacattcagatctgaaaaaataaagcacaaaataaatctaaatgtgtcttttggaataagttcacatttcattagataacactctctataaattatcagactataattgaagacagtatggaaatacaaaatcacagatttggttattcccagacttctcagtgggatgggttgctccctcaatgtgagtgccatttctcaatgaacaacaaccsagaaatgttagaaacatgtgtctaaattaagcaaagcaagtgcagatcctttgttattttgctagacacaaggaaaattcaatgtccgaaattcccttgtttcttcctactttttttcccccacatcgcttttcccgttccttttcttttactcctcctactctaastaatggaagaaagattctggattaatgctacacgaggtgaaaaaagattatggtttagaacagggatgatcataggaaaaaaaagtcattaatttttaagtggggagagagagtgacatataaagagtataaa

SEQ ID NO: 29327 - DNA, 518 bp, Chicken  19866894248077_3
tctctataaattatcagactataattgaagacagtatggaaatacaaaatcacagatttggttattcccagacttctcagtgggatgggttgctccctcaatgtgagtgccatttctcaatgaacaacaaccsagaaatgttagaaacatgtgtctaaattaagcaaagcaagtgcagatcctttgttattttgctagacacaaggaaaattcaatgtccgaaattcccttgtttcttcctactttttttcccccacatcgcttttcccgttccttttcttttactcctcctactctaastaatggaagaaagattctggattaatgctacacgaggtgaaaaaagattatggtttagaacagggatgatcataggaaaaaaaagtcattaatttttaagtggggagagagagtgacatataaagagtataaaatgtacttctataccttattgtcccactgagaaagtcttcactgaccattttaatattagttctggatatatttcaaactgaaaa

SEQ ID NO: 29328 - DNA, 599 bp, Chicken  19866894248083_1
  misc_feature (1)..(238): n is any nucleotide
nnnnnnnnnnnnnnnnnnnnnnnnnnnnnnnnnnnnnnnnnnnnnnnnnnnnnnnnnnnnnnnnnnnnnnnnnnnnnnnnnnnnnnnnnnnnnnnnnnnnnnnnnnnnnnnnnnnnnnnnnnnnnnnnnnnnnnnnnnnnnnnnnnnnnnnnnnnnnnnnnnnnnnnnnnnnnnnnnnnnnnnnnnnnnnnnnnnnnnnnnnnnnnnnnnnnnnnnnnnnnnnnnnnnnnnnnnnnnntgttttgatttctaagaggatttttcttcagtgttagattctcagaaatcttttttcttttsttttttaagtaattaataatggagcaggcttttagtatctaccctggaaggtaaaaacccttaatcacagtagcatcattagtgctttcaagcatttaattttgatgcttgacaaagcgcatggccattgataagaacaaataagtgttgttgtgtgcaattgagggaaaaaagaaaagcatgaaaacccctaagcttcaagtaattaaatttaaatatgttatttgaatttagctgagataatgtacaaactgtgggtatatttttcaatcagtgaaagaccccttgagtaaacatga

SEQ ID NO: 29329 - DNA, 556 bp, Chicken  19866894248083_2
gttgttgtgtgcaattgagggaaaaaagaaaagcatgaaaacccctaagcttcaagtaattaaatttaaatatgttatttgaatttagctgagataatgtacaaactgtgggtatatttttcaatcagtgaaagaccccttgagtaaacatgatccatttaaattcaaatcatggggagtggaaagtaaaccctgctgtggttaagaaggcatcttcactagaagactgggcattgtgtatgtggtgtgcgagcactcatgttctgtatagtttcataaaggactgtgttcactcatggrtgcctacatgccagagacyttgttgcatctatttattcatttatttagctagttagttgtctttcctcccacccccccagcccttaatttgaaccggtaatgaaaaactgacactgccatttccaccttttaaagtgcctcaaaaaggttataattcagcacttattagccttgggatatgacttcatggcatttgggtgaagtttttgcagtacatctgtgcctctttctctctctgtaggccacaagctcagaa

SEQ ID NO: 29330 - DNA, 537 bp, Chicken  19866894248083_3
ggaaaaaagaaaagcatgaaaacccctaagcttcaagtaattaaatttaaatatgttatttgaatttagctgagataatgtacaaactgtgggtatatttttcaatcagtgaaagaccccttgagtaaacatgatccatttaaattcaaatcatggggagtggaaagtaaaccctgctgtggttaagaaggcatcttcactagaagactgggcattgtgtatgtggtgtgcgagcactcatgttctgtatagtttcataaaggactgtgttcactcatggrtgcctacatgccagagacyttgttgcatctatttattcatttatttagctagttagttgtctttcctcccacccccccagcccttaatttgaaccggtaatgaaaaactgacactgccatttccaccttttaaagtgcctcaaaaaggttataattcagcacttattagccttgggatatgacttcatggcatttgggtgaagtttttgcagtacatctgtgcctctttctctctctgtaggccacaagctcagaa

SEQ ID NO: 29331 - DNA, 600 bp, Chicken  19866894248085_1
tttcccaccctgtctgacgatcctacccgtggccctgggacccacctgccaagccctgaggacgtcgccccgaggtcccccctcacccgctgtcctcacaccagggtcccacagctccctactcgccagcacggagccggccacagccaagggctctgccttgcctggtggtgaaaggagaagctcgcccctcactcagagcctgcagccattcctccacagcgctgctctccagatgtgccgacacccggcaccgcggccctcctccccaataaagagatcactcacgctccgtcccayggtgccgtgttagggagtcctatcactcacctccgggtcccatccccgcatccgggcctccacaacccacagcagccacacccaaagaaaggtaatgaagccgctgaggggtgtggagcacaggtcttatggggagtggctgaaggagctgggattgttcagtctggagaagagaaagctgagggaaagtattattgttctctgccactccctgaaatgaggttatagtgaggtaaagtcggtctcttytcccacgtaaggagtgaaaagatgagaggtaatgacctcgagttgtccagg

SEQ ID NO: 29332 - DNA, 600 bp, Chicken  19866894248085_2
ggcaccgcggccctcctccccaataaagagatcactcacgctccgtcccayggtgccgtgttagggagtcctatcactcacctccgggtcccatccccgcatccgggcctccacaacccacagcagccacacccaaagaaaggtaatgaagccgctgaggggtgtggagcacaggtcttatggggagtggctgaaggagctgggattgttcagtctggagaagagaaagctgagggaaagtattattgttctctgccactccctgaaatgaggttatagtgaggtaaagtcggtctcttytcccacgtaaggagtgaaaagatgagaggtaatgacctcgagttgtccaggggaggtacaggctgaatattaggaaaaacctcttccctgaaagaatggtcaggcattggaacgggatgcccagggcggtrgtggagtcaccacccctggaggtgttgaagaaacgtggaaatgtggcatgtgggaacgtgatggggtcatgtagtaggcgatactgaatcacagaatcaccaaggctggaagagaactccaagatcattgagcccaaccggccaccttcacgtgccacatctaaacgtt

SEQ ID NO: 29333 - DNA, 502 bp, Chicken  19866894248085_3
cccaaagaaaggtaatgaagccgctgaggggtgtggagcacaggtcttatggggagtggctgaaggagctgggattgttcagtctggagaagagaaagctgagggaaagtattattgttctctgccactccctgaaatgaggttatagtgaggtaaagtcggtctcttytcccacgtaaggagtgaaaagatgagaggtaatgacctcgagttgtccaggggaggtacaggctgaatattaggaaaaacctcttccctgaaagaatggtcaggcattggaacgggatgcccagggcggtrgtggagtcaccacccctggaggtgttgaagaaacgtggaaatgtggcatgtgggaacgtgatggggtcatgtagtaggcgatactgaatcacagaatcaccaaggctggaagagaactccaagatcattgagcccaaccggccaccttcacgtgccacatctaaacgtttcttggtggcaagcggacagacgggctcaatga

SEQ ID NO: 29334 - DNA, 600 bp, Chicken  19866894248094_1
taattaagctgtgaataccgtgccaagaactgctggttctttgcatgaaataggatttagtccaggcttcttgacacagaaggcaacactttttcaaagcctgacacagggagaggttcaaaatatgacttcttatcctggctaagttgcctagtcctacctgcagcttcttcccatctgctggctttgttccatcctccgcaactgccacactgcttttctgtgtacaaaaaagaatgaaaacctttgaatgccattaccacttcacctgcttttatgggatctatagatagctctcaractaatgtctgtgagagtgggacaatcaaaagaaatgactatgtatgaacactactgaaagtgccaaagccatgtgttttccttaaaccaatacagcctctgagggatgtgggattatgcttgcagcaactcagtgaggatgtaggtatctagaaacaaacccacgtgttctctaccttctgttccttgtagatgtacacagccccagatttcacccccaaacatgtgtatcctgacttatcttctttcaaaggcagagtgaaaacacaaagatgtgagatgtgtcttcttccagtgatt

SEQ ID NO: 29335 - DNA, 600 bp, Chicken  19866894248094_2
tttaccacttttccttcctctccttaaactgcatgaagagagtgccaagaccagaagggacaaaacatgtttgaatgccagtgaaacacatctgaatggtaaagtgtgtcagtgccagaggacagcttgaaatctaatagtctgctccacatctggcagtagcacaggccaagagaactaagtggcagcaggagaagaagcagggggagcaactgagggggaggaattgaacaggcagactcagatcccaagtgttctggagtgcatgtcctggccggatctaccagattgaaagggtarctggctctggcaacagccttcagatgctgtctttttgtaggtagtcatgtcttccttcaraagatggtgagcgaagggctgtggtctcaaactttgagaacgtaattacagccacagaccttcttgtctgcaccagtagcataaagaattgtgtctctgacacagctgcggttaatacacagaaacaggatttgggcattttgatcttgtgacaaaatgctgactggcagcagtggcaatggttgtggaaggctgccagatccccttctgtgctgcagactggtaacaagtgataccacc

SEQ ID NO: 29336 - DNA, 600 bp, Chicken  19866894248094_3
caaaacatgtttgaatgccagtgaaacacatctgaatggtaaagtgtgtcagtgccagaggacagcttgaaatctaatagtctgctccacatctggcagtagcacaggccaagagaactaagtggcagcaggagaagaagcagggggagcaactgagggggaggaattgaacaggcagactcagatcccaagtgttctggagtgcatgtcctggccggatctaccagattgaaagggtarctggctctggcaacagccttcagatgctgtctttttgtaggtagtcatgtcttccttcaraagatggtgagcgaagggctgtggtctcaaactttgagaacgtaattacagccacagaccttcttgtctgcaccagtagcataaagaattgtgtctctgacacagctgcggttaatacacagaaacaggatttgggcattttgatcttgtgacaaaatgctgactggcagcagtggcaatggttgtggaaggctgccagatccccttctgtgctgcagactggtaacaagtgataccaccagcatcacagtaacacacccaaactcaaagtgggaaaagagagtttcttccaacatccct

SEQ ID NO: 29337 - DNA, 600 bp, Chicken  19866894248098_1
atgcaaacttgggctagaccagtacaaaagcaagattgtgctgccaggctttgtaaaataatattgacacatggctacataaataatattagtgtaataggaaacataaagttgagcctaggagcccacctctacaagacatgcaacgtgaagggatggaagtcttgtttcgaattagaagaaaactgcaattaacatttgttgtgcagtgctttcacgggttcttcagtgtaggttggaggtctagcacatttcaattcaccagtcactttcactggagctttgtcagaaggaaagtckgaaagcagactgccttcctactcttccccaacagaatcagctcacacagaagttaaactgcaccttcagcttttgtgcaaaagctgatcagaaactgaccaacaggaaacatagtctggtaagaacacgccatttacttttcccttgcagccagaccagagttacttaacaactcttcacagcactggtaaacaaggccagtgtctaattaatctcttgcagaatcataaaatggcatctctgttctccctacaattttgtaatctagaattagatttctaataaaaaaaacccctccat

SEQ ID NO: 29338 - DNA, 599 bp, Chicken  19866894248101_1
  misc_feature (1)..(21): n is any nucleotide
nnnnnnnnnnnnnnnnnnnnnaagatgagggctaatccagtgtgagcaggagcctctgcattgtttggcctatctcagaggtgctaagagggataactgtgagctgttgtcttgggctttcctgagtctggaatctttgcaatagcatggagttgattggcagcatcctccccacagcaggcagcggagtgacaccaggcttaggacagagcaagccttagtcttcccgtgactggatagcgttggaacctgtgatctggaagtgagaggtactgtgttccattatgtgttatgctaacrgagaatagagagagcttggaagactttattaataccaggtgatgtttggtggggatactgcaactcttaaaatgataagcactagataaacattgagaagtccatttaatgtaacctttttccctaggggtgtcaatgtttctgcagttctgatgcactgatgtggttactttgcatgtgtgtgaaccagctttcctagacaccaattatggctgcttaaaagaagtgtgcagacccctgctatctccagtccacaaactggaaatgacgggtacagaatcagagtgtttgtaaacttt

SEQ ID NO: 29339 - DNA, 599 bp, Chicken  19866894248102_1
  misc_feature (1)..(59): n is any nucleotide
nnnnnnnnnnnnnnnnnnnnnnnnnnnnnnnnnnnnnnnnnnnnnnnnnnnnnnnnnnnctaaaatctcttagattttgcatttaaaataaggtataagtaaactggataaggaataatagatcagaaaaggagccttctggcttccaggctgccctgcaaagcataaaatgtggtatcaaccagcagtgcttgcatcttgctgtagtttacaccaggtcaattttttagaaaaaagaagagatgctcactcaagtcctggttcataaaggccatggccactggcacataaatctagacrttatcagcatgttaacttgctgcttttctaataagaatatatcctgatggccttggtcttgattgttgggaaaaatattaataatataaatctcatgttagaagtaagtcttaaagaaaacacccaggacttactggaaggcatctgckttgttcacagaacaagcaaagaatgctgaggtgagttttcctccaattctatgcctgcaaacgaatgttcagtgctgggagtggctgggtgagttcgttaggtgctgatggaagatctgtttcacctgctctgagaactgctgggggcag

SEQ ID NO: 29340 - DNA, 600 bp, Chicken  19866894248102_2
gctgccctgcaaagcataaaatgtggtatcaaccagcagtgcttgcatcttgctgtagtttacaccaggtcaattttttagaaaaaagaagagatgctcactcaagtcctggttcataaaggccatggccactggcacataaatctagacrttatcagcatgttaacttgctgcttttctaataagaatatatcctgatggccttggtcttgattgttgggaaaaatattaataatataaatctcatgttagaagtaagtcttaaagaaaacacccaggacttactggaaggcatctgckttgttcacagaacaagcaaagaatgctgaggtgagttttcctccaattctatgcctgcaaacgaatgttcagtgctgggagtggctgggtgagttcgttaggtgctgatggaagatctgtttcacctgctctgagaactgctgggggcagcctgtgaactctcccggctttctctctcctttcacaacgtaggtgtggccaaggtacccccatgcattttggcatggagaagatgagggctaatccagtgtgagcaggaacctctgcattgtttggcctatctcagaggtgctaagaggg

SEQ ID NO: 29341 - DNA, 600 bp, Chicken  19866894248104_1
tcgcttcgaagtgacagcagcacagaagcaaggtcggcatttcctgaaatgaaaaagctttcattttgtcctgcctccataaacacctccttccccgggccctgagcaaagccgcacgcagtgcctggcagcaccgcacctggagacgctgcacccctcccagcacacactgcccggagcaggagctgccttcctgctgcctgcatacaccaacggagcagctctgaaggcttaacctggaaccgggagctccaggacaagcagtcccattgccaaccccaccagcattaagaccccatrtgtgcacagcccgctgcatctgaggacagccgggctcacggcacagcgctcagcagggccgtgcacacacttgtgctgctctcagggcagaagggaattgtttaaaccacgcagccccacacatcgtgtttgctgctcttttttcttttwtttttcttttaccattattaaacttggaggttttacgagctttcacagctccgtttgcctccttaattggcgccactgtttttaaccctgctgccggagctgcattgccatggttacccacacaagcctcagcgagcaggaggtattttt

SEQ ID NO: 29342 - DNA, 600 bp, Chicken  19866894248104_2
acgctgcacccctcccagcacacactgcccggagcaggagctgccttcctgctgcctgcatacaccaacggagcagctctgaaggcttaacctggaaccgggagctccaggacaagcagtcccattgccaaccccaccagcattaagaccccatrtgtgcacagcccgctgcatctgaggacagccgggctcacggcacagcgctcagcagggccgtgcacacacttgtgctgctctcagggcagaagggaattgtttaaaccacgcagccccacacatcgtgtttgctgctcttttttrttttwtttttcttttaccattattaaacttggaggttttacgagctttcacagctccgtttgcctccttaattggcgccactgtttttaaccctgctgccggagctgcattgccatggttacccacacaagcctcagcgagcaggaggtatttttagaattgccaaaatgcacatctccaacaagcggggctgtgccacacagagctctgctccttccaccacaccagcattaaaatgagggaaattcaaaagtcactgcaggaggggcccccagcacagctcccacacacccactggga

SEQ ID NO: 29343 - DNA, 600 bp, Chicken  19866894248104_3; identical to SEQ ID NO: 29342

SEQ ID NO: 29344 - DNA, 600 bp, Chicken  19866894248104_4
gcacccctcccagcacacactgcccggagcaggagctgccttcctgctgcctgcatacaccaacggagcagctctgaaggcttaacctggaaccgggagctccaggacaagcagtcccattgccaaccccaccagcattaagaccccatrtgtgcacagcccgctgcatctgaggacagccgggctcacggcacagcgctcagcagggccgtgcacacacttgtgctgctctcagggcagaagggaattgtttaaaccacgcagccccacacatcgtgtttgctgctcttttttcttttwtttttcttttaccattattaaacttggaggttttacgagctttcacagctccgtttgcctccttaattggcgccactgtttttaaccctgctgccggagctgcattgccatggttacccacacaagcctcagcgagcaggaggtatttttagaattgccaaaatgcacatctccaacaagcggggctgtgccacacagagctctgctccttccaccacaccagcattaaaatgagggaaattcaaaagtcactgcaggaggggcccccagcacagctcccacacacccactgggagcact

SEQ ID NO: 29345 - DNA, 600 bp, Chicken  19866894248104_5
gaggttttacgagctttcacagctccgtttgcctccttaattggcgccactgtttttaaccctgctgccggagctgcattgccatggttacccacacaagcctcagcgagcaggaggtatttttagaattgccaaaatgcacatctccaacaagcggggctgtgccacacagagctctgctccttccaccacaccagcattaaaatgagggaaattcaaaagtcactgcaggaggggcccccagcacagctcccacacacccactgggagcactgtgggacagctcagcctggggacgtygtggcagccacccactgcagaccttctggtcaggaaggagcagacgagacctcccagccccccagaaacatcaccgtactgtgtgagcaagagctgtcctgcagtcacggggcacctcgccaagaatgcccacacgtggactcaacactgcttagggttcacatcacagatttaacatccccagggcctggatggtgcagtgatgcrttggttcctgcgccaagccaaagaggtacccatgagcaatggttgccctgctagctcctgctcagcttgcaaccgcctctccaccatcaccct

SEQ ID NO: 29346 - DNA, 578 bp, Chicken  19866894248104_6
agggaaattcaaaagtcactgcaggaggggcccccagcacagctcccacacacccactgggagcactgtgggacagctcagcctggggacgtygtggcagccacccactgcagaccttctggtcaggaaggagcagacgagacctcccagccccccagaaacatcaccgtactgtgtgagcaagagctgtcctgcagtcacggggcacctcgccaagaatgcccacacgtggactcaacactgcttagggttcacatcacagatttaacatccccagggcctggatggtgcagtgatgcrttggttcctgcgccaagccaaagaggtacccatgagcaatggttgccctgctagctcctgctcagcttgcaaccgcctctccaccatcaccctccatctctcacagcagcaattgcaagctctgcaaccaagaccggatacatcatcccaccccccccaagcaaaaggaaaatacacctatgctggcagctggctctgggtgcaccgcacacctggaaggacaccccccgcagtgcccggagcagtctgcctgcagcgacactcgcactgccccagct

SEQ ID NO: 29347 - DNA, 500 bp, Chicken  19866894248111_1
tttcatctggaaaaaaagaaggaatatattaaaattttaacaagggatcaaacagaacaacaagcaatcaaaaacaacaacaacaacaacaaaaaccaaccaacaaaaaacttgcaatattcagcttgaagatttttatttatttataatatacatattgttaaagagttatggcatcaagttcatatttttcatatagaagcctggatacacctaatattttaggatgccagtagtaccagggaaaatacactaaatgttttagatgctacatcttttaaaacaaaggatacatgtacyaaatgtacagtagaatttctattaatgaaattattaataacagaatttgtattttcacagatatgataaaagtctctttccaaagagaattaattaatatgagttttactgatataaattcaaaggcaattggatgaaatgagtttgggtttctaagcaaagttatttcagacctctatgtacataatcatgaataaaat

SEQ ID NO: 29348 - DNA, 600 bp, Chicken  19866894248112_1
gtgaccctcacagtaaagaagttctttcacatatttgtgtggaacttcctgtgttccagtttttggccagtgctccttgtcctatcagtacacaccactgaaaacagcctggcctcatccagttgcctcctgctctttcatatttataaacattaatcagattccctctcagtctcctcttcagcaggctgaacagtcccagctcataccctttcctcatacgggagatgctccaggcccctcatcatttttgtggccctctgttggactctctccagtagttccctgtcttttttgaamtggggggccagtatgagacacagtgctccagatgtggcctcaccagggcagagtagagggggaggatcacctccctcgacctgctggccacattcttcttgatgcaccccagggtaccattggccttcttggccacaaaggcacactgctggctcatggtcaccctgttgtccaccaggattcacatgtcctctgcagagctcctctccagcaggtcagcccctagcctgtactgatgcacgtggttatttcttcccaggtacaggactctgcacttgattttgttgaaccttgttgggc

SEQ ID NO: 29349 - DNA, 573 bp, Chicken  19866894248112_2
gagggggaggatcacctccctcgacctgctggccacattcttcttgatgcaccccagggtaccattggccttcttggccacaaaggcacactgctggctcatggtcaccctgttgtccaccaggattcacatgtcctctgcagagctcctctccagcaggtcagcccctagcctgtactgatgcacgtggttatttcttcccaggtacaggactctgcacttgattttgttgaaccttgttgggctcctctgtgcccagctgtccagtctgtccaggtcccattgaatggcagaacagcyttctggcatgtgagccactcctcccagctttgtatcaggagcaaacttgctgagggtggactctatcccatcaaccaggtcattgatgaagatgttgaacaagactggacccagcaccggcccgaacactgctagctacaggtcttcagccagactccatgtcactgatgacaactctctgagctctgccactcagccagttctcagccaacctcatctgagaaggatgatcttaaaccacgtattaaataacagatgacaaaatccaacaca

SEQ ID NO: 29350 - DNA, 599 bp, Chicken  19866894248114_1
  misc_feature (1)..(37): n is any nucleotide
nnnnnnnnnnnnnnnnnnnnnnnnnnnnnnnnnnnnntcctacatcaggctgctggtttcctcagtctgagatacttttgtatgctggtagaaacaagctattaggtttatcattggctttttgccataattttataagtgacacatctaatagtaggaaatgtaagtttcttggaagtgctgtttaactccaaccactttgttctgacttctgcacaatgcacagatggttatcctttgctgtgctgcatcagaacaggactttccatgggctgccctgggtgaacctggggcaaagcrcagctcattcaagagcctcattacatttagctgctgaggcctaaggtaataaaacctcagtgcctgtagggtttttgcagttattgtggcttctgaccccaaacggccttcctccttgccrtgtaaggctgtatttcaagaaggactctaagctttatgtttggtaggtccattatatgtggtgccaatccacagagagcacctccaagggcactgagcaccatcagcacctcagcagcagactgatggagaacctctctgatgaccactgggatgtctgatgtgtggtgctgcagttg

SEQ ID NO: 29351 - DNA, 600 bp, Chicken  19866894248114_2
ttgccataattttataagtgacacatctaatagtaggaaatgtaagtttcttggaagtgctgtttaactccaaccactttgttctgacttctgcacaatgcacagatggttatcctttgctgtgctgcatcagaacaggactttccatgggctgccctgggtgaacctggggcaaagcrcagctcattcaagagcctcattacatttagctgctgaggcctaaggtaataaaacctcagtgcctgtagggtttttgcagttattgtggcttctgaccccaaacggccttcctccttgccrtgtaaggctgtatttcaagaaggactctaagctttatgtttggtaggtccattatatgtggtgccaatccacagagagcacctccaagggcactgagcaccatcagcacctcagcagcagactgatggagaacctctctgatgaccactgggatgtctgatgtgtggtgctgcagttggctctgctggagcgcagtgtgtgcggccggggtgtcctcagctgtcctcatgtggaatgaggtgaagtgactgactagggagagccrcatgtaggatatagtgacaaaacygtacactggca

SEQ ID NO: 29352 - DNA, 600 bp, Chicken  19866894248114_3
tggcttctgaccccaaacggccttcctccttgccrtgtaaggctgtatttcaagaaggactctaagctttatgtttggtaggtccattatatgtggtgccaatccacagagagcacctccaagggcactgagcaccatcagcacctcagcagcagactgatggagaacctctctgatgaccactgggatgtctgatgtgtggtgctgcagttggctctgctggagcgcagtgtgtgcggccggggtgtcctcagctgtcctcatgtggaatgaggtgaagtgactgactagggagagccrcatgtaggatatagtgacaaaacygtacactggcacgtagaggtgctaagagaaagaacayggtgtgcactttcaaattggttattggttctgacaacttcctttggagctgttcctgcccaactctgtcccttcccgaggccactgccagctcctccctgccacgtgcctccctctggggaagcaggggaggcagtgccatctacgcagcttctgccgggctcccagaagatgtggttcaggtagaacacagtgccaygctgcagtgtttgcatttcagtattcatagaaggacttgga

SEQ ID NO: 29353 - DNA, 600 bp, Chicken  19866894248114_4
cctccttgccrtgtaaggctgtatttcaagaaggactctaagctttatgtttggtaggtccattatatgtggtgccaatccacagagagcacctccaagggcactgagcaccatcagcacctcagcagcagactgatggagaacctctctgatgaccactgggatgtctgatgtgtggtgctgcagttggctctgctggagcgcagtgtgtgcggccggggtgtcctcagctgtcctcatgtggaatgaggtgaagtgactgactagggagagccrcatgtaggatatagtgacaaaacygtacactggcacgtagaggtgctaagagaaagaacayggtgtgcactttcaaattggttattggttctgacaacttcctttggagctgttcctgcccaactctgtcccttcccgaggccactgccagctcctccctgccacgtgcctccctctggggaagcaggggaggcagtgccatctacgcagcttctgccgggctcccagaagatgtggttcaggtagaacacagtgccaygctgcagtgtttgcatttcagtattcatagaaggacttggagaacttgtttcctgttgtgaacta

SEQ ID NO: 29354 - DNA, 600 bp, Chicken  19866894248114_5
ctaagctttatgtttggtaggtccattatatgtggtgccaatccacagagagcacctccaagggcactgagcaccatcagcacctcagcagcagactgatggagaacctctctgatgaccactgggatgtctgatgtgtggtgctgcagttggctctgctggagcgcagtgtgtgcggccggggtgtcctcagctgtcctcatgtggaatgaggtgaagtgactgactagggagagccrcatgtaggatatagtgacaaaacygtacactggcacgtagaggtgctaagagaaagaacayggtgtgcactttcaaattggttattggttctgacaacttcctttggagctgttcctgcccaactctgtcccttcccgaggccactgccagctcctccctgccacgtgcctccctctggggaagcaggggaggcagtgccatctacgcagcttctgccgggctcccagaagatgtggttcaggtagaacacagtgccaygctgcagtgtttgcatttcagtattcatagaaggacttggagaacttgtttcctgttgtgaactatgaaatatccctgcagtggggtaataataatatacaa

SEQ ID NO: 29355 - DNA, 600 bp, Chicken  19866894248114_6
ctcatgtggaatgaggtgaagtgactgactagggagagccrcatgtaggatatagtgacaaaacygtacactggcacgtagaggtgctaagagaaagaacayggtgtgcactttcaaattggttattggttctgacaacttcctttggagctgttcctgcccaactctgtcccttcccgaggccactgccagctcctccctgccacgtgcctccctctggggaagcaggggaggcagtgccatctacgcagcttctgccgggctcccagaagatgtggttcaggtagaacacagtgccaygctgcagtgtttgcatttcagtattcatagaaggacttggagaacttgtttcctgttgtgaactatgaaatatccctgcagtggggtaataataatatacaactgctgaaatatccctgcagtgcctccttaggttttactgtggaaactgcagttaaaaaaaccaccaccacaacaaaaacagaaacagaatgaatcagccagcaaagatacttctgtgaggccaacatggaacgtttcccattttcattctattagcagaagaatgtaaaaatgtgatattacacataaaaaaaggaa

SEQ ID NO: 29356 - DNA, 600 bp, Chicken  19866894248115_1
cagagcatatatattttttccattcattaaaaaaaaaagattttaacaacagctttattaccactagtgtttgcttttttgcaatgtgtaagaaaggctacacctgcttcacaatcacagatggatatatctgaacccaaatgccaggaagtttacttctgaaataaacaagactttggtaagccaggctgcctttcagtcttgcatgatgcctttgatatacaaaattttcagactgtggtatgcataccactaatatcacatgagtaagtgaatctatatgcagatactttcaacagrcagctgttgcttcctttgtacatgcattgcctcatacagaggatgaaatactgattcaccaatgatggaattttaggggaaagacttaggaaactcttatagctagataattgtaggctcatggaaagaaagaatatagagttctcagcagatttaagcttcttaagcatactggatatatgtgtttcccttttcattcccttccctgtctgcaaatatccaaaagagagagactttggatcatccaggcagataatttttcccctttatttgtgaacttcaagaactgcctttgaagtt

SEQ ID NO: 29357 - DNA, 599 bp, Chicken  19866894248118_1
  misc_feature (1)..(268): n is any nucleotide
nnnnnnnnnnnnnnnnnnnnnnnnnnnnnnnnnnnnnnnnnnnnnnnnnnnnnnnnnnnnnnnnnnnnnnnnnnnnnnnnnnnnnnnnnnnnnnnnnnnnnnnnnnnnnnnnnnnnnnnnnnnnnnnnnnnnnnnnnnnnnnnnnnnnnnnnnnnnnnnnnnnnnnnnnnnnnnnnnnnnnnnnnnnnnnnnnnnnnnnnnnnnnnnnnnnnnnnnnnnnnnnnnnnnnnnnnnnnnnnnnnnnnnnnnnnnnnnnnnnnnnnnnnnnttttgggcccctcactacaagaaagacatggrggccctggaacatgtccagagaagggcaatgaagctggtgaggggcctggagcacaaatcttatggagaatggctgagggaactgggattgtttagtctggagaagaggaggctcaggggagaccttattgctctctacaactgcctgaaaggaagctgtggtgaggtgggttggcctcttctgccaggtaacagcaacaaggcaagaggtcatggtcttaagctgtagtgagagaggctcagattggatattaggaagaatttcttctcagaaggagtggtgagatgttagaacggcc

SEQ ID NO: 29358 - DNA, 600 bp, Chicken  19866894248120_1
atgtggttttgcattgtttggagtttggtttttttcaacagtaacagccattcattagaagttatcattggtaatactcaaaaatacagctgaaacctttcagtcctctctgctctgcccagtttttttcccttctgacttaggtcgttatagcaatcaaaactagataatattcaagtctgttatcaagcatcgtgaacacttatgctaaaagaagagataatgttaaaaaaaataataataaaaaaaaaagaagcaccattaccaatttttagctacagttacccatttttatactcygcagggatgtcagtacaggttaggaaagtattaagaggaccatccggaaataaaatgccatctgtggccagtcatgctctactgacttactggaaatagtaaagacatgcaattggtagttgtccaaaaaatacttactttacatacagaggacacaaattcacacaratygccttaggaatggcacattaacacatacaagcaagaatctcatacaagacaggttatgtataatggatatcagtaatgattgctgtcagtattactcactcatcagaggtcttgttggtcttctgatca

SEQ ID NO: 29359 - DNA, 600 bp, Chicken  19866894248120_2
aatattcaagtctgttatcaagcatcgtgaacacttatgctaaaagaagagataatgttaaaaaaaataataataaaaaaaaaagaagcaccattaccaatttttagctacagttacccatttttatactcygcagggatgtcagtacaggttaggaaagtattaagaggaccatccggaaataaaatgccatctgtggccagtcatgctctactgacttactggaaatagtaaagacatgcaattggtagttgtccaaaaaatacttactttacatacagaggacacaaattcacacaratygccttaggaatggcacattaacacatacaagcaagaatctcatacaagacaggttatgtataatggatatcagtaatgattgctgtcagtattactcactcatcagaggtcttgttggtcttctgatcactgtgggcttcctggtaattatatcctctgtgtgacccaatgatatatacaaaaaaaaaaaacaaaaaacatacaacattaaactcttaacatggttcaacttatcaaaaggaagtatctggaaattcagagagctgtattcagtaaatctttacgcatcatggaaga

SEQ ID NO: 29360 - DNA, 600 bp, Chicken  19866894248120_3
attcaagtctgttatcaagcatcgtgaacacttatgctaaaagaagagataatgttaaaaaaaataataataaaaaaaaaagaagcaccattaccaatttttagctacagttacccatttttatactcygcagggatgtcagtacaggttaggaaagtattaagaggaccatccggaaataaaatgccatctgtggccagtcatgctctactgacttactggaaatagtaaagacatgcaattggtagttgtccaaaaaatacttactttacatacagaggacacaaattcacacaratygccttaggaatggcacattaacacatacaagcaagaatctcatacaagacaggttatgtataatggatatcagtaatgattgctgtcagtattactcactcatcagaggtcttgttggtcttctgatcactgtgggcttcctggtaattatatcctctgtgtgacccaatgatatatacaaaaaaaaaaaacaaaaaacatacaacattaaactcttaacatggttcaacttatcaaaaggaagtatctggaaattcagagagctgtattcagtaaatctttacgcatcatggaagaaac

SEQ ID NO: 29361 - DNA, 600 bp, Chicken  19866894248122_1
gcacctatgctggtggagttacagaatgctttaccattttctcagatgaatttaacaaagctaagtgttagaaataaataatgtgtaagaaacagagccaagctattgtatccacatggatctgttccattgatgcaaacagtggaaacataagcagtgtgacagagaggctgagtttagaattacagtgctgttatttctttaggccggttaaagaaagatgctgcactgtcaaggatatcagatgaaagtcttgataaaattcaagatgaagaaacatcagtctttaaagagcttccyggtgccaaagcatctgatgagagctcagttccccttactggctcagtaacagaagctgctggggcatcagatactattgcaaatggaaaccatccccgtgtaccttatggtaagaaactaagataacacgacagtcttcttgttttgatagcatgttttgctgcacataagtctctatcataaatgataagtttgtgtttgggatgttcagctctaatccctctttgccatttgtggagaaagattctcatttacaagtgacattttctagagagcctgaaaacaattacattttgtttg

SEQ ID NO: 29362 - DNA, 599 bp, Chicken  19866894248126_1
  misc_feature (1)..(3): n is any nucleotide
nnntactctcgttgcagatccctgggagagcagcccctgccctcactccaccctcctgcaggagcagggaggcctgtcctcacccacctcatcccatagcagctcagatgccatgtcccagtcacctcgagggacccagccaggagctgtcaaggaaataaagttacctaccgaaactcaaaatgagcaaaacgttgccagaatgtaagagggaaaacaaagtcccagatgaaaaacaagtctccttaactgctgtctattagtaaacgtgttgcagtcctatttgcacagttgtgttayrcatgagggtggctgacggtgaagcagcccagcgaggcagaccctggaagtcatagaatcagaactgcagaatcgtctgagttggaagagacccttaaaggccatctggtccaactcccttaaaacaaacagggacacctacagctccatcaggtgctcagagctgctccagcctaagtcaccgagcccttcctacttttcacttgaggaagcagccaagcagcacgaaaaagaagcgtccgtctgccacgtctctgcaaatgtgagatatttcatctgtctgtcggggaagagattaa

SEQ ID NO: 29363 - DNA, 599 bp, Chicken  19866894248126_2
  misc_feature (1)..(2): n is any nucleotide
nntactctcgttgcagatccctgggagagcagcccctgccctcactccaccctcctgcaggagcagggaggcctgtcctcacccacctcatcccatagcagctcagatgccatgtcccagtcacctcgagggacccagccaggagctgtcaaggaaataaagttacctaccgaaactcaaaatgagcaaaacgttgccagaatgtaagagggaaaacaaagtcccagatgaaaaacaagtctccttaactgctgtctattagtaaacgtgttgcagtcctatttgcacagttgtgttayrcatgagggtggctgacggtgaagcagcccagcgaggcagaccctggaagtcatagaatcagaactgcagaatcgtctgagttggaagagacccttaaaggccatctggtccaactcccttaaaacaaacagggacacctacagctccatcaggtgctcagagctgctccagcctaagtcaccgagcccttcctacttttcacttgaggaagcagccaagcagcacgaaaaagaagcgtccgtctgccacgtctctgcaaatgtgagatatttcatctgtctgtcggggaagagattaag

SEQ ID NO: 29364 - DNA, 600 bp, Chicken  19866894248130_1
tcaccttctccttgttatataccagccacaagtggtctacatttccatactcagtggagaacagaagtataaaataaattctggtttctttgaaacatgagcagtgtatttttgattcatggctctgaaaactcgctgcctgtggccaccctgcaaagcaggacttgctgctcagacccgaggcagtgccccaaagctgaggggttaccggcaaaatcaatgagacaaggaaaggtttccagcaagcctcaccaagcctgcagatccacaagaaatcttggccatagccctgcatatctyggggcgtgagtaatgtctgcacttctgctgctgctctggtctaacaaatgccaggctaactggctagatcattaccctgcccgctatgggatggatccagmtcccactgcagccagctggagtctctccatcgggtgaagtggggagggattggccccagggttgctgttgtttgtccttctatggtgcacrctgcctccctccygctgtgcagggaggcagcaggagcccaaggtcaggagatgagggcaaaccctggaatcgcagcaattccttgcgagggacagaactcctatttaa

SEQ ID NO: 29365 - DNA, 600 bp, Chicken  19866894248130_2
cagtgtatttttgattcatggctctgaaaactcgctgcctgtggccaccctgcaaagcaggacttgctgctcagacccgaggcagtgccccaaagctgaggggttaccggcaaaatcaatgagacaaggaaaggtttccagcaagcctcaccaagcctgcagatccacaagaaatcttggccatagccctgcatatctyggggcgtgagtaatgtctgcacttctgctgctgctctggtctaacaaatgccaggctaactggctagatcattaccctgcccgctatgggatggatccagmtcccactgcagccagctggagtctctccatcgggtgaagtggggagggattggccccagggttgctgttgtttgtccttctatggtgcacrctgcctccctccygctgtgcagggaggcagcaggagcccaaggtcaggagatgagggcaaaccctggaatcgcagcaattccttgcgagggacagaactcctatttaaggaaaggagaaaaactaagagagggttttatgaccaggtccagaatgaggcaaagaaaaacacccatgtcagcagttcaaatcaaagcagacggtctttga

SEQ ID NO: 29366 - DNA, 600 bp, Chicken  19866894248130_3
aaagctgaggggttaccggcaaaatcaatgagacaaggaaaggtttccagcaagcctcaccaagcctgcagatccacaagaaatcttggccatagccctgcatatctyggggcgtgagtaatgtctgcacttctgctgctgctctggtctaacaaatgccaggctaactggctagatcattaccctgcccgctatgggatggatccagmtcccactgcagccagctggagtctctccatcgggtgaagtggggagggattggccccagggttgctgttgtttgtccttctatggtgcacrctgcctccctccygctgtgcagggaggcagcaggagcccaaggtcaggagatgagggcaaaccctggaatcgcagcaattccttgcgagggacagaactcctatttaaggaaaggagaaaaactaagagagggttttatgaccaggtccagaatgaggcaaagaaaaacacccatgtcagcagttcaaatcaaagcagacggtctttgagttacagccagcctgtccctggacaactgctggatggcagtgccaaggtgcaccccaaaacatgtctgcttgggcaagtttcatccactca

SEQ ID NO: 29367 - DNA, 600 bp, Chicken  19866894248130_4
taccggcaaaatcaatgagacaaggaaaggtttccagcaagcctcaccaagcctgcagatccacaagaaatcttggccatagccctgcatatctyggggcgtgagtaatgtctgcacttctgctgctgctctggtctaacaaatgccaggctaactggctagatcattaccctgcccgctatgggatggatccagmtcccactgcagccagctggagtctctccatcgggtgaagtggggagggattggccccagggttgctgttgtttgtccttctatggtgcacrctgcctccctccygctgtgcagggaggcagcaggagcccaaggtcaggagatgagggcaaaccctggaatcgcagcaattccttgcgagggacagaactcctatttaaggaaaggagaaaaactaagagagggttttatgaccaggtccagaatgaggcaaagaaaaacacccatgtcagcagttcaaatcaaagcagacggtctttgagttacagccagcctgtccctggacaactgctggatggcagtgccaaggtgcaccccaaaacatgtctgcttgggcaagtttcatccactcacattgcaagtagg

SEQ ID NO: 29368 - DNA, 600 bp, Chicken  19866894248145_1
attcagacaagggaagtgcctttggcaagacagttgagcaagggtttctcaagttcacaattttcaatgtaggtacttgagtttcagtgaaatcctttctactgtcccctattcttttctaatctgggctttgactagtttattttacctaagtaacctcactgtttcactgaactactttgcaagttggaaatatgtagattacaactatgtttctcacaccttaatgagataaacagggagataaaggtaggaaaacagaaatttgcctccctgttctaagtgccagttcttgccacrtttgttagtgattacaactataaaaaagcttttaaatgtaaagtttagacaaatagcatagtgttagcaggaagtataggattcataacttgatatttgaatgcaacagtgttcaattgcagtgaaactgtatttaattcttacaggcattaagttgattgtatacccagttgattattaataatgataatttccatgctttacttcacaggaggccattgctttaagtctcaaattaatgattaaaatgggtaaatgtggcttgtatctagcaactagctacctcagtgttttatacct

SEQ ID NO: 29369 - DNA, 599 bp, Chicken  19866894248151_1
  misc_feature (1)..(125): n is any nucleotide
nnnnnnnnnnnnnnnnnnnnnnnnnnnnnnnnnnnnnnnnnnnnnnnnnnnnnnnnnnnnnnnnnnnnnnnnnnnnnnnnnnnnnnnnnnnnnnnnnnnnnnnnnnnnnnnnnnnnnnnnnnnnncccacctcccagctcattgatcaccattttttttctttttttgctgccaaaatgaatgcccccatttggggcagtgccagaaaggatggatttaccctcagaagcccaaaggaggcagtgggcactgccagccttcgctgaaggcacaatgcggcctcgggaggaggaggaggargaagaagaaggtgtgaggggtgagggtgatgctcaacaaaagtgtactcaggcacttcaaattaaaatagaacaaaataaaataaaacccaacctaaaacattcattatattcattaaaacagcctgaaagggctgtgttgagagcagcgtcagtattgccaaattcaagagttccgatagtggggatggaaccccaaaacgtggggaggctgtggggtgctggtcctggggtgtggggacaacgagcagcccagctctggtcccctggtaagacagtgggggctttttaggaacaaaa

SEQ ID NO: 29370 - DNA, 599 bp, Chicken  19866894248156_1
  misc_feature (1)..(102): n is any nucleotide
nnnnnnnnnnnnnnnnnnnnnnnnnnnnnnnnnnnnnnnnnnnnnnnnnnnnnnnnnnnnnnnnnnnnnnnnnnnnnnnnnnnnnnnnnnnnnnnnnnnnnnaactgtggaaaaacacacatgcatgttttaactcccatgtggatcctttgattgtacaattgtgatgtgacaagtaccaaacgttgtagcagtgagtaatataaatggtggttatccacaaggcaggcatttgattattagtgccagtgaaaggacgtcaggttactgatgttggatactgctgttcctgtagcctaygagaaatgtgacaggtgcagtttcatgataaggctttctaaagatgtagatgagtagatatgttttccaggagtagggatggaggcaaagagcatgatggctgaaaagtgagcatgatgaatttctggactgaataacgtgtctacttcctatcacagcagaggaaggaacacactatgaaagaaatgtcttccagactcatatccctaataagctatgaaatatacgtgcataaactccctgcttgggcttatttcaatacccaaacaagcttgtgagcagtgtttgattattcaaga

SEQ ID NO: 29371 - DNA, 600 bp, Chicken  19866894248156_2
agtagatatgttttccaggagtagggatggaggcaaagagcatgatggctgaaaagtgagcatgatgaatttctggactgaataacgtgtctacttcctatcacagcagaggaaggaacacactatgaaagaaatgtcttccagactcatatccctaataagctatgaaatatacgtgcataaactccctgcttgggcttatttcaatacccaaacaagcttgtgagcagtgtttgattattcaagagtaggggaatgcaaaccttctgacacctccaagaagcttccaacaagcacttrgacttggaattggtgcctagggagcttttccacacagagataagtttaattgcagacatcagcattttgttttggagtctgctttgtccagaattttgcagtgtgtgcatatgtcatctcaagcataayagctagcaaaaaaggatcagctggtgctctagacttcaaggccaagtgctgtgaatatctgcaataaatgttacacacttgaataatgcctttgggctcagtctgtgctgtctctgggatagtgagccagggagcacggtatgaaccctgaactgctcgttgtgtgcatgc

SEQ ID NO: 29372 - DNA, 557 bp, Chicken  19866894248156_3
agaaatgtcttccagactcatatccctaataagctatgaaatatacgtgcataaactccctgcttgggcttatttcaatacccaaacaagcttgtgagcagtgtttgattattcaagagtaggggaatgcaaaccttctgacacctccaagaagcttccaacaagcacttrgacttggaattggtgcctagggagcttttccacacagagataagtttaattgcagacatcagcattttgttttggagtctgctttgtccagaattttgcagtgtgtgcatatgtcatctcaagcataayagctagcaaaaaaggatcagctggtgctctagacttcaaggccaagtgctgtgaatatctgcaataaatgttacacacttgaataatgcctttgggctcagtctgtgctgtctctgggatagtgagccagggagcacggtatgaaccctgaactgctcgttgtgtgcatgcattgctggcaaggggatacccctaagtccaactatctccaagtcctgtactttccctatcatccatgaaatggggctttcctatgg

SEQ ID NO: 29373 - DNA, 506 bp, Chicken  19866894248159_1
gtgtttttacagaaaacacgctttgaatggaaagctttcatgctccattttctcacctgtgccattcaccatgtgacagagataagacgcatccctgatggcatggattaatggagtaacttcagaggatgagctactacccaggtatttatatcatctcccagtgtgagtgagccgcctgcacttagacaagaaactgcaacccaaaaaaggcagaagtgtcactgcatcaaaaatgaagtcatatagaaaaaaggagtcaaatttgtctgttttctttgcagacagaaatggtagatrcggaatagctgcctaaaggggaaggtgatttgaccagcgtttccctctctagcataatacttctatagtgcagcaatgaatagtatcatctgcaacaatgcatgtttctttaatcaaagagtacatggaggggatgaaaaaaacatctgtaagcataaccaccgaatgcttagcagggctgacatcaaaaactcttagaatcacag

SEQ ID NO: 29374 - DNA, 600 bp, Chicken  19866894248160_1
taagtctagactgctttgccattgctgtttttgtgtatgcaaagctgtctagtgactgctttcagtcagcttttggtgtttttaaattgcatatgaagtaatttacctacatacttgtaacatgtctgttgtattgcagcctctcttgtctctggtttcccatgtggtcctacaaggtacactggaagatactggtttgaattagatcacaaaccagtataaagtaagaagcttagtttaaatgttttgtcaatatcccaatgcatcatttttaacacttctaatatgctacaggctcartaattttgctgtttctgaacagtgttttcagagggaatttagagttcyttcaaagatttagagtatttctagaactgagaagggccttttgtgaccatgtttttacaagttgctgtggtgtgcatacttatttagatgtaaattctacggagttggactgccaagtttttcttttaaaccttgacatggaaactttggctagtgctataaactgtttttccagtgtcaagtataatttactttcaaaataaatgctcagttcaaggagctctttataagctttccagtgcatctgtttag

SEQ ID NO: 29375 - DNA, 600 bp, Chicken  19866894248160_2
ctagtgactgctttcagtcagcttttggtgtttttaaattgcatatgaagtaatttacctacatacttgtaacatgtctgttgtattgcagcctctcttgtctctggtttcccatgtggtcctacaaggtacactggaagatactggtttgaattagatcacaaaccagtataaagtaagaagcttagtttaaatgttttgtcaatatcccaatgcatcatttttaacacttctaatatgctacaggctcartaattttgctgtttctgaacagtgttttcagagggaatttagagttcyttcaaagatttagagtatttctagaactgagaagggccttttgtgaccatgtttttacaagttgctgtggtgtgcatacttatttagatgtaaattctacggagttggactgccaagtttttcttttaaaccttgacatggaaactttggctagtgctataaactgtttttccagtgtcaagtataatttactttcaaaataaatgctcagttcaaggagctctttataagctttccagtgcatctgtttagagggggtttaaagaaatgtatatattccccaaagaattttattctaac

SEQ ID NO: 29376 - DNA, 600 bp, Chicken  19866894248160_3
acttggtgccatgtggtcaagcacaaagagcatagcacgcgctctttgatggagtcagtgtgagatgcatcacaatacaagacacctatgtgaagtagttggtgactttgctaacaacaggagtagaagataccatgagcactgcgtcctctgtgatatgaaaagaatgttggttgtatatattgcataggttaatcctagaaattaaggactgggcttcatccagtagtgctgtgcagctttccctcctctcaaggcagcagtggagatcaggctgctgtcctgtgtaagcctatgtargtgtgcatctgggctctgtaaggacccagaagagcagctggctgtgcttggtgaggcacttggrgatggatggagagggtagcacagggactaccttcccatcrggctggtttaaaaggagtggcgatgargagtgaaaaggaaggttcaaccagtgaatggttcaagggatttccctcccaggagggactaaaccctcctcagtcgttatttgaagggaagtagtgggtgttagttggcttggttgtcctgcttctttgttctaatctggaaataaggcatactggaaacttcaacttg

SEQ ID NO: 29377 - DNA, 600 bp, Chicken  19866894248160_4
atgcatcacaatacaagacacctatgtgaagtagttggtgactttgctaacaacaggagtagaagataccatgagcactgcgtcctctgtgatatgaaaagaatgttggttgtatatattgcataggttaatcctagaaattaaggactgggcttcatccagtagtgctgtgcagctttccctcctctcaaggcagcagtggagatcaggctgctgtcctgtgtaagcctatgtargtgtgcatctgggctctgtaaggacccagaagagcagctggctgtgcttggtgaggcacttggrgatggatggagagggtagcacagggactaccttcccatcrggctggtttaaaaggagtggcgatgargagtgaaaaggaaggttcaaccagtgaatggttcaagggatttccctcccaggagggactaaaccctcctcagtcgttatttgaagggaagtagtgggtgttagttggcttggttgtcctgcttctttgttctaatctggaaataaggcatactggaaacttcaacttgaattgttgttgcatttgttaacctgtagtgggacatttggcaaacatgtagaacatgggcttca

SEQ ID NO: 29378 - DNA, 600 bp, Chicken  19866894248160_5
actttgctaacaacaggagtagaagataccatgagcactgcgtcctctgtgatatgaaaagaatgttggttgtatatattgcataggttaatcctagaaattaaggactgggcttcatccagtagtgctgtgcagctttccctcctctcaaggcagcagtggagatcaggctgctgtcctgtgtaagcctatgtargtgtgcatctgggctctgtaaggacccagaagagcagctggctgtgcttggtgaggcacttggrgatggatggagagggtagcacagggactaccttcccatcrggctggtttaaaaggagtggcgatgargagtgaaaaggaaggttcaaccagtgaatggttcaagggatttccctcccaggagggactaaaccctcctcagtcgttatttgaagggaagtagtgggtgttagttggcttggttgtcctgcttctttgttctaatctggaaataaggcatactggaaacttcaacttgaattgttgttgcatttgttaacctgtagtgggacatttggcaaacatgtagaacatgggcttcatgcagaagggccttttccacagagtttaaaacaatccagt

SEQ ID NO: 29379 - DNA, 598 bp, Chicken  19866894248160_6
accatgagcactgcgtcctctgtgatatgaaaagaatgttggttgtatatattgcataggttaatcctagaaattaaggactgggcttcatccagtagtgctgtgcagctttccctcctctcaaggcagcagtggagatcaggctgctgtcctgtgtaagcctatgtargtgtgcatctgggctctgtaaggacccagaagagcagctggctgtgcttggtgaggcacttggrgatggatggagagggtagcacagggactaccttcccatcrggctggtttaaaaggagtggcgatgargagtgaaaaggaaggttcaaccagtgaatggttcaagggatttccctcccaggagggactaaaccctcctcagtcgttatttgaagggaagtagtgggtgttagttggcttggttgtcctgcttctttgttctaatctggaaataaggcatactggaaacttcaacttgaattgttgttgcatttgttaacctgtagtgggacatttggcaaacatgtagaacatgggcttcatgcagaagggccttttccacagagtttaaaacaatccagttctccttggtcctgatgcatttgta

SEQ ID NO: 29380 - DNA, 599 bp, Chicken  19866894248166_1
  misc_feature (1)..(48): n is any nucleotide
nnnnnnnnnnnnnnnnnnnnnnnnnnnnnnnnnnnnnnnnnnnnnnnnctcaggtacccccagtaaattgtagtataatatttagaaatggcctattccaagttatctctttctcaagccgtttacagtttgggtaatcggaatatggaatatctcaagagtgaattgtatgtgatgttgaaaattgcattatttttcatactctaatagtgtatctcaggattcttagaaaaacagaaggaatattttggcaatctgacgttcaagaaggtcgtatatcaaaattctttatatagtttwgagaaagataagattagaaggcttttaaaatctgagtctagatttaggtttacagctttggacattgtaaacaaaatgaagtttccctggcatagagttttcaatcagaaatgacaaataagctttaaaattataaagagaaagatatccaagtagcatatcatagcaagtaacgtagtattttctgacataaagagtggaataaaattattgaagacttgttaatgagtattataactggctttttgttatttctcatttgtttattccccagtccaggtgaaatctctggaagtcta

SEQ ID NO: 29381 - DNA, 600 bp, Chicken  19866894248168_1
gaacttcataaataggtgggctgagctcctgctttggaatttctacattgctctgtgcctcagtctctctagtggtaaatagttctgaactcctttctgattcagaatgggcctttgattatcctcagggcccagctggttgctctgcagatgcatttggagccaatgctctgatgggagctgctctgaccacatgtgattgatgccgtgctgcctgatggtgcttcccatgcagatgtgctctcagaaaataaggtcagttgccactggggaaactacagcttgaattgatttaattcrtttattgacttgtgagtgcattcagcttggggtggtaacagatctgctaggcactgaggtgctgtgtgagacaagatgtagttgtgtcttgtgtctgtgggtgtctgttcaagcaggtaggtgtgcagtggaggggttgctaagtaaacagcggaagtgtgaatgtagtctgtcttccagttaagctcaggagctggcctggcattctgagcttatcaatactgttgctgcatactttgctgagttctctgtcataatgcacatggcctcaagggtattttcctctgtgtgtctgcattc

SEQ ID NO: 29382 - DNA, 600 bp, Chicken  19866894248168_2
gaggtgctgtgtgagacaagatgtagttgtgtcttgtgtctgtgggtgtctgttcaagcaggtaggtgtgcagtggaggggttgctaagtaaacagcggaagtgtgaatgtagtctgtcttccagttaagctcaggagctggcctggcattctgagcttatcaatactgttgctgcatactttgctgagttctctgtcataatgcacatggcctcaagggtattttcctctgtgtgtctgcattcttctgttcaatttgatttgtattcatcttcacaccaattaatgctgctctgacartgtgggtgcgtaaggaattgatggtgcayggagagttggattcaatgatacctggggctctcttccaacttgggatattctgtgattctctcctagagaggactgggtctttgctgcctgattgtayggttatattctgctttctcaggccacaasctctttctgctgtcacatatgctggagaaagttttcagctggtgtaagttatcatagctccttagtggakagactttagtgggagatactctattggtmaaatttctgcccatgacattttatagaaagcttaattcttttata

SEQ ID NO: 29383 - DNA, 600 bp, Chicken  19866894248168_3
tgtcttgtgtctgtgggtgtctgttcaagcaggtaggtgtgcagtggaggggttgctaagtaaacagcggaagtgtgaatgtagtctgtcttccagttaagctcaggagctggcctggcattctgagcttatcaatactgttgctgcatactttgctgagttctctgtcataatgcacatggcctcaagggtattttcctctgtgtgtctgcattcttctgttcaatttgatttgtattcatcttcacaccaattaatgctgctctgacartgtgggtgcgtaaggaattgatggtgcayggagagttggattcaatgatacctggggctctcttccaacttgggatattctgtgattctctcctagagaggactgggtctttgctgcctgattgtayggttatattctgctttctcaggccacaasctctttctgctgtcacatatgctggagaaagttttcagctggtgtaagttatcatagctccttagtggakagactttagtgggagatactctattggtmaaatttctgcccatgacattttatagaaagcttaattcttttatattaagttgaattaaatagactggttttca

SEQ ID NO: 29384 - DNA, 600 bp, Chicken  19866894248168_4
aagctcaggagctggcctggcattctgagcttatcaatactgttgctgcatactttgctgagttctctgtcataatgcacatggcctcaagggtattttcctctgtgtgtctgcattcttctgttcaatttgatttgtattcatcttcacaccaattaatgctgctctgacartgtgggtgcgtaaggaattgatggtgcayggagagttggattcaatgatacctggggctctcttccaacttgggatattctgtgattctctcctagagaggactgggtctttgctgcctgattgtayggttatattctgctttctcaggccacaasctctttctgctgtcacatatgctggagaaagttttcagctggtgtaagttatcatagctccttagtggakagactttagtgggagatactctattggtmaaatttctgcccatgacattttatagaaagcttaattcttttatattaagttgaattaaatagactggttttcaaaactgcttaagtgatttataaacccaagcttttttgagagtggttgagactgaagggttgcctgggggtcggtgagtactgaggtgtgtggctaacc

SEQ ID NO: 29385 - DNA, 600 bp, Chicken  19866894248168_5
cttatcaatactgttgctgcatactttgctgagttctctgtcataatgcacatggcctcaagggtattttcctctgtgtgtctgcattcttctgttcaatttgatttgtattcatcttcacaccaattaatgctgctctgacartgtgggtgcgtaaggaattgatggtgcayggagagttggattcaatgatacctggggctctcttccaacttgggatattctgtgattctctcctagagaggactgggtctttgctgcctgattgtayggttatattctgctttctcaggccacaasctctttctgctgtcacatatgctggagaaagttttcagctggtgtaagttatcatagctccttagtggakagactttagtgggagatactctattggtmaaatttctgcccatgacattttatagaaagcttaattcttttatattaagttgaattaaatagactggttttcaaaactgcttaagtgatttataaacccaagcttttttgagagtggttgagactgaagggttgcctgggggtcggtgagtactgaggtgtgtggctaacccaggccacgctgtttcaccaacaggctgg

SEQ ID NO: 29386 - DNA, 600 bp, Chicken  19866894248168_6
cctctgtgtgtctgcattcttctgttcaatttgatttgtattcatcttcacaccaattaatgctgctctgacartgtgggtgcgtaaggaattgatggtgcayggagagttggattcaatgatacctggggctctcttccaacttgggatattctgtgattctctcctagagaggactgggtctttgctgcctgattgtayggttatattctgctttctcaggccacaasctctttctgctgtcacatatgctggagaaagttttcagctggtgtaagttatcatagctccttagtggakagactttagtgggagatactctattggtmaaatttctgcccatgacattttatagaaagcttaattcttttatattaagttgaattaaatagactggttttcaaaactgcttaagtgatttataaacccaagcttttttgagagtggttgagactgaagggttgcctgggggtcggtgagtactgaggtgtgtggctaacccaggccacgctgtttcaccaacaggctggtgcattgcctgttaaaaattctgcggacaagacttttattttttttctttcctttttttcccaattctgt

SEQ ID NO: 29387 - DNA, 600 bp, Chicken  19866894248168_7
tttgatttgtattcatcttcacaccaattaatgctgctctgacartgtgggtgcgtaaggaattgatggtgcayggagagttggattcaatgatacctggggctctcttccaacttgggatattctgtgattctctcctagagaggactgggtctttgctgcctgattgtayggttatattctgctttctcaggccacaasctctttctgctgtcacatatgctggagaaagttttcagctggtgtaagttatcatagctccttagtggakagactttagtgggagatactctattggtmaaatttctgcccatgacattttatagaaagcttaattcttttatattaagttgaattaaatagactggttttcaaaactgcttaagtgatttataaacccaagcttttttgagagtggttgagactgaagggttgcctgggggtcggtgagtactgaggtgtgtggctaacccaggccacgctgtttcaccaacaggctggtgcattgcctgttaaaaattctgcggacaagacttttattttttttctttcctttttttcccaattctgtaattttgtaggatttactcttgtttactt

SEQ ID NO: 29388 - DNA, 600 bp, Chicken  19866894248171_1
tgacattgctttaaagaaacactaaggctttgcaacacagtagaggtaaagctaacaaaagataaactacttgtacttataatatttatagtagcttataaacatgatataaaaatattcatgtatttattactagaatataacaggtgcatccactccagtgcatgtctctggccaagtattaactgctaacaagaaatagttactgaaatattataaactcgtacacaaacctttacagtggaatcccaagatgcagaatataaacacccatcacgccaacaaatcttactgacggcrtcatcgtgtcccattaagatgtcctgccgtcttccaaatgcaactgaataaaaatatctaacaggaagagatcataaaggcatcataccttcagataacataaacagttttctctgaattgatgaaaataacttcctttctacagtttctaacaggaaccagaactgaaaataaaacaaatgcagaagtatagatactgcatttcatcagtgatcttctgtatctgtaaccataaccacaattaccaaggtactccatataattcagtggagtcaacaggaagtaaatactcacatatta

SEQ ID NO: 29389 - DNA, 600 bp, Chicken  19866894248175_1
ccgcaatgtttggaggaagaggaggggggtcagaatgctgctggctgctcctggggcacggcttgagccatcctgcacagaccttgcagataaacagggatctgaaggggcatttcttggcagccgggcacagggatgctcaggcagtgacacggccgttgctttctggcagtgaaagcagatcagcctgaataatggattcttcctgcgtgggctggtggctggggtgccatcggggagggctgcgtgcgtgacttcgtgacttctgtctgagaacaaaacaaaaacccaccagagacrtctgtccaaattttcaggtcatttttttttccccccctcctctcttttatatggtaatatataagctgagcagaagcaattcttagtaagtgccttaggacagaagagctcttttagggaattggctttgagatgctgtgtttcccttaaagtgcagtaaataaatatacttccctttctggaaaacatagagaagctctgccatgaatcttccagaaagtcagacctttggaacattgggctttgtacataatcagtcatgttatgcgttaaggaagcgagcagactgggaaaccaaat

SEQ ID NO: 29390 - DNA, 600 bp, Chicken  19866894248180_1
gggagcatttgaatttgaatgaaatatataagatggtaaaaaacagacttagaatggcaaggcattccacttagatataatattcacacccttgaaacaaaataaaataatgtacaggattattcgggatttctcaagtttttgttatttatttctattccatcccatccattcacatgcatccttgcttctcccctcttactgcaatacaacccaaagatatagctggccactaaaattacatactaaggaaaatgcacttctacatattacagccttttcactttttatgtgtactayatctgagcatgtatagatctggtatattcaaaacacatagatgtatttgtatcaaccatattcaccagctttcagtcctaacacttcttagtattagtttccaacyacaatttcttaatgaaaaaagaaataagattttaacaagattcatttcttttctttgtatttgttacttaaattttgactaagcgccacaataaatgttagcaraaaaagttataaacagaaatgtcaaatccattgatgatctaaacttcagtttgtaagcatcttttgcactacttagattgcagttgccta

SEQ ID NO: 29391 - DNA, 600 bp, Chicken  19866894248180_2
ataatgtacaggattattcgggatttctcaagtttttgttatttatttctattccatcccatccattcacatgcatccttgcttctcccctcttactgcaatacaacccaaagatatagctggccactaaaattacatactaaggaaaatgcacttctacatattacagccttttcactttttatgtgtactayatctgagcatgtatagatctggtatattcaaaacacatagatgtatttgtatcaaccatattcaccagctttcagtcctaacacttcttagtattagtttccaacyacaatttcttaatgaaaaaagaaataagattttaacaagattcatttcttttctttgtatttgttacttaaattttgactaagcgccacaataaatgttagcaraaaaagttataaacagaaatgtcaaatccattgatgatctaaacttcagtttgtaagcatcttttgcactacttagattgcagttgcctattaagcaccttccaagtgaaatatgtttgtccatgtactacaactattactagaataaccattctagaggttctaattgaattgagacaaccactgaacttcctct

SEQ ID NO: 29392 - DNA, 575 bp, Chicken  19866894248180_3
aacccaaagatatagctggccactaaaattacatactaaggaaaatgcacttctacatattacagccttttcactttttatgtgtactayatctgagcatgtatagatctggtatattcaaaacacatagatgtatttgtatcaaccatattcaccagctttcagtcctaacacttcttagtattagtttccaacyacaatttcttaatgaaaaaagaaataagattttaacaagattcatttcttttctttgtatttgttacttaaattttgactaagcgccacaataaatgttagcaraaaaagttataaacagaaatgtcaaatccattgatgatctaaacttcagtttgtaagcatcttttgcactacttagattgcagttgcctattaagcaccttccaagtgaaatatgtttgtccatgtactacaactattactagaataaccattctagaggttctaattgaattgagacaaccactgaacttcctctgtgggccctgcccagaccaattaatagatggtttacagcaagaaggactgccagacagacattctagggaacaggcatg

SEQ ID NO: 29393 - DNA, 600 bp, Chicken  19866894248183_1
tcgtgtcatttatctgccccttctgttatgtagatagccttcatttaacttctaaaattaaacaaataatctattattcctgactgatgttaaggctatgggacttgatgtgcaatactcagttgccatcagcttggtaatttagatggccactgaccttacaggatcaagctgtaaattacagttcctttattgactgagtgtcctcttagtgctattttaaagaggtaacttagttctttccttcatagaccaaagaatgtatcacctccaaatgaaatgtatgaaatgacacttacrtggagaaaatattaaatttacagaattcaatattctattgagagtaaatatgggaagtattctacagtgaattcagtagcacattatttacaatatacatttctgtaatcatcataaagtgtagacaagaaatgaatggagatgtttaaacaactcatgggttttaatgactgtatcacgtcttaatgcctatgtatttctacattatgtctgtgttcctttgtattttaaacaggtatacttctaagtggtggaatagattttatacttcctgatgtagcacaaaaagtgagacaacat

SEQ ID NO: 29394 - DNA, 600 bp, Chicken  19866894248189_1
tgacgctagtctactcagcttaatagccgcagggacgcggcacagcgtcaggactcacatgtctgtaggttgggagtacagccctacataccagtggttcctggtacttcagcagatgtgctcctgaagttttctggtataagcagaggccctgtcttctaatgcaatgtagcataagcctgtgaacagaaatgcatttttttttaattactgtttgggtacctatcagaaaaagtatgcagacatcgtctaaaatcagaaccatattttttcaactgatcaacatgcagtgtttgtcayactgtatgcacgtgcttggtagcctaccaagagcttctagccctgaacaactacaagttttatttacaaagtagatgaaataaacatgctgtgctgtgtgttagaaacgaagggaagcagttcttgtgaggtgacagctgatgcttccacagctatgaatccttcccttttggagagttcagatttcagtgtaagcatgagacctgatctaaggtgatgggccagcgtacataagattctctcccaaatgtgttgaatatcaagatgcagccgttcatattgctcacactgagtgtgtgc

SEQ ID NO: 29395 - DNA, 600 bp, Chicken  19866894248197_1
gagaaaattaggactgaaaacaatgagttttaattcacagggcatgtgaaaaataataaaaatataagaatactttggaagtaagaaaggagcaaagaaaatgaagcacaatgaggaaaacaattaattatacaaagaaaaactttattttttggtttaatcgttctagaaaaagtgaactatgattagattaattgaattaattagtaaaggattagaaatgtagagaaaaaaaaaaagtagagcttaaggaatactgacatacatagatccatgcaagttcagagatcctgatgaacrtatctgataagctaacaaaagtacactttgaaatatcaattactatatttaaaatttctctaagaacagatgaggtatccctgggttgagaaagaaagaatagttctgtaaaggtagaaaagagatactgaggaattctaggtaaatcagtgttttttaagtccctgmagataatcttagaacaatggccatttgtagaaaacggaatgttaatgaagtgtcagaataaaaaatgtagactgttctacaaatgagtctaaattaattctttgacgtggagggaataagaagtaactattg

SEQ ID NO: 29396 - DNA, 600 bp, Chicken  19866894248197_2
gaaaaagtgaactatgattagattaattgaattaattagtaaaggattagaaatgtagagaaaaaaaaaaagtagagcttaaggaatactgacatacatagatccatgcaagttcagagatcctgatgaacrtatctgataagctaacaaaagtacactttgaaatatcaattactatatttaaaatttctctaagaacagatgaggtatccctgggttgagaaagaaagaatagttctgtaaaggtagaaaagagatactgaggaattctaggtaaatcagtgttttttaagtccctgmagataatcttagaacaatggccatttgtagaaaacggaatgttaatgaagtgtcagaataaaaaatgtagactgttctacaaatgagtctaaattaattctttgacgtggagggaataagaagtaactattgcacagaatgaaacagaagccttgggaggcttttgtcaatatcctatatagcattgttttaaaaaagctatggtgctgaaatcacccaccttggaagatttggaaacagattaaattgtcatttgttgactatatctctcattttagatgttgcactggatgatttctg

SEQ ID NO: 29397 - DNA, 600 bp, Chicken  19866894248199_1
tacccttgcaaagagttgactccccacctgtttataggctccctttaggtactgaaaaactgcaatgaggtcaccccgcagccttcttttctccaggctgaacaagcccagctccctcagcctgtatttgtagggagaggtgctcccacctcttttgactagctggccacgctgtgtttaatgcatcccaaaatgcagtttgcctcttggctgcacaccactggctcaccttgagctgctctcacctgcaccccaggtccctttgggctgagctgccctccaaccaatgggctcccaccygtgccccgtgactgggactgcttggtccgagttgcagaacccagcatatatttgtgttaaacttcatgctgttgttgatcacacggtgttccaaaggatctagatccctgtgtggccccttgtccccccagggagacaacagcacctcccagtttagcaccactggcaaacgtgctggggatgcactccagtcctgcatccacaccactgatgaaaacactgaataggagtggccccagcactgagcccttaggatcaccatgagtgactgttcacaagccaggtgtagccgcattcacc

SEQ ID NO: 29398 - DNA, 599 bp, Chicken  19866894248200_1
  misc_feature (1)..(154): n is any nucleotide
nnnnnnnnnnnnnnnnnnnnnnnnnnnnnnnnnnnnnnnnnnnnnnnnnnnnnnnnnnnnnnnnnnnnnnnnnnnnnnnnnnnnnnnnnnnnnnnnnnnnnnnnnnnnnnnnnnnnnnnnnnnnnnnnnnnnnnnnnnnnnnnnnnnnnnnnnncagcagtgcataatgccctacaactcataaccctagaacaggcagaggagctggcacaactgctccccagctggtcagagctgccaggcactcttcttctttgccaaggaggtcctgtgggctcccagtgactctccacaccccgrtgtgctctgctcttacttcggtgatagttgtgcgtggccataagcgagccgctcgatgggatggaggccatggctccgggtcctgggtttgtgctgatggaaaacctgcaagtaagagaacagccatgattgcagagggaccagactgattatttggtaagagatttgaccacactgggtacaatgcccagcaaacagagtcctccgtgtgygtcaatctgcagctgtagagctctggctcagagctttgtgcaaagccaaagtaattcccttgaaaacaactgcttgcacagcctcag

SEQ ID NO: 29399 - DNA, 600 bp, Chicken  19866894248200_2
actgctccccagctggtcagagctgccaggcactcttcttctttgccaaggaggtcctgtgggctcccagtgactctccacaccccgrtgtgctctgctcttacttcggtgatagttgtgcgtggccataagcgagccgctcgatgggatggaggccatggctccgggtcctgggtttgtgctgatggaaaacctgcaagtaagagaacagccatgattgcagagggaccagactgattatttggtaagagatttgaccacactgggtacaatgcccagcaaacagagtcctccgtgtgygtcaatctgcagctgtagagctctggctcagagctttgtgcaaagccaaagtaattcccttgaaaacaactgcttgcacagcctcagtgcaacaacttcctggggcccagcacggttgttttgcttcyctgcagcagcaaccctgttactttccttgggtcaacgcttcgggagttgtgaaatcacagcgtgaagttgcataaggaacagaggagcgctttggtgggggggtgcacgatggggctctgtgcagggggggtgcagctcagcacccaccagggccacgcacccatactgagc

SEQ ID NO: 29400 - DNA, 553 bp, Chicken  19866894248200_3
taagcgagccgctcgatgggatggaggccatggctccgggtcctgggtttgtgctgatggaaaacctgcaagtaagagaacagccatgattgcagagggaccagactgattatttggtaagagatttgaccacactgggtacaatgcccagcaaacagagtcctccgtgtgygtcaatctgcagctgtagagctctggctcagagctttgtgcaaagccaaagtaattcccttgaaaacaactgcttgcacagcctcagtgcaacaacttcctggggcccagcacggttgttttgcttcyctgcagcagcaaccctgttactttccttgggtcaacgcttcgggagttgtgaaatcacagcgtgaagttgcataaggaacagaggagcgctttggtgggggggtgcacgatggggctctgtgcagggggggtgcagctcagcacccaccagggccacgcacccatactgagctgcagtgctggggaagctgaggcagggcactgcctgggctgacccccacgtgtcacacacatgggaccacagcagccacgg

SEQ ID NO: 29401 - DNA, 599 bp, Chicken  19866894248204_1
  misc_feature (1)..(57): n is any nucleotide
nnnnnnnnnnnnnnnnnnnnnnnnnnnnnnnnnnnnnnnnnnnnnnnnnnnnnnnnnctgccccatcgctgcccctcacctcagccacacaccccaaccgcaccgagggccacccagtgccctacctggaaggcgtacttccccagggtgctcaccacctccctgaaggggatcttggaggtgaaggtgtggccgtggtacactatgggctccccgttcggcccgtcccagcaatccacctccaggcagcggcagccccgtttcagagccctatgggtgggcagtcaccccagtaccccmgccagggcaccagccccctgccctccctctggctgtggtgtcacccctgcagaaccaggggatatgtgccagggcgaggacacccatctagggatggatggaggaagagagggaagaacggatggattcagggaaggaaaaactgggcatagcatctccaaaagggaccctcctcctgggcgcagctgtggcaccggtggtgctggggggcagatgggagggagcagcccattacctgatgtagccttcgatgctgctctgaccccggatctggtcctctatcaggtaggtgttgtgag

SEQ ID NO: 29402 - DNA, 600 bp, Chicken  19866894248204_2
ctgtggcaccggtggtgctggggggcagatgggagggagcagcccattacctgatgtagccttcgatgctgctctgaccccggatctggtcctctatcaggtaggtgttgtgagaggaggagatgaagtagtggcagagaggctgggtcatgtcctgccacagagcccggtgctgaggattgaagatggagccctccggggagcagaggtacatgaggaacccgtcagcactcagcgcgtggcgagctctggctgtgggcagaccaggagactcaaccaaagtcagggacgagggggacrcggtaggagcaaatgagattgctggtagctcctggcatcctgggccaggctggagcattaggaacaacggaggtggccctggggaggtgggyggcgggccccagagccaaagctcgcaccccatgcccggccaacttcattcagaagaacggcccgaasaaagggagaactgcatccagatcacacgtgtgagcccttcgcccgtgcccagtcctctccccagtgcagagcacagctattttgcaggctctcacctgtctccgagggctcgtacttgtcaatgagctccatagcgagctc

SEQ ID NO: 29403 - DNA, 600 bp, Chicken  19866894248204_3
tctatcaggtaggtgttgtgagaggaggagatgaagtagtggcagagaggctgggtcatgtcctgccacagagcccggtgctgaggattgaagatggagccctccggggagcagaggtacatgaggaacccgtcagcactcagcgcgtggcgagctctggctgtgggcagaccaggagactcaaccaaagtcagggacgagggggacrcggtaggagcaaatgagattgctggtagctcctggcatcctgggccaggctggagcattaggaacaacggaggtggccctggggaggtgggyggcgggccccagagccaaagctcgcaccccatgcccggccaacttcattcagaagaacggcccgaasaaagggagaactgcatccagatcacacgtgtgagcccttcgcccgtgcccagtcctctccccagtgcagagcacagctattttgcaggctctcacctgtctccgagggctcgtacttgtcaatgagctccatagcgagctcctccgtgccctcctcctccagctgctcctgccgcaggaaatccaccagctccagcagcgtcagcttcttcccgtcctcagagaactcccgga

SEQ ID NO: 29404 - DNA, 600 bp, Chicken  19866894248204_4
acagagcccggtgctgaggattgaagatggagccctccggggagcagaggtacatgaggaacccgtcagcactcagcgcgtggcgagctctggctgtgggcagaccaggagactcaaccaaagtcagggacgagggggacrcggtaggagcaaatgagattgctggtagctcctggcatcctgggccaggctggagcattaggaacaacggaggtggccctggggaggtgggyggcgggccccagagccaaagctcgcaccccatgcccggccaacttcattcagaagaacggcccgaasaaagggagaactgcatccagatcacacgtgtgagcccttcgcccgtgcccagtcctctccccagtgcagagcacagctattttgcaggctctcacctgtctccgagggctcgtacttgtcaatgagctccatagcgagctcctccgtgccctcctcctccagctgctcctgccgcaggaaatccaccagctccagcagcgtcagcttcttcccgtcctcagagaactcccggaagaggctctgcacctcctcgcgctccgtgagggctttatagaagagcacaaactcttccccttccag

SEQ ID NO: 29405 - DNA, 600 bp, Chicken  19866894248204_5
gcaggaaatccaccagctccagcagcgtcagcttcttcccgtcctcagagaactcccggaagaggctctgcacctcctcgcgctccgtgagggctttatagaagagcacaaactcttccccttccagcgtccctgactccgacttgtcggcagcctgcaagggagctcactcagcatcaacggcgtggggtgcccagcccggaatgggtcaccgctgccggtggaaggcacaagggtgggaggaaagaagggaagcgttgtgcagcccgctccggcccatcctgcccaccaatgctgtgstgcttacctggaagagtcgcagggcatggtcctcattcatgtccacgttcatcatcttgaggagacgctgcacctccttgaagttcatgcgcccgtccttattcttgtcagctttctggaaccagtcacgaatccacgtgcgaggaagcaggagagatgttaaggaaaagggccttggataagagagctggagtggtcccctcccctgatgcagacggtgatacccataacactacgtgctaggacaaggctggagatgcagggcttgggagaggcggggtgggggaggacagaacgcga

SEQ ID NO: 29406 - DNA, 449 bp, Chicken  19866894248226_1
cctctatcatgtgcttggatgtgggaattaagtgctattacatgatcataacttgacagactgaccacagtttagcaattcaccactaataattattatctccgtttcgttattcttggcaatcatgcattctgttttctctagactctctttgaaattatcaattgcaaatttagtaactgcctattcaaagttacacactctttgctgacacaacaaatctgttagatgagctgcctttttaaaatgtcacaaagatgtatattttaaatttagtaaataaaatggaagagcatatgygtaataaatgttccaaaagatgattcctagcatatttcatatttccatttcaaaagtatgtatatttgatgtccagattcccgttccagttccagaaagactgatataatagagaggcaagaccagctgcgatgctaatatatatatat

SEQ ID NO: 29407 - DNA, 600 bp, Chicken  19866894248228_1
ctttcctgctttatgcgttgggaagcatcaaaaaggtgcaagcaaaacattcttaaggaatgcacttagcaatttttttttcctttagtgagaggaggaatacttggcaccttagatgttgtttgtgtaaatgttttggaacactggggaggtggcaatgcaatgttctgtcttcggttcatttttcaaggtcgtcttcggactcaagagttagagacaggattttctgcatagggagtctgactgcaccgtttttatcgtacagagctactgttcttaactattattttgcatgtgacrggtgacccagtatccacatgattaagtgatcacaattttttcctataaaagaaattatacagatgttagttaagaagtattcctagttggttagataaagtcctataactaggattttaaaagaagtattgtttgctcttttctcatttcctctttaacatcgattcagcaggacatatattctttaatggaaaaaaattgcttttctgaatgactcatgttatgcagttgtccatttagcaaatcacggaatcataggatggcctggtttgaaaaggaccacaatgatcatctagttcc

SEQ ID NO: 29408 - DNA, 600 bp, Chicken  19866894248228_2
tgtgcagggtcgccaaccagcagaccaggcttcagcagtgttctacttcatgaagtggttttgctaatttgtacttgggctcttggtgtaggactcaagtgctgtggttagaggctcgtgttttgtacctgtaggttaatgacataacgtttgtatagtccttctgttcttacagtcccttagaagaacagggcacacagggtatctactctaagttacagttatttgtattgttgaaagtggctgtgtcagatctacattaacagttcagtcattttccatctagagcagacaacttcwgtgcagataagttaatactgaacagaagtatgaagttgtgcagccaacactgaattaaacataatggatgttttgtctcacgtcgtgttttgctgtagaacactgtgatgattttctgtgtagcactcagctaccattgctgaatgctgttttcctctgtttcttactaaaaaaagaaaactaaaaggatttctgctttttccctttcttcctggctgctttgtttagaattgtcttgagttatttttttccttgaggtgtgtcttctggatttccttccacccaattagggcaaataag

SEQ ID NO: 29409 - DNA, 600 bp, Chicken  19866894248236_1
ttttggaaaggcaaagatgtcttcgaaaaccctaagaagaaaaggtaggagacaggcatagccacatttcttcgcaggagaagtgactcaaattaacaggttgtaggcagaatttattctagtcaccagtgccctgaagctgagtctagccaagaagaaacaaaactgaaatattccttaatagaagtcagtgaaactataatcttcccattcaccaataggaggaaaaaaaaagtgaaggtgcatctctctaccggaccagccatttctttccctttatgcaaataacagcatcagaartgattcccaagcacgttccaagccactatttgcttcatctctctctctctccctctctcctttcactgtacactcatttcctcagaatccttatcaacagaagtgagatctgcatcacatttagacttctattcttcacacaacaaacactcaaactactgtgaaacttgctgtcaacatgcagactggactgcctcagggactgacatgggaaaggtctggaacaacttcctcactcctctttcttagaaaattattcaccactgctctcatccctcctacagcaagcctccatgccca

SEQ ID NO: 29410 - DNA, 600 bp, Chicken  19866894248240_1
cataaacatttgatgttccatccagaggcaatatcctcatttcctacgagataccactgctgcacatgtaagtactgacactatgctgagacccgtggtccacgctagcacggacaatgagaagaatataccaaaatagaagaaggtcatccacgtcatctccattctccattccccatcactaagggaagaagcacttttctttctcagccctgtctgctctcctctgtttgcgctgctacgatttttgccattccacatttgacagtgtgctgtgtgcgcttccatctctttaggacwcaccggatgctttgtttggatttttgtattccgatagagcactttgtacatttctgccagcagcagaattaaataccccactatctagacggaatgyttcaatctcagatgttctcccgaaagcgaattggaaagactggtttgtttgttttcataaaccttgtatacttgacaaaatgcactgtgcatgaggtatttcctccttgtagaagggtctgggcagtccctgcttttcctcagtatctctttgtcatcctgctctatgaaaataataagaaagcaaacaagaaaataaatgtg

SEQ ID NO: 29411 - DNA, 600 bp, Chicken  19866894248240_2
gtccacgctagcacggacaatgagaagaatataccaaaatagaagaaggtcatccacgtcatctccattctccattccccatcactaagggaagaagcacttttctttctcagccctgtctgctctcctctgtttgcgctgctacgatttttgccattccacatttgacagtgtgctgtgtgcgcttccatctctttaggacwcaccggatgctttgtttggatttttgtattccgatagagcactttgtacatttctgccagcagcagaattaaataccccactatctagacggaatgyttcaatctcagatgttctcccgaaagcgaattggaaagactggtttgtttgttttcataaaccttgtatacttgacaaaatgcactgtgcatgaggtatttcctccttgtagaagggtctgggcagtccctgcttttcctcagtatctctttgtcatcctgctctatgaaaataataagaaagcaaacaagaaaataaatgtgtcctccttccaaatcaaaacaaacctctgtcatttattttagcgtactgcttgtgcagaaatggctctttcctccctgtgctttctgcattttgcta

SEQ ID NO: 29412 - DNA, 600 bp, Chicken  19866894248241_1
ttccagtccaagtttgataccctctgaaccgaacaaaagaccctccagtccaaactaaacagcctccaaccaaacgagtcaaacttcaatctcaacaagacatcctccaagctgaatgagacctcttcctaactgagtaagacagactctgagctgagctggagagtaagagcgccgaaactgaccaacgtgaccaatagcaggagacaccagaatcaatgccagttgcttctgtaaaaggatggaaaaagaaacgagcatcacctcatttagatcagaagaaaggggaggaggaagaartagaggaaacagaaactataagagaagaggaggaaagaggtccagagtggctctgagatccaggggatccagaaagagggcttagacccccaatgcctaggagggtaacaataagccccaaaagagtaggagatagggaaaacaatgtcaccattactactcgacgttctgagaatgactgaaattcgaggtttgagaaaagacttttcacagcaaccaaatgaatccatcgtcacctggttacttcaatgttgcgacaatggggccaacagtgtgttgctagataggagagataccaac

SEQ ID NO: 29413 - DNA, 600 bp, Chicken  19866894248248_1
tcaaacatgatggtcttgcagttaccaaaataaagcacagaacaaagactgtaaagcaaactaagaagccttatgtctacacatgcaatgctgacaaggacatttttgtcacttcatagaagcgttagactgaatttactccaagcttttagtcttactgatttgtttttatttaaaataaaaagacaccgacatgaggagggtgagaaaatcatccaacccaaatgccttagtgggatccattgaggcaatccctgaaggcattcaaggccaggctggatgtggctctgggcagcctgrtctgctggttggcgaccctgcacatagcaggggggttgaaaccagatgatcattgcagtccttttcaacccaggccattctatggctctatgattgtatgaaatgtgtrtgttgaaagaaagagtgtatggcaacataccagagtgttcacacacacattacctacccttttgggtcaagaagatctctgactttctcattgtatatctccatgtaggatacttccactttaaaactctgctcttcattttcctccttctgtgctctttcaaagagaccgctgcaaagtctagggattaa

SEQ ID NO: 29414 - DNA, 600 bp, Chicken  19866894248248_2
cacttcatagaagcgttagactgaatttactccaagcttttagtcttactgatttgtttttatttaaaataaaaagacaccgacatgaggagggtgagaaaatcatccaacccaaatgccttagtgggatccattgaggcaatccctgaaggcattcaaggccaggctggatgtggctctgggcagcctgrtctgctggttggcgaccctgcacatagcaggggggttgaaaccagatgatcattgcagtccttttcaacccaggccattctatggctctatgattgtatgaaatgtgtrtgttgaaagaaagagtgtatggcaacataccagagtgttcacacacacattacctacccttttgggtcaagaagatctctgactttctcattgtatatctccatgtaggatacttccactttaaaactctgctcttcattttcctccttctgtgctctttcaaagagaccgctgcaaagtctagggattaatccaggttggtcagcygtacccatcattgtgtatgattttccagatcctgtgtgattgaatttataattagtgaatgtgcagtacagtggtttttgctgtgaggaaggg

SEQ ID NO: 29415 - DNA, 600 bp, Chicken  19866894248248_3
cctgcacatagcaggggggttgaaaccagatgatcattgcagtccttttcaacccaggccattctatggctctatgattgtatgaaatgtgtrtgttgaaagaaagagtgtatggcaacataccagagtgttcacacacacattacctacccttttgggtcaagaagatctctgactttctcattgtatatctccatgtaggatacttccactttaaaactctgctcttcattttcctccttctgtgctctttcaaagagaccgctgcaaagtctagggattaatccaggttggtcagcygtacccatcattgtgtatgattttccagatcctgtgtgattgaatttataattagtgaatgtgcagtacagtggtttttgctgtgaggaagggaaaagtggagaagaggtagacaaaagaataataatataaacctggcattttagtgaaagatatttgtgctgttttctattttaaagcaaccagaacatcattcagttaaaaactatacaattaagaagaaaagagaaacaagaaatttagttcaaactgacagagaagactttcagatagatagttctcctgtagaggacaacccac

SEQ ID NO: 29416 - DNA, 569 bp, Chicken  19866894248248_4
gatgattattaaagcttattctgactgcagaggcggaaaataagggcgatgcactgaactcaaggacaggcacgatcaaagataataatccaaagtgtgagaaataagggtagccagcaacagatacaagcagttctcatcctgtcaacctcatatctaatgttagaaaagagaaaaaacatttcctgatgtttgcacaacgtaaaaatgcctatgttgtaaggcatttctcctgaaataacgtcactatagccatgaaaggagtctctaccagaacattaacaacttgtgcatcagtgytttgcatacattctggaaggacttaccagtttgcccataggcaaagatgcaagcattgtagccttcaaaggcattctgaagaatattctctccaaggcacttgaaaacaacatcttgacctaagaaatagaacacacatagtaacttgcatagtaacaagggggggagggtgtttttttcttgttttgaattcttcaataattatgtaaaagcaaagagcattttttggctgttcttgcctaaatacattatttagcattcagtatttg

SEQ ID NO: 29417 - DNA, 600 bp, Chicken  19866894248249_1
atcacagtttgacatcatcatcactggaggtgtcttgggatggttaaagagattagaaataatgtaatgcccaaactgacacgttaggcgtttgcaccctgataaagtgggagctttccttcatgcagaactgcaggagcagtgccaagctgtcaagcccccagaacccattgttttctcatggacagactgcgcaacgtgtgggaagaaaatggaaaagcagaagtggaacttttctccaactactgtctacttgctccaactctcaataggccatgagaaaagggaacatcagaacayctctgaacctgatttccttgagggtagaggttgcctgattgttccaaaatgtgaagaatatggaagaggcttaaagtttcccatatgtcttcatctgtgttcctgcattcagctgcactgccaactctggagcacagcattgctgttctgagtcatggcatctggagaatgggaaaatcctattcaagagcctcatatttctctctgctgcctgggtcccagacactagatgttattattcagcatcctcgtatcccccagttttcaattcctagctttgattctgtggacacagcagtg

SEQ ID NO: 29418 - DNA, 600 bp, Chicken  19866894248249_2
atgtgaagaatatggaagaggcttaaagtttcccatatgtcttcatctgtgttcctgcattcagctgcactgccaactctggagcacagcattgctgttctgagtcatggcatctggagaatgggaaaatcctattcaagagcctcatatttctctctgctgcctgggtcccagacactagatgttattattcagcatcctcgtatcccccagttttcaattcctagctttgattctgtggacacagcagtgtagagtgtgataaaaaattaggaaaatctttgtagttagagaggaaaygtccctgatgcccacaaaaagatacttagaatcaaacatatcttttgttttgttttgtttttggagaagttatagtctaaaagtaatgctgctgtatgaaagcaagatagttgctgtactaaggtcttacccaatatttctttatcttctcagctgaaacagtctcagctttctcaggaaatgcacgtaacagatggataaggcagggcttccaaggaatggtttagtgctgaaggtattgatgagatattctgttgtttctggcagtagatttggtctgtgctacaccctttgtaagat

SEQ ID NO: 29419 - DNA, 600 bp, Chicken  19866894248249_3
tgtgaagaatatggaagaggcttaaagtttcccatatgtcttcatctgtgttcctgcattcagctgcactgccaactctggagcacagcattgctgttctgagtcatggcatctggagaatgggaaaatcctattcaagagcctcatatttctctctgctgcctgggtcccagacactagatgttattattcagcatcctcgtatcccccagttttcaattcctagctttgattctgtggacacagcagtgtagagtgtgataaaaaattaggaaaatctttgtagttagagaggaaaaytccctgatgcccacaaaaagatacttagaatcaaacatatcttttgttttgttttgtttttggagaagttatagtctaaaagtaatgctgctgtatgaaagcaagatagttgctgtactaaggtcttacccaatatttctttatcttctcagctgaaacagtctcagctttctcaggaaatgcacgtaacagatggataaggcagggcttccaaggaatggtttagtgctgaaggtattgatgagatattctgttgtttctggcagtagatttggtctgtgctacaccctttgtaagatt

SEQ ID NO: 29420 - DNA, 600 bp, Chicken  19866894248249_4
gtgaagaatatggaagaggcttaaagtttcccatatgtcttcatctgtgttcctgcattcagctgcactgccaactctggagcacagcattgctgttctgagtcatggcatctggagaatgggaaaatcctattcaagagcctcatatttctctctgctgcctgggtcccagacactagatgttattattcagcatcctcgtatcccccagttttcaattcctagctttgattctgtggacacagcagtgtagagtgtgataaaaaattaggaaaatctttgtagttagagaggaaaagyccctgatgcccacaaaaagatacttagaatcaaacatatcttttgttttgttttgtttttggagaagttatagtctaaaagtaatgctgctgtatgaaagcaagatagttgctgtactaaggtcttacccaatatttctttatcttctcagctgaaacagtctcagctttctcaggaaatgcacgtaacagatggataaggcagggcttccaaggaatggtttagtgctgaaggtattgatgagatattctgttgtttctggcagtagatttggtctgtgctacaccctttgtaagattt

SEQ ID NO: 29421 - DNA, 600 bp, Chicken  19866894248249_5
gaagaatatggaagaggcttaaagtttcccatatgtcttcatctgtgttcctgcattcagctgcactgccaactctggagcacagcattgctgttctgagtcatggcatctggagaatgggaaaatcctattcaagagcctcatatttctctctgctgcctgggtcccagacactagatgttattattcagcatcctcgtatcccccagttttcaattcctagctttgattctgtggacacagcagtgtagagtgtgataaaaaattaggaaaatctttgtagttagagaggaaaagtcyctgatgcccacaaaaagatacttagaatcaaacatatcttttgttttgttttgtttttggagaagttatagtctaaaagtaatgctgctgtatgaaagcaagatagttgctgtactaaggtcttacccaatatttctttatcttctcagctgaaacagtctcagctttctcaggaaatgcacgtaacagatggataaggcagggcttccaaggaatggtttagtgctgaaggtattgatgagatattctgttgtttctggcagtagatttggtctgtgctacaccctttgtaagatttca

SEQ ID NO: 29422 - DNA, 600 bp, Chicken  19866894248249_6
aactttctgtatttgtcagtgcttaagagtacagaagcctacagattgaccttgcttataattcaaaatatgttaagaagcagcttgaacatcttggaaacagtatatgtttgagttatactgtttcaaacttcctggtcgtgttgaccttcgatttgagaatgctctaaataaaagtagtttccctgaacgtctggctgaaaggaaacatcgtgagcagggcaatattaaataatacagcttttctgaaatttggggttaatatatttatcaataaatacaaataaacaaagagacttygaacctgccctgtccttactgtgtggagactgagatcattaaacaggaatcagtagagaggtgccctcattttccactgtgcgtctgcaacgtttgggtgagggtagtggctatgactctgagccagcacacatcagaaagctgagcatgtggtgcagtatgcaacccaaggcttttaagcattaattttatctatttattctgatgggtttattgaaggctgatgtgtgattttaacaggggggaaaatttaattatatgactcagaattcctcacgctaggataaaagtttatagaat

SEQ ID NO: 29423 - DNA, 600 bp, Chicken  19866894248254_1
tgcctagatgtttccactctgccatctgactcctgcttgactagcagttctgatttctggaacctcccaatctaaattctcaaatcagctgtatccatttttgaaaataacaaatacaacagatgcaagaaatgcacaagtactttaagaattgcatatgcaccttattttttttccccagggtgctctggtatatattcgctttgttgttcaacaaagcaaagggcaaggttttgcgcacttgggtcaaggtaatcccagttatgtatacaggctgggagaagagctccttgagcgtawtcctgctgagaaggacttaggggttctggttgattaaaaatggaatgagtcagcagcgtgccattgcagcctggaagaccaatggtatccctgggttccatcaaaagaagggtggccagaagggcaaaggaggtaattgtcaaccctctactctgtcctcacaaggccctgtttggaatactatgtccatgtctggggtcctcaacaaagaaaagacatggagcttttggagagcatccataggaggagggccatgaagatgatcaaagggctggagaacctctcgtatgaagatagggt

SEQ ID NO: 29424 - DNA, 600 bp, Chicken  19866894248256_1
ctattgtcagaatctagagtttgtaaacagtacataacaagggatgtagacttgttttcttaatgttttctctacagtgactctagaattatggctgaatttcagagaaaaaatagttgtgtaaaatcttataacatgacacgcagaaaagctcagagagtaaaagtgagttgccagttcattatgagaatgctcctttctaaactaaagtgttttctcagtggctgtttaataatgtactgaatgcacattgattgacccagtatttcacaccatatgtgcttagatgtttgctgtttrtgtaagtcacttgcacaaatttctagtcctacaactccgttttcatttctgtatctaattacctacactttttccatgcttccagtttggttcctttgcagtaatctgacaatacacccaccattcgagctgcagatatcaaattttgaaattaactaaagctgggtgtatggtgtctaaactggcagtctcctacagctcactttgcatttcataaagtgaatcccagggtgactccgtaggacttttcacatcctgatcttgatcaaataactggatagcctcattttagtctctata

SEQ ID NO: 29425 - DNA, 600 bp, Chicken  19866894248256_2
tgcacaaatttctagtcctacaactccgttttcatttctgtatctaattacctacactttttccatgcttccagtttggttcctttgcagtaatctgacaatacacccaccattcgagctgcagatatcaaattttgaaattaactaaagctgggtgtatggtgtctaaactggcagtctcctacagctcactttgcatttcataaagtgaatcccagggtgactccgtaggacttttcacatcctgatcttgatcaaataactggatagcctcattttagtctctatatacatacagtyccccgtgaggagaatggaattgcttatgcacataaaagactagaactggggctattctgtataaagtgcaaaaagctatcaaggaatggtagcgacaaaatagcacacaactagacttaaacttacaagggtttgatcttactgaagtcagcagaacctttccaggcagacattagaagtaaagtcagacttatttagttaaatcaatctctgtgtcatatgtgtcttacggaacttaaacaaatacaagtgagtgtttagaagtgacaaatattttatcttccaaggaattactttgtg

SEQ ID NO: 29426 - DNA, 600 bp, Chicken  19866894248265_1
gctgcgagcagcggagctgcgcctgctgttctcctctcgtgtttacactatttatttttagccgtgatagataagagagatagagaggcttccttatttttgtacttttcgtaccggtttccctggcagtgtggtggtggtgttgtactcctcggctcccccgcgccccaataaaaacgtggaaccgactgagctccgtttctgggccgtgctgaacccgtggcacaacgggggtcgatggacagcattcctcctcaccccatttacgggcaccgtgccgtgcgttccgcctcaccccaygctcccatcctcattaccacgtccaagcagggtgttttggtttttttttaagctttttttttgacaatattaaaaaaaaaagaggctttgagagggcagctttccctctcggaatgcaaaaaaaattgggctgtaaattcccaacaacaacaacaacaacagtccaacataaaacaaaggaacgaaggcgctgagccttcaccaccccatcgggacggcccaaaggcactccgtggtcacagtgttcctgagcgaaagcggggtgggttccccccgtggcggaggtgtgagccgctccca

SEQ ID NO: 29427 - DNA, 600 bp, Chicken  19866894248267_1
ccacctccacccattggaagcagttgaatttcaggaaggtggcagtgcacacatggcacagggttaaatttgggttaaagacagcatcatctccaggcctctggcaaatgaggcggagtaagcaggacacagcaggggagatcaggtccttcacaaatgggaatattcacttgggaagaagtaggagaaaataacctagaaataaggtcactggtctccagacagccccatgggaaagccaagtagtgctgagagtaattttcctgcttagtgtggcaggcgtgtgggcacacatcatakggargtgagagcaatacaggctttggacaatactagaaaccccaagagaccacgaagagcccttaaccctttgggtaaacggtcccatgtgaacacccagcacattaacttattgttgcacgaggctgggaaatggtttggatcttagtttatgtgagcattaccaaagaataaaacattgcaacatatctgtcaggaactgtatttctctgtgctacaatccttgaagaagaggaagtaaacacactgctggctctgcacgactcttcctgtagggcaactgcattgtcatccccagga

SEQ ID NO: 29428 - DNA, 600 bp, Chicken  19866894248267_2
ctccacccattggaagcagttgaatttcaggaaggtggcagtgcacacatggcacagggttaaatttgggttaaagacagcatcatctccaggcctctggcaaatgaggcggagtaagcaggacacagcaggggagatcaggtccttcacaaatgggaatattcacttgggaagaagtaggagaaaataacctagaaataaggtcactggtctccagacagccccatgggaaagccaagtagtgctgagagtaattttcctgcttagtgtggcaggcgtgtgggcacacatcatakggargtgagagcaatacaggctttggacaatactagaaaccccaagagaccacgaagagcccttaaccctttgggtaaacggtcccatgtgaacacccagcacattaacttattgttgcacgaggctgggaaatggtttggatcttagtttatgtgagcattaccaaagaataaaacattgcaacatatctgtcaggaactgtatttctctgtgctacaatccttgaagaagaggaagtaaacacactgctggctctgcacgactcttcctgtagggcaactgcattgtcatccccaggaaatg

SEQ ID NO: 29429 - DNA, 599 bp, Chicken  19866894248268_1
  misc_feature (1)..(244): n is any nucleotide
nnnnnnnnnnnnnnnnnnnnnnnnnnnnnnnnnnnnnnnnnnnnnnnnnnnnnnnnnnnnnnnnnnnnnnnnnnnnnnnnnnnnnnnnnnnnnnnnnnnnnnnnnnnnnnnnnnnnnnnnnnnnnnnnnnnnnnnnnnnnnnnnnnnnnnnnnnnnnnnnnnnnnnnnnnnnnnnnnnnnnnnnnnnnnnnnnnnnnnnnnnnnnnnnnnnnnnnnnnnnnnnnnnnnnnnnnnnnnnnnnnnnttttaatttctaaagaaattaatgacttagagatgataaacctgtgcagtataggrggaggcagagaaagaaggagaataaatatatatgtttatatatgtgtatactgctataactctgtaactatattaaatagacataaccctacaggcctcttcaggtctgtgcttgccacttaaaccaacatgtattttcagtccaactttgtgtttactttacattttgcagtctcgttctaataatctgtttctcatttttcatataatactgaagaatatattttaaataacaaatgttctactaatgaaacacaggcaaagtgactgacaagtgaatgaacatatcacatctccct

SEQ ID NO: 29430 - DNA, 545 bp, Chicken  19866894248268_2
tctcccttaagctaaatatgagcagaatcctgcaaaaatcaattgtctgatagctggaggacactgacttccatgtgattgaatttcctggcttgccagaggcttctaaagcacagatgtgtgaggttttctaacctaattaaagaacccccaccatcagctcagaattaaatgatttcatggcaatataaaatgataactctttcctgagccactattaagcagtggctttggaccttgttatttgtatagaaaaattcctctgtgcacacgtctccagatacagagtacaaaagcatyagagctgctgggctgaactgaatattcatgtgagttcaagcatgaagatctaagacatgaccacttacctctagatctgtttccatgtacacagaggttacttgtgaagatttaaggcctggctcgttggatgtgttagggaccctgaacaggctatttcaagggattatggagggtgtgttggtgggtaacccactgcaatgttggaaaactgtggggtattttttcttttcattaaatataaa

SEQ ID NO: 29431 - DNA, 600 bp, Chicken  19866894248269_1
atgctccaaaggatggagttcacaacttactgcgctgcttagcaaccctttccaagagttgacaatccaatcttttatccaaatttttaaagatccactctgtgttttaaatatcccagtgcaaatctcattgatttcagcaaaattcctactagataagaaaggagagaaacaggctaacaggaaattctgaagaatgggagagtagaaagattactttagttttgtacgtgggttaagaccctctagtttgagcttgacatatctgtgccgcttcctatctcctgaggatttacttcyttgatgcacttgagcaaaaataaaagaggttacaggatgaaattttaaatttgactaagaaagaattaattaagaaatgagaaaacagatctctctagaggcttggaaaccgtaacttcagattttttggggagtttcagaagagtgaagaatgaaagtagtaattaagggcctgatctacatccctaaaagcccagtggcatcatatactgaggaactcaacatcagattgggaaatggagaaaaataaaagcacaagggaaaagttgactgaagatactagctcagtgcacagtttgg

SEQ ID NO: 29432 - DNA, 599 bp, Chicken  19866894248271_1
  misc_feature (1)..(27): n is any nucleotide
nnnnnnnnnnnnnnnnnnnnnnnnnnnagagaagagaaaatatcgcatatacaaggtatcatgaccattattaaatattaaacagcactggctggcccaacttctgggtgtattctgaattttctagtatataggcagcacctaaacactacaatcatacaccctttgcagtttcagagaggtaggataacgagatccaacagaggaacagaatgacttgaatgatgttaggtgaagcatagaagattgttcaaaatcctaccacaaactccaagagcaaagcagaaagtacaggaatgygtggattccattttttcatagtggtcagtcgacactgtcactgtacagcatcctctaacaatgcgagcaaaggcaaaacaggatttccagatggaacacagaatgactcagactttccaggccttcatattttaatgtaaacttgactgttttatgaagacccacatacatttacccctgcctatcctaaactctccaagagccagagttcatacatctgtttcattcctatacgtatcagacaattgcacctgttgctcataaagaggtccgtacaattttcccaagcatgagagtca

SEQ ID NO: 29433 - DNA, 600 bp, Chicken  19866894248272_1
ctctgggtgaaaaacttcttcctaatatctcacctaaacctcccctgtctcagtttaaaaccattcccccttgtcctgtcactatcctccctctcaaacagccattccccctcctgtttatacactcccttcaagtactggaaagccacaatgaggtctccccagaaccttctcttctccaagctaaacaatcctagttccctcaacctttcctcataggagaggtgctccagccctctgatcatcttagtggccctcctctggacccgctccaagagctccacgtccttcctgtactgkgggccccaggcctggacacagtactgcagatggggcctcacaaagagctgagcagaggggcacaatcacctccctctccctgcatttcttatcctaaaagaatgtgaccagcttgaaagagcagcaggatctatttggtaccaaaaggatacttaagagtaactaactttgaaatctcttcttcataaatagcccctgtgagagcaatgcaagtttttgtcaagtaaggccctacatcttctctgaaaaagagtgataaaagtttcattctgtgtaaattgcatgttgtattttaatata

SEQ ID NO: 29434 - DNA, 600 bp, Chicken  19866894248280_1
agaaacctagaaaacacctattatgtgggctacgtggagacgcactggaacaggttgcccaaggaggctgtggatgccccatccctgcaggcattcaaggccaggctggatgtggctctgggcagcttggtatagtggctggtgaccctgcccacagcaggggggttgaaactcgatgatcattgtggtccttttcaatccaggccattctatgattctatgattctatgatttttggtgattttttcatcaaaatgcaactccagtcaattaaaaaaaaaaatctagttcaatttctgktggaaatggaagcaaataattccacatctcaaaataattcacagtcctttgtcaaccacatacttccttgcccagaaacagataaaaaatgtcaaatgtcagcgtcctcacaaaattaattcttaattaacgtcaagagccaatatttgtttatttatttaactatccgacaacacattattttttaaagagctgcgtgattgccttccatacaaagcttatgtttcttatttaggatatacccagaaaagaatgttgaatattttgtaatacattgagactttcaaaagactggtaaat

SEQ ID NO: 29435 - DNA, 600 bp, Chicken  19866894248280_2
agagctgcgtgattgccttccatacaaagcttatgtttcttatttaggatatacccagaaaagaatgttgaatattttgtaatacattgagactttcaaaagactggtaaatccatatcttcaattctaaatggatagagcttcctttgctccagttctcttactgcaaaatacaggctgatggaaactgaagaacatggcctatatatattttagtcagtggccttgtaaatctgagggaaagacctaaactatgaatgataataacctatggtttttatccaaaaattccgtagaaartgaatatctattcaaaatagctgtagttcatctgaagaatggatctacaagtctgtatgtccccaaatagatgtttgaatttatgttcagaatattttaaaaacgccatttctcctcttatgttttctgccatgattaactgtgttgctgtaaatcttgcttaaatgtgtagtttgacaattcctaaaggtagaagaaaaggtcttaggtttgcacagctacatgtaactgtggccacagagggctaagaacagcaaagcgtatctcatctgttaattctccaggcatgcaagagagttg

SEQ ID NO: 29436 - DNA, 600 bp, Chicken  19866894248281_1
ctaaacatgcaaatgcattaaaaacacctaatagacatcacgttaccttgacaggatttattttctataagctcaagttgattggcactaattatatttctcttgctcaatcctttatcagcagtcccattttattacaccctaaatcaatattaggatgacaaggctcaaaagctcacacctttgaggcacagattttgactgtttttccaatgcaatgaatcagatttctagagctgaccaccagcagcccattggcacagtggagctctcaaaccattctctccaacttgtaattayaacactaaaaaaagatctgtagcttaatttgtcatccccaaagaaacagcaaaataaacagactgattacaaaagatctcctctagtgaaagggaagaaaagcaagtgaagacagaaaaggaagtgtgggaggtgagcaggttaccgtcaatcaaacttttgagtcctcgagaatgattagaaaaagaagtaattccttcacagcaagaatttgttctcctgatgttaattgttgattttagcacgtatgactatcacagaatttattcaactgagtgaggcaatcgtgctgttcaaatt

SEQ ID NO: 29437 - DNA, 600 bp, Chicken  19866894248282_1
atttatttaatttttttcctcatttttttttctcatcatattttatgcatactaaacccctgaatcaagcacatattgatggctgagctgtatatctcctttggattttacattttcccatggtccaatctctcatttttctgtctctaattaagaaaatgttgtctttttacaacaatcgcaaaggcctcccatctagttccctgggcttttccccacaactggctgctgccacagctgcttccatctgaagttccacagagactagaaatggggaagagaggagataaggctgtgctkaagtagcartttggctgttcctcgcaatcccctcagacttgcagtcctgaggagtcctttgcagggtgtccctcaccttccttccactcaattcctctgctttctagaactgtcctaaataaactcagcaacagattttcttaaaagaatatttcagattatctcagaaaataggtcatgctgcaagggacggtttgaaaacaagtgttccttgcccttttgattttgagggcaaacttattcctgattatggaagcaggacttggaaaatgggagatgccagtaagatgccatagaatt

SEQ ID NO: 29438 - DNA, 600 bp, Chicken  19866894248282_2
atttttttcctcatttttttttctcatcatattttatgcatactaaacccctgaatcaagcacatattgatggctgagctgtatatctcctttggattttacattttcccatggtccaatctctcatttttctgtctctaattaagaaaatgttgtctttttacaacaatcgcaaaggcctcccatctagttccctgggcttttccccacaactggctgctgccacagctgcttccatctgaagttccacagagactagaaatggggaagagaggagataaggctgtgctkaagtagcartttggctgttcctcgcaatcccctcagacttgcagtcctgaggagtcctttgcagggtgtccctcaccttccttccactcaattcctctgctttctagaactgtcctaaataaactcagcaacagattttcttaaaagaatatttcagattatctcagaaaataggtcatgctgcaagggacggtttgaaaacaagtgttccttgcccttttgattttgagggcaaacttattcctgattatggaagcaggacttggaaaatgggagatgccagtaagatgccatagaatttgtctctat

SEQ ID NO: 29439 - DNA, 599 bp, Chicken  19866894248283_1
  misc_feature (1)..(55): n is any nucleotide
nnnnnnnnnnnnnnnnnnnnnnnnnnnnnnnnnnnnnnnnnnnnnnnnnnnnnnnctaagactctatgaaagaggtgacttgattactgaaggaatctacacctcaattaaccacaaataaaacagtataccaatagctttgcactttcagcactgttagtctaataataacagtaggatgcttaacatccttttttaagtccctccatttcccccttcttttccttccatagccacacctgacttctaaaaacccagatcagccaggcttccttctgtgtacctgacccttctccccaygttctgcagctgctgacagcagacctcccaggaactgcatattgaagtgtaaagataacacatctgacaaagtcaactgatctgtccrtcttctgtccctgttcacatcatccagtgatttcaggagatctgctaaatctttgcttggcctaaagaagctctgccctgctcttgaaattctgtagtaataagaagtacatttgtcacagcaacaagaattttaaccatttaaccactaggatgaaggcattagaattagcataaaattacttatttcagcatagagtatttcctgtcca

SEQ ID NO: 29440 - DNA, 600 bp, Chicken  19866894248283_2
gaaggaatctacacctcaattaaccacaaataaaacagtataccaatagctttgcactttcagcactgttagtctaataataacagtaggatgcttaacatccttttttaagtccctccatttcccccttcttttccttccatagccacacctgacttctaaaaacccagatcagccaggcttccttctgtgtacctgacccttctccccaygttctgcagctgctgacagcagacctcccaggaactgcatattgaagtgtaaagataacacatctgacaaagtcaactgatctgtccrtcttctgtccctgttcacatcatccagtgatttcaggagatctgctaaatctttgcttggcctaaagaagctctgccctgctcttgaaattctgtagtaataagaagtacatttgtcacagcaacaagaattttaaccatttaaccactaggatgaaggcattagaattagcataaaattacttatttcagcatagagtatttcctgtccaagcaagggctcggcagcttattcatcagaaagaatacttacatagatagtgtggcccggtgagccaggtatactggaacctggtctgga

SEQ ID NO: 29441 - DNA, 529 bp, Chicken  19866894248293_1
atagaggccaacttccatgctacacctccgtgtacattattttctgtagaagcaatgtcacaaaattgaaaaggtcaatcacaccaatgatccagaatgaggatgcctgtcttgatgattgaaatgttgggaagtacgtacctgtattctcagtgcaacagaatgtccactgtactaccttccagatgttttttatgattctatgtctgtatttctcatgcagctagtgttgtctttgtcacttatgtgtcttaagtttgtgtatcttaagtttgtcttatagtttatggttgctaagakaaatatttttgtatatttaggacattatgcactttccakttctctaaaatttgttatactcccagccaggtttccttatgacaaccggtcatctttgacatgtcgccttatcaaatgcttcttgaaaaatgcatgctgtccacatcactttcttatctatcatagcagcattatcttcaaagagttctatcagcttagttatacaacacagtgctattatatgttcata

SEQ ID NO: 29442 - DNA, 490 bp, Chicken  19866894248293_2
ttttctgtagaagcaatgtcacaaaattgaaaaggtcaatcacaccaatgatccagaatgaggatgcctgtcttgatgattgaaatgttgggaagtacgtacctgtattctcagtgcaacagaatgtccactgtactaccttccagatgttttttatgattctatgtctgtatttctcatgcagctagtgttgtctttgtcacttatgtgtcttaagtttgtgtatcttaagtttgtcttatagtttatggttgctaagakaaatatttttgtatatttaggacattatgcactttccakttctctaaaatttgttatactcccagccaggtttccttatgacaaccggtcatctttgacatgtcgccttatcaaatgcttcttgaaaaatgcatgctgtccacatcactttcttatctatcatagcagcattatcttcaaagagttctatcagcttagttatacaacacagtgctattatatgttcata

SEQ ID NO: 29443 - DNA, 599 bp, Chicken  19866894248299_1
  misc_feature (1)..(123): n is any nucleotide
nnnnnnnnnnnnnnnnnnnnnnnnnnnnnnnnnnnnnnnnnnnnnnnnnnnnnnnnnnnnnnnnnnnnnnnnnnnnnnnnnnnnnnnnnnnnnnnnnnnnnnnnnnnnnnnnnnnnnnnnnnncatgccagtcacactttcagcaggtccatcccgcatacttcaatggagatgagaaaatggctaaaatggtatagctccctaagacacaatgactcagtgcagcatctcattgcagcataaaaagcaacggcctcctcccaccctctcattccaggtgtccctttatcctgctcccarctgcccttccctgccaaacaccagcaccctactcatctgtgctgagcctcrgtaactyttgtggtggtgagggggtttctgagctgtccctccagctcaggaggacacgttactgcaataagagcaaaggtaaggggggaatggaaaaggaggctggaggaatgagccctccctctctgagcagcagcaagctgttacatttatctgactgcacatgaaaaggcagtgaaaatggagtgtttatctcttctgaaagctcagcaagataatgcctggcttcaagctctgtagatttgtga

SEQ ID NO: 29444 - DNA, 599 bp, Chicken  19866894248299_2
  misc_feature (1)..(72): n is any nucleotide
nnnnnnnnnnnnnnnnnnnnnnnnnnnnnnnnnnnnnnnnnnnnnnnnnnnnnnnnnnnnnnnnnnnnnnnncatgccagtcacactttcagcaggtccatcccgcatacttcaatggagatgagaaaatggctaaaatggtatagctccctaagacacaatgactcagtgcagcatctcattgcagcataaaaagcaacggcctcctcccaccctctcattccaggtgtccctttatcctgctcccarctgcccttccctgccaaacaccagcaccctactcatctgtgctgagcctcrgtaactyttgtggtggtgagggggtttctgagctgtccctccagctcaggaggacacgttactgcaataagagcaaaggtaaggggggaatggaaaaggaggctggaggaatgagccctccctctctgagcagcagcaagctgttacatttatctgactgcacatgaaaaggcagtgaaaatggagtgtttatctcttctgaaagctcagcaagataatgcctggcttcaagctctgtagatttgtgagttaggagatgtgtaagcagtcaccctgcatgtactaagatccttggtgtg

SEQ ID NO: 29445 - DNA, 599 bp, Chicken  19866894248299_3
  misc_feature (1)..(65): n is any nucleotide
nnnnnnnnnnnnnnnnnnnnnnnnnnnnnnnnnnnnnnnnnnnnnnnnnnnnnnnnnnnnnnnnncatgccagtcacactttcagcaggtccatcccgcatacttcaatggagatgagaaaatggctaaaatggtatagctccctaagacacaatgactcagtgcagcatctcattgcagcataaaaagcaacggcctcctcccaccctctcattccaggtgtccctttatcctgctcccarctgcccttccctgccaaacaccagcaccctactcatctgtgctgagcctcrgtaactyttgtggtggtgagggggtttctgagctgtccctccagctcaggaggacacgttactgcaataagagcaaaggtaaggggggaatggaaaaggaggctggaggaatgagccctccctctctgagcagcagcaagctgttacatttatctgactgcacatgaaaaggcagtgaaaatggagtgtttatctcttctgaaagctcagcaagataatgcctggcttcaagctctgtagatttgtgagttaggagatgtgtaagcagtcaccctgcatgtactaagatccttggtgtgcctgaag

SEQ ID NO: 29446 - DNA, 600 bp, Chicken  19866894248300_1
caggatctggtcacgttcaaaaaagctgtttcagaatttggaagctgtctgaaactactcatatagaaggtttttttatttaactgttatgacagaaatgaagtccaaactattttcagttgaattaatgtgagactaatagccatgcaggcaacatctgaggtgttcagccctgggttcgcattaagttctagaggcaaaagtttagagcgatgaacaatgtaaatgaatcacctctgggtctaggcactagagtatgctgtaatcgtagcataatgaaataaggaagagactttgtcraatttgttattattttaatctagaggagcttggagatacaactgtgtagctcactccaaaagtaatgcctcctatttatttgtgttatttatgtgagagcattctcaggacccacccagcacaaactttgtactatccaaaatagccaccatcattttcaatgcactgaagatgatattaagctctgtatacaagtctcctgctcctaatccatcaattcacatggatgagctcattggaacactcttcattttgtgatgtgacatctgtgcatggctgtctggagcaagccttgtgtca

SEQ ID NO: 29447 - DNA, 600 bp, Chicken  19866894248301_1
gctcattttcctcttgtggctttggactagttacgggaaggtcacttgatcaacccccctaaataactccatttcaacatctcagactcctgggactctcccagtgctggaagtgttttgcaaaactgatgcaacacctggaagcaactccaagatatgagaatcttagctctaccctttgatataaggggatcaaagggaagagctagagaaaaggaactgaaaggatggggggaaaagaaaggcaaacagcaagatgccccaaccttgtattattaaaattccaaggctttgagctgyctcccattcctggtttactaatggttaaggaggatgctgttctgtgaatagtttgagtaaccccatgttttactcaaggaaagaggttttctgtccctgtctgtgcaggcaggctggctttgtgcaggtgactcagtcacacttcagcagaaagttgggcttttttcctataaactagcagaaaggcacccatggtctgagaataacccacatcagtgcagtgctatcattcccgaacagtcaaaggtgagattggtcaggtcatgtgtagcaaaagcagataggtattttgggggctct

SEQ ID NO: 29448 - DNA, 599 bp, Chicken  19866894248303_1
  misc_feature (1)..(128): n is any nucleotide
nnnnnnnnnnnnnnnnnnnnnnnnnnnnnnnnnnnnnnnnnnnnnnnnnnnnnnnnnnnnnnnnnnnnnnnnnnnnnnnnnnnnnnnnnnnnnnnnnnnnnnnnnnnnnnnnnnnnnnnnnnnnnnnnttggtttggttggggtttttttgttgttgttgttgtttgtttgcttgtttttgctgagctaatggtatctccactcagaaaaaagcagaaatcagagttcaaaaagaatgattagtcttcagtggtaatgcggtgggaccatagagcacaggtaacactttaacagatgccygaatattttgaaagataaattccttttcactgttaatgaaactttgggtgaagtatcttcagacaaagtcccggtctttttttgcttcccttccttttcttttctactctaaagcttccactcctttttcaaaatctgcagcaatgtatcttcctgcaaaggtctcatctcttcttgtacatccttcttttcacacctggcaaaccctctagattgtgctactcctgcaaagacagaagaattgaggaaaagtactgtattcttcttcagtgcaggtataaaagagatttccctattct

SEQ ID NO: 29449 - DNA, 600 bp, Chicken  19866894248308_1
aagacaaaaaaaaaagagtagaaacagtaggtacatggtctaaaagaggggaactggagctccaacaaggacagaagtagaaacaattgatcacaaatatgcagagaatgaatgaaaaagaaacaaccgagacacaagtataccaaaggccataatgtgctggtgccaacaagaaagaaaaggaaattgttctgtgagtttcaggctcataaatggctacttacatgctaaaaaaatgtacgaaaatgagattataatggaacagcagcttactcctcctaaacctagaaccttccagcmccaaaatatgcacgatcagcaaagcccctcttgaacctcagatcagtgcctgactcagtggcattagctccagggctaccaccaggtccaggaacccacatgtcccttttggaaatcagccaagagacaagccccctcattgcatgtcaaagcatatgctgatgtgccaggtgttggtgcttgcagcccctaggtcttcctgccacagcctgaaatattcgctatgaatagggtgcacggtaaagacatcagaacccttgcaggggacacactttgcctacatttggcatcttactattc

SEQ ID NO: 29450 - DNA, 600 bp, Chicken  19866894248309_1
gtgcgtgttgctcatcacattcctcccagcctgcatttccaggggtgccttggagctctcacctcgtaggtggaaatgttccctgtccagagaagctgtggcagccccatccctgaaagtgttcgaggccaggttgggtgggcccctggacagcctgatcttgtgcctgatttagtggttggctgcactgcccagggcaggggattggaagtggatctttggtgtcccttccaacccaagccattctgtgattccttgtaggactgctcttaagccaacatttagaaaagcatctttacygaggacagtgcttaactgtttgtccaaataccttccctcctcatgggaggaaataaattgtgcacgcttcagtggtgctgggctgcagctgggggcacgtgggagtctcatgtgaatgtgttactgaaacaaaggacgaaggaaaaaggcttagcacctacagcactgtcacacatatattcattctgtaagcaggagctgatggctgggttgcctccgaggtgaggaatgacactgagccctgcagccgtgagtgcctgcacatccttctctgctgctcctgaactgattgcatctgaa

SEQ ID NO: 29451 - DNA, 423 bp, Chicken  19866894248312_1
caaacattgctgctgtgctgaaacaggacgagaactgctacaggaagagcaggtttgtgggttttaagtgtacacttcaacaacaacaacagaaaagctccaaacaaggccagcacgaggttaactaataaataaagagcactgggtgtgctaacgggaagtttacacatgtagaacttctttctacttctgacattgtttctttggctgaataaatatagatattttaaaaatacattcattaacgtttcatgagaactgagcagtgaaatctttcctttgcttcatttgtgtttgatwgtgctcagacaacrcattaagactaagcagaggatcacgtgaaactaagtaaccctagtgcaaaaagcccctctagcaaagctccctacagtggagaaagaatacaaacgcaggcaagaggaa

SEQ ID NO: 29452 - DNA, 409 bp, Chicken  19866894248312_2
gtgctgaaacaggacgagaactgctacaggaagagcaggtttgtgggttttaagtgtacacttcaacaacaacaacagaaaagctccaaacaaggccagcacgaggttaactaataaataaagagcactgggtgtgctaacgggaagtttacacatgtagaacttctttctacttctgacattgtttctttggctgaataaatatagatattttaaaaatacattcattaacgtttcatgagaactgagcagtgaaatctttcctttgcttcatttgtgtttgatwgtgctcagacaacrcattaagactaagcagaggatcacgtgaaactaagtaaccctagtgcaaaaagcccctctagcaaagctccctacagtggagaaagaatacaaacgcaggcaagaggaa

SEQ ID NO: 29453 - DNA, 600 bp, Chicken  19866894248314_1
tttaacttttataactttgtggataattctcctgtactttattagcacaggctccttgaaataggattttcttagaaagttacatttgtaatcaaatttgagaagtaggattttagattaaagaacagcaacatcaaaagccatgttacataacaggagaaattttaatatttgctgaggatccaggtgttcctgctaaccctgcagaatatatttttcaagtcaccaattcagtggcattcaagttttccatgcaataaatcatttgaccacgtctgtatcttttacgtgctgtatgcytcaccaagccactttgaagtcctgaggagataatacagttccttaaactgtttgtaaactcagtctgcaaaaaagtattttactgtgatctagtgagtaagtacttgcccatgatgaattgtagatgtgtaaagcataagctaccaaagaaatgcacaagactcgtcagcagtaagtggtgctgtgctcaaaggatatgtttcccccacctacattgtctgatacatctgaaacaatctgtttacatagttactgaaaatctcgggcctctatgattaggaacctaggagaggatctgaa

SEQ ID NO: 29454 - DNA, 600 bp, Chicken  19866894248315_1
gcaaaaagcttttgcagcttattgttgcaaatgcttttatttaatgcactttctataaaacttgtcaaaataaactgagaaataggtaagacatgcagacgatgggaatgaaatcaggtagagttaaatatgcaatgatatttctctttctccttaaaaaaaaaaaaaaaaaaaaagttatagtatgtacaattacatgaacaatctaaaataccatatctgtgccataatatgatgttacttctggtaagaaagtttgatgaactactactctagatttccagaattttacttcaattycatgttcagacttgaagttcagcgtattgaaataaatcagtcttaaagtatctctactctttaaaattactaatttattcattcactgctccagaaagatgtgtgtgaaaagcagaatatgtgtttaatgaaatctgcatatataaatcttgcaaatataaatagaaataaaaaatgtatagtttatattcctagattaaatctccagtaaaatggactcctagttgagaagatgtaccagtaagctaaggagaaaagctttacaggaatgctctagttcctcggaaagagaagagacaa

SEQ ID NO: 29455 - DNA, 479 bp, Chicken  19866894248318_1
tgaataaatcggcaataatgtcctatgcgattttccatcaggcctgaagagacatcagcatagcttaaactattctaaattctcagagtttgtctgtggattttttaattctgttcagttaaactgatacaggcttttaagttggtggtgctgattaatcttaaacaggagcaatacagtaccagaaagactgtccaagaatattgaagtgatagtcacagtctgtctaaacacaccaatatgtttagatgggatatgatatgcgtatataatacgcttcagaacttaaccctcatatcratgcaaktaaagatgccygaaaagacacttccgcataacttcctacttctaaacatatcatctggaacactgttggactctgtgtgtggtagagcaataatctaatcactgctgcagatcttgcattcttttattcttggctttatgggtggcatttcaagatactagaaatcaagtgt

SEQ ID NO: 29456 - DNA, 472 bp, Chicken  19866894248318_2
atcggcaataatgtcctatgcgattttccatcaggcctgaagagacatcagcatagcttaaactattctaaattctcagagtttgtctgtggattttttaattctgttcagttaaactgatacaggcttttaagttggtggtgctgattaatcttaaacaggagcaatacagtaccagaaagactgtccaagaatattgaagtgatagtcacagtctgtctaaacacaccaatatgtttagatgggatatgatatgcgtatataatacgcttcagaacttaaccctcatatcratgcaaktaaagatgccygaaaagacacttccgcataacttcctacttctaaacatatcatctggaacactgttggactctgtgtgtggtagagcaataatctaatcactgctgcagatcttgcattcttttattcttggctttatgggtggcatttcaagatactagaaatcaagtgt

SEQ ID NO: 29457 - DNA, 461 bp, Chicken  19866894248318_3
tgtcctatgcgattttccatcaggcctgaagagacatcagcatagcttaaactattctaaattctcagagtttgtctgtggattttttaattctgttcagttaaactgatacaggcttttaagttggtggtgctgattaatcttaaacaggagcaatacagtaccagaaagactgtccaagaatattgaagtgatagtcacagtctgtctaaacacaccaatatgtttagatgggatatgatatgcgtatataatacgcttcagaacttaaccctcatatcratgcaaktaaagatgccygaaaagacacttccgcataacttcctacttctaaacatatcatctggaacactgttggactctgtgtgtggtagagcaataatctaatcactgctgcagatcttgcattcttttattcttggctttatgggtggcatttcaagatactagaaatcaagtgt

SEQ ID NO: 29458 - DNA, 463 bp, Chicken  19866894248331_1
actggtttggtcctaaaattaatataagaaccaacattcctgtatacacatgcctagattaataatcgtttccctcagaaatgcatgttccctctttgaaatggcacagacaacaccgctatacctcagtgtcaccatgtcattattgccacagaactgtccacatcagcacagagtccctctgaaacacacctgtcacatgcgtccatcaggtacatttacacagcagcacttttgctttactgggattgcaaaatgagcagggacgctgtggagcagtgatgcaacaggacaatctayagctggtgcctacatactcccatgcaatccttatcacagcatcagtgtgggcagaagggccaattgagtcagccttgatcttatttttgcaggaatgttgtggatactgctgtcgtctttgccatattcaagccattttaaagcatatttcatagaatcatag

SEQ ID NO: 29459 - DNA, 600 bp, Chicken  19866894248332_1
cctgttccggtttgtcaccaccctgtgagtgaaaaaattcctcctaataacctacctaaacctccccatctcagtttaagaccattcccccttgtcctatcactatccagccttgtgaacagccgtgaccagctctcatctataaactttgtagtagtgtgagctaaagccaagaaatctcatcttttctcttagtaggaccaaataggttcgttttcttagtgcttactcgcctgtgaggaacagcagttcactgtattcctacatcaaaaggctgtgatacgctgccaaaagataacragaggactttggaacagttctcacaatgtgtgcatttggttgttgggtttggrtttttttgcagttgttgtttggttggttttcttttgagggaacttctgaaattgccaattgagtcataactacaggaagagttgggttggatgggaaaggagctcatggactgagcagttctgggctggtagggtacgtgtggccgcagtttgtctggaacatgaacctcctctctgtttgaggagcttggtgaggatggggatgttctcatgaaacttcttcagagctcagggtcaaagtactgct

SEQ ID NO: 29460 - DNA, 600 bp, Chicken  19866894248332_2
acctaaacctccccatctcagtttaagaccattcccccttgtcctatcactatccagccttgtgaacagccgtgaccagctctcatctataaactttgtagtagtgtgagctaaagccaagaaatctcatcttttctcttagtaggaccaaataggttcgttttcttagtgcttactcgcctgtgaggaacagcagttcactgtattcctacatcaaaaggctgtgatacgctgccaaaagataacragaggactttggaacagttctcacaatgtgtgcatttggttgttgggtttggrtttttttgcagttgttgtttggttggttttcttttgagggaacttctgaaattgccaattgagtcataactacaggaagagttgggttggatgggaaaggagctcatggactgagcagttctgggctggtagggtacgtgtggccgcagtttgtctggaacatgaacctcctctctgtttgaggagcttggtgaggatggggatgttctcatgaaacttcttcagagctcagggtcaaagtactgcttgtgggatctgttgtgccacatagagtccatcaccagtgtagctagagatttg

SEQ ID NO: 29461 - DNA, 600 bp, Chicken  19866894248333_1
atatacctttagaagaaactagcacttctttactatcacttatttaagcttttattataaaagaaatatttggagatttaccaagaagaaaaacttgatatggtataattcaataaagtttcctggggagtttttcatagaatgggcatccttcacactgttgatgcatagtgtatttttaattggaaaaatgctatgaacatcactaattgccacatagactgtagtagtatctatttcaatctgcctatcttctgccaaaaattaatacttgttaactcttcaggtttcaaattactsttaggycgygtagataaacgttctacttgaaacagatcttaaggtgttatcctgcaacccctgtactggatcttggattgaatcattaacaaaaatactttttcaattaaagcatatttaaatatatacccttttcttgctaattaattttaaggagtatttgtgttaaaaatgtatgtttaatttttcatttgaacttgactggtttagtttatctctctgatgtatttcaggtagttctcagacattaaatggctggacatcatttaattaaagcaaaattaaagcaaaattgcatat

SEQ ID NO: 29462 - DNA, 600 bp, Chicken  19866894248333_2
ctttagaagaaactagcacttctttactatcacttatttaagcttttattataaaagaaatatttggagatttaccaagaagaaaaacttgatatggtataattcaataaagtttcctggggagtttttcatagaatgggcatccttcacactgttgatgcatagtgtatttttaattggaaaaatgctatgaacatcactaattgccacatagactgtagtagtatctatttcaatctgcctatcttctgccaaaaattaatacttgttaactcttcaggtttcaaattactsttaggycgygtagataaacgttctacttgaaacagatcttaaggtgttatcctgcaacccctgtactggatcttggattgaatcattaacaaaaatactttttcaattaaagcatatttaaatatatacccttttcttgctaattaattttaaggagtatttgtgttaaaaatgtatgtttaatttttcatttgaacttgactggtttagtttatctctctgatgtatttcaggtagttctcagacattaaatggctggacatcatttaattaaagcaaaattaaagcaaaattgcatatagcaaa

SEQ ID NO: 29463 - DNA, 600 bp, Chicken  19866894248333_3
tagaagaaactagcacttctttactatcacttatttaagcttttattataaaagaaatatttggagatttaccaagaagaaaaacttgatatggtataattcaataaagtttcctggggagtttttcatagaatgggcatccttcacactgttgatgcatagtgtatttttaattggaaaaatgctatgaacatcactaattgccacatagactgtagtagtatctatttcaatctgcctatcttctgccaaaaattaatacttgttaactcttcaggtttcaaattactsttaggycgygtagataaacgttctacttgaaacagatcttaaggtgttatcctgcaacccctgtactggatcttggattgaatcattaacaaaaatactttttcaattaaagcatatttaaatatatacccttttcttgctaattaattttaaggagtatttgtgttaaaaatgtatgtttaatttttcatttgaacttgactggtttagtttatctctctgatgtatttcaggtagttctcagacattaaatggctggacatcatttaattaaagcaaaattaaagcaaaattgcatatagcaaatga

SEQ ID NO: 29464 - DNA, 600 bp, Chicken  19866894248338_1
ctgtcctggcagtcagcatccttctacttcagcccagcaaggatatctgaaaatgggcacttgctacacttgaagagatgaaaacaacgttctggaagcacagccacacatctgcactcttgaaggagaaacgggtgcccataacctgcctggtaaggggaagactgggagaagcaaatgacttaaattttgcaaggcagagaaatggccttagaaagacggccattacttcaacctagaagacagtttcctaagcacaacagcacgtattttgcagctgctaacagctgagggaggaayccatgtcagatgagacagctgacagtcaggaaacaaggtcacatgggaaatcaaggaacacacttaattggttgacctaaggttaaatgcagaagttcagcactgccaggagcaggagtaacatcacagatgaatcactgcacttaccaggcaggtttggtcaatagagctatctatctgtgtggctaaaatgagcccagaacgggcttgcaagtactaaggagttctcttacctccattggtttcctggtacaccacagacttccccagctcagcaccaagacgcctggagagagagag

SEQ ID NO: 29465 - DNA, 600 bp, Chicken  19866894248343_1
tccattttttttttactccattttcactgttgggattttgggcttcactgtgtatgagagatagtactttttcattctttttctctatgtttacagtcttcagaagcttcatagatgtctttttatagatcagtggcttgaggctgaatttcagctgcagacatacacttttttctgttacctggctctgtagagaaacttaacaattcttgtaaggaagtatattggttttgtattctttggttcagtaagaatatctcaatgcagaacatttgctgagcatctgtactgtgttctacyactaagtgcatagtacacacagtaggataaaggatgtgcactctgcggtccacagctcataggagtttgtgaacacaactttctcactgattgtactcatcctacagagagaattcaagtaactacctcatagaagacactgaattcttagatagcaacagtcaraggaaatgaatgtggagtttaattaccctgtgtatttatgtgcttcttctactgggtcttgattttctatgcacattctccaagatatgccgtggttctgcagggatatctttatggccactgtgatacaaataa

SEQ ID NO: 29466 - DNA, 600 bp, Chicken  19866894248343_2
cacttttttctgttacctggctctgtagagaaacttaacaattcttgtaaggaagtatattggttttgtattctttggttcagtaagaatatctcaatgcagaacatttgctgagcatctgtactgtgttctacyactaagtgcatagtacacacagtaggataaaggatgtgcactctgcggtccacagctcataggagtttgtgaacacaactttctcactgattgtactcatcctacagagagaattcaagtaactacctcatagaagacactgaattcttagatagcaacagtcaraggaaatgaatgtggagtttaattaccctgtgtatttatgtgcttcttctactgggtcttgattttctatgcacattctccaagatatgccgtggttctgcagggatatctttatggccactgtgatacaaataatactgatattgatttttatatcctgaacaaaataacatctcatcttttacaatttgaaatgttcttcttgcacttgaaaggagctactcatcatagcatttttttttctttgctatcaaacagtgctttccaggcacggtcagaaattggcctagattgctcaat

SEQ ID NO: 29467 - DNA, 599 bp, Chicken  19866894248345_1
  misc_feature (1)..(68): n is any nucleotide
nnnnnnnnnnnnnnnnnnnnnnnnnnnnnnnnnnnnnnnnnnnnnnnnnnnnnnnnnnnnnnnnnnnntatatacataaattgtgcccacctcacacataaacagagcagaagaaaacaaagagaacatctgatctatacctaattagtgcagagccttctcaatttctttttgctttcacaattcccattatattatccctgcctacagcaggggagttggaactagatgatcttcaaggtccttccaacccaaaccattctgtgattctatatcatttattaaaaaaataatgcatayagtaaacattacaaataagacaatatctgaggaaaaaaaaaamaaacctttaatttcagataagtgttaagataatctaaaaactctagaaaatgaggctagtctgaacaagggacmtgaggaatggaagaatcactcagaaaacaggaaatatcaatgagaagattggagtgggaagccctctgtggcacgttctctttaaactacaggtaatgtgtataagagggagctagggtctcccacagcaatgttgatcgaggctacaaaatatgtgaaagaccatggtcattgcctgttga

SEQ ID NO: 29468 - DNA, 599 bp, Chicken  19866894248345_2
  misc_feature (1)..(25): n is any nucleotide
nnnnnnnnnnnnnnnnnnnnnnnnntatatacataaattgtgcccacctcacacataaacagagcagaagaaaacaaagagaacatctgatctatacctaattagtgcagagccttctcaatttctttttgctttcacaattcccattatattatccctgcctacagcaggggagttggaactagatgatcttcaaggtccttccaacccaaaccattctgtgattctatatcatttattaaaaaaataatgcatayagtaaacattacaaataagacaatatctgaggaaaaaaaaaamaaacctttaatttcagataagtgttaagataatctaaaaactctagaaaatgaggctagtctgaacaagggacmtgaggaatggaagaatcactcagaaaacaggaaatatcaatgagaagattggagtgggaagccctctgtggcacgttctctttaaactacaggtaatgtgtataagagggagctagggtctcccacagcaatgttgatcgaggctacaaaatatgtgaaagaccatggtcattgcctgttgaaatgttgcagcatcttaaacagatgtattttgttggtgggtag

SEQ ID NO: 29469 - DNA, 600 bp, Chicken  19866894248345_3
caaagagaacatctgatctatacctaattagtgcagagccttctcaatttctttttgctttcacaattcccattatattatccctgcctacagcaggggagttggaactagatgatcttcaaggtccttccaacccaaaccattctgtgattctatatcatttattaaaaaaataatgcatayagtaaacattacaaataagacaatatctgaggaaaaaaaaaamaaacctttaatttcagataagtgttaagataatctaaaaactctagaaaatgaggctagtctgaacaagggacmtgaggaatggaagaatcactcagaaaacaggaaatatcaatgagaagattggagtgggaagccctctgtggcacgttctctttaaactacaggtaatgtgtataagagggagctagggtctcccacagcaatgttgatcgaggctacaaaatatgtgaaagaccatggtcattgcctgttgaaatgttgcagcatcttaaacagatgtattttgttggtgggtagagtaattctcttcctgtatattaattgttctcaagaggcaaccttcttatctacatgctaaattcctcattcttc

SEQ ID NO: 29470 - DNA, 383 bp, Chicken  19866894248348_1
tgaggggatggtgaatgctcccattccaccagcctcccatgtcacttgctactgaaataattttgaaactagaagcaggttagggaatctccaagataaatagaacttttcacttcctgagcaaatgctgtaaccgctactgaattagataagatgtactttacatttacaaagtatgtacgattataatcaatcccgccatattttttagcattttaaagagaaatgttttacttgctgtggatatcagatgaagagagctgggatcaatcttggctcaggtgcctgggtaagagcacraagtaaactaagaatattattttcagggcctttctcaaattttggggatgacagagatagtctataagagcaaacaacaggtt

SEQ ID NO: 29471 - DNA, 600 bp, Chicken  19866894248351_1
tgttggtcattccactgcgttcttataaaaaatggaatccgatattcaatttcattttaactcagggaacagatcagtatgttacacacaatagcagaaaggtttctgtgaattgtttttcagtcatggattgattttaattgagcaaggttcaagccactagaacagggaacaagaattcagctgcctccagggatttaatcagcttcctgacctaacaaaattcatccaaacagatgatggaaaaaaatcaatttgtggtaaatgatgccatcagtgaaaagccagagtagagtcacyttttgaatagatatctagttcctagcaggcaagtctcacggttgctgcaggacacatggtcagggaggcaggtgcagaggtacaggctatcttaaaagctaaatatttagagtaccagcaatattacaagtttaccttaaacataacaactaaaagagagattcaaaactagcttttacattgagcacacaaatacatatataagctagagacaaagtttttttcttttctatgcttacataatttctcacatgccttcacttatcttttttgcaatgtttcacatcaagagaaggttta

SEQ ID NO: 29472 - DNA, 600 bp, Chicken  19866894248353_1
tctttccttatttgcagccatatatcattggggccccgctgtcaccaagggctgatggagcagtgttgttggcacgggtcagtgtttcagtggcacactcgatctgcccatggttcccatcctgcccttgagtgcagcatcatgcagcaggcagggactgcacagcgttgtggttggaaaaaaacatctattttttttctcttttaacaaactgctttggactgcctgagtggctccacgtgctgtcaagtgacaaacaccccaaacctccactgattcctttacctccacgctccgtaygggacaagcgcagcgtttgctttctgcatgccttctcctgcctggctcccgtttgcctgagaccatttccccaccaagttctggttttgattccccagtctcgcttcctatcttgtttttctaatctcagattgtttgaatttccttctggatgtgcctgctgcaaggcagtgctgcagcagaggaaatggtgactgggaggaacgagcccatgagtaaacaagagccagagtttgagtctgtccgtgggatcgatggaggtggctttgatgggggagatagccctgacgccagycaaaa

SEQ ID NO: 29473 - DNA, 600 bp, Chicken  19866894248353_2
cgtaygggacaagcgcagcgtttgctttctgcatgccttctcctgcctggctcccgtttgcctgagaccatttccccaccaagttctggttttgattccccagtctcgcttcctatcttgtttttctaatctcagattgtttgaatttccttctggatgtgcctgctgcaaggcagtgctgcagcagaggaaatggtgactgggaggaacgagcccatgagtaaacaagagccagagtttgagtctgtccgtgggatcgatggaggtggctttgatgggggagatagccctgacgccagycaaaacgtagctgtgagttggagctgcctgcaatgatagttgttggaaatgcggcgtgtaccatcgagggaggcacggcagcactgcagtgtttttctttcttcggaaagagaggcaacaagcacgcctctgttccagagaaggaggaaagggggggggggraagagtgtgttttcttgtctgtgcataaagggcagcgtggaaaaagaggaggaaaaatggaatatttatttaaatggcagagggcttgcttttctgccggccgcccctgctgtctgctgagtggtagcagctaatagc

SEQ ID NO: 29474 - DNA, 561 bp, Chicken  19866894248353_3
tctggatgtgcctgctgcaaggcagtgctgcagcagaggaaatggtgactgggaggaacgagcccatgagtaaacaagagccagagtttgagtctgtccgtgggatcgatggaggtggctttgatgggggagatagccctgacgccagycaaaacgtagctgtgagttggagctgcctgcaatgatagttgttggaaatgcggcgtgtaccatcgagggaggcacggcagcactgcagtgtttttctttcttcggaaagagaggcaacaagcacgcctctgttccagagaaggaggaaayggggggggggraagagtgtgttttcttgtctgtgcataaagggcagcgtggaaaaagaggaggaaaaatggaatatttatttaaatggcagagggcttgcttttctgccggccgcccctgctgtctgctgagtggtagcagctaatagctggaggcgaaactaatacttggcagcggataagacacagcacaggcccccttgtacgaggggcttgctaaagtgcttgctttatgtcagggctgtaagatgagttcatcttc

SEQ ID NO: 29475 - DNA, 550 bp, Chicken  19866894248353_4
ctgctgcaaggcagtgctgcagcagaggaaatggtgactgggaggaacgagcccatgagtaaacaagagccagagtttgagtctgtccgtgggatcgatggaggtggctttgatgggggagatagccctgacgccagycaaaacgtagctgtgagttggagctgcctgcaatgatagttgttggaaatgcggcgtgtaccatcgagggaggcacggcagcactgcagtgtttttctttcttcggaaagagaggcaacaagcacgcctctgttccagagaaggaggaaagggggggggggraagagtgtgttttcttgtctgtgcataaagggcagcgtggaaaaagaggaggaaaaatggaatatttatttaaatggcagagggcttgcttttctgccggccgcccctgctgtctgctgagtggtagcagctaatagctggaggcgaaactaatacttggcagcggataagacacagcacaggcccccttgtacgaggggcttgctaaagtgcttgctttatgtcagggctgtaagatgagttcatcttc

SEQ ID NO: 29476 - DNA, 599 bp, Chicken  19866894248354_1
  misc_feature (1)..(77): n is any nucleotide
nnnnnnnnnnnnnnnnnnnnnnnnnnnnnnnnnnnnnnnnnnnnnnnnnnnnnnnnnnnnnnnnnnnnnnnnnnnnnttggtcaatgagcagaatgaactgagcactggctccttttccctccagcatctcccctcctgccagcaggttgcagggatgctgccaggagccaccaggtccatcaccaatggaccacagcagggctgctgctccatttcagactgtccccagtgatgggggtgactgcagcagagttggcttttgccatcctcgtgccatccttcttttctttaacctcttygggtattacagaatttgactacatgggaggaaaaaaaaaaaaaagcctttggggaggactgttctgtttttaaacttcttttgtaattgttttttaaaattgctcctgttttgtatattgtacttacacaagaatgcatctcatggactctggagcagttggaccttgaatgagaagcctgaacataaccccaaacttaacttctagtttaaaagtgagagttacaaaccagtaagctgtgtctgatggagataagacagctccaggggcaggaaggagacacatagaagtttaagggg

SEQ ID NO: 29477 - DNA, 600 bp, Chicken  19866894248358_1
gtttcctaatgtttagatggaaaagtccactttaaatgtgcagctattcaagtacgtgcacccaacaacatctctcgggtaaacgatatcacctggaagtatgcttcttacaggatggttattttactgattagtggaaagaaaaactgctcacggagcagaaactgtagctgacataccaggactcctggcatttctcaggcaggtaggagattccatatgaagcaaggcctccgcagcttcaattgtcttatccgtgcagtgtacattgcttccatgaactgatgcttccactgcagracaaaagagtcatgagaccacgttaggcatacaagtcatagaatcatggaaccttttgggttggaagggacctttaaaatcatacagttccaagccctccgctataagcatggacacctccttgtagaccaggttgctcacagccccatgcagcctggccttgaacacctacgggctcaagttcatacgtattactgtacaacagtgctattcaatcttaaacacgaggatcaagaagttgtccrgtggcttcacacctttacaccttactgccaacagaaatgtttagggaagacatga

SEQ ID NO: 29478 - DNA, 600 bp, Chicken  19866894248358_2
ttgtcttatccgtgcagtgtacattgcttccatgaactgatgcttccactgcagracaaaagagtcatgagaccacgttaggcatacaagtcatagaatcatggaaccttttgggttggaagggacctttaaaatcatacagttccaagccctccgctataagcatggacacctccttgtagaccaggttgctcacagccccatgcagcctggccttgaacacctacgggctcaagttcatacgtattactgtacaacagtgctattcaatcttaaacacgaggatcaagaagttgtccrgtggcttcacacctttacaccttactgccaacagaaatgtttagggaagacatgagacaagcagccaacaagaaccaacaccgtcgcttgagagatttctggctcacagccaagctccctctttctattaggagttcaagagcttacagaaacagatttggggggtttctcttctacttcctatttaagcaaaataaaccggattgtaatgaggatggttgtaaaatgacacagttgagagaagcaaacccagctccaaccgtgatcccattaaaacacagacatcacctctcttcaggt

SEQ ID NO: 29479 - DNA, 599 bp, Chicken  19866894248363_1
  misc_feature (1)..(152): n is any nucleotide
nnnnnnnnnnnnnnnnnnnnnnnnnnnnnnnnnnnnnnnnnnnnnnnnnnnnnnnnnnnnnnnnnnnnnnnnnnnnnnnnnnnnnnnnnnnnnnnnnnnnnnnnnnnnnnnnnnnnnnnnnnnnnnnnnnnnnnnnnnnnnnnnnnnnnnnncacatgaagtgcagcgggcgggagccgcagcaccaccagcagggcttcggtctgtgagaagcacggacgtaacaactctgtgcccctgcagctcggtttgctgtcaggctgccattcgctgtgaagttctgtgcttccagatgtagcraactccgggccgcttgtcgatgatatcaacgtgtgtgggttctgcacaggtactctgctgtgccgagtcagctggtgctgtgagtttttatggggcaccaaggaggatgaatgattcctagagggtgctgcctttggtgcgttgctgtctccattcagtaactgctccggggtttttgctttcccttctgtgtcagtgcctgtcacttaatgtagatttaaggactatttcaaagccctgtgtgcatcacgaataactgtacatccgcagaactgtatattgtgttggaggtctgcttg

SEQ ID NO: 29480 - DNA, 600 bp, Chicken  19866894248364_1
tggtgagagtgctgtaggagctaagctgcgtcataccaacttaatggaaaaggccagtatattctggatgggcataatggaaagaatgacaaccgccattcgtcttttggatggccaattggacaatttacgcctgtagtcagtgggaaagaccaaaaccacaaaataataaaaagcagccaaaaaaccaccaccaccaaaaaaatgcccaacccccccagacaaacatacaagcaaataaacaacagcaaaaaacaactgaaaatcaaaaccacagtactgaccaggagagcaagaaascaaacaaacaaacagatgcaaaacaaagctgcagttttcctcagtatcatctttggacttcatctgaattatcttttgttwactcccatctgcactccagaaagcactctgatggtcagcaatattcccgagctattactttgttgtagtgctgtgaaaaggcacccttgagtttgtatgaggtacaatgaaataaatgtggtatttcttgaaaagtaacttttcgaagagtttcttcataattaaaagcacaacaatccacctgctggtgttcataaaatccctttgccatttttgggt

SEQ ID NO: 29481 - DNA, 600 bp, Chicken  19866894248364_2
aagaatgacaaccgccattcgtcttttggatggccaattggacaatttacgcctgtagtcagtgggaaagaccaaaaccacaaaataataaaaagcagccaaaaaaccaccaccaccaaaaaaatgcccaacccccccagacaaacatacaagcaaataaacaacagcaaaaaacaactgaaaatcaaaaccacagtactgaccaggagagcaagaaascaaacaaacaaacagatgcaaaacaaagctgcagttttcctcagtatcatctttggacttcatctgaattatcttttgttwactcccatctgcactccagaaagcactctgatggtcagcaatattcccgagctattactttgttgtagtgctgtgaaaaggcacccttgagtttgtatgaggtacaatgaaataaatgtggtatttcttgaaaagtaacttttcgaagagtttcttcataattaaaagcacaacaatccacctgctggtgttcataaaatccctttgccatttttgggtgtacagatcatagaatcataggatcatggaatcgcttgggttggcagggaactcaaagcacaccaagtttcaacccactgc

SEQ ID NO: 29482 - DNA, 599 bp, Chicken  19866894248365_1
  misc_feature (1)..(115): n is any nucleotide
nnnnnnnnnnnnnnnnnnnnnnnnnnnnnnnnnnnnnnnnnnnnnnnnnnnnnnnnnnnnnnnnnnnnnnnnnnnnnnnnnnnnnnnnnnnnnnnnnnnnnnnnnnnnnnnnnnnactagcaggaaggcacaggaaagatcaacccacatcactgcagacatgagcactcagcgctgggtgcccagcaccactcccagtgcagaatcaacaatgccttctgaccacaggacagcataagagattggaagttttattctgaaggatagattgcaacacaggtcaggcagagaatccatgcrcctctactgggtagaaataaatattggatatattcccccaaggtaaaatgtttagtgcctacctatatactacctaacaccctcttactagggtccaacatgctgcctgcaggaaagaggcagctcccaaaattgcagcagtccaagcctggggtattcacacttcctaacaggagaagcctaatggggcagctctgcagccttggttccctatagagttcagagggaacaacagacagagcasctaatccatgcccctgcctgaatcacgctcaggagagatggcccatctccgctgc

SEQ ID NO: 29483 - DNA, 600 bp, Chicken  19866894248365_2
ggaagttttattctgaaggatagattgcaacacaggtcaggcagagaatccatgcrcctctactgggtagaaataaatattggatatattcccccaaggtaaaatgtttagtgcctacctatatactacctaacaccctcttactagggtccaacatgctgcctgcaggaaagaggcagctcccaaaattgcagcagtccaagcctggggtattcacacttcctaacaggagaagcctaatggggcagctctgcagccttggttccctatagagttcagagggaacaacagacagagcasctaatccatgcccctgcctgaatcacgctcaggagagatggcccatctccgctgccagtagagggagctcagccaggtaggcctgyagatacattttcgtgcgtctgcattcatagccaggggcaaacctgagttacaagagcagaaaatgagagtggcagccagatgacttgtgaatagaagccaacagccccagtacacacatcgtgtaggaaccctccactgcaacacagatactcagaaacagtttgcagagctgttattaaaatatgctgcagaaagcacatgttaagaaatgtg

SEQ ID NO: 29484 - DNA, 600 bp, Chicken  19866894248365_3
tattcccccaaggtaaaatgtttagtgcctacctatatactacctaacaccctcttactagggtccaacatgctgcctgcaggaaagaggcagctcccaaaattgcagcagtccaagcctggggtattcacacttcctaacaggagaagcctaatggggcagctctgcagccttggttccctatagagttcagagggaacaacagacagagcasctaatccatgcccctgcctgaatcacgctcaggagagatggcccatctccgctgccagtagagggagctcagccaggtaggcctgyagatacattttcgtgcgtctgcattcatagccaggggcaaacctgagttacaagagcagaaaatgagagtggcagccagatgacttgtgaatagaagccaacagccccagtacacacatcgtgtaggaaccctccactgcaacacagatactcagaaacagtttgcagagctgttattaaaatatgctgcagaaagcacatgttaagaaatgtggacaattaagtgggaagatagctgccaagttcccgacataatcactacaacagatgggatgtgttttacagtagatggaggagggc

SEQ ID NO: 29485 - DNA, 600 bp, Chicken  19866894248365_4
gggcaaacctgagttacaagagcagaaaatgagagtggcagccagatgacttgtgaatagaagccaacagccccagtacacacatcgtgtaggaaccctccactgcaacacagatactcagaaacagtttgcagagctgttattaaaatatgctgcagaaagcacatgttaagaaatgtggacaattaagtgggaagatagctgccaagttcccgacataatcactacaacagatgggatgtgttttacagtagatggaggagggcatggagatgaagtatggcaccagtgcaaaagtaktctgaatagcaaaggaaagacaatagagaagatttaacagttgggaatgtaaagagagctgtctgcattttaaaggctgagaggaataatgagattggcagctccaggataacacacacagtgcaaggtgctgtgctatctacatttcaagagacaatttcctcttgtatcttctcacagttttggcagaaatgacttcagcctttgccctcagctgggctttgctcttcagtggtccacagagatcccgtctataaacggaagggatcccatctataaaccaaatcacagcttttctgc

SEQ ID NO: 29486 - DNA, 600 bp, Chicken  19866894248366_1
acagtcagtcctcctcgacataggcagttttacctaaattagtcagtggttcatcatcaccttgatgaggaagtcagttccaaaacaaaactttgttgtgagttgcagcaacatgcaggacgagctcacacgttgcttgaaggaagtcttgtctctaaggagcattgtagttccttcgttttctccacggaacacttttcagacataaggcccgaggcccttcctctggtgctggctctgtcgcatgagaatttcctatggaggtctagggagctcccgtggatgctgctatggcaggcrgtaactgacccaatgaccacctccacgtctgtaaccacccaaccaaatcagtgcttgctgtttggccagcctgcagctaatctggggtctcagctacacatctgctcccttgcaatgatagcaaagatgtcagtttgagaccattagagcaattagactctcactcatcaaaaggccaaagcttaaactgacagttatttcacatgaacagttgtgttaaaagtctgccacatgttgctggctctccgcctgcttttggtagttaagctatattaggagggtaaaagacattaaatcctt

SEQ ID NO: 29487 - DNA, 600 bp, Chicken  19866894248369_1
cttgagagtacagtttgggcaacatctctcaaaatcagcaaagaggttaaaattagtacttccaaaatgtactgactgccagtttttcctacagatactgtctgtggttactgatgaatttgtaacttgagaagtcctgtttgaatatttcacggttttatctgttctacccaacatacataattttctgttaaaaagtgtttgctattttacagtttcttgattaatttactgaataatgcttagtcctagaaccatctgcactactaccatttttccagctcactcctgtctgtttcytcccttactgaacacaaggaggaatgatgtaaaaaaaaaaaggtacartcatctcagtccgttagcaaacatttcatctttccaaaattctgatatagaactcatgattcaagtcatgttacagaacgactgtgtgtcaataacttgtatacacataccacagctagagtgcagccctgcagctttgtcattcctactacaggagctgcttccagtgcagagccttcacatacagtaatgcaacatgcttagttgctctctccctttctccccctctcactgttcctttatctctctctc

SEQ ID NO: 29488 - DNA, 600 bp, Chicken  19866894248369_2
aaaattagtacttccaaaatgtactgactgccagtttttcctacagatactgtctgtggttactgatgaatttgtaacttgagaagtcctgtttgaatatttcacggttttatctgttctacccaacatacataattttctgttaaaaagtgtttgctattttacagtttcttgattaatttactgaataatgcttagtcctagaaccatctgcactactaccatttttccagctcactcctgtctgtttcytcccttactgaacacaaggaggaatgatgtaaaaaaaaaaaggtacartcatctcagtccgttagcaaacatttcatctttccaaaattctgatatagaactcatgattcaagtcatgttacagaacgactgtgtgtcaataacttgtatacacataccacagctagagtgcagccctgcagctttgtcattcctactacaggagctgcttccagtgcagagccttcacatacagtaatgcaacatgcttagttgctctctccctttctccccctctcactgttcctttatctctctctctggggatctcttagaaagataaaaataccagctgtttctagcacatgg

SEQ ID NO: 29489 - DNA, 600 bp, Chicken  19866894248377_1
taggatgtcagactttgatccaacagtgcaggctggtcagacataaatacccatacgcacatatctacttgcaacatcaagacctagaacaacagaggaaaccactgagatgtggggaaggtaattgctttgtaatttcaaatacaacaaatacatttgaacacagtcagaatgaagtaaaaaagtcagcactgaccgttttttttccagcttgcaattgccaattgcaaaatttcttgcaaaaccaattgcactggaaaggagttttctattgcccataaaattctccatgaaggagcyrycaagatgcactaagcagggagtcagaagtttcataccagggaaatttttcatttctaacctacagtgagggagtactaccacaaactgcagacaacaggcaaattacaaagttacttaatcattcatgcaatcatcatctttcagaaggaaattcagcagtgtcacaaagggagaaagaagaccagcaattggaaaggttaggtgcyctttcacaggctgagaacaagatgctaaaatattaactgtggtgttttgaaggattcagaactacgggtctcctcctgttgtaaaatgcat

SEQ ID NO: 29490 - DNA, 600 bp, Chicken  19866894248377_2
aggatgtcagactttgatccaacagtgcaggctggtcagacataaatacccatacgcacatatctacttgcaacatcaagacctagaacaacagaggaaaccactgagatgtggggaaggtaattgctttgtaatttcaaatacaacaaatacatttgaacacagtcagaatgaagtaaaaaagtcagcactgaccgttttttttccagcttgcaattgccaattgcaaaatttcttgcaaaaccaattgcactggaaaggagttttctattgcccataaaattctccatgaaggagcyrycaagatgcactaagcagggagtcagaagtttcataccagggaaatttttcatttctaacctacagtgagggagtactaccacaaactgcagacaacaggcaaattacaaagttacttaatcattcatgcaatcatcatctttcagaaggaaattcagcagtgtcacaaagggagaaagaagaccagcaattggaaaggttaggtgcyctttcacaggctgagaacaagatgctaaaatattaactgtggtgttttgaaggattcagaactacgggtctcctcctgttgtaaaatgcatt

SEQ ID NO: 29491 - DNA, 600 bp, Chicken  19866894248377_3
ggatgtcagactttgatccaacagtgcaggctggtcagacataaatacccatacgcacatatctacttgcaacatcaagacctagaacaacagaggaaaccactgagatgtggggaaggtaattgctttgtaatttcaaatacaacaaatacatttgaacacagtcagaatgaagtaaaaaagtcagcactgaccgttttttttccagcttgcaattgccaattgcaaaatttcttgcaaaaccaattgcactggaaaggagttttctattgcccataaaattctccatgaaggagcyrycaagatgcactaagcagggagtcagaagtttcataccagggaaatttttcatttctaacctacagtgagggagtactaccacaaactgcagacaacaggcaaattacaaagttacttaatcattcatgcaatcatcatctttcagaaggaaattcagcagtgtcacaaagggagaaagaagaccagcaattggaaaggttaggtgcyctttcacaggctgagaacaagatgctaaaatattaactgtggtgttttgaaggattcagaactacgggtctcctcctgttgtaaaatgcattt

SEQ ID NO: 29492 - DNA, 600 bp, Chicken  19866894248377_4
gcttgcaattgccaattgcaaaatttcttgcaaaaccaattgcactggaaaggagttttctattgcccataaaattctccatgaaggagcyrycaagatgcactaagcagggagtcagaagtttcataccagggaaatttttcatttctaacctacagtgagggagtactaccacaaactgcagacaacaggcaaattacaaagttacttaatcattcatgcaatcatcatctttcagaaggaaattcagcagtgtcacaaagggagaaagaagaccagcaattggaaaggttaggtgcyctttcacaggctgagaacaagatgctaaaatattaactgtggtgttttgaaggattcagaactacgggtctcctcctgttgtaaaatgcattttgctacaaatggctttgaagctgatcacgtgtggaggagcccaggatatgcacagacactgaatcctgaaagtgggggctgtctcttagcaaacctaagctgactttcagcatagaggtactcagaaacagagcatcaggtaagaaagggccagaggagaaaagtgttggggcatatttttccattcacttggagtactaaaagaag

SEQ ID NO: 29493 - DNA, 599 bp, Chicken  19866894248380_1
  misc_feature (1)..(4): n is any nucleotide
nnnntgtatgtttgatatattgcttgtgcaactgcatgagacagacattttggggaagaacacataattcatgagctcaggctggaaccatgagacacaactgcacacataccaggcacttggagaagccctcttatttaccaagcaacttatacaatgtttatgtgcttccaggaataggtaacaatgctccaacagtataattctgtagatgagtttctacaatcattgtttgaattcacgcaacttaattccgctcactgctgtgggcttctaagtgctcctagctataggtcttastttgaccctcttctgctctgaaggagtttgtgatgctgggaagagccaaatgccacagcagcaacaaatgaactgtgaaggacagccacgctccagcaggaaccagagtaacccaagaatgtgcaagtatggggaaactaggaacttgaaactggatgaaggacattcctcccctctaatgkaatggggaaatgaaataatagagttttaaggaacaatacaatcacgtttcaacttcatgtaatatgatgatgtatgcagttaytgctgagaaaagtgcatctgtagcttccatgctc

SEQ ID NO: 29494 - DNA, 516 bp, Chicken  19866894248380_2
aacaatgctccaacagtataattctgtagatgagtttctacaatcattgtttgaattcacgcaacttaattccgctcactgctgtgggcttctaagtgctcctagctataggtcttastttgaccctcttctgctctgaaggagtttgtgatgctgggaagagccaaatgccacagcagcaacaaatgaactgtgaaggacagccacgctccagcaggaaccagagtaacccaagaatgtgcaagtatggggaaactaggaacttgaaactggatgaaggacattcctcccctctaatgkaatggggaaatgaaataatagagttttaaggaacaatacaatcacgtttcaacttcatgtaatatgatgatgtatgcagttaytgctgagaaaagtgcatctgtagcttccatgctctaacatgaatatgcacgcactgagaagtgcttcttaaatacacatcttgtgagaarcacagaactgtgcatcagttgatgcttgcaattatcagaaata

SEQ ID NO: 29495 - DNA, 433 bp, Chicken  19866894248380_3
gtgggcttctaagtgctcctagctataggtcttastttgaccctcttctgctctgaaggagtttgtgatgctgggaagagccaaatgccacagcagcaacaaatgaactgtgaaggacagccacgctccagcaggaaccagagtaacccaagaatgtgcaagtatggggaaactaggaacttgaaactggatgaaggacattcctcccctctaatgkaatggggaaatgaaataatagagttttaaggaacaatacaatcacgtttcaacttcatgtaatatgatgatgtatgcagttaytgctgagaaaagtgcatctgtagcttccatgctctaacatgaatatgcacgcactgagaagtgcttcttaaatacacatcttgtgagaarcacagaactgtgcatcagttgatgcttgcaattatcagaaata

SEQ ID NO: 29496 - DNA, 343 bp, Chicken  19866894248380_4
cagcagcaacaaatgaactgtgaaggacagccacgctccagcaggaaccagagtaacccaagaatgtgcaagtatggggaaactaggaacttgaaactggatgaaggacattcctcccctctaatgkaatggggaaatgaaataatagagttttaaggaacaatacaatcacgtttcaacttcatgtaatatgatgatgtatgcagttaytgctgagaaaagtgcatctgtagcttccatgctctaacatgaatatgcacgcactgagaagtgcttcttaaatacacatcttgtgagaarcacagaactgtgcatcagttgatgcttgcaattatcagaaata

SEQ ID NO: 29497 - DNA, 600 bp, Chicken  19866894248384_1
actttgcataggccctactgaactttagcataaatcgactgcagaaggaaaaaacaagtacaaatactctgagattttcagtgtttttttttttttaataaatgtgctttgttcacaaaaggtagtgacatgaagacaacagaaatgcaaatacattttttctcttttccttgccagcaccttaagaacaagagatgttcgtcatctcctgcccagtcagaattttcagacatttcataacttagaaacattctctttgcaccaaagctaaatagccaaaaactcccaacgccatcaatwttgttcagggagttgtaagtatttacacaaatccaactttcctccttcacaacaatccactgtcccttacattaaagaaaaaaaaaattaaataataaaaaaagaacacttaaggtatttagaataagcagcaagaaaaccaagctgttgtgaaacttcggtccctaaaccacgaatacagtggtgtcaccaagctgccacgaaggcctaaattttcagtgttaatattttcaactttttaaaggatacgtcctggtctgaacagcttaactgtatgaatcacaaaccaatttacaccga

SEQ ID NO: 29498 - DNA, 600 bp, Chicken  19866894248384_2
cttatgttaaagaataaagcattacagtccagttcacatctgagtgtaagtaggaccagtgcagtatgactttctgtaggaaactgtagaggaaaaaaaagcaaacaggtcaaactgacacttcaagtgcaaaatttcaatagaaaggagaagtttcatttttgcagcaaccactgtaaaaatcactctcatacttcagtttgtctggtaactcctggatgatgaatacagcatggtagattaatacggtgtaaggtgtatttcagcagtcacctatgaaactactattagtattttctrtcatgtcgctgcagtcagtattaaatccatgatgcggcacctacttcaaatcatttgtcataggcacttacatagcaatttaaaagcctaacatttaaattcatgaattctggtcattagggcaatctaagctaaactaatactggttcctctattattaatgctgaaaagaatttctttttttcctgcaaaacacttacaaatttattatacaagttaaaaaacttcataaacataaaatgcttgttccaccttcttacagtgcagatcagttttcagatagctacagagtttttattc

SEQ ID NO: 29499 - DNA, 600 bp, Chicken  19866894248384_3
ataatttactttaaaacatgacagaaaaaaaaccaccctgcccctccccacccaccccaaaaaacccaacatcaaaaaatacaaccccagaacagtttgaaaagaatacaaaacactattgccagggaaatactgttatatgttagtgcttgtacacatataattgcaaaatcatgttccagctttgaggtgaaacaatcttctagacgtaccatactcctctgtttgtgcagggtaacctattcaggaatctcacatctatctgctatttatgcaatgaaattacacagcacgtgtaaytttggattaacctattcaagtgttttggtgttatctcaagagggcagcaatgaaagtaaaatcaaatgtgcattacagtttctccagcccaggcttaaccagagtgaaacaaatcttggaaataagttttgttctgtaattaagtagggacgtgtgtaaccgagtgtcttaacctatctgcacatttaattaaagtgcaaattagttcttcctacgtttacttctcagaagccaaccaactccagtgccttaagctcaatcacattaagagttaaaatattgaaacatttagcaaattaa

SEQ ID NO: 29500 - DNA, 600 bp, Chicken  19866894248385_1
aatgtcttcccagtgaaagaaaagctgtggaggttgaaggtctagctgacatttgctgtgacatcctacaagatgtcttctgtacctcaggtgctgctgttgtcttgggtacctggaggggctggcctggtggtggtccaaacatagctagtgcagactgtaggtatgccactaccgtgctctgctttctctaacaagtcttgcactgtcggctcacatccagacaacttctgcgtcacatttcatgtgcttttatttctgagttacagagtaagctggaagagctggtggtcagtcctwagtgccctctcaggattgctggtggtgacaggtgccactggtgactaccttgaggcgacatgtatggtatatgttgccttgtctctgtgatctgacctaatcaagatctctttcagtatgaagctggtcaggccgtaaacatattgcccagagagtctttgatgtctccatccacagaggtctttaagactcaagtggagcaggcttcgtgccagcctctccgatgaggcctgctctcagaccacgcctggattagatgtcttcagggtcctttctgacctcaatcagtctgtggtttta

SEQ ID NO: 29501 - DNA, 600 bp, Chicken  19866894248386_1
tgatctccaggcacagagccccaggtttgagatctgtgctaggaaaacagattctcgaagttacgttgggaagtggacaaaagaacttctagggctttccttcacagtgctgatgtgctcccctgtttttcagagtattccagtcccacctgcaagatttcagcgtcctttcagtttgtcccaggcagatttaaattctcctccatgatggtggttctcatccaaattaaaaaagaatatcaggagaaaaatgctgtagtaaatatcaaaggcacagtgttaaaatccaagaatactgtrtgtgtttgtggtaagagctgtgttgtttcatgccaactatccctattcagaatggagaaatgggtgggaaagactttgattcaaatcagaccatatgttttcttctctaacagagtttttcctatctcagtgcattctagtagtattgtaaggtgtgtttctataccaaatgttcctattggtagagttcaaatactgttatgtcttaaaaaatgtctcagtaaaggaagtttgttcaggtctgtgcaagagcataaatcagaagtgactgctgtaatctgtgaagatattcgaatgctc

SEQ ID NO: 29502 - DNA, 493 bp, Chicken  19866894248391_1
ttttaatgcatcccaggatatcactggccttcttggtcaccagggcacactgctggctcatggccaagaatgataacttttcttttcctaaaatgtcgaattcattccacatgtctttcttcttcaggaaatcttcgaccaagatgacctccttctaaaaaagaaaaaaaaaaattacccacagatatttccccaagaaatatctcagaggacactggatttgctgatttctaacttatttatattactattctggaacaaatatgtcgcttccagcaaatctcccccatgcagtctttytagtgggtttccatccttgtactcacaggatggatagacatatgcctgggagctcaaaacctgtacccttctgtctctgtggcaccaggatgacatcattgagagacaccttgtctttcctgttttttctctctttactttttttctatctacaaggattgctctgaaagtaattcctcctattttattatgt

SEQ ID NO: 29503 - DNA, 600 bp, Chicken  19866894248398_1
actgttattcaaaagtctggcctaatagatcatgagatgttgaacaatttagagcactgcgcactgtattgttgtgccattaaggctttggaacgaagcttcattggggacagaggagaacaaaggacccatctatttcttcattgctattattgtttctgccctgaaagacacaaagcctgggctacctaacagagctactgttctttagttgttcagtttctctgttgaaagcaggaactgtcagacatggaaatgatatcagaatattcaagtttaacaatttgcttaaaattcacytcattagcacaaaatttgccaactatgagacctaagagaaatttccacacacaacctccatgcatgacaaatacactgtcattcaattctgatgcagtgaagcaggtttaatacgttcaaacactacttttccttgagctattgagcaactatttcccaacctcaattctaaacaaagtcttattatatttagcagcccagataaaagaaatctttacgcttacgtataagggttgacgatgcatctgaagtgttatacagccacaggtacaataaaagcagttaagtgcaaccttttgt

SEQ ID NO: 29504 - DNA, 600 bp, Chicken  19866894248401_1
agtgccagacagccccgtgacaccgggcaggaggcagaatctgcatcagagccctcatctcccggagggtccatccccagggcagctgagcagacatcctgcagagcgctgcgatcctctgtcctctgcatgcctgggagtgaaggaacagagcttcacaaggctcattccactcagcagaagcagtgggatgaatccacccagagcctgagaagacaacagggtctgcccagctgagggcatcctggatcactcaggctggaggccacgagtgggatgggcttctgctctccatcaccwccgtctctgtgctttataaaccccccagggttcccttcctgcagaacctcccctggtctgtcgtatatgctctcccaggtgaaaatttccacccaaatcgttttcttgcygggccttctgccacttctctatctcccactaagtggccgatgtccctttggggcagggatgaagaccccgcttccctctgctttatagcagtatgatttgcagtaggggaaaacagaggwaagagcccttacctgctggtgccaggatgagaggaccttacaaaaggacctgtcacaggagcccacaaca

SEQ ID NO: 29505 - DNA, 600 bp, Chicken  19866894248401_2
gcgatcctctgtcctctgcatgcctgggagtgaaggaacagagcttcacaaggctcattccactcagcagaagcagtgggatgaatccacccagagcctgagaagacaacagggtctgcccagctgagggcatcctggatcactcaggctggaggccacgagtgggatgggcttctgctctccatcaccwccgtctctgtgctttataaaccccccagggttcccttcctgcagaacctcccctggtctgtcgtatatgctctcccaggtgaaaatttccacccaaatcgttttcttgcygggccttctgccacttctctatctcccactaagtggccgatgtccctttggggcagggatgaagaccccgcttccctctgctttatagcagtatgatttgcagtaggggaaaacagaggwaagagcccttacctgctggtgccaggatgagaggaccttacaaaaggacctgtcacaggagcccacaacactgacacaatggctgtgcaaggttttgcatatagagcwgggctacattgagatgtcattaggctcagtgggagagctggccgaagagaaggcactttgtggggagcaatt

SEQ ID NO: 29506 - DNA, 600 bp, Chicken  19866894248401_3
cagctgagggcatcctggatcactcaggctggaggccacgagtgggatgggcttctgctctccatcaccwccgtctctgtgctttataaaccccccagggttcccttcctgcagaacctcccctggtctgtcgtatatgctctcccaggtgaaaatttccacccaaatcgttttcttgcygggccttctgccacttctctatctcccactaagtggccgatgtccctttggggcagggatgaagaccccgcttccctctgctttatagcagtatgatttgcagtaggggaaaacagaggwaagagcccttacctgctggtgccaggatgagaggaccttacaaaaggacctgtcacaggagcccacaacactgacacaatggctgtgcaaggttttgcatatagagcwgggctacattgagatgtcattaggctcagtgggagagctggccgaagagaaggcactttgtggggagcaattagctaacaagagcttgcagctacaactggatgagtacggtatgctgagcaagcacagccattgctttcacagggatcctgcagctataatgtatcctgaacttgcaaggactgccatcac

SEQ ID NO: 29507 - DNA, 600 bp, Chicken  19866894248401_4
ctgcagaacctcccctggtctgtcgtatatgctctcccaggtgaaaatttccacccaaatcgttttcttgcygggccttctgccacttctctatctcccactaagtggccgatgtccctttggggcagggatgaagaccccgcttccctctgctttatagcagtatgatttgcagtaggggaaaacagaggwaagagcccttacctgctggtgccaggatgagaggaccttacaaaaggacctgtcacaggagcccacaacactgacacaatggctgtgcaaggttttgcatatagagcwgggctacattgagatgtcattaggctcagtgggagagctggccgaagagaaggcactttgtggggagcaattagctaacaagagcttgcagctacaactggatgagtacggtatgctgagcaagcacagccattgctttcacagggatcctgcagctataatgtatcctgaacttgcaaggactgccatcacctcagcaccaatctgaactgttattgatggaagtagatggtttgtcattttgctttccagtgatacgaaaacatttgcactcatccatggggcagtacgaactcttca

SEQ ID NO: 29508 - DNA, 600 bp, Chicken  19866894248401_5
agagcttgcagctacaactggatgagtacggtatgctgagcaagcacagccattgctttcacagggatcctgcagctataatgtatcctgaacttgcaaggactgccatcacctcagcaccaatctgaactgttattgatggaagtagatggtttgtcattttgctttccagtgatacgaaaacatttgcactcatccatggggcagtacgaactcttcatctccaggggctgctgcacagctgtgagctcccacctgctcaggctgcttctcacaccgtgagctccatcagggtagaasatggagcagataaacaagaaccagttggcctctgtttcccagcccttgcccacagcctgcccttccttctctccctgcagcacaccgtggccccaccaggccctgccagcacccaccccactcctgccatagccccaccactttcccctccccggggttcacacagcccttttgctgtgctcacactgctcccattggctcccagccccaactgctgggttttcctgggctcattagcagggctctcctgggattaatgcttcatgttatttcttgactactgggaaaatcgcatcctca

SEQ ID NO: 29509 - DNA, 600 bp, Chicken  19866894248411_1
tggccttccccaggaaccccgtgcagaaaggcagcattttggctgcatcctttgcactgtaagcagcccctcccccaaagagcccaccaatccctccccagtgctgcgtatcactgagctgctctgtcacccatccacaaaacggaaaagagttggttttcagtggagtggcagctaatgacagggcagtgagaaccgagaggccttattaaggggataaaggttatcaggattgcaacattgagcctgcctgagcaaatctcgcctggtgcctgcaggtggatgagtcggggctcctcrcaagacacacgggtgcacggatttgggtgcacggatttgcccagagaagcacagtctgcatatggacagagggatggaaagatgattgggggagggatgcacagccccagactgcgaataggggtgaaaaggtgcaaatgggtggctgtgtccgtgggatgagagaggagcagagatagcaggagagataatcgggtggataatccccctccccccccagcgtccttcctgccaggattactcctgctgagcacagggcgacggacagacacggtgtgtttgcacgggggttgtaggagt

SEQ ID NO: 29510 - DNA, 600 bp, Chicken  19866894248412_1
aataagtaaaaaataaaaataaaaataaaaagtgaaaaagtaaaggaattacagaaactgggtcatttttaagctacttatctcagaacctagaaagtcatcttatttcttgtgaaaaaacaaaaatggttgagtagaagaaaaactggttgtcctcaattatcccatatgacttgtatggaggcgaatgcataaatattcaaaaactgcagctgttgtactaaaaaatcgaattgctccaaaattccaagtaaaggttaccgttcacattatcttgcaccatgtatagaatctcacaayacatttattagctgtgcaaatctctcacataaatgttcatgaagtctaatgctaattattttaagttatcatgtaaagatatcagaacataacatagtgaagttaaaccacttgaacccattggcttttgaggacaatggaggaggtttttggaatatcaaaaagtttgtgtacaagttaattaaagtagctttgcaactgttgagttaaaagtatgagtaacattatttcacagataaggtattcaaacattggaatgggctgcccagggaagtgatgcagtcctcatccctagaggta

SEQ ID NO: 29511 - DNA, 503 bp, Chicken  19866894248412_2
gtgtggatgtgacaccaaggcacatagcttggggatgggactcactaggcctggttgatggttggacttgatgatcttgaaggtcttttccaatttagatgattcaatgattttagaacaaaatctttatattagagtgatatttccaatatgggtttcagatttcctgttttccttgcttgaacaagagatactagaagtacgctagtacagaaaaagaaaataacatggaattttttttactaatagcctcaaagttttgtggtgccagtattattaataattctggaagggaaacckgaaagtctgcagctatgatttctcaagcatttaggaaattaacaattttgaatatgaaaatgaagagacagccatacttgccattatttactgtcgaagtgcattccctcttcctaaaacagtcttgcaatgcaagcccctgcttgtttgtctcacagtttctgaaagctcatctagttctttgggtactttactctagaaat

SEQ ID NO: 29512 - DNA, 600 bp, Chicken  19866894248414_1
ttattactggtttgttctggattggttgggctttgtttcgtttttcagaggaaaccactggatgtattaagaggagaatcagaatctgctcagaggtttgatcaggagaggaataaagggccgtgtgttgacgtgtagggcttgttttgtacagcgagcactttcaggaactcctggcaaaccatctcactgctcaggctagtgaaccagtataggtcaggaactcaggaaaatctattaaataggtggttatatccattaagatcagtaatcagagaggccatcagcatagaggcatgytaacttccatttcttcaagcctcagcaccagcttcactcttctacaagtctgaatgcttcagcagtgtgttgactgaagtaccaggagcatttctactgagcagctcattgcagcccttcttcacggtgctgggcaggagggctgtgggctcacagagcacagtacttgcacacattcaggttgcacagatcagaacgctgttccccatcagcartggtgmtgctgaaaggtgttccaggggatacagcactgccctgaacagcaggagtccttcaaagcctcccctgggtgatgaagct

SEQ ID NO: 29513 - DNA, 600 bp, Chicken  19866894248414_2
gtcaggaactcaggaaaatctattaaataggtggttatatccattaagatcagtaatcagagaggccatcagcatagaggcatgytaacttccatttcttcaagcctcagcaccagcttcactcttctacaagtctgaatgcttcagcagtgtgttgactgaagtaccaggagcatttctactgagcagctcattgcagcccttcttcacggtgctgggcaggagggctgtgggctcacagagcacagtacttgcacacattcaggttgcacagatcagaacgctgttccccatcagcartggtgmtgctgaaaggtgttccaggggatacagcactgccctgaacagcaggagtccttcaaagcctcccctgggtgatgaagcttacagatgatatgatttagtgggatgtcaagagaaggaaggttagatcaagtggcagctttcacagatcacacctttcagtgctgttcagcatttctcgtggctgcttctgctgcctgcagacaccagccagctctccaytgtcccagctcactgcaacactccacgtggtgttttgaagatcctttcttggtcagagaggggctttctgtgttt

SEQ ID NO: 29514 - DNA, 600 bp, Chicken  19866894248414_3
aactcaggaaaatctattaaataggtggttatatccattaagatcagtaatcagagaggccatcagcatagaggcatgytaacttccatttcttcaagcctcagcaccagcttcactcttctacaagtctgaatgcttcagcagtgtgttgactgaagtaccaggagcatttctactgagcagctcattgcagcccttcttcacggtgctgggcaggagggctgtgggctcacagagcacagtacttgcacacattcaggttgcacagatcagaacgctgttccccatcagcartggtgmtgctgaaaggtgttccaggggatacagcactgccctgaacagcaggagtccttcaaagcctcccctgggtgatgaagcttacagatgatatgatttagtgggatgtcaagagaaggaaggttagatcaagtggcagctttcacagatcacacctttcagtgctgttcagcatttctcgtggctgcttctgctgcctgcagacaccagccagctctccaytgtcccagctcactgcaacactccacgtggtgttttgaagatcctttcttggtcagagaggggctttctgtgtttgtttgt

SEQ ID NO: 29515 - DNA, 552 bp, Chicken  19866894248414_4
ggctgtgggctcacagagcacagtacttgcacacattcaggttgcacagatcagaacgctgttccccatcagcartggtgmtgctgaaaggtgttccaggggatacagcactgccctgaacagcaggagtccttcaaagcctcccctgggtgatgaagcttacagatgatatgatttagtgggatgtcaagagaaggaaggttagatcaagtggcagctttcacagatcacacctttcagtgctgttcagcatttctcgtggctgcttctgctgcctgcagacaccagccagctctccaytgtcccagctcactgcaacactccacgtggtgttttgaagatcctttcttggtcagagaggggctttctgtgtttgtttgttttcttttcccacctttgagaaatcccatctacgcttgtattacatactctcttgttcttcaggttttcatcaagtcaaacattttcgcttttgttctttcagctttgccagacatggagcagtttgcagaagtcacgcaggtctagcaatctcagaactcctatagggca

SEQ ID NO: 29516 - DNA, 600 bp, Chicken  19866894248415_1
ggggggaggaagtggggtagggggtgggaggtaaaagtactacaagatggtgttttcagaggaaagaaaatagccagacaatgtttacctgctgctagaatgataggagctgcagattgcgcaaatatgtaccacttttcaacctaagaaattgcttccctgcaaacctctgcttatgtgggtgaattttgcagatgatgtttaaagtgtcgacattctgggactggaagtgtgtacgtagagtatgagctctgtgaaaacggagagtccagccttgcatccctccttgcggactgcttrcatagtacctgcaggaatggtccctcagcttgcagattcatgttctgagctgtctattcattagcaaacacagaatttacctggcaataaaaggtatctttgtatcatgtgttgttacaataatgtttatttaaatattatctgattccctcagcacttttattatttaccaatagaaaaaatgacaccattacttttctctgaatttttaaaaatgactataatgcaattaaattactgaattcatttatatttaattgtattttggttttaatgtgctatcggaggacatttctttcc

SEQ ID NO: 29517 - DNA, 600 bp, Chicken  19866894248415_2
aaaaaatgacaccattacttttctctgaatttttaaaaatgactataatgcaattaaattactgaattcatttatatttaattgtattttggttttaatgtgctatcggaggacatttctttccacgactgttagttttctatgcaacataagaaaatctaaagctatattaaggaaatgtattacatgggcaagacaaagtctcattagtgttatttatggcatgctgaaacctcattagaagaaggtaggctggattcaaaaatgcattactgagaatggtttttttctggggggggkgggggtgttaggagagaaattgcttttattgtgtttctttatcacatacagagtggttagtggacatgttggtttcttaaagcgtgaaataaattaagatagaagaaaacgagtaattaatctaagtggtaagtataacctcattacagattgagaataacctgcacatggtcacgaggagtttctgtttactgatcaccttagtttcaactaaccattaatttttaacttcttgcactggagttaaaaagtggtatttttcagcatggtagtttgcatcttaagcagtaataatgtgct

SEQ ID NO: 29518 - DNA, 600 bp, Chicken  19866894248417_1
tggcccctctgcattccaggaactatggaatactcactagatctgttgactttagtcttcttaacatggtcaaacactgaatgctatgaagacaatttaagcttaaataagtgataaatgtcttttgttgaagaaaacaattttacttattaattttctattgtagaactgctgcattataagttattctcacagataaatagtatagatattttactactctgatctgcatcaattacatccacatctgggaaaattaattagtttaagaatatgttaggctaaaatattatgttgcayatagtgttaatgaccatctgaatgcaattctattacttgcttttttttccttgccttctctttttaaaattcagtattttattcctgtaatgcagtatcttggcaccagtgtgctacaaatgaaaaggtgtgtatatttcaatattagcaatgatataaagccttttagaagtctgcaccccttaccccaattacagccagagtcttcatggcttccaaaaatgcaagaatctgtagatggtgtgaaaccctcttcacccatgagctccttaccagcccttggtaacctgactgctgagg

SEQ ID NO: 29519 - DNA, 600 bp, Chicken  19866894248422_1
tacatcgtagtatgctgcagtatatcgtgcagccctcatcatttctcagaaataacatacgtaaacatagctggaacagtttagcgaattaatacatacattttcgtttgggaaaaaagatcattttacttcagtcagcagaaggtatttgtaaccataacatgcttccctttttggggaaggagcgcagaatttttgagggaacagagacagaaatgaactttaaaaggggaaaatatgttaaaagagacagaaacttacaggaactaagaatgagtttgatatgatgaatttttcaaratcccccttttaaagtaattttatttctgggcctcctcatttgtgttccaccctgttaaatattttttttgagatagtctggtaattgtaagtattacatttgtgctcatctcatgcgttttcactaagttttatttctaaagttacgtcgtaaacttgggaaatactgtacaagcagcatacaccattttggtatcagacgttatcacgtcggcatttcatgcttaccctccaacagcataagcaccctttatcatctatggaattctgacatttatggtaaaatatttgtactcagta

SEQ ID NO: 29520 - DNA, 599 bp, Chicken  19866894248427_1
  misc_feature (1)..(110): n is any nucleotide
nnnnnnnnnnnnnnnnnnnnnnnnnnnnnnnnnnnnnnnnnnnnnnnnnnnnnnnnnnnnnnnnnnnnnnnnnnnnnnnnnnnnnnnnnnnnnnnnnnnnnnnnnnnnnnggatggcccagagggaaggaacagctccaagtgctgtgagcagcagttctgaggctgctgtactgctgagagcagttgtgttggaacacattctgctcacagctgtggggatctgcaccccttcaggccccacgttgggcaccacgaaggactgcggtgctgtcacccggcagcagctcagcaccacacwrctttcattctcactgaccccctcccagtgggttcccgaagagactcagaataaaatgccacaacttgtgggtcaagataaaatctatgtgctaagtgaaaacaggaagagagaaataacagtaatgcttatagtatatgtctacatgtgtgtatttatgtgtagagagttataaagaaatgttgcacatagcatttgctcaccaccccccaagtgatgctaaaagcagaaaggatggagtggagcatgtcatcgttctgtaattttgctgttggtattccacagcatatcagcatgca

SEQ ID NO: 29521 - DNA, 599 bp, Chicken  19866894248427_2
  misc_feature (1)..(109): n is any nucleotide
nnnnnnnnnnnnnnnnnnnnnnnnnnnnnnnnnnnnnnnnnnnnnnnnnnnnnnnnnnnnnnnnnnnnnnnnnnnnnnnnnnnnnnnnnnnnnnnnnnnnnnnnnnnnnggatggcccagagggaaggaacagctccaagtgctgtgagcagcagttctgaggctgctgtactgctgagagcagttgtgttggaacacattctgctcacagctgtggggatctgcaccccttcaggccccacgttgggcaccacgaaggactgcggtgctgtcacccggcagcagctcagcaccacacwrctttcattctcactgaccccctcccagtgggttcccgaagagactcagaataaaatgccacaacttgtgggtcaagataaaatctatgtgctaagtgaaaacaggaagagagaaataacagtaatgcttatagtatatgtctacatgtgtgtatttatgtgtagagagttataaagaaatgttgcacatagcatttgctcaccaccccccaagtgatgctaaaagcagaaaggatggagtggagcatgtcatcgttctgtaattttgctgttggtattccacagcatatcagcatgcac

SEQ ID NO: 29522 - DNA, 600 bp, Chicken  19866894248427_3
ggttcccgaagagactcagaataaaatgccacaacttgtgggtcaagataaaatctatgtgctaagtgaaaacaggaagagagaaataacagtaatgcttatagtatatgtctacatgtgtgtatttatgtgtagagagttataaagaaatgttgcacatagcatttgctcaccaccccccaagtgatgctaaaagcagaaaggatggagtggagcatgtcatcgttctgtaattttgctgttggtattccacagcatatcagcatgcacagcacgggcaattaaaacgttaatactccwggtccgtggattgacaaccttccagatgcctgcttctcaaaagggaagaagaactgcatatcccagaggacctcacggtcagagaaggaagatacggcacagaagtcacgggatcgggctctgtcagttctcgctcgctctggtagccacgcagagggctgggtgtgcttccaagccttgcaccttcattcaaggaggacttttggtttcagaaaccttctctctcttatttatttgatttattaccctcaattacaattagatggtattatattctgttatcttgcattccgatatcac

SEQ ID NO: 29523 - DNA, 600 bp, Chicken  19866894248431_1
agagagagaaggtttctgaaaccaaaagtcctccttgaatgaaggcgcatggcttggaagcacacccagccctctgcgtggctaccagagcgagcgagaactgacagagcccgatcccgtgacttctgtgccgtatcttccttctctgaccgtgaggtcctctgggatatgcagttcttcttcccttttgagaagcaggcatctggaaggttgtcaatccacggaccaggagtattaacgttttaattgcccgtgctgtgcatgctgatatgctgtggaataccaacagcaaaattacaraacgatgacatgctccactccatcctttctgcttttagtatcacttgggaggcagtgagcaactgctatgtgcaacatttctttttaactctctacacataaatacacacatgtagacatatactataagcattactgttctttctctcttcctgttttctcttagcacatagattttatctttacccacaagttgtggcattttattctgagtctcttcgggatcccactgggaggggtcagtgagaataaaagctgtgtggtgctgagctgctgccgggtgacagcatcgcagtcctt

SEQ ID NO: 29524 - DNA, 600 bp, Chicken  19866894248434_1
acagctgtggggatctgcacccacggtattaaagggtgcggaaggatttgagggaaatgaaaggatactgtgcttagagatgagcatttagggatttgatgtgattgagaagcatatgggggctctggcagtgacttgtgggggttagatttggtgagatctgggaatcactgaggggggaaacagagcatcagggagcccacaacagggaatttgggtctctcccacacagtgcaccccaaaaaggagacacctgggagggaggccttaatggggtcttccagcacccacgttagcatyggtatctgggagctgtggagtggtgggtgcccccatgggatgggatctcctggtcggcacaggtcagtccctcactgtcaccaggggtcacatggagacagcggagaaagactgtggggctcctcaggatggcagtgaggagggacagctctgttgtaagtgtgaggtgaatgtcaaagatgatgcatttggggatctgggagggatgttgatttggggtccaattggtccaaaactgggagatcctatgtgtggctttttggggtcccactacatggtttggggttacccatactgatg

SEQ ID NO: 29525 - DNA, 600 bp, Chicken  19866894248435_1
gcaagaactccacacctactattcttcctttgggtggagggacggccaggctggtagtgggagggagtcagagttcatggggaaggaagaagtcacagcatggggcaagacagccaaactcaagcgaggggcagaatttatctgctggtgacagtaaaaggttggtagagaaaattcagggtaaaactagtgaagtaaaaactcccgtcccaccaccctccctccacaataatctgccatcacaggaaaatctttctaatctatcagaaaagaagaaaaacatttggcagtaaatgcagsaagtatagaacattaaaaatacaaaaggttagacctactacggtgcaagagtctgtctccaactcattcacagtgagaaatgctgctaggtgtgacttcttctgttaccatgggaatagaaacaccagatttagtagcacagtaaccagtcagattgggctaacctgtgtgtatttcacaagaagatgttttctcagcttcctgatcccatttgtcataaacattaatatgtttatctaaaaatatgtaacaaaaacaaaaaagatcaaacacttaaaattatttcacatcaggatttga

SEQ ID NO: 29526 - DNA, 599 bp, Chicken  19866894248444_1
  misc_feature (1)..(18): n is any nucleotide
nnnnnnnnnnnnnnnnnnatgtctgcatatgagctagtcagtataggcactcttaacagtcaaaggaaattgcacagtcctctgggcttctcttctgatctgctttcacctaccagttggtaaaatgggaccctgcgtttaatagaatcatagaatcataaaattgcttggattggaaggatccttaaagcccagctccagctccctactataggccatgccacacaccagatcaggctgcccagggccccatccaaccttaaccctatttaaccagatgtttcacacaagaaaagagtrgtaggaaagaaaagaggagtcaccaagactgtggagtaaaatcacagcaagagtacattggcttcagctggaattgaattagctttcttcacagtaggctctatggtgctgcactttgaatttatgaccaaacctgtgtaggtgagacgcttgatgttttggttatctctgagcagtgctggcacagcatcaaggctttctctgtttctcaggcagccctgcagcaagtgggatgggggtgggcaagaggctggggaggacacagctgggcatggtgaccccagctgagcaaagggatg

SEQ ID NO: 29527 - DNA, 600 bp, Chicken  19866894248446_1
agatacacattcatgtacagcgatgcctctgtcacagtgaaaagcatttccttttgctttcccgttagcactgctgcctgttgagatgataacggattagacaaacgttactacgcctgtacagctgtaggccctgtcagtgtttaaacagttgaagaaggcggttattgtgactgttgtgaaatggcagctccgggcaccagaattcccacagagtgctggaaacaaatcctcaccaaactgcatctggaaaaggctctgcagctgaagcagaatcaaagctttttctcttgcacttcrtttaatgaatttcatctccagatttggcacagttgctctctggaggacgattgcattttttaggtcatttcccagatgaaataacttattacttctccataaacttaccttaggtgattcaaagtttgatatgtgaaacccagcaaattagaagtactcctctgtaagagacacaaagtccagctgctgaagtgcagtgtatctcagcccgccagcatctctgcttcacgccacctggatgctgaacctgcatgaaacacttcagaggagctaattgtgttggggtgagaagttgcaagc

SEQ ID NO: 29528 - DNA, 600 bp, Chicken  19866894248449_1
ttctggcttttaaactctggggagaaaaaaagaaaaaaaagatttattttttaggttgtattcctcatactcagactttagggtgatgcttgtaagggtaacaacatctcagtaggaaaaaggacccaagaagttcaaagagctggaggacataaaacataatttctaattcccattttgaacagagcctagtaagtgaagggagttgttggagacaagggcataaagccaatgagatgcagaagtttaagaacaaatatagaaaagaagtagcatgccagaaagatcccagagagtatmatgagttactataaacctatatgaataatgtctataacaagacaagaatcctcttctgtgtaataagaagaatcacaaattatttgacactgtattaacaaccagaaccccaatgttttgtcaagattttgatccctcccagaaacaggtcagaaggcagcaggaactctttcaagtttcagaccctccttccagacagggtcttcctcctttgtcgcagaaatgaaatcagcatgagcaaaaaagacagtgctaactcttgtattccaaagggattacggtattttagattataaggga

SEQ ID NO: 29529 - DNA, 600 bp, Chicken  19866894248458_1
ccagctctcagccagtcctcacagggcaggtgctccagctctctgatgatcttcatggttctcttctggacctgctccaacaggtcaatgtccttcttgtgttggtggtcctagaactggacacatgactaatgtgtccagtatgatgcaatacaatcagtatgactgttcaaagagatgagactaacagaaacttgaactgtctggaaataaggaggctgaaaaaatgcccagaaaaactatataatttaaaaaaaataatttgattgctcagaaatttaatttgacaaaagttagaawgaaggcttgttttctattttatcaacctgaaccatatttctttagttccattttgatttctggcgttaaatccaaaataaaccatgagagacaataaagatcaagaagctgggcccctctgttgatggtgagccctgtaacaatgctgatagaaactgagggctgtagatttctttggcttttcagtatgaatgagtgagtaaatagatgctgtactagagttycaagttttgaaaatttgcaggacattttaatttaagaagtttgagaactttctcagaattcaaacctacattttga

SEQ ID NO: 29530 - DNA, 600 bp, Chicken  19866894248458_2
aaatgcccagaaaaactatataatttaaaaaaaataatttgattgctcagaaatttaatttgacaaaagttagaawgaaggcttgttttctattttatcaacctgaaccatatttctttagttccattttgatttctggcgttaaatccaaaataaaccatgagagacaataaagatcaagaagctgggcccctctgttgatggtgagccctgtaacaatgctgatagaaactgagggctgtagatttctttggcttttcagtatgaatgagtgagtaaatagatgctgtactagagttycaagttttgaaaatttgcaggacattttaatttaagaagtttgagaactttctcagaattcaaacctacattttgaactactgacacatttcccatggagttccccccattctaacttcattggtctagatgttctctagaaatcactggattggtcttgaacatgatagtctcagagatttactgatttatttattacaaaagtattttctcagaaagtggtttcatttactctactgattgagtatgaaatacttgcctgggtgctcttctcctatatggaaaggaaagacttcagaa

SEQ ID NO: 29531 - DNA, 444 bp, Chicken  19866894248459_1
catatttttccccatggaagagcagctcgttaaaacattgaggagtaatgattgcttgtgattctctcctctccaagttctgcataatggagtactacacactttcaatataacaataaaatatccccatctacatttattgcgaaaatgacaaattgtgttttccagttttgtctaagtgagctctgggtgtattgccttggaaaattagtatttgacaacctggtgtgaggtggatactatcatagtacattaataatggccgatgctgtttgatgggagtgatcttggttcgccatrttctgggctcataaaaataatctcagcactgataatatttatgtgagcactaagaaccctgacagaacgctgtaactaaattgattttattaataatacaatagatcattaatgacaatcgtgcttgaaaggaacatagaaata

SEQ ID NO: 29532 - DNA, 600 bp, Chicken  19866894248462_1
gggtaataattgtgtgcaatacacctaggcacttcccaatgtatttttttttttaagaattcactgaaaaataaatatgaaaataattcataaatatttattatgttaaagggagagaaagctacttctcaaaatatgctaacaatttgcagtatcatgcaactgcagcagcaggcattgctaaatttccctcaaaaagtttaaattatttatataatacaacaaattaaactgaagatttctcccatgtcagcagttctcttgttgcacttttggcaaatgcaatttcatcttgaaatrcattttattttacccacattttattatcctgacaaagtagctagtgagaaaagtacaccatattaaggtaaaacctgagagcaacaccatttttgcttcaaaaagataaaagtagagacaacaaaacaatggtgtctcataaygtctcatatatttcataattgaaatataacttactacaatgaaggaaaaaatattcagatgattatctactactttatatgtttttcaactattactcagagaaagttctaggccgtgagatatcattcaaatgyaactcaaattgtaaaaaaatta

SEQ ID NO: 29533 - DNA, 600 bp, Chicken  19866894248462_2
aatttgcagtatcatgcaactgcagcagcaggcattgctaaatttccctcaaaaagtttaaattatttatataatacaacaaattaaactgaagatttctcccatgtcagcagttctcttgttgcacttttggcaaatgcaatttcatcttgaaatrcattttattttacccacattttattatcctgacaaagtagctagtgagaaaagtacaccatattaaggtaaaacctgagagcaacaccatttttgcttcaaaaagataaaagtagagacaacaaaacaatggtgtctcataaygtctcatatatttcataattgaaatataacttactacaatgaaggaaaaaatattcagatgattatctactactttatatgtttttcaactattactcagagaaagttctaggccgtgagatatcattcaaatgyaactcaaattgtaaaaaaattaaaatgagttgttacaaaaatggaattgcattcatgcaagagaactggtgcactcaaacacttgaaataaaatggaattacagtatttgaaagagtatccaataaaacaatgaaaggatacacagttcaaattatgcaggaaag

SEQ ID NO: 29534 - DNA, 600 bp, Chicken  19866894248462_3
aatgcaatttcatcttgaaatrcattttattttacccacattttattatcctgacaaagtagctagtgagaaaagtacaccatattaaggtaaaacctgagagcaacaccatttttgcttcaaaaagataaaagtagagacaacaaaacaatggtgtctcataaygtctcatatatttcataattgaaatataacttactacaatgaaggaaaaaatattcagatgattatctactactttatatgtttttcaactattactcagagaaagttctaggccgtgagatatcattcaaatgyaactcaaattgtaaaaaaattaaaatgagttgttacaaaaatggaattgcattcatgcaagagaactggtgcactcaaacacttgaaataaaatggaattacagtatttgaaagagtatccaataaaacaatgaaaggatacacagttcaaattatgcaggaaagagtgtaagaggactcccatcttttacagattgcatggtagaaggaataaatgttatgatttttttccccaaacatcacataagattgataaaataataccatcatatctgattttacattgataagcattcatgt

SEQ ID NO: 29535 - DNA, 600 bp, Chicken  19866894248464_1
ggaacgatctggggagcccttcaggggtgtgatggaacagaagatttctgtatttcgtgtatttagggcagagcaggctggtggaggatggggttttcgtactgtttcctaagtgactgtgattatgtttcatttgtgttggaaacacacgggtatatttccgacttagccgtgcgtttctgttggtttgtgtcagaaccatcagtcggttcatctgacctttccattactgaatgcaaaatgatctccaaggatgaacgttgcaaactattccaaagcgatttccttccattaaaagcygcttatagaatatcactgctgtgctaaaattgaaggctcgtgaacgtgcagatcagagcacaggacgtctcatgtgcccgctgccccatccgtccccccgccgcacagcgcctcctgctgcccccgtcctgctgggggggsggaaggggcagtgacggccctgcgctgggcgcgtgcggagcagtgggtgcgcagctgtgggcagcgctgtgctgcggcacggccggggcaggcagagatctgctgggaggagttgggctctgcgtctcagcaccccctgcgctcagcccggcacaatct

SEQ ID NO: 29536 - DNA, 600 bp, Chicken  19866894248464_2
gaaacacacgggtatatttccgacttagccgtgcgtttctgttggtttgtgtcagaaccatcagtcggttcatctgacctttccattactgaatgcaaaatgatctccaaggatgaacgttgcaaactattccaaagcgatttccttccattaaaagcygcttatagaatatcactgctgtgctaaaattgaaggctcgtgaacgtgcagatcagagcacaggacgtctcatgtgcccgctgccccatccgtccccccgccgcacagcgcctcctgctgcccccgtcctgctgggggggsggaaggggcagtgacggccctgcgctgggcgcgtgcggagcagtgggtgcgcagctgtgggcagcgctgtgctgcggcacggccggggcaggcagagatctgctgggaggagttgggctctgcgtctcagcaccccctgcgctcagcccggcacaatctgctgttatttattagttctctattggagatgtggaacagagagcatttggaagcagcttggcagccactgaagtgcttttctatttgttctttggctgccattcagaaatcaaatggtgatgcatgaggagtccaaagctc

SEQ ID NO: 29537 - DNA, 600 bp, Chicken  19866894248464_3
gcagtgggtgcgcagctgtgggcagcgctgtgctgcggcacggccggggcaggcagagatctgctgggaggagttgggctctgcgtctcagcaccccctgcgctcagcccggcacaatctgctgttatttattagttctctattggagatgtggaacagagagcatttggaagcagcttggcagccactgaagtgcttttctatttgttctttggctgccattcagaaatcaaatggtgatgcatgaggagtccaaagctctgtcttattgagtctttaagtaaatgtagttcaaaaaamcaaaagaaaagcttcattatcacgctaaaaagaaacaatgactgtagaaagctggctgtacttcacattgcatgtgaatctgaacagcataactttttttttttttgctgagaaaattaacacgtctgtcatttggagtgtagctaaacattatttactaagctgaaactccagctaagtaatgtagcacgtcttcactcacagtacagcctgtaaaccagcagctggctgggcagatactgtctttcaggctttgtttctgtcatgcacatgagagcactgcagcgctgtgcccggctc

SEQ ID NO: 29538 - DNA, 497 bp, Chicken  19866894248466_1
ccttctgccaggacaaccttatggaggtggggtcacagaatggaagcagcacaggggacaagcagagatcactgttaagctacagccttatgaacctggcagcaaaattaaaaccgagtaacaaatgttactgtgcggctctgaactcagatagaggagaaaatgacaacttcgttttccactttaatccatatcagtttcattgccaccacttttccttcccaaatgaaactcagatgccattcattcaacacaaatcgatcacttcaggctgaaagtttcacaatctcacaccaaatrtgtgaacgtttcaatcagctcagcgaggtgagctctctataagtccaacaccagcactttgtttaacatattggccccagagcctacactcaccaaccatctgctggtacagctacagcagaaaagcttcataatgcaggttaaaaagtatattttcctgtgtgggtcgtatcctgatgcaatacagcacacaaatt

SEQ ID NO: 29539 - DNA, 600 bp, Chicken  19866894248471_1
ggggaaaaatatatagtgagtgtaaaccatctgtatatggtataacaacttcccagaagtgggactgtgtactggtttcagcgtcatcatttttgtgagcactctaataaggaatgcttatgttctaaaataatgggtttgaaatgtttttgcatagtttttcataatgctttgtcaacagatcaactgcggatttgactttctagttgtgagaatacattggaaacaattaagttggttagaggtgaaaacaaagtttcttttattattttcagtggtggttcagtttataacttataygctgatgatgaagatgagacagaggcatcaccttctggccaacagattattgaaaattcaatyactatgaataaaatgaaactactcaaggcgaagatggagaacatgaatttaagtaaaaaggtgaaagtgtgacttaaattcttctatgatcaaatagtttgcactcagccagtatgggctttttaraaaaacagattagatactttgctgtctgtggaagtagagtgataaagggtatatgatttattatctggtgttttaaaaaaaatgaacagtaacacgtaaatgttcttccct

SEQ ID NO: 29540 - DNA, 585 bp, Chicken  19866894248471_2
actgtgtactggtttcagcgtcatcatttttgtgagcactctaataaggaatgcttatgttctaaaataatgggtttgaaatgtttttgcatagtttttcataatgctttgtcaacagatcaactgcggatttgactttctagttgtgagaatacattggaaacaattaagttggttagaggtgaaaacaaagtttcttttattattttcagtggtggttcagtttataacttataygctgatgatgaagatgagacagaggcatcaccttctggccaacagattattgaaaattcaatyactatgaataaaatgaaactactcaaggcgaagatggagaacatgaatttaagtaaaaaggtgaaagtgtgacttaaattcttctatgatcaaatagtttgcactcagccagtatgggctttttaraaaaacagattagatactttgctgtctgtggaagtagagtgataaagggtatatgatttattatctggtgttttaaaaaaaatgaacagtaacacgtaaatgttcttccctggggcatcagcttcccttggatctacctttcagtattcgaagaattca

SEQ ID NO: 29541 - DNA, 459 bp, Chicken  19866894248471_3
cggatttgactttctagttgtgagaatacattggaaacaattaagttggttagaggtgaaaacaaagtttcttttattattttcagtggtggttcagtttataacttataygctgatgatgaagatgagacagaggcatcaccttctggccaacagattattgaaaattcaatyactatgaataaaatgaaactactcaaggcgaagatggagaacatgaatttaagtaaaaaggtgaaagtgtgacttaaattcttctatgatcaaatagtttgcactcagccagtatgggctttttaraaaaacagattagatactttgctgtctgtggaagtagagtgataaagggtatatgatttattatctggtgttttaaaaaaaatgaacagtaacacgtaaatgttcttccctggggcatcagcttcccttggatctacctttcagtattcgaagaattca

SEQ ID NO: 29542 - DNA, 599 bp, Chicken  19866894248477_1
  misc_feature (1)..(8): n is any nucleotide
nnnnnnnntcgctaattaagtaccacttgaaataatgattgttttatgctggaagcatatttatgtgtggggggttttttttgttttgttgtggcagaggtttgtccaacatgaatatttattaaaacttttcaagttacttaacattttccacagtgctccttcattaatatttttgcaatttgttttgctcttatcaactttagagcaggaatacaattttgttaaaattcaaacattgtttcatggagaaaaaaaataagtcatgagcgtctgagtaaacagtgtgggttgcttttktttgtttgttttgtttttttgttttgtttgtttctttgtttttaagaagcttgataccagaccatggacagcagaaacagctgtgttttttcatgtatttggtacatactacatcacttctttcatagtgttgagttagcagtattttacctcagaatttgcactgcttttcattaaaagccatttaatgaaatatgctttccttaggtattacaagtgttcattcttaaggtgttttctgtttcttgcatgagaacactgaaaaagatggctgctgatttttcccttacaaataccta

SEQ ID NO: 29543 - DNA, 600 bp, Chicken  19866894248481_1
aattatctgtacttgctgacagtcccaggagagaggactggggaactgaaaggacgtgaaaactgcaacctgtctgtggttgccatgtgtggatccatgtaaggtatgctcaggtgaggaaatctctgctgttgtttgttgtagcgttcttagagcatggataaacacagccccgcattctgcaaggtgcacaaattcaataaaacagttttagggtaaaaagcctttctactgtgtcagctgaactggaacacgtatggatttggaatcctaccaagtactttgaaagcttttttcacrtgtatgtgtgttaatgatttgctctctttttcatttctaaataattatgtcctggggacataagacacagaatttttctgatcaccatttactagaccacatccatctacagttactgaatggtggtgttgaagacaccacagttattttccattttgtgttactgacatatttcggatactgcttggtgacaaaakacttgaagggaaaatagtaaatgtaaaaaacaattgtagttgcaaatgatggaagtaacatttacttaccatgtggctcgcttcagcctttggaaaacccaga

SEQ ID NO: 29544 - DNA, 600 bp, Chicken  19866894248481_2
caataaaacagttttagggtaaaaagcctttctactgtgtcagctgaactggaacacgtatggatttggaatcctaccaagtactttgaaagcttttttcacrtgtatgtgtgttaatgatttgctctctttttcatttctaaataattatgtcctggggacataagacacagaatttttctgatcaccatttactagaccacatccatctacagttactgaatggtggtgttgaagacaccacagttattttccattttgtgttactgacatatttcggatactgcttggtgacaaaakacttgaagggaaaatagtaaatgtaaaaaacaattgtagttgcaaatgatggaagtaacatttacttaccatgtggctcgcttcagcctttggaaaacccagagaagtctaagagtgcacagtgcactttttggagaactgcagatattgtgcaaatatttgtgtatttccctggtcgggtaaaacttaaccctatgcatcttaacagcaacttctgttttcatataaatgcctgctgcgtttggagagtacagtgtagcccagtaggatttgtcccaacaggtacatcagaagagaayg

SEQ ID NO: 29545 - DNA, 510 bp, Chicken  19866894248481_3
kacttgaagggaaaatagtaaatgtaaaaaacaattgtagttgcaaatgatggaagtaacatttacttaccatgtggctcgcttcagcctttggaaaacccagagaagtctaagagtgcacagtgcactttttggagaactgcagatattgtgcaaatatttgtgtatttccctggtcgggtaaaacttaaccctatgcatcttaacagcaacttctgttttcatataaatgcctgctgcgtttggagagtacagtgtagcccagtaggatttgtcccaacaggtacatcagaagagaaygtttaggaacagggccgttcatttaccttagcagccacgtgttggaaattgtcaggtgagaatcacagtgtgttttttaaggatacgaataactccaaattctgcgtttaataaacctctgttacaaaaagcattgtagaaaccagagtttgggaactgatcttttcatggaagcactgtgcagtgtgaaacttgccaaaaactaatggg

SEQ ID NO: 29546 - DNA, 600 bp, Chicken  19866894248482_1
atatctctagcttgaaatctagagcgaaggggaggatccaaagggttaccagagtatttaggtactggcaggcccaacgctattacacgaaaatcttcactaacccgaacaatcctccatgcatccaactctgattttgtatgatcctaaattaaccaacataaagcagaaaaaaaaagttacatcactaaatactcctccaaattaagctgcaggtagactgacggtccttgtttgtaaagctgtaaatatggtattgttcccatctttcattcagaagtgctaaaaagcactgaactrttctaatttgtggatcataaaagcaaggttttccaaaatgaacgtagacagaacatttgattatgcgcagctgccaggcaatttgattagagaccccgcagatggtcatggttcagaactgtgctttcagaaccttgctttcaaaaggaacagaaaataaacagatgacaaaatttattttaacctgaattactagaagtgtgttactgtgagtacatttttttttcttcttttcccttcttcttgtaactgtaaaggagactatcattgctttaaaattttcatttataaaatatgctt

SEQ ID NO: 29547 - DNA, 600 bp, Chicken  19866894248488_1
aatgacacattcatttctcataatagtgagcttgttgattttcctgttaggtttatgatataagcctggcatctaatgactaatgcagctcctgctgcagagtgtgttcatctgagggacagggagatatattgactcctgatggaaagaactggaaaagatacttaaggagcgctaaaaacaactgttttttttgtaattgtgctttgggggaatttttaaaaattgatgagttttgtaacaacgtacagaaattatggctaattaactctatgtacttccccagctctctttgttgtrtgagcaacaggtgagtggtaggaagcagctatggcagccagcataagcaatacaaacatctctcatcagcttaagttaaacctttatgtctaatgagggtttaaaataataaaaattacttaaatggaggaaaatcatcatacccatagttgtcaggctcctatgaattctcatacttaaaaaactgctattcctcaaactgtctatttgctggagatttcatcttttaataaaaattttgcttgtaattttaatcatctttttgagaagaacaaattagtcctctgagcacaaaaaaac

SEQ ID NO: 29548 - DNA, 600 bp, Chicken  19866894248495_1
tcctgaattttatcctgtgactttactatttcaacttgacctgaattgaaaagtttgagtttaatgactgttgtaacataaacactgaaacaagaggataattattttaaaaagtgcttactgtagtgaaaatgaccacagtggctcatgttttacaccttctgtcatcgttgtccccctgttttacctgtttgtgtctgttttctttagcattccacatgaaggttggactttccaggtgtgtttttatttttttcttagagaaataaatatctggggggagggaggttaggcgacgtrttatttagatattcagtaatagaagagaacccagraggttaaagtctgaaaggaaaatctattggtctttttggacatccataggtgaattaatgagraatggagacttgatagtgtggtcagagaatttagattttctagtagttagtgttggcttggctaattctgtacaaacttctctcataatattaactgatgtgcttccacttctgtgtgtgacataagtgtaagatttattgagcaacaacatgaattgtcttgagcagctctgctactctagttgtgaaaataagtctattt

SEQ ID NO: 29549 - DNA, 600 bp, Chicken  19866894248495_2
ttgacctgaattgaaaagtttgagtttaatgactgttgtaacataaacactgaaacaagaggataattattttaaaaagtgcttactgtagtgaaaatgaccacagtggctcatgttttacaccttctgtcatcgttgtccccctgttttacctgtttgtgtctgttttctttagcattccacatgaaggttggactttccaggtgtgtttttatttttttcttagagaaataaatatctggggggagggaggttaggcgacgtrttatttagatattcagtaatagaagagaacccagraggttaaagtctgaaaggaaaatctattggtctttttggacatccataggtgaattaatgagraatggagacttgatagtgtggtcagagaatttagattttctagtagttagtgttggcttggctaattctgtacaaacttctctcataatattaactgatgtgcttccacttctgtgtgtgacataagtgtaagatttattgagcaacaacatgaattgtcttgagcagctctgctactctagttgtgaaaataagtctatttttcttatttttaaagatgatgtaatgagagaaaaa

SEQ ID NO: 29550 - DNA, 600 bp, Chicken  19866894248495_3
taattattttaaaaagtgcttactgtagtgaaaatgaccacagtggctcatgttttacaccttctgtcatcgttgtccccctgttttacctgtttgtgtctgttttctttagcattccacatgaaggttggactttccaggtgtgtttttatttttttcttagagaaataaatatctggggggagggaggttaggcgacgtrttatttagatattcagtaatagaagagaacccagraggttaaagtctgaaaggaaaatctattggtctttttggacatccataggtgaattaatgagraatggagacttgatagtgtggtcagagaatttagattttctagtagttagtgttggcttggctaattctgtacaaacttctctcataatattaactgatgtgcttccacttctgtgtgtgacataagtgtaagatttattgagcaacaacatgaattgtcttgagcagctctgctactctagttgtgaaaataagtctatttttcttatttttaaagatgatgtaatgagagaaaaatacaagagatggtttttaatgacttgaatttttgtttttggcaggtattagcaccagagatgg

SEQ ID NO: 29551 - DNA, 600 bp, Chicken  19866894248502_1
taaaccaggaccaaaggtgcactgtgtgaacaattcctaactcagtgggcctctgtttgctccctatcagtatgttgcacattgcagtgagctggcgaaaacattccaacagccccaccgttaccaaaaaaaagagatgaatttacataacttaaagatgtgattacttactgtgctgtctgatgctggcccccagaactagtagcctacagagtttggattgtgatttaaagagatccttaatggtccttctgagacagcttcccacgttgttcaagtgtggctgctggtccagatagyagagtccagctcagcgtctgctgattagaatatcaacttgagatgttgctctttcttccactatgataccatttctcagtctaatcattcttcatcattatgataatttaaaaaaaaaaaaaaatctagtttaaagttatcctttgctgaatttaactttgcaacctgctattatatcttgaatagttctcatctttccttttgtaccagtttggcatttatcagcaattacaaagttatttaagtgagatctgcctatttcattcttcaattttacctcacaaatcccctttatttatt

SEQ ID NO: 29552 - DNA, 599 bp, Chicken  19866894248509_1
  misc_feature (1)..(109): n is any nucleotide
nnnnnnnnnnnnnnnnnnnnnnnnnnnnnnnnnnnnnnnnnnnnnnnnnnnnnnnnnnnnnnnnnnnnnnnnnnnnnnnnnnnnnnnnnnnnnnnnnnnnnnnnnnnnnaaaacctgtgttgtgttatagctgagtttgtggtgtgactcctgaatgaaaacagtaaatgacataaaattcagttactttcacagtgattatacaactgtgttttcatgcccactttctgaataaaacaagatatataggaatgagttttctcctagtaacttctgaatccactgcttcatttgagctgyatttgatacagagatagaggtcgcaaggtcaagtttctacagtttcaatgaaacctggcagatgagattagaaaaatgactcgaatttgtgcctccaggacagaaaaagcttcagcatggacttggaagttttctattccattcaacctgctgccttgcagattagcatccttggttggtctgayggtcacartgtragttgctccyagtagtgagaaggtggtgttttgtgaasgaatttagggaaattatttagaagggagtgggaatccagccagggtaacgtcagcctgggattg

SEQ ID NO: 29553 - DNA, 600 bp, Chicken  19866894248509_2
actttcacagtgattatacaactgtgttttcatgcccactttctgaataaaacaagatatataggaatgagttttctcctagtaacttctgaatccactgcttcatttgagctgyatttgatacagagatagaggtcgcaaggtcaagtttctacagtttcaatgaaacctggcagatgagattagaaaaatgactcgaatttgtgcctccaggacagaaaaagcttcagcatggacttggaagttttctattccattcaacctgctgccttgcagattagcatccttggttggtctgayggtcacartgtragttgctccyagtagtgagaaggtggtgttttgtgaasgaatttagggaaattatttagaagggagtgggaatccagccagggtaacgtcagcctgggattgctgcacaagtattttggggcatgtgcaagcacattagtaaataactagactttgtaactttgctggtcatgaaaaaaacccttgtttttgcaagagccttccagtctcccaaaccaatcatgtacccttcaactttatggtggtctatacctacgttagatgcatgtttttcctatccttgtcaga

SEQ ID NO: 29554 - DNA, 600 bp, Chicken  19866894248509_3
agtgattatacaactgtgttttcatgcccactttctgaataaaacaagatatataggaatgagttttctcctagtaacttctgaatccactgcttcatttgagctgyatttgatacagagatagaggtcgcaaggtcaagtttctacagtttcaatgaaacctggcagatgagattagaaaaatgactcgaatttgtgcctccaggacagaaaaagcttcagcatggacttggaagttttctattccattcaacctgctgccttgcagattagcatccttggttggtctgayggtcacartgtragttgctccyagtagtgagaaggtggtgttttgtgaasgaatttagggaaattatttagaagggagtgggaatccagccagggtaacgtcagcctgggattgctgcacaagtattttggggcatgtgcaagcacattagtaaataactagactttgtaactttgctggtcatgaaaaaaacccttgtttttgcaagagccttccagtctcccaaaccaatcatgtacccttcaactttatggtggtctatacctacgttagatgcatgtttttcctatccttgtcagagaagggaa

SEQ ID NO: 29555 - DNA, 600 bp, Chicken  19866894248509_4
attatacaactgtgttttcatgcccactttctgaataaaacaagatatataggaatgagttttctcctagtaacttctgaatccactgcttcatttgagctgyatttgatacagagatagaggtcgcaaggtcaagtttctacagtttcaatgaaacctggcagatgagattagaaaaatgactcgaatttgtgcctccaggacagaaaaagcttcagcatggacttggaagttttctattccattcaacctgctgccttgcagattagcatccttggttggtctgayggtcacartgtragttgctccyagtagtgagaaggtggtgttttgtgaasgaatttagggaaattatttagaagggagtgggaatccagccagggtaacgtcagcctgggattgctgcacaagtattttggggcatgtgcaagcacattagtaaataactagactttgtaactttgctggtcatgaaaaaaacccttgtttttgcaagagccttccagtctcccaaaccaatcatgtacccttcaactttatggtggtctatacctacgttagatgcatgtttttcctatccttgtcagagaagggaattgt

SEQ ID NO: 29556 - DNA, 600 bp, Chicken  19866894248509_5
tgtgttttcatgcccactttctgaataaaacaagatatataggaatgagttttctcctagtaacttctgaatccactgcttcatttgagctgyatttgatacagagatagaggtcgcaaggtcaagtttctacagtttcaatgaaacctggcagatgagattagaaaaatgactcgaatttgtgcctccaggacagaaaaagcttcagcatggacttggaagttttctattccattcaacctgctgccttgcagattagcatccttggttggtctgayggtcacartgtragttgctccyagtagtgagaaggtggtgttttgtgaasgaatttagggaaattatttagaagggagtgggaatccagccagggtaacgtcagcctgggattgctgcacaagtattttggggcatgtgcaagcacattagtaaataactagactttgtaactttgctggtcatgaaaaaaacccttgtttttgcaagagccttccagtctcccaaaccaatcatgtacccttcaactttatggtggtctatacctacgttagatgcatgtttttcctatccttgtcagagaagggaattgttgaggcagtt

SEQ ID NO: 29557 - DNA, 600 bp, Chicken  19866894248509_6
aacaagatatataggaatgagttttctcctagtaacttctgaatccactgcttcatttgagctgyatttgatacagagatagaggtcgcaaggtcaagtttctacagtttcaatgaaacctggcagatgagattagaaaaatgactcgaatttgtgcctccaggacagaaaaagcttcagcatggacttggaagttttctattccattcaacctgctgccttgcagattagcatccttggttggtctgayggtcacartgtragttgctccyagtagtgagaaggtggtgttttgtgaasgaatttagggaaattatttagaagggagtgggaatccagccagggtaacgtcagcctgggattgctgcacaagtattttggggcatgtgcaagcacattagtaaataactagactttgtaactttgctggtcatgaaaaaaacccttgtttttgcaagagccttccagtctcccaaaccaatcatgtacccttcaactttatggtggtctatacctacgttagatgcatgtttttcctatccttgtcagagaagggaattgttgaggcagtttcgctatttcatttctttgatggcttga

SEQ ID NO: 29558 - DNA, 600 bp, Chicken  19866894248519_1
gaaggagttcttctcccagtctgtacagatggctgagattaccccgagtcaagcactagagcttgcacttggccttgtggaatttcattaggttctcatgggcccacttttgaagcttgtgcaggtctcattggatggcatcccttcgttctgttgtattccgtgcagcactgtgcttaaagtctccagcaaagttgttgaagccacccaactgattccttatccactgaaagttccacccttcatatcttcccagtttagagaaagaaatgttttgtgggaccatatcaagggcctaamagacgtccaggtagaagacatcagttacccttccttggcccactgaagccatcgctccatcataaaaggccaccagactggtcaggcacaatcagcccttggtgaagccatgctggttgttctggatcaccccctcgtcccttaatgtgccttaacatctcttccaggaggatcagctccacaaccttcctaggcacagacatatggctcaccagcctatagttcaacaggtcttctttcctccttttcttctacaggagaagcgtttctgcttatccagtcgcagggacttcatctgac

SEQ ID NO: 29559 - DNA, 600 bp, Chicken  19866894248525_1
acggttcgtgttgtgccctgtccagattaatgttgttattactgatctggatgaaggaattgagtgcagtgatgacaccaagaaagggaagagttaattggcctaagattactacagagggacttggacaggctggatcgctgggctgaggccaactgtatgagcttggacaagaccatgttccaagtcctgctctttggtcacaagaactccatgcatggctacagacctggggctgagtggcacgaaaggtgcgcaaggggtgttgattgatggccaactgaacacaagccgtcagtstgctcaggtggccaagaaggccagtgtcatcatggcttgtatcagaaatagtgtaggcagtggaatgagggaggagatcatccctctgcacttggcaccagtgaggatgaaccttgagtactgtgttttggaactctcactgctaaaaggaccttgaggacctgaagcatgtccatagaagggcaaggaagctgtgaagtcttatgaggaacagctgaggaaactgacagaaaagaggtcattgcaaggtgaaggtcggcctcttttcccacktagttagcaataagacaagatgtaatg

SEQ ID NO: 29560 - DNA, 600 bp, Chicken  19866894248525_2
tggccaactgaacacaagccgtcagtstgctcaggtggccaagaaggccagtgtcatcatggcttgtatcagaaatagtgtaggcagtggaatgagggaggagatcatccctctgcacttggcaccagtgaggatgaaccttgagtactgtgttttggaactctcactgctaaaaggaccttgaggacctgaagcatgtccatagaagggcaaggaagctgtgaagtcttatgaggaacagctgaggaaactgacagaaaagaggtcattgcaaggtgaaggtcggcctcttttcccacktagttagcaataagacaagatgtaatgacttcagtgagaaacaccaagctcctctttccccttgcaaatgccagtgatgcaggcacaaaacagagctgccccccgtagaggatttgctaggcaagtgatcagggagggyccaagacctgtgcaaatgttggcagcagagggagcagaacagcctgagaacacctgcatggcacctggacagcagtttcacagggaatctactctgatgagatctctgcttcctaattccagtgagattggctgaactgccagtcttcataggctgcttga

SEQ ID NO: 29561 - DNA, 600 bp, Chicken  19866894248525_3
cttgagtactgtgttttggaactctcactgctaaaaggaccttgaggacctgaagcatgtccatagaagggcaaggaagctgtgaagtcttatgaggaacagctgaggaaactgacagaaaagaggtcattgcaaggtgaaggtcggcctcttttcccacktagttagcaataagacaagatgtaatgacttcagtgagaaacaccaagctcctctttccccttgcaaatgccagtgatgcaggcacaaaacagagctgccccccgtagaggatttgctaggcaagtgatcagggagggyccaagacctgtgcaaatgttggcagcagagggagcagaacagcctgagaacacctgcatggcacctggacagcagtttcacagggaatctactctgatgagatctctgcttcctaattccagtgagattggctgaactgccagtcttcataggctgcttgagcattacacagaaagatggagcatatgctagaaagagtggaggaagaggtctgtgttcaggtgaggttggaggcttaggggtgcatggggtgattcactgaccccatctgtatgataggcacagatggcaacccatggt

SEQ ID NO: 29562 - DNA, 600 bp, Chicken  19866894248525_4
ggctgaactgccagtcttcataggctgcttgagcattacacagaaagatggagcatatgctagaaagagtggaggaagaggtctgtgttcaggtgaggttggaggcttaggggtgcatggggtgattcactgaccccatctgtatgataggcacagatggcaacccatggttattctttgcccgatctcatcagggccagagcatcaaagcagtagggcagagggagtccaataaaaatgtgtgggtgatgatgcttccaggcacagtacatggcctggaaaaagagtggcttctgggcratcttctaacaggacagtaaaagctaactagacttagtagaggatctcactggataattagaacaaacacatgtaatatttcccaaacacatgtaatgacagttaaatctggcaaatgtcaaaccattttgtccaggcatgttttttaagggaaagattttcaatgcataacacgtgtgcttttctccctgtggggtagtgtaaatatgtactggaattccctgcattccccaggttatgtgcacctgtgatcagatctcctgcacttcagccaagcctcaagagtgtggaagggctgct

SEQ ID NO: 29563 - DNA, 600 bp, Chicken  19866894248534_1
gagtgaaaggagaagggagaactgggaagatgatgcagatgtcagaaactacccatgaaaagcagagcactttggacagtgaggatcagaaccatcaagttcctgtcccaatggccaagggtaagaacagaccccagcgtcacaggagaaatggacagtgatattcctgctgtaatgcaggatattatggatgtcaatcaaagggcaacactgagaaagctggacactcagtgatactcagatgactgcctttcacctggaaacatagatgtttcttctgatgacacagaaattctcccrttttgggaacagtggcatagcagatctccaagacaaactttctaaggaagatatacacggggatcctttggtgcctttcccttcccacgctgagaatggtgaggtcattcccatcaagattaggagacacatggaaaagataatgaaaacaggaccatgtgtgaactggtgtggtctgtttaagctgagaagaatcagtttggtcaccgatgtcctgctctcctctgccaaggctctaagatttccagtgtcacttctgttttgttgaagccactgtccccagacacagtgtcactatgt

SEQ ID NO: 29564 - DNA, 600 bp, Chicken  19866894248535_1
gtcctatcactacatgcttttgtaaaaagtccctctccagcttttttatagtccactctggaaggctgtgataaagtctccctggaaccttctcttccccaggctgagcatccccagttctctcagcccctcttcaaggagaggtgctccagctgtctgatcattccagcaggtccatatccttcttatgttggggtcttcagacctgaatgcagtactggaggcagggtcttaaaagagtgaagtagaggtggacagtcacctccttcaccctcctggacacattgctttagatgtagycttggatttggttgcctttctgggctacaggtgcacattactgactcacgttgactttttcatccatcartatctccaggyccttctctgcatggctgttctcaattcacctatcacccagcctgtatttgyrctggggaatgcctcagcccaggtgcaggactttgtatttggccttgttgaaccgcatgttttttacatgggcttacctctcatgcctgctatggtccctctgaatggcatcccttccctccggcatgccaactgtaccactcagcttggtgtcatctgtaactttgc

SEQ ID NO: 29565 - DNA, 600 bp, Chicken  19866894248535_2
ataaagtctccctggaaccttctcttccccaggctgagcatccccagttctctcagcccctcttcaaggagaggtgctccagctgtctgatcattccagcaggtccatatccttcttatgttggggtcttcagacctgaatgcagtactggaggcagggtcttaaaagagtgaagtagaggtggacagtcacctccttcaccctcctggacacattgctttagatgtagycttggatttggttgcctttctgggctacaggtgcacattactgactcacgttgactttttcatccatcartatctccaggyccttctctgcatggctgttctcaattcacctatcacccagcctgtatttgyrctggggaatgcctcagcccaggtgcaggactttgtatttggccttgttgaaccgcatgttttttacatgggcttacctctcatgcctgctatggtccctctgaatggcatcccttccctccggcatgccaactgtaccactcagcttggtgtcatctgtaactttgctgaaggtatgctcaatcaccctgtccatgccaccaacgaagtgacagactccatactagcccttgaggaa

SEQ ID NO: 29566 - DNA, 600 bp, Chicken  19866894248535_3
ctggaaccttctcttccccaggctgagcatccccagttctctcagcccctcttcaaggagaggtgctccagctgtctgatcattccagcaggtccatatccttcttatgttggggtcttcagacctgaatgcagtactggaggcagggtcttaaaagagtgaagtagaggtggacagtcacctccttcaccctcctggacacattgctttagatgtagycttggatttggttgcctttctgggctacaggtgcacattactgactcacgttgactttttcatccatcartatctccaggyccttctctgcatggctgttctcaattcacctatcacccagcctgtatttgyrctggggaatgcctcagcccaggtgcaggactttgtatttggccttgttgaaccgcatgttttttacatgggcttacctctcatgcctgctatggtccctctgaatggcatcccttccctccggcatgccaactgtaccactcagcttggtgtcatctgtaactttgctgaaggtatgctcaatcaccctgtccatgccaccaacgaagtgacagactccatactagcccttgaggaagaccactcatc

SEQ ID NO: 29567 - DNA, 600 bp, Chicken  19866894248535_4
ttcaaggagaggtgctccagctgtctgatcattccagcaggtccatatccttcttatgttggggtcttcagacctgaatgcagtactggaggcagggtcttaaaagagtgaagtagaggtggacagtcacctccttcaccctcctggacacattgctttagatgtagycttggatttggttgcctttctgggctacaggtgcacattactgactcacgttgactttttcatccatcartatctccaggyccttctctgcatggctgttctcaattcacctatcacccagcctgtatttgyrctggggaatgcctcagcccaggtgcaggactttgtatttggccttgttgaaccgcatgttttttacatgggcttacctctcatgcctgctatggtccctctgaatggcatcccttccctccggcatgccaactgtaccactcagcttggtgtcatctgtaactttgctgaaggtatgctcaatcaccctgtccatgccaccaacgaagtgacagactccatactagcccttgaggaagaccactcatcactgatctccacatggactcctttgaatatgactatccatccaactcctta

SEQ ID NO: 29568 - DNA, 600 bp, Chicken  19866894248535_5
tcaaggagaggtgctccagctgtctgatcattccagcaggtccatatccttcttatgttggggtcttcagacctgaatgcagtactggaggcagggtcttaaaagagtgaagtagaggtggacagtcacctccttcaccctcctggacacattgctttagatgtagycttggatttggttgcctttctgggctacaggtgcacattactgactcacgttgactttttcatccatcartatctccaggyccttctctgcatggctgttctcaattcacctatcacccagcctgtatttgyrctggggaatgcctcagcccaggtgcaggactttgtatttggccttgttgaaccgcatgttttttacatgggcttacctctcatgcctgctatggtccctctgaatggcatcccttccctccggcatgccaactgtaccactcagcttggtgtcatctgtaactttgctgaaggtatgctcaatcaccctgtccatgccaccaacgaagtgacagactccatactagcccttgaggaagaccactcatcactgatctccacatggactcctttgaatatgactatccatccaactccttac

SEQ ID NO: 29569 - DNA, 599 bp, Chicken  19866894248537_1
  misc_feature (1)..(138): n is any nucleotide
nnnnnnnnnnnnnnnnnnnnnnnnnnnnnnnnnnnnnnnnnnnnnnnnnnnnnnnnnnnnnnnnnnnnnnnnnnnnnnnnnnnnnnnnnnnnnnnnnnnnnnnnnnnnnnnnnnnnnnnnnnnnnnnnnnnnnnnnnngcctgtctgaatggaaattgagcagctgctaaagcatcaagtgatgctggagcaagaagcttgcatctctaatggcaggagcttaatgcatgcagaatcttcagaatgatagatatgacagacactggagccctcaacgttgtggacatatggaaaccaacrtgttcaataaactccatgttcctggttgccttgtgtgtggagcagtgcaaaggctggaaggccccagggcaaccactgatgtcttcaaaagagtatattcaagcctctttggaaatactcactggggattgtttgcctcagagattgtcctccaacccaaattgaatttcaacacaggcttggaatggtggatggaaaaaaagattccttattatactgggctcagactgwtgtcctaaaagccaagcctatgttttggtgcagcagggaatgttccggctcatcacaagaaagaacag

SEQ ID NO: 29570 - DNA, 600 bp, Chicken  19866894248537_2
agaatcttcagaatgatagatatgacagacactggagccctcaacgttgtggacatatggaaaccaacrtgttcaataaactccatgttcctggttgccttgtgtgtggagcagtgcaaaggctggaaggccccagggcaaccactgatgtcttcaaaagagtatattcaagcctctttggaaatactcactggggattgtttgcctcagagattgtcctccaacccaaattgaatttcaacacaggcttggaatggtggatggaaaaaaagattccttattatactgggctcagactgwtgtcctaaaagccaagcctatgttttggtgcagcagggaatgttccggctcatcacaagaaagaacagatgtgcaatgagtggaataactgcctaataagtgtcctgcccttctcaaaagtgacaattcggtgaagaggctgctgagtgaggaggcaacaccacaaggagaaattcctgcctcatgatggtgttcagccaccactggcagcaacacacaccatcacgctaacttggagtgcagctgcaccgtgtaacctccttcctcagtgagggtttgagggtgaaagcctgtgagatt

SEQ ID NO: 29571 - DNA, 600 bp, Chicken  19866894248544_1
aatttttccagaacgtctagctctccttctgctgtcaaagaacacgtagatcttaagaacgtgtttaggttggagaaacccccttacaaggtcttgacatgggaaagttaaaccagtctagtcctgtactctaatcagccaagagtgatgctgttttttaaattagctgcaaattgaaagaaagaatttgaacctcacacacactttggttctgttacattagggccttggcagatttgggaggacagctgggccctgaattagctgtaactatgctgggaaaaaaaaggaaaaaaaaargcctaggtatctctaagaatctcagtggaaaacatctggtcattaaaaaaaaaaaaagagggagagagagaaaaaggaacacaaatgatggaagagaaacagaacagaaaaaactgagtgccactctataaattaattcaccgtagaattccctgctcatttctgatcacccattctgaaaagaaactgcagtgagagggaaaagcaaaatcatacttgttctgctctgtgtttgcccacacacctttatctgctgtcacgttttrttcctccatgtcagtttgattcttcagccagaaa

SEQ ID NO: 29572 - DNA, 600 bp, Chicken  19866894248544_2
gtaactatgctgggaaaaaaaaggaaaaaaaaargcctaggtatctctaagaatctcagtggaaaacatctggtcattaaaaaaaaaaaaagagggagagagagaaaaaggaacacaaatgatggaagagaaacagaacagaaaaaactgagtgccactctataaattaattcaccgtagaattccctgctcatttctgatcacccattctgaaaagaaactgcagtgagagggaaaagcaaaatcatacttgttctgctctgtgtttgcccacacacctttatctgctgtcacgttttrttcctccatgtcagtttgattcttcagccagaaatttctatattcagagggccttttcctgaagggaattatctacttcttgacatcctctatttaaaaagaaacactactgtattagttgctggtatccctaaaaatattgaactctaagctattgtgggatttttatttcatggcttatatcttccttcttaaataaagtcctactagaacatattcatgttgatttgtatcacccctcttcttggatggtctaccaagaataactgtagcagctctaaaatcctgtcctttttttca

SEQ ID NO: 29573 - DNA, 600 bp, Chicken  19866894248544_3
attatctacttcttgacatcctctatttaaaaagaaacactactgtattagttgctggtatccctaaaaatattgaactctaagctattgtgggatttttatttcatggcttatatcttccttcttaaataaagtcctactagaacatattcatgttgatttgtatcacccctcttcttggatggtctaccaagaataactgtagcagctctaaaatcctgtcctttttttcatacccaaacagtttgtgtttggttgcaattaccctgatagtactgcttcattgacttgtttctcggyagtctctctgagccgtatgtatgcagtatctatttattgagtaaaaatctgttcacacaaacctgttagtacatccctaatcacaccatgggagatttctatccacatagactgtcacatgcacttcactaaaatttaatctcatcagttgatacagtcgtttctttctttaaagctacagctcttctcacacctttgtgacctaagctttccttcgggtatagttcatagtcagaaataacagtatcttattgatttttgtcattgcatcatatttcaaagcgcctattgaataatgtc

SEQ ID NO: 29574 - DNA, 600 bp, Chicken  19866894248546_1
taaacaaatgcattcctcaataggtgatgttataccattcaaagtaggggaatcatttcacaggaatttgacatgctattactgcttttatcttgttcctaagatgcaccattgtttgggcattaaaagaatattaagttcaaagttgcaaaatgcagtttgtagcctctttcattgttttgttatgttctacacattttgacttacagttctttatgatagttttgaaaaaagaaaaaaagaatcaacggaatctcaataacagcccagtttattcttctccttcatattaagataccrgatgcctgttttagttacatggagtaaatttttccaaggttaagrctgagcatgaagaaaggcaggccaccagtaacctgacatacaaagaaatcataatttctgcatgaaatccaaaggacactgtcaagacacaattttctaggatgtgaaatattcttgcaactcagaacagcacataagaaatgtgttatgtcaccacaactgctgtctttgactccacagcatcgtggacatattttcagagaaaattgatgtacattaagtgtcttcagtatgtttgtcatcaaacattgaaca

SEQ ID NO: 29575 - DNA, 600 bp, Chicken  19866894248546_2
aggggaatcatttcacaggaatttgacatgctattactgcttttatcttgttcctaagatgcaccattgtttgggcattaaaagaatattaagttcaaagttgcaaaatgcagtttgtagcctctttcattgttttgttatgttctacacattttgacttacagttctttatgatagttttgaaaaaagaaaaaaagaatcaacggaatctcaataacagcccagtttattcttctccttcatattaagataccrgatgcctgttttagttacatggagtaaatttttccaaggttaagrctgagcatgaagaaaggcaggccaccagtaacctgacatacaaagaaatcataatttctgcatgaaatccaaaggacactgtcaagacacaattttctaggatgtgaaatattcttgcaactcagaacagcacataagaaatgtgttatgtcaccacaactgctgtctttgactccacagcatcgtggacatattttcagagaaaattgatgtacattaagtgtcttcagtatgtttgtcatcaaacattgaacaactggttcacagcaatgatactttggcagtgtctgctcatttgcc

SEQ ID NO: 29576 - DNA, 600 bp, Chicken  19866894248546_3
tttctgcatgaaatccaaaggacactgtcaagacacaattttctaggatgtgaaatattcttgcaactcagaacagcacataagaaatgtgttatgtcaccacaactgctgtctttgactccacagcatcgtggacatattttcagagaaaattgatgtacattaagtgtcttcagtatgtttgtcatcaaacattgaacaactggttcacagcaatgatactttggcagtgtctgctcatttgccttttcataccaaatgttcttcatccaactgacatcttacacaagattatctctyctccttaagcacaaagcaaatctaccacattgacatgacttgtgcattttgtggtagtacaaaattatacatctcagctgattaaataagaaaatttgtaacatctgaagtattttaaaagaaaatcttggaacacttctttaaaaatcaatctcatctcatctagaagccttggcattttatgtatgccatacacgggccatggctttgtggtttgaagtacattgctgaagtaccttaaatacctgaggttacttgtggaaacttctgctatataggaaaaaaacaaaacaaaacaaa

SEQ ID NO: 29577 - DNA, 600 bp, Chicken  19866894248547_1
gatggaaagcatagatgcatcttgcttggaaatgagaattatattcagctgcaagtagcgtgctcttaagtaaccacacttcccacattttcttttttacatttttatttatcaaagacagcatagctttcatattttgagtgaccagagagatctcaggatgctttcatagctaaggtaagcttagccaaaaagtgcattgcaggatacatgatggtttggagtaacacagtgcagtcccttgcctttgttgtgactgagtgagctggtgtcactgacaccctggacagcacgagccasggccctcagaaagagaatataccattggcgatggaccattactcttgtgggaacgtgagaagagttccaaacttgtcaaaggaagatttggcatcgtacttaactgagaggctccctaagaccaaaggtctgtctccaccactgagtcagaacaatgtgcagcgttcgagctttagaagtcgtacacatacaaaccgagcgttattcttcatgctatttagatgcacgtgtattttgactggcgtttatacagttgcataaaggtcaaaatataaagttctgcaaatgtttgtttaatac

SEQ ID NO: 29578 - DNA, 600 bp, Chicken  19866894248547_2
caaaccgagcgttattcttcatgctatttagatgcacgtgtattttgactggcgtttatacagttgcataaaggtcaaaatataaagttctgcaaatgtttgtttaatactcttatggaagcctaaaggattaagtttacctgctcaggtgtttcaacgaaaacaaaagctgattacacgggaaagtaaactagatgtgccattttaattccttagcattttataaacaatttttggtataccaagaaatatttagtgcaaagcacatgcttagcttaaatcctaggcctggagaaaaartataagcaaaattaactgtaaaatgaaagcccagaaaagaagctggcatatgtaatctgcgtgcccacggaaatataaaaagaggaggagttttccacactaaaagcattatttggtttttgttttaagaaaccttgatgctttcttccaaaataatagtattgaccattacattatcggtttgtataactgacaaaaactgttagagtgataggaacaaagagtcttcatcacctaaaaacaaatacttcagcattcaccatgaatactgcagcaagtttatacttatgggtcaacact

SEQ ID NO: 29579 - DNA, 600 bp, Chicken  19866894248547_3
catgccaaagctcctggacttcctgaaaatgttaacaatataggtctccttcacacacatggagacagcagtttaccagatggaaccttaaaaaaacaaaattgaaaattaaaaggccttgcttcagctcacagctaggaactgaaactgcaagaagtacaactgagagaagagttaataatgattttgtataatttcagcttggaaatacagcatacagaccaggattgctacaggagcatccataacatggccattacgggggcaatactgaaagctgccttgttaactccagtaackgcgccctcattgcacaagtcttgttggcagcagaagtaatcaaaattatccaactgatagaatacagcaatgtcattcacattgcactgagacaacttccagcaggaggacgttcgcagtttacctgcaaaataattaaaaagattaagagaatgttgaaagcaatgctacttttgatacagactgagaatcgctgcttaggctgaagcctcctttctccatgccacgagcttcagcaacaaccatcctgggaagatggaggtcctaaaatcagcacaacagtctcttagggcagaagga

SEQ ID NO: 29580 - DNA, 600 bp, Chicken  19866894248559_1
gagcagaaccacagatggagtttagaatgaatctgataacagcagagcattggccacgggctgtcaggaatggtgggagtgagtttttctgcccctgctgtccctgttaggttcaagcattgcttgccaggttccccagatttactcatgtcctgaagatcctcataagtatggtgtaaatcagcacatatgtagactttgatgggatcagctatgcatcacagattttgtacacaatcagatcagtttatcgctttgatgtgctcatactgctttgtaaggccccatacgtaactgcarcagggtgagggcagccaggcatggggatttcccttcctatgagtggggataactcaaagcaaggagaakttgttaccagcagtgtttgctgctacacctgcaggtttttgctactaccgctcttctacttcctgactcatcagtgatgcacacacgctgacaaaggacagcagcatggatgcaggttcctctgctcagcttgcttttcatctgaatatgagctgcacattttagcaagaagaacagaacatttcacaggtagccctgctcctgctgcactgttttttggctgggtcaaac

SEQ ID NO: 29581 - DNA, 600 bp, Chicken  19866894248559_2
atggtgggagtgagtttttctgcccctgctgtccctgttaggttcaagcattgcttgccaggttccccagatttactcatgtcctgaagatcctcataagtatggtgtaaatcagcacatatgtagactttgatgggatcagctatgcatcacagattttgtacacaatcagatcagtttatcgctttgatgtgctcatactgctttgtaaggccccatacgtaactgcarcagggtgagggcagccaggcatggggatttcccttcctatgagtggggataactcaaagcaaggagaakttgttaccagcagtgtttgctgctacacctgcaggtttttgctactaccgctcttctacttcctgactcatcagtgatgcacacacgctgacaaaggacagcagcatggatgcaggttcctctgctcagcttgcttttcatctgaatatgagctgcacattttagcaagaagaacagaacatttcacaggtagccctgctcctgctgcactgttttttggctgggtcaaaccttctgattaatgttgacgcacccgggtgggtgcaaaatgggtgtccagagattttctgactaattttg

SEQ ID NO: 29582 - DNA, 600 bp, Chicken  19866894248559_3
cctctgctcagcttgcttttcatctgaatatgagctgcacattttagcaagaagaacagaacatttcacaggtagccctgctcctgctgcactgttttttggctgggtcaaaccttctgattaatgttgacgcacccgggtgggtgcaaaatgggtgtccagagattttctgactaattttgtttctgtgatagggtggtagcaaaattcccattgagctctgagctacacggagtgcaacagcagtcactgagccaccagtgtaggaaagagggtgagcgttagcaggagaacaagtawaacagtgaagcaaaacaaagccaaagcataacaaatcaggacgccagttccaaaaaaacccttcaaaacaaattccaaaacaaataacacttctcacataaaaaacaaaacaatgccaacacatcagcattctagtaattcctgctatggagtgcttgactytaaacagcacatttttaggaggaagtattttagctgtgtaaataaaaggcttccacgtatctttgttttcctgtgaaatgcgaggccaataacttctctcttattaagaagttcattgtaactttccctaaggtgttt

SEQ ID NO: 29583 - DNA, 600 bp, Chicken  19866894248559_4
agattttctgactaattttgtttctgtgatagggtggtagcaaaattcccattgagctctgagctacacggagtgcaacagcagtcactgagccaccagtgtaggaaagagggtgagcgttagcaggagaacaagtawaacagtgaagcaaaacaaagccaaagcataacaaatcaggacgccagttccaaaaaaacccttcaaaacaaattccaaaacaaataacacttctcacataaaaaacaaaacaatgccaacacatcagcattctagtaattcctgctatggagtgcttgactytaaacagcacatttttaggaggaagtattttagctgtgtaaataaaaggcttccacgtatctttgttttcctgtgaaatgcgaggccaataacttctctcttattaagaagttcattgtaactttccctaaggtgtttttttgttgttgttgttgctctcttggcaaaacggtttggaacaaagagaaagcagcttcccctcctgttgttgtgctgtctttgcgagcagttatgttcacggagaccaatctcagtttcctctgtggtggtgttgtgttgcgtgaaatgtcccaacgttcc

SEQ ID NO: 29584 - DNA, 600 bp, Chicken  19866894248563_1
acacctgtttgggttggaaaagagctgcaagatcaaggaccatcagcctgacctcccatgtgccaccattatgccacatccccctgcaccagtgctgttgtgccaccgtctcctgctccgatctctgctataagaaggtcgtggttatgtttccctttcgagcagatacagaggaacgagcgtggcgcttctcagagcagggaataaaatggatgacttgatggtgaggctcccagtggatcatagaaacagagaatggcctgggtcgaaaaggaccacgatgatcatctggttccaacyccctgctatgtgcagggtcaccaaccagcagaccaggctgcccagagccacatccagcctggccttgaatgcctccagggatggggcatccacagcctccttgggcaacctgttcagtgcgtcaccaccctctgtatgaaaaacttcctcctaatatccaacctaaacctcccctgtctcagtttaaaactatccccccttgtcctatcactatccatccttgtaaacagccrttccccctccygtttatacactcccttcaagtactggaaggccacaatgaggtctccctggagcctt

SEQ ID NO: 29585 - DNA, 600 bp, Chicken  19866894248563_2
cagtggatcatagaaacagagaatggcctgggtcgaaaaggaccacgatgatcatctggttccaacyccctgctatgtgcagggtcaccaaccagcagaccaggctgcccagagccacatccagcctggccttgaatgcctccagggatggggcatccacagcctccttgggcaacctgttcagtgcgtcaccaccctctgtatgaaaaacttcctcctaatatccaacctaaacctcccctgtctcagtttaaaactatccccccttgtcctatcactatccatccttgtaaacagccrttccccctccygtttatacactcccttcaagtactggaaggccacaatgaggtctccctggagccttctcttctcccagccaaacaagtccagttccctgaacctttcttcagagtgctttccttcatcctctgcctcactctatattctcaagaagtctgcaagagcttttccatttaccatgttattgttctttgtttcaacactcgacctttctctgccctcagcgtttccaagctgcatgtagaagtaatggcttttcagatcaatgattaacgtggccacaggcagcactctttg

SEQ ID NO: 29586 - DNA, 600 bp, Chicken  19866894248563_3
agaaacagagaatggcctgggtcgaaaaggaccacgatgatcatctggttccaacyccctgctatgtgcagggtcaccaaccagcagaccaggctgcccagagccacatccagcctggccttgaatgcctccagggatggggcatccacagcctccttgggcaacctgttcagtgcgtcaccaccctctgtatgaaaaacttcctcctaatatccaacctaaacctcccctgtctcagtttaaaactatccccccttgtcctatcactatccatccttgtaaacagccrttccccctccygtttatacactcccttcaagtactggaaggccacaatgaggtctccctggagccttctcttctcccagccaaacaagtccagttccctgaacctttcttcagagtgctttccttcatcctctgcctcactctatattctcaagaagtctgcaagagcttttccatttaccatgttattgttctttgtttcaacactcgacctttctctgccctcagcgtttccaagctgcatgtagaagtaatggcttttcagatcaatgattaacgtggccacaggcagcactctttgcatctctgcta

SEQ ID NO: 29587 - DNA, 600 bp, Chicken  19866894248570_1
aggatcattcagttgcgaggcttagtgtgcattcccagtagaggggcacagcacacgtgtctggccatgcatatggatgtggtgtgcagtgtctttgcttgcacctgcataagcacccacagcaattgtgtggaaatgaacaacacagctgaacaccctgttctccctctccagatgataaatttgttagtggttattagcacaacattactgttcattggtagttgctcctgcattcaagtgtccctagatgagatgggtctgcccccagtccataccctgtttaacacatctccatcyctgaattaggatttttccagattctgatctcctccaacttgctgcctagtatagcttgaaacttgctggtgagtcacctctgcttacctgcgcagagagaacaaagtcacacagaaaaaataacagggtcaagaatgttgtatagactgcaatgatcaggtgcagaactcaggyggacaagagttttggccccttccatggcttggttctcctaaacatgctgtaataaacaccttatagaccctcagactaagtttgctttttcttgtaaggtctgtgatactcttatttcccacccca

SEQ ID NO: 29588 - DNA, 600 bp, Chicken  19866894248570_2
atgataaatttgttagtggttattagcacaacattactgttcattggtagttgctcctgcattcaagtgtccctagatgagatgggtctgcccccagtccataccctgtttaacacatctccatcyctgaattaggatttttccagattctgatctcctccaacttgctgcctagtatagcttgaaacttgctggtgagtcacctctgcttacctgcgcagagagaacaaagtcacacagaaaaaataacagggtcaagaatgttgtatagactgcaatgatcaggtgcagaactcaggyggacaagagttttggccccttccatggcttggttctcctaaacatgctgtaataaacaccttatagaccctcagactaagtttgctttttcttgtaaggtctgtgatactcttatttcccaccccaactctttttatcaattaggaaaagttagtttaacctttccaaggctttgagtgactcattcagttgtgttccattaataagcaacctgaaatatataatctttgttattgtttctgttatatcttgttccttaatgtctgtgaatcttggtggttgtttttttgttttgttttg

SEQ ID NO: 29589 - DNA, 600 bp, Chicken  19866894248584_1
aaatcaaatgatgaatgttacatttgtaagcatccaaaaatggtcatgccatggactgccacacacctaagtactaaaaaggcagatacagctacatggacagataatggatacatctaatgatatgagatgaaagaaatttgatacggagatgtgattcctgaattctgattactaagaatattgatcctgagcatgtagcaactcaattgtgtcatcacaacaaaataccaagttggaaggattctgtgaaacacattcattttaacatttagcattaaatgggaaattaaacatttwatttccatcctccgcttattcaaatactgtgcaccgtttcagtaatcacatgactgattgatattatttggttgctaagttcagttctccttcccacaccagtttgtgtgcatgagcttgggagtgtgtattttaaaacagttttgcacaatcaacacctgcagggaatactgctgataggtaccaactatagatttttacaaaggtgaatggaagttgaatggagcatttgcactgcctcaagcagtgcatgcttccacagcatgacacagaagaacaactgcgctgctgcactgtcat

SEQ ID NO: 29590 - DNA, 591 bp, Chicken  19866894248611_1
tcccatctgtccagatagcagagctgaggcttcaccacaaggaaacattgctcagggcttcctggccgccccggagctgctctgtgcaccaaaccaaagagcctgcaggggctgagccgtggggcaggcgctgtgcgaccacaggcagcagccactgcacagcgaaaggcttctgttcccggcaggggactcagcgctgaagcagcaggtgtagttttctatcagatgcctgctcctcggtagaatatttctcaagttgtgtttttggatgaatgtcagtttgcatgaattggtgtatcrctcgactctcaagggctccttccaatcagtccttttccctcgcgcggtagaggagactgatgttgccttatctgattggtctgtaggactagattaattcacctgtagcaaaattaatctcgttttctgagtgcccagggtaccaattgctcgtcagagggtaaagcgggcatttcaggtgcagggacttgaagcaaactgtaaatactttaatacggatagggtattttagagacgagatccaggtcaaacctaaaacctctccctatctgacgggatgctattaggaaa

SEQ ID NO: 29591 - DNA, 533 bp, Chicken  19866894248615_1
gacacaaataaccttaatcaggcctcttagttaatttctgaaattgtgcagtatcgacctctgtttgaagcaggattttcatcctatggccctttcagtaacacatacacatcttccagttagcaaagcaggctttttctaatggtgacatcttttagatcttatttacagtcctaatcacatcattgattccagtaatctttctggcactaagagccgttattaattctctcaaaggggccctgggtggggtttgtatatattttttaaacccagacaattcaaattacaccaagcaayagcaatctaagattaggggtagaagggagaagaggggaaaaaatccaccattctcagtgtttttaatgctcagacagcgaagaggccacaatgtttctcagacaaaggccaacagctgaacttcattttggtaactgaactaaacagttcggagcagcattctactccccaaaccacgttaggaaagcatatggtcaatccaaaatacagcacttgggcatttctgacttatg

SEQ ID NO: 29592 - DNA, 600 bp, Chicken  19866894248619_1
tttactgccatttcctagggaaaaccaacgatgtaggaattataaaatgcaatttggagtatagcagttcaaagtgattcttctgtaatttgctcctttacactgcctatttacccccagaattatccatactggaaaccaagagaaagcaggctctgcatgggcactgttcaatgacgatagaatcattaaggttggaagagaccactaaggtcatctagtccaaccgtcaggttttgatgccaggtttcacaaacccgaacttggggagaagtggcaagagcaagcagggaatgattwaaaaagcattcctgtggatctgagcaaagtaacagtgttgtttttccccagacaagcagaagacagttttaggagcatagagtaatttctgcttcctccagggttcctgatctggagtcaggaaccaacttttgagtgaaagggatttggagatgacagctttcacattctttctttcagtcagcttttgtttagcatgaatgccctttgcttttgggccatttggggcagtcataaaccagacaatatggcacatgggcctggagttaactaggagtttttttccagaactgccttctc

SEQ ID NO: 29593 - DNA, 600 bp, Chicken  19866894248622_1
tttggctgccaataaactacatattttcttatttactaataggagagaagtaaactctccatggtgagtaatacagatagcagcagctccagtttctcttcattcatcactatattgctttacccaagcaaaggtcagtgagtacttggtttcttttctctgttgtggagtttacattcacgagtcagtggagggtctgcaattgtatcctggcagtgtggcccaaggggctgtttctggggcctgttcacctttccctgctcttgctggagaaaagactgaggtcgtgttctggagcaygggcaggagcaggaggtggaagatttgctccctcgtggcctatgactcactttactttagacaccctcttctagactgcaaggggaaaggcttaagattgaagctgcatcctgagatgtatgtcagctggccactggtggaggagagaggatgtctttccagcagcttgtggttgctctgaagtaggttggtaggttgtgctcagataactttagtgccttttgaaggatggcattcgtaatccaggtgttggtacgtcttctaaactgcaggaaagttcaaaaccacacccagcattcg

SEQ ID NO: 29594 - DNA, 600 bp, Chicken  19866894248624_1
tgaatcaatacaaaaatttttgatgaaatggaataaggaagaaacatccctttggtgtgttctttagcccgtcttttcaatacaacagcttttctttttttccccccctctaaaaagaaataattgtttaatcccaactgtggttaacagcttcctaactgcatgcaactgtctcttgacttcctgatccccgtctggtagttaggaatccaaagggtttcttaaatcaacaggagcagctgcctccttgaagccacgcatggtgtatgtcaccgtctatggaaaggagctgcaatacarggaggagcagygctgattaatggggccagtgtcgtagctcagagtgtggttgcactactgtgtacggctgcacttacttcaatcatttatcttccagcctctgccacacacacacacatacaaacatacacacacgctgtattttttgccagtgattgagcagtcattagaaacacaggaatgcacaaggtgcagagggatctgtagctggtgatgtgcctataggggtaatgcctcctttcatcttgttctttggacaagaatgagaaacgctgacaaaatccagtccttggtctgaaa

SEQ ID NO: 29595 - DNA, 600 bp, Chicken  19866894248624_2
aaaaatttttgatgaaatggaataaggaagaaacatccctttggtgtgttctttagcccgtcttttcaatacaacagcttttctttttttccccccctctaaaaagaaataattgtttaatcccaactgtggttaacagcttcctaactgcatgcaactgtctcttgacttcctgatccccgtctggtagttaggaatccaaagggtttcttaaatcaacaggagcagctgcctccttgaagccacgcatggtgtatgtcaccgtctatggaaaggagctgcaatacarggaggagcagygctgattaatggggccagtgtcgtagctcagagtgtggttgcactactgtgtacggctgcacttacttcaatcatttatcttccagcctctgccacacacacacacatacaaacatacacacacgctgtattttttgccagtgattgagcagtcattagaaacacaggaatgcacaaggtgcagagggatctgtagctggtgatgtgcctataggggtaatgcctcctttcatcttgttctttggacaagaatgagaaacgctgacaaaatccagtccttggtctgaaatttatctctct

SEQ ID NO: 29596 - DNA, 600 bp, Chicken  19866894248631_1
aaggatgaccaggagtgctcctctgactggaatgaacttgctcgtcacttaaaacctttcttttttccttcaaatgggttggtcagtgggccacactgtacaaggacaattgttaaagaactaatccatgttataaccctgacgctactaagtagtactgacgcctgcagggcaggtgatatgaagacagttcctgtctcacaaggaagaagctactgtgaagcaagtgcttttaataaggagctggtaagaaatggtaagaaatacatttcttgagcactgtccataatcaactgttaygacacagcgatgcggatctttgcttctcgtttgatctttactggtgtgagaactgaaagagtggaattctagccattaaaaaaacaacaacaaacaaccacygagttctgagctgcattgctgttaggtcactgtttttagtatgaccttgtagtgaacacttctgccacctctatctactgcttgggataaaaattaattcagaaggcagtagaggataaattaaacaccagcwtgagctgacaacaataacagattattttaaatgactggggcatttctatgctgcgtgtaatgaag

SEQ ID NO: 29597 - DNA, 600 bp, Chicken  19866894248631_2
aggacaattgttaaagaactaatccatgttataaccctgacgctactaagtagtactgacgcctgcagggcaggtgatatgaagacagttcctgtctcacaaggaagaagctactgtgaagcaagtgcttttaataaggagctggtaagaaatggtaagaaatacatttcttgagcactgtccataatcaactgttaygacacagcgatgcggatctttgcttctcgtttgatctttactggtgtgagaactgaaagagtggaattctagccattaaaaaaacaacaacaaacaaccacygagttctgagctgcattgctgttaggtcactgtttttagtatgaccttgtagtgaacacttctgccacctctatctactgcttgggataaaaattaattcagaaggcagtagaggataaattaaacaccagcwtgagctgacaacaataacagattattttaaatgactggggcatttctatgctgcgtgtaatgaagtctggttgcttttgttggttagttacataacattcagttcttgccttcccctgccctttctgacagccctagccagctaggctatagtttgttttctttcct

SEQ ID NO: 29598 - DNA, 600 bp, Chicken  19866894248631_3
ataaggagctggtaagaaatggtaagaaatacatttcttgagcactgtccataatcaactgttaygacacagcgatgcggatctttgcttctcgtttgatctttactggtgtgagaactgaaagagtggaattctagccattaaaaaaacaacaacaaacaaccacygagttctgagctgcattgctgttaggtcactgtttttagtatgaccttgtagtgaacacttctgccacctctatctactgcttgggataaaaattaattcagaaggcagtagaggataaattaaacaccagcwtgagctgacaacaataacagattattttaaatgactggggcatttctatgctgcgtgtaatgaagtctggttgcttttgttggttagttacataacattcagttcttgccttcccctgccctttctgacagccctagccagctaggctatagtttgttttctttcctactccactcctggtaaggagaaggtgtgaacagtggaggcgtttggaaatcaaaataggtgtttttttttttcctttcctttgattgatctgaagcatatttggatttgctttgcgagcaagcacttgccacg

SEQ ID NO: 29599 - DNA, 600 bp, Chicken  19866894248639_1
tattcactcttctcttccacgtacagcataaatccaaaaaattgtggcaatgaattttacttgaacagatttattaaaatatgtagataacagctaatgtctttttggtgggaaatgactggtatatgcacgaccagatcagatcctttaatcaaacagaaaacgtcagagactgctccagctaaggattaattgtgccaacttaagtcagacaaaatatattttggcattgcttctgacagatgaaaataaaacaaacattagggatcagcttgcagctaacaatatgcaaaattaaasaatataaaaattttaaacttttatgggagtgctgattagcttttgttctaaaagctgcaaagaacagactttgctgttaatcttgttacatttccacttagcaaacagaaacaaggatccttaaaaaccctgctattcaaacaagataacagatactgaatgaatgctatgcactgcatagtgggctatacaaaaaaaaaagagagagaaaagaagacttttttattgagcagaattaaaacagtaaaaagctcaaattatctctgaggtcatgtatgactataagctgattataataaa

SEQ ID NO: 29600 - DNA, 600 bp, Chicken  19866894248639_2
actataagctgattataataaagtatcaggcctatacatttttcatttgaaggttaaattctcaattaatttttcagcgtgttgccatctccactgagcgcagttgctaattgcaataaaacaatagctttcactgtttgaatctgtgtgttgaattcaagacgctgtcagagatctaataggtttgtgagtactgaagcctagacaacaattattgcaataagtcaaaaagcaaacgtcaatctgagttttcaggtacttaaaatgctcacaggttaaacaaagcaaacttgttatctytgattatttttatcccatatttctcagactcggtgacttwgtttytttaatgtaaacaaaagacttcaacagctaacatcytgtgtgctcttcagtaacatgcacaaagaacattcaaaatgcatgtggaaatatgctaaagttgagtatctgagccgtgtatacaaataacatgcttaaaattataattcactgtaaaatgtgaattaactagcatccaactgatcaagagtatttcaggatatacttcactttgaataaatacaatatattgtgtttatagtgagtatagcccttaat

SEQ ID NO: 29601 - DNA, 600 bp, Chicken  19866894248639_3
tttcatttgaaggttaaattctcaattaatttttcagcgtgttgccatctccactgagcgcagttgctaattgcaataaaacaatagctttcactgtttgaatctgtgtgttgaattcaagacgctgtcagagatctaataggtttgtgagtactgaagcctagacaacaattattgcaataagtcaaaaagcaaacgtcaatctgagttttcaggtacttaaaatgctcacaggttaaacaaagcaaacttgttatctytgattatttttatcccatatttctcagactcggtgacttwgtttytttaatgtaaacaaaagacttcaacagctaacatcytgtgtgctcttcagtaacatgcacaaagaacattcaaaatgcatgtggaaatatgctaaagttgagtatctgagccgtgtatacaaataacatgcttaaaattataattcactgtaaaatgtgaattaactagcatccaactgatcaagagtatttcaggatatacttcactttgaataaatacaatatattgtgtttatagtgagtatagcccttaatgactatataaaagaaactggattatatgtataatctcact

SEQ ID NO: 29602 - DNA, 600 bp, Chicken  19866894248639_4
tttgaaggttaaattctcaattaatttttcagcgtgttgccatctccactgagcgcagttgctaattgcaataaaacaatagctttcactgtttgaatctgtgtgttgaattcaagacgctgtcagagatctaataggtttgtgagtactgaagcctagacaacaattattgcaataagtcaaaaagcaaacgtcaatctgagttttcaggtacttaaaatgctcacaggttaaacaaagcaaacttgttatctytgattatttttatcccatatttctcagactcggtgacttwgtttytttaatgtaaacaaaagacttcaacagctaacatcytgtgtgctcttcagtaacatgcacaaagaacattcaaaatgcatgtggaaatatgctaaagttgagtatctgagccgtgtatacaaataacatgcttaaaattataattcactgtaaaatgtgaattaactagcatccaactgatcaagagtatttcaggatatacttcactttgaataaatacaatatattgtgtttatagtgagtatagcccttaatgactatataaaagaaactggattatatgtataatctcacttggca

SEQ ID NO: 29603 - DNA, 600 bp, Chicken  19866894248639_5
ttgccatctccactgagcgcagttgctaattgcaataaaacaatagctttcactgtttgaatctgtgtgttgaattcaagacgctgtcagagatctaataggtttgtgagtactgaagcctagacaacaattattgcaataagtcaaaaagcaaacgtcaatctgagttttcaggtacttaaaatgctcacaggttaaacaaagcaaacttgttatctytgattatttttatcccatatttctcagactcggtgacttwgtttytttaatgtaaacaaaagacttcaacagctaacatcytgtgtgctcttcagtaacatgcacaaagaacattcaaaatgcatgtggaaatatgctaaagttgagtatctgagccgtgtatacaaataacatgcttaaaattataattcactgtaaaatgtgaattaactagcatccaactgatcaagagtatttcaggatatacttcactttgaataaatacaatatattgtgtttatagtgagtatagcccttaatgactatataaaagaaactggattatatgtataatctcacttggcaatccacttcctcagtgcctcaaaagaatgcttacac

SEQ ID NO: 29604 - DNA, 599 bp, Chicken  19866894248641_1
  misc_feature (1)..(58): n is any nucleotide
nnnnnnnnnnnnnnnnnnnnnnnnnnnnnnnnnnnnnnnnnnnnnnnnnnnnnnnnnnatatagtggaatactgcaatcaaagtaaaatactctctcatcacttggaagaatgcttggataatggctggagttatggatatctttttatattaatatatacaacactcctttaatttcagatattttgccattatcttgtccaacgtgattttacttcctttttccttagcagtatgccattaacatatgaattttctcatagaaataaataatagaaattaaagaaaattcctcatcaygcattttgctgtaatttacaattatcatttcaatacttagatgtttgaatcgcaacgcaggaaattgaggtattacaaatcctcccagtcaagaaaattgctaattaatagtgattctggtatatgcattttatgagttattaagagttttaaagtcatgctaaagattgcatctatccgtgatgcttccctcttcttctcattgacttttaaaaaaaggctcacagccttttttgagatattagggtatctgactgaaagtaagcactgtaaatgctgcccaagaatctccacaatac

SEQ ID NO: 29605 - DNA, 518 bp, Chicken  19866894248646_1
gccataaaaaagttgattattacaattcagaaaggaattaacactgtcttttgcctcaacttcattttttaacatagactgctcaagaaaataattctccactgatggtattagacacgctgtcatcagtgcaatgcaggtcagcatgaggggggacagatggctcacagccagctgtgtgtcactacagcattacacaaacagggaaggttacacaaacagggaaggaacgtgttacctaacttgaacccagttcccgaaagtgcagtgcataagaatgacctcgctgatcttgaccaytgcacaaagtcatgtctttctcaagtacttgggtgcctttgcctgtatgcccaccgatggggagcgtgcaggcctgacacgagggcctagtctccttagcagactgcagagtttttgaagacaagctggaaggcagtggtaatctgtgggcctttgggcctttcttcttccaggaaccagcactgagggctccaaggctcagcgcctgcagagcacca

SEQ ID NO: 29606 - DNA, 600 bp, Chicken  19866894248647_1
caccatgtgacaaagcaaataccaggagaagtaaagcaaacctcattaaaataaagtggctggatgataaggtgcatgtttaacattccttttaaaagcaatatttctttgctttgctttatcttgctaatgcccttaaaaactgcctgaaaatatgttgcagtaattgccaaagtagctggagctttttagcatctttacaatgaggtctgaaggtctctgattgtagtaaggtggatttggctgtcacaggcattccgtgcagcagatgagcacctgggccgggcctgctcttcccaytcatagctgggcctggggtgggcgctgcttccacggccccccgcaacagagggctgtgtgaggggcagccctgcaggcagcagcactgggcaatgtgggcagcaatggttgcagccccttcctttgctggagcacacccgtcttatttgctcagtatcctaaagtgagttaatgactatttttatctctattcgtatttctcacgtacgtaccaacctgtgttgatgtgcagctcgacaagccgggctgcagttgtgatgctgaaaatctcaaacctgtcacggagtgaggcaaggataa

SEQ ID NO: 29607 - DNA, 600 bp, Chicken  19866894248681_1
aatctggttgagtctacagatgctttttggcaacatgtgtacttcctatcagtcattacagagatcaagaacatttttaaaagactgaacgaagttgttatttggggtgaatttttgaccttgaatttcttccagattacagtcagactgtttgcaacttttttgtatttgacagagaacaaattaaactgaaatcagacctaagaaactatattttaacctaaataaattttagacagctgaaagagaatatttaaattaaagtacatgagtcaaacttcctgccactttcaaaaggartataataatgcacgtctgaaagtgtcaggaaagaaaacatcagcataaggtttagcaagcacaggagttcttatgttgttgttgccatttttttaataagtattaattgtaaattcatgtgtgtcttagcaagttgatttctggaaaacaaacaaacagcaataacaacaagaacaaaacaaaaaaagaacaataacargacttttcctaracagtggcttcttccagaggttggataactccaggtcatagagtgaacatgagagatggcattcacaaagtcatataatacataaaaat

SEQ ID NO: 29608 - DNA, 600 bp, Chicken  19866894248681_2
ttttaaaagactgaacgaagttgttatttggggtgaatttttgaccttgaatttcttccagattacagtcagactgtttgcaacttttttgtatttgacagagaacaaattaaactgaaatcagacctaagaaactatattttaacctaaataaattttagacagctgaaagagaatatttaaattaaagtacatgagtcaaacttcctgccactttcaaaaggartataataatgcacgtctgaaagtgtcaggaaagaaaacatcagcataaggtttagcaagcacaggagttcttargttgttgttgccatttttttaataagtattaattgtaaattcatgtgtgtcttagcaagttgatttctggaaaacaaacaaacagcaataacaacaagaacaaaacaaaaaaagaacaataacargacttttcctaracagtggcttcttccagaggttggataactccaggtcatagagtgaacatgagagatggcattcacaaagtcatataatacataaaaatgactgtggtcttaaatgtatctataatcattagcggtggccaacaattctggagggggtaaacaaggaagagat

SEQ ID NO: 29609 - DNA, 600 bp, Chicken  19866894248681_3
tttaaaagactgaacgaagttgttatttggggtgaatttttgaccttgaatttcttccagattacagtcagactgtttgcaacttttttgtatttgacagagaacaaattaaactgaaatcagacctaagaaactatattttaacctaaataaattttagacagctgaaagagaatatttaaattaaagtacatgagtcaaacttcctgccactttcaaaaggartataataatgcacgtctgaaagtgtcaggaaagaaaacatcagcataaggtttagcaagcacaggagttcttatrttgttgttgccatttttttaataagtattaattgtaaattcatgtgtgtcttagcaagttgatttctggaaaacaaacaaacagcaataacaacaagaacaaaacaaaaaaagaacaataacargacttttcctaracagtggcttcttccagaggttggataactccaggtcatagagtgaacatgagagatggcattcacaaagtcatataatacataaaaatgactgtggtcttaaatgtatctataatcattagcggtggccaacaattctggagggggtaaacaaggaagagatc

SEQ ID NO: 29610 - DNA, 600 bp, Chicken  19866894248681_4
ttaaaagactgaacgaagttgttatttggggtgaatttttgaccttgaatttcttccagattacagtcagactgtttgcaacttttttgtatttgacagagaacaaattaaactgaaatcagacctaagaaactatattttaacctaaataaattttagacagctgaaagagaatatttaaattaaagtacatgagtcaaacttcctgccactttcaaaaggartataataatgcacgtctgaaagtgtcaggaaagaaaacatcagcataaggtttagcaagcacaggagttcttatgrtgttgttgccatttttttaataagtattaattgtaaattcatgtgtgtcttagcaagttgatttctggaaaacaaacaaacagcaataacaacaagaacaaaacaaaaaaagaacaataacargacttttcctaracagtggcttcttccagaggttggataactccaggtcatagagtgaacatgagagatggcattcacaaagtcatataatacataaaaatgactgtggtcttaaatgtatctataatcattagcggtggccaacaattctggagggggtaaacaaggaagagatcc

SEQ ID NO: 29611 - DNA, 600 bp, Chicken  19866894248681_5
cctaagaaactatattttaacctaaataaattttagacagctgaaagagaatatttaaattaaagtacatgagtcaaacttcctgccactttcaaaaggartataataatgcacgtctgaaagtgtcaggaaagaaaacatcagcataaggtttagcaagcacaggagttcttatgttgttgttgccatttttttaataagtattaattgtaaattcatgtgtgtcttagcaagttgatttctggaaaacaaacaaacagcaataacaacaagaacaaaacaaaaaaagaacaataacargacttttcctaracagtggcttcttccagaggttggataactccaggtcatagagtgaacatgagagatggcattcacaaagtcatataatacataaaaatgactgtggtcttaaatgtatctataatcattagcggtggccaacaattctggagggggtaaacaaggaagagatccttcctgtcctgtacaaggatgaaaagggacaaaattgaaaatgctgatggtagtcagtgaacttcaagatactacaaatggcttctttgtttccagaaagtagagctacaaaagaacaggcat

SEQ ID NO: 29612 - DNA, 600 bp, Chicken  19866894248681_6
tattttaacctaaataaattttagacagctgaaagagaatatttaaattaaagtacatgagtcaaacttcctgccactttcaaaaggartataataatgcacgtctgaaagtgtcaggaaagaaaacatcagcataaggtttagcaagcacaggagttcttatgttgttgttgccatttttttaataagtattaattgtaaattcatgtgtgtcttagcaagttgatttctggaaaacaaacaaacagcaataacaacaagaacaaaacaaaaaaagaacaataacargacttttcctaracagtggcttcttccagaggttggataactccaggtcatagagtgaacatgagagatggcattcacaaagtcatataatacataaaaatgactgtggtcttaaatgtatctataatcattagcggtggccaacaattctggagggggtaaacaaggaagagatccttcctgtcctgtacaaggatgaaaagggacaaaattgaaaatgctgatggtagtcagtgaacttcaagatactacaaatggcttctttgtttccagaaagtagagctacaaaagaacaggcatctttggagcatt

SEQ ID NO: 29613 - DNA, 552 bp, Chicken  19866894248683_1
gctagccaggaacttcctgagtagtacagttgcaagagaagaattcacactaatgaatgctaaaatttcattcacagaattttagaagtgattgaagaaaggaaattttgttggtttttttttttttttccccacaagcactgaagctgcttcataattgatgctcatggatttgtttagttttattgttcttgtacactttctcttatctaactggaaaaaaggtaggaaccagacctgtgtgtttcaaggctttgtgtgtacaatttacatcaaatagcttaagatttaacatcctcrtttttttttttttttttttttttgggggggtgtgtgtgtgtataatgtaaaaatgtatattaattaaaattaaattatggtctccagataaagataacatttccaggcattggggtaaatttttatcttcctctcttctattgcaagaattctacttcagttttaatgacatgctaaatctggcatttctggaacggataggtccaagtgcaatatcaaaattcaacgatggctgttcatgttgggtctttt

SEQ ID NO: 29614 - DNA, 600 bp, Chicken  19866894248707_1
tgctggcgctggtgcctgcccaaggctacgctgccatggctcagcctcaaagcccagctccttcctgcagcgcctcaccctgcgggctcatctcgcctccagacacagcccagagctactgctgacactgcatcctgaagccaagagcttgtgtgtccctaaggcacaacgatccccctacccagcaaggggatgagcgccaaccccaaagagaactcagtgcaaattccacacccaggctgatcttgtcactgtttcggcccctctgcgtctgtctgggctgtggaggagcagcatgarggccccggctgcagctggaaggctgcagctgctgtacctgactcagccagggcataaacctcagcggccgccctcgagacgcagtcaatcaccaacggcaccaccacacccggcggcagcttctccatcaggaagcgatgtgcctcctccaagtgctgctccgactccgagtccagcgtcagcttcacacggtaataattgttggcccagtccggataggagcccaaactcacacggccctggaagctggcattggcctgatccagcacgggagcaatctgcacctcatcagctgccaca

SEQ ID NO: 29615 - DNA, 600 bp, Chicken  19866894248709_1
gcacccgaaatacattagaaatgtcttaatgctgagatttttggccacaaaagcaggaagaacacaaatactcttccttcctgctgtcttcttcctgagctttcctatgacaaagcaccacttttcccacgcgttctttccttttctcctcactgcctcccccccccccagatcccttcccttcttttggatgctgcccattctgattcaggcatggcagggggggcattttcttcaacatcctcctctcttgtctatcatcagcccagacacggctctggacacacagcaggctccatyagctgttggtagcacagctccagggctcagcgtgcatcgatgctggggaggtgagcactgctaccrctgctgggaattttgctcagaatttcccttgtttaaacagaactgggctgtgctgtcaccagattcctttataaccacagcgtaatgaaacaatgagcttttcctctgccttttctgattacaatgtggtatcctcctgaccaaggcacttatggaagactttgaggcattctgagccctgggcagttcacccctgccatttcttcaaggtgtgctctctgcctttgggcaatg

SEQ ID NO: 29616 - DNA, 600 bp, Chicken  19866894248709_2
aatactcttccttcctgctgtcttcttcctgagctttcctatgacaaagcaccacttttcccacgcgttctttccttttctcctcactgcctcccccccccccagatcccttcccttcttttggatgctgcccattctgattcaggcatggcagggggggcattttcttcaacatcctcctctcttgtctatcatcagcccagacacggctctggacacacagcaggctccatyagctgttggtagcacagctccagggctcagcgtgcatcgatgctggggaggtgagcactgctaccrctgctgggaattttgctcagaatttcccttgtttaaacagaactgggctgtgctgtcaccagattcctttataaccacagcgtaatgaaacaatgagcttttcctctgccttttctgattacaatgtggtatcctcctgaccaaggcacttatggaagactttgaggcattctgagccctgggcagttcacccctgccatttcttcaaggtgtgctctctgcctttgggcaatgatttattttgttccccaacaaacccacaggagtccggggcaagggtaggtcttacagcaaggcttt

SEQ ID NO: 29617 - DNA, 600 bp, Chicken  19866894248716_1
cacactatattaatttgtaatgtcagcctacaacagtgaagggtgttctgggcagtgcattatttcaagcctccaagaaagtcattatagtttcaaatctctttttctctaaaaggaaatatttgcaattcccaactttccacctatttcccagatgattaacatctgcacactgcatcttggaagctgtggcacaacagaggaacaaaagcagcatctaagcaaaatgttattcctagatgcttgataacataacagcgcttaatttaaaactaagctggaaaaaacccatcatgtagrctwcccacagctagctcacasaagtttaccaagagaaggttgatgctgccttgctttgtcaatcaccttcaaagaaggcagccctatgaatawtggtgtactcatcactgaaattcaatatactgcttttcctggctcgaaaggaaccctgggacagtagcactgcacccattcaagaacctctgataagtaaatgagtttgttttcctattagtcacagataaagacagctctgcctttataacagagaagaggcattttcttcaaatgcagctatctcacaaagaaaaccaaataagc

SEQ ID NO: 29618 - DNA, 600 bp, Chicken  19866894248716_2
actatattaatttgtaatgtcagcctacaacagtgaagggtgttctgggcagtgcattatttcaagcctccaagaaagtcattatagtttcaaatctctttttctctaaaaggaaatatttgcaattcccaactttccacctatttcccagatgattaacatctgcacactgcatcttggaagctgtggcacaacagaggaacaaaagcagcatctaagcaaaatgttattcctagatgcttgataacataacagcgcttaatttaaaactaagctggaaaaaacccatcatgtagrctwcccacagctagctcacasaagtttaccaagagaaggttgatgctgccttgctttgtcaatcaccttcaaagaaggcagccctatgaatawtggtgtactcatcactgaaattcaatatactgcttttcctggctcgaaaggaaccctgggacagtagcactgcacccattcaagaacctctgataagtaaatgagtttgttttcctattagtcacagataaagacagctctgcctttataacagagaagaggcattttcttcaaatgcagctatctcacaaagaaaaccaaataagctca

SEQ ID NO: 29619 - DNA, 600 bp, Chicken  19866894248716_3
gtcagcctacaacagtgaagggtgttctgggcagtgcattatttcaagcctccaagaaagtcattatagtttcaaatctctttttctctaaaaggaaatatttgcaattcccaactttccacctatttcccagatgattaacatctgcacactgcatcttggaagctgtggcacaacagaggaacaaaagcagcatctaagcaaaatgttattcctagatgcttgataacataacagcgcttaatttaaaactaagctggaaaaaacccatcatgtagrctwcccacagctagctcacasaagtttaccaagagaaggttgatgctgccttgctttgtcaatcaccttcaaagaaggcagccctatgaatawtggtgtactcatcactgaaattcaatatactgcttttcctggctcgaaaggaaccctgggacagtagcactgcacccattcaagaacctctgataagtaaatgagtttgttttcctattagtcacagataaagacagctctgcctttataacagagaagaggcattttcttcaaatgcagctatctcacaaagaaaaccaaataagctcaaggctttaaggaagcctt

SEQ ID NO: 29620 - DNA, 600 bp, Chicken  19866894248716_4
caaatctctttttctctaaaaggaaatatttgcaattcccaactttccacctatttcccagatgattaacatctgcacactgcatcttggaagctgtggcacaacagaggaacaaaagcagcatctaagcaaaatgttattcctagatgcttgataacataacagcgcttaatttaaaactaagctggaaaaaacccatcatgtagrctwcccacagctagctcacasaagtttaccaagagaaggttgatgctgccttgctttgtcaatcaccttcaaagaaggcagccctatgaatawtggtgtactcatcactgaaattcaatatactgcttttcctggctcgaaaggaaccctgggacagtagcactgcacccattcaagaacctctgataagtaaatgagtttgttttcctattagtcacagataaagacagctctgcctttataacagagaagaggcattttcttcaaatgcagctatctcacaaagaaaaccaaataagctcaaggctttaaggaagcctttttaatgtggagtaaaggagggaagtaccatcaaaatggcactcttgtcataccagtatgcttagtatttct

SEQ ID NO: 29621 - DNA, 600 bp, Chicken  19866894248716_5
ctgttcctatcactaggacttacacaatgcttatgcccccctccctccccctaagcctgttctttgtcagcagacatgtaaattgaccagtacacacaaaggacagtactctcccttttactcgttctgctcctgagcattacccacagattattccttttaacacatacgtaccttcctcttgtgtctatcagggaggaaacacaaaagcacggaaataatttgggaatcagagcacaaaggaattctgttccttccaagaagacagccctgaaagccagatcagcatcctttggcatwacttgttaagttcagcatatttggcatttccatcctctcttcagtagttcagcgcagcacgagcgagccttactttttcctccatcatcttcccctcaaggataagagatcgtagctccaccgtccattcagagacgcacccccctctagctattaattcagctcaattcctcgcagtcactgactcagccatgcgtagtgcgatcctgacgtctgacctcgccgcctcctgccagcccaactcatactcgccgtcccgcatccccggggcggccattgggcgatgcgagtgacaggcag

SEQ ID NO: 29622 - DNA, 600 bp, Chicken  19866894248731_1
cttcagtgtaacagtagtacagctggactctaatggattgcagctacattaccctactaggggtctttacaaggagagtctacaacactgatcaatttaacagtattagtttcatcttatcctgatttttctctcatgtatatgccttcaaacatacaaagctgctgccaaccagtacagtacttcttgcaatagagtatttatagacttataaaatgcatcagacattaagacaggtgtgttatactgataaatatgttgaccaaaattaaagtgacaacagtaatacacatgaaagaraagctacttgctgggttggaaaaatagctagaaaagcaaggggaattgctgtggcagagagatggcataaggccaactgtctctggataatacaattctggatacttgcagactaagtatgtacacgagtgacacaaacctccttcctctctccagccacaagacttgggaaacatgagcaacaaacacacccttctcaccaaaatgtggtccaatcaaactgatattttattttggaaaggagagtggatggaagaatcttttgcggtccacacaaaccattcctttaggtattctaca

SEQ ID NO: 29623 - DNA, 600 bp, Chicken  19866894248732_1
tattcacacgatgcatgtatccccaggtagcctgcagtctggaaagacgtctgtcaaaattacaatggaaaaaaaaaaacagcagagaatgtaaagttattcttgttgaaagcatcttatcaagacagttctttaaaatgagttttccttgattgctcttcacgtgaaataatttatcttgagatttttatgcacagaaccaaattctagtgtaattatttccgtatgaaaccactggaatgaatatgattgcacacatgtaacttaaatcaaaatttgcctccatgtttttggtttagractaagggaaataagggcaattcagctgacataggagrtyttatgcacaatctgaatctgctctgtgttgcttgtcttcagtccccttgcaaaacrattctgaaaccctattcatttacaacagcagctaataagtacactggaatccttaaggcttgatcataggagcccataggacatttctttgcccttccaaccacatgcacaatgagtacagtcctaatatgaaggcaggaagwtgaacagcttctcaagatgcagcagatactgagtaatcctggtgtcttccagtggagcaac

SEQ ID NO: 29624 - DNA, 600 bp, Chicken  19866894248732_2
ctggaaagacgtctgtcaaaattacaatggaaaaaaaaaaacagcagagaatgtaaagttattcttgttgaaagcatcttatcaagacagttctttaaaatgagttttccttgattgctcttcacgtgaaataatttatcttgagatttttatgcacagaaccaaattctagtgtaattatttccgtatgaaaccactggaatgaatatgattgcacacatgtaacttaaatcaaaatttgcctccatgtttttggtttagractaagggaaataagggcaattcagctgacataggagrtyttatgcacaatctgaatctgctctgtgttgcttgtcttcagtccccttgcaaaacrattctgaaaccctattcatttacaacagcagctaataagtacactggaatccttaaggcttgatcataggagcccataggacatttctttgcccttccaaccacatgcacaatgagtacagtcctaatatgaaggcaggaagwtgaacagcttctcaagatgcagcagatactgagtaatcctggtgtcttccagtggagcaacatcatgctatgtgattccctgtactgaccacagttata

SEQ ID NO: 29625 - DNA, 600 bp, Chicken  19866894248732_3
ggaaagacgtctgtcaaaattacaatggaaaaaaaaaaacagcagagaatgtaaagttattcttgttgaaagcatcttatcaagacagttctttaaaatgagttttccttgattgctcttcacgtgaaataatttatcttgagatttttatgcacagaaccaaattctagtgtaattatttccgtatgaaaccactggaatgaatatgattgcacacatgtaacttaaatcaaaatttgcctccatgtttttggtttagractaagggaaataagggcaattcagctgacataggagrtyttatgcacaatctgaatctgctctgtgttgcttgtcttcagtccccttgcaaaacrattctgaaaccctattcatttacaacagcagctaataagtacactggaatccttaaggcttgatcataggagcccataggacatttctttgcccttccaaccacatgcacaatgagtacagtcctaatatgaaggcaggaagwtgaacagcttctcaagatgcagcagatactgagtaatcctggtgtcttccagtggagcaacatcatgctatgtgattccctgtactgaccacagttatagg

SEQ ID NO: 29626 - DNA, 600 bp, Chicken  19866894248732_4
ttattcttgttgaaagcatcttatcaagacagttctttaaaatgagttttccttgattgctcttcacgtgaaataatttatcttgagatttttatgcacagaaccaaattctagtgtaattatttccgtatgaaaccactggaatgaatatgattgcacacatgtaacttaaatcaaaatttgcctccatgtttttggtttagractaagggaaataagggcaattcagctgacataggagrtyttatgcacaatctgaatctgctctgtgttgcttgtcttcagtccccttgcaaaacrattctgaaaccctattcatttacaacagcagctaataagtacactggaatccttaaggcttgatcataggagcccataggacatttctttgcccttccaaccacatgcacaatgagtacagtcctaatatgaaggcaggaagwtgaacagcttctcaagatgcagcagatactgagtaatcctggtgtcttccagtggagcaacatcatgctatgtgattccctgtactgaccacagttataggaggggctatagaaaaacagccttcacatccctgtggatattgagttatttttcatc

SEQ ID NO: 29627 - DNA, 600 bp, Chicken  19866894248732_5
atgaatatgattgcacacatgtaacttaaatcaaaatttgcctccatgtttttggtttagractaagggaaataagggcaattcagctgacataggagrtyttatgcacaatctgaatctgctctgtgttgcttgtcttcagtccccttgcaaaacrattctgaaaccctattcatttacaacagcagctaataagtacactggaatccttaaggcttgatcataggagcccataggacatttctttgcccttccaaccacatgcacaatgagtacagtcctaatatgaaggcaggaagwtgaacagcttctcaagatgcagcagatactgagtaatcctggtgtcttccagtggagcaacatcatgctatgtgattccctgtactgaccacagttataggaggggctatagaaaaacagccttcacatccctgtggatattgagttatttttcatcttgaaggcatctctgatagttaaagaaggttgcataaaaactaatgaagtacaattgttggatcacagtatcttcacccttcccagaggagcacaggcacataaatagagcgtggacaggagcactagctgtattgcttccat

SEQ ID NO: 29628 - DNA, 600 bp, Chicken  19866894248734_1
ttgtgcctcctgccctttcagtgggcaccactgaaaaaagcatgaccccatccacttgactcctgtgcattaaatgcttgcaggtattgataagatccactctcaatcttctccacactgaacagacccaggactcagccttttcacttaagggagaagctccaggtcccccatcatatctcccagagctccacagggctctctaggggatccctgtctttcttgaactgaggagcccagaactgaacatagtactccagatttggcctcaccacagcagagtagagggagagaatcacytccctcgacctcctggtcacgctctttctaatgcaccccaagataccattggtatctacatacctgctgtccagcaggacccccagatccttccctgcagagctcctctccagcaggtcagcccctaacctgtactgatgcatgtggttattcctccctgggtgtaggactctacacttgccactgctgaattaacatcaaaaggcagcaagaaaaaaaatcaattcacaggaaatcatctagtctctcaggcctgttagacatcaacaggtggccatacagaaagctgtggctaaagcc

SEQ ID NO: 29629 - DNA, 600 bp, Chicken  19866894248741_1
cacaaagcgtgaggcagcctgtgagcaagacgttccacagcataccttgaacagcttcagacaacatgcttggctgtgaaatcaatgcagagaaaagtcagcagattcacagccaagtgaagtcaactaaacttaagatttttttcaggaaaatttggtaggaaagagaagtgatttcctagtgaaggataatatatttaacagggctgctgacagacactattgaatttctcaggctgtgatcagcttcattaagtgaaacatatgaagtgtttgtgcagcagcctgatctttttctgsatctctggctccatctgattgcttcaaaacggtgacaagggagaaaagacaagactataaacatagtggaaagctctgagtattccacaagactttattaacagctacaactacatggttgcatactttctagatcttttacactggatcaaagatgtaaatgctcatggatagcagtttaaagaaaaaaacactttaaaatgcagctgttactttgcccataagaaacaaggcttctctggggtcaacatctgtcagctgtagaagacaagagagttcatttctgccatctcaaataca

SEQ ID NO: 29630 - DNA, 600 bp, Chicken  19866894248745_1
ttattttaattctagtccacaatttgtgtgctctgagcttttatttataccgtctgttaaagcaggaaaaccacgcatcagatgttgcatttctaccttgcttttgtatttctttgtgctttcaactttgaccctgaaagtcaaagggaagtaggacttcggtgtgctccaggtcttgggatatgtccaggtcacagttccatttgtgcttgcatactgacattgaggtgggtctggctttacttcaagagaaaatatagaaggtattaatacacattagcagcataaggtcacattggygtactgttgttgatagttttatatgaaccggctgttggaacttctattagattatgacaggagttggcatgatatataagaactgcattgtatgcttctcacagaaaattaacaaygctcctgcagcctctctgggtgagatccttctgggttttttttttgcctggagaggtgtagggggctccattagagacagatggttatcttcaccccccacagactggcagggyacttagcaaaacatgtttttgtccatctgtaagaatggatcaggagtgaggcgtacctggccttaaccag

SEQ ID NO: 29631 - DNA, 600 bp, Chicken  19866894248745_2
tgctttcaactttgaccctgaaagtcaaagggaagtaggacttcggtgtgctccaggtcttgggatatgtccaggtcacagttccatttgtgcttgcatactgacattgaggtgggtctggctttacttcaagagaaaatatagaaggtattaatacacattagcagcataaggtcacattggygtactgttgttgatagttttatatgaaccggctgttggaacttctattagattatgacaggagttggcatgatatataagaactgcattgtatgcttctcacagaaaattaacaaygctcctgcagcctctctgggtgagatccttctgggttttttttttgcctggagaggtgtagggggctccattagagacagatggttatcttcaccccccacagactggcagggyacttagcaaaacatgtttttgtccatctgtaagaatggatcaggagtgaggcgtacctggccttaaccaggccaaataactgagtcaatctgcagttctcaaagaatagcctgctgggttattggctattctctgactttccccacatgccccttccaaaacacatctatgtaagagagaaggtta

SEQ ID NO: 29632 - DNA, 600 bp, Chicken  19866894248745_3
ggtctggctttacttcaagagaaaatatagaaggtattaatacacattagcagcataaggtcacattggygtactgttgttgatagttttatatgaaccggctgttggaacttctattagattatgacaggagttggcatgatatataagaactgcattgtatgcttctcacagaaaattaacaaygctcctgcagcctctctgggtgagatccttctgggttttttttttgcctggagaggtgtagggggctccattagagacagatggttatcttcaccccccacagactggcagggyacttagcaaaacatgtttttgtccatctgtaagaatggatcaggagtgaggcgtacctggccttaaccaggccaaataactgagtcaatctgcagttctcaaagaatagcctgctgggttattggctattctctgactttccccacatgccccttccaaaacacatctatgtaagagagaaggttacagaaatttctggcagatgtgggagagacaggcttggtggtcacaagctatggatacattgcttcttcacttcctcatcctcttccagactgctgctatgatttgtttccccct

SEQ ID NO: 29633 - DNA, 600 bp, Chicken  19866894248746_1
tgtggattggctcagggacatccagtctttagacagactcaccaattgcctagtgctcagcagaaactatcagttaattatcagtttgctggttagccatctatttattttattagtaattattgcgacagagttctggaagtagcaagcatatgttgtccaaagtctaaatgagtcgttgtctttttttattatttaatgcttcacagcttcttatgcctcttctaccaagttcattattaactaattattagctgctttgaaacagcaccttcccttcgagatggcaataaaaagatmcaataaataagaagtaaccagcagagcccctctgcttatctcggcatcagcttatccttattatcaaaggagtctacaccctcctagaggacacayacaaatgatcttctttaacgacagtaatctgcttccacaggtgggatgataaaagttaagtcaggtggctgttaagtcttacctttaaccctttttgtgtcagtctgaagaggatgttcctctgtccttcctttaagaaactgtagcttctttcattacccraaaaggacgtaagctaaaattggaataaaaggaaggcccagg

SEQ ID NO: 29634 - DNA, 600 bp, Chicken  19866894248746_2
ccatctatttattttattagtaattattgcgacagagttctggaagtagcaagcatatgttgtccaaagtctaaatgagtcgttgtctttttttattatttaatgcttcacagcttcttatgcctcttctaccaagttcattattaactaattattagctgctttgaaacagcaccttcccttcgagatggcaataaaaagatmcaataaataagaagtaaccagcagagcccctctgcttatctcggcatcagcttatccttattatcaaaggagtctacaccctcctagaggacacayacaaatgatcttctttaacgacagtaatctgcttccacaggtgggatgataaaagttaagtcaggtggctgttaagtcttacctttaaccctttttgtgtcagtctgaagaggatgttcctctgtccttcctttaagaaactgtagcttctttcattacccraaaaggacgtaagctaaaattggaataaaaggaaggcccaggttaaaaaactttcaaagctgtactgatcagaagtctcggtttttgctttgagaaggtgggatccctttatgagcatctcaagtagggaagctgaca

SEQ ID NO: 29635 - DNA, 600 bp, Chicken  19866894248746_3
tttgaaacagcaccttcccttcgagatggcaataaaaagatmcaataaataagaagtaaccagcagagcccctctgcttatctcggcatcagcttatccttattatcaaaggagtctacaccctcctagaggacacayacaaatgatcttctttaacgacagtaatctgcttccacaggtgggatgataaaagttaagtcaggtggctgttaagtcttacctttaaccctttttgtgtcagtctgaagaggatgttcctctgtccttcctttaagaaactgtagcttctttcattacccraaaaggacgtaagctaaaattggaataaaaggaaggcccaggttaaaaaactttcaaagctgtactgatcagaagtctcggtttttgctttgagaaggtgggatccctttatgagcatctcaagtagggaagctgacaagagacgtacccggagccaattgccatcattaagaatttgagctagaaaaaattgttattgtctgcaaaatttatctatgcttctgtgttggaaatgccctcataaactattccattccaattgtaataaaacatctattaccgcagtgtttaaggctcatt

SEQ ID NO: 29636 - DNA, 600 bp, Chicken  19866894248748_1
caggcaacacctcacctcacaagaagcctcatggtatactaaacttacacaaatatttgaacaaacacaagtcatgaccatgattttacattggatcagagtttgttctattactgaggtgtttttaatccagaataaagaattttcaaatgggaagtattgtactgttgaatgacagcctgaatatgttaccttcttcctgctgctgctttagtgactgcacacccaggtaaagcagattatcataaccccaaatctttgagaactatgtccctaatgaaggtagaaatggctaaaatyttcttcttgtactcagaacttacattttaccatgtttctacaaatacattgtacgtatttggttaggtggacagtcaccctgatctcctcatttagttctcctggctgcatttttttatgcttatccagtatttataagttcgtcctcatttatctttaattaggttgaaatgaatatatgaggaaaagtaggtaaggataagttgtttcacagatgatgctgggataaatctatccttacaatgaattgtttaggagtcttgttatttgaaataatatttaataaatttgaccatagaa

SEQ ID NO: 29637 - DNA, 600 bp, Chicken  19866894248757_1
ttctgtaacaccagagacttggtgctttccagtattcaatcacattatcccctctacagggaatggggctgagccagtggggtacaggggaggcagggttgctgcacagctccagcaagcttctaggagagatatgggccccaccaggacatcattgccagcagtggactcctagtccctctgtaccagccttcagcccttgggatctggtgcgatgagcatccctggacaggaacaacccaaaacgttcactgtccattaaaggagatttcaccttgcttgatatgaggacaggctgasatagctgaggttggtaagcctggagaagagaaggctctaaggagacctaatagcaacctttcagtatctgaaggggggctgtaaaaaaaaaagggggacgggctctccagcagggtctgttgtgataggacaagtagaaattatttcaaactaaaagaggggagatttagattggataaagaaaacaatattttatgataaggctagtgaagcactggcaccggttgctcagagaggtggtggatgccctgcccctttagacacacaatgtcaggttagacaggctctgagcacctgttg

SEQ ID NO: 29638 - DNA, 489 bp, Chicken  19866894248757_2
gaaggctctaaggagacctaatagcaacctttcagtatctgaaggggggctgtaaaaaaaaaagggggacgggctctccagcagggtctgttgtgataggacaagtagaaattatttcaaactaaaagaggggagatttagattggataaagaaaacaatattttatgataaggctagtgaagcactggcaccggttgctcagagaggtggtggatgccctgcccctttagacacacaatgtcaggttagacaggctctgagcacctgttggaactgtaggtgtctctgttcattgcagrggaattggactaaatgaccttcaaagatctcttccaactcaagatattctatgattctctggttataaccgctaactgctgctggatttccgggagcaattacaacaagaattctatgtttctttatgataatagaagcagtcagcaatctggaacacagaccttctcttcttgcacttctttaccttg

SEQ ID NO: 29639 - DNA, 599 bp, Chicken  19866894248761_1
  misc_feature (1)..(23): n is any nucleotide
nnnnnnnnnnnnnnnnnnnnnnnttaggatttatcgaagttaaagttattagaaatgaagacagaccgtccgtccatcgttattcttcttaccaaagtgttaacgtctcacagtcaataagcacctcacccgcacaggtcacacacatttctccttgaccactcccactcttttactgcacttcatacttgttctgtgtcctaacagtccacttggaccccaaattctacgacaacgtcatctccctgcataacacatttggggtctcttcagcctctgctcccaacaccacaggcactstcccayccccagacctgccttgacatgtcttttgccactcacctctagtcctggccctgcacatcaaatcccacatcttggaagtatttgaatgtttctgcctaaatcagttaacccagcacagctacgtggcagcagctctctttcactgcccacacgctttgctagccrttttaattcagactggaaacgtctgcctttctaaggatataattatatttgtttagtcccracatgaaaacaccctgcggatcatcagagcaaaagcagttcttcatgcattgaggtaggacrtactc

SEQ ID NO: 29640 - DNA, 600 bp, Chicken  19866894248761_10
ttcctggaagcacaaagaaaatactgaaagctcttatgtgcatgtttccatccccagctcttgacaactttacatgcagcagcttgtaaacacttgaaaataggaaggaatggagatcagttcccaccatagaaagcttttaaggactaggaatacattttaaggcaaggcagaaatgctgccaatgacaaaacagatttatgatacctttgctaggaaataaataggactacacaaagtctgtctggcaaaatactacagatatttgtaatgtaacggcaaaaatacatcttgcaagcrcagtaattccacatgatctatcagaattgagtatttattcattcttaaatactaaattaataacagaygtactagcatacctagcagtacactctgcaggtgacgcgcagtgtgattttctgtgacttcctgggttaaagattctaaactccagagtcaaaacaaagctttccagccactgcctcaagcagatttagtgaccaccagctcctatagcacagcaggggcacrgkcagagaccaaacgttgttttcccctgttgagaactggcacaggagatagcacacacacaccataaaa

SEQ ID NO: 29641 - DNA, 600 bp, Chicken  19866894248761_11
tttacatgcagcagcttgtaaacacttgaaaataggaaggaatggagatcagttcccaccatagaaagcttttaaggactaggaatacattttaaggcaaggcagaaatgctgccaatgacaaaacagatttatgatacctttgctaggaaataaataggactacacaaagtctgtctggcaaaatactacagatatttgtaatgtaacggcaaaaatacatcttgcaagcrcagtaattccacatgatctatcagaattgagtatttattcattcttaaatactaaattaataacagaygtactagcatacctagcagtacactctgcaggtgacgcgcagtgtgattttctgtgacttcctgggttaaagattctaaactccagagtcaaaacaaagctttccagccactgcctcaagcagatttagtgaccaccagctcctatagcacagcaggggcacrgkcagagaccaaacgttgttttcccctgttgagaactggcacaggagatagcacacacacaccataaaacaggaattgaaatgtctgcatattgtcgctagtcactgcactacatgaatcaacactcagatccttca

SEQ ID NO: 29642 - DNA, 600 bp, Chicken  19866894248761_12
acacaaagtctgtctggcaaaatactacagatatttgtaatgtaacggcaaaaatacatcttgcaagcrcagtaattccacatgatctatcagaattgagtatttattcattcttaaatactaaattaataacagaygtactagcatacctagcagtacactctgcaggtgacgcgcagtgtgattttctgtgacttcctgggttaaagattctaaactccagagtcaaaacaaagctttccagccactgcctcaagcagatttagtgaccaccagctcctatagcacagcaggggcacrgkcagagaccaaacgttgttttcccctgttgagaactggcacaggagatagcacacacacaccataaaacaggaattgaaatgtctgcatattgtcgctagtcactgcactacatgaatcaacactcagatccttcatccatctcacaaacaagaatattacctgttaaaggctaattgctttgcagagagtttctctggttctacagcgtgagccatataaacaaaacgcccttaccgaattttcaggcagatgttcagggactggatgggaatcctgctcctccttccccagcactct

SEQ ID NO: 29643 - DNA, 600 bp, Chicken  19866894248761_13
acaaagtctgtctggcaaaatactacagatatttgtaatgtaacggcaaaaatacatcttgcaagcrcagtaattccacatgatctatcagaattgagtatttattcattcttaaatactaaattaataacagaygtactagcatacctagcagtacactctgcaggtgacgcgcagtgtgattttctgtgacttcctgggttaaagattctaaactccagagtcaaaacaaagctttccagccactgcctcaagcagatttagtgaccaccagctcctatagcacagcaggggcacrgkcagagaccaaacgttgttttcccctgttgagaactggcacaggagatagcacacacacaccataaaacaggaattgaaatgtctgcatattgtcgctagtcactgcactacatgaatcaacactcagatccttcatccatctcacaaacaagaatattacctgttaaaggctaattgctttgcagagagtttctctggttctacagcgtgagccatataaacaaaacgcccttaccgaattttcaggcagatgttcagggactggatgggaatcctgctcctccttccccagcactctgt

SEQ ID NO: 29644 - DNA, 600 bp, Chicken  19866894248761_14
cagcactctgtacactgagcgcttggtctgtgtccgccgtagtaatctctctttgtccatcaaaatatgatcaatctgagtcaagattgaacgctcaaaggcaccgaaaccctgcaacaacattaactagtgtcagataatgcagaaagcttttcctcaaggcagcaatgttcctctatctttccatgtcagtggataagcagacagcattccaagaggagggggctcaggttttgttgcacagattttttgctatttctgttattttttttatttctccctctccttcccttcccaacmtgaggcacggcttaataataaaatgcctttgttgctctggttcagatgaacttcccaatgattaatattacactcacagatgctatgagaccctgaatcttaggggcacatgattacccgtagtattaaagtatacactctgtaaaggaggaagggcatagaaacccctaattgtgttgtaaaacacaaactacttgttgatcaagcacgacttggcttagtttggaatatccatgacaggagacttccaaatcaactgctgctccacacatctctaccaattccgtggcagcacacaca

SEQ ID NO: 29645 - DNA, 599 bp, Chicken  19866894248761_2
  misc_feature (1)..(17): n is any nucleotide
nnnnnnnnnnnnnnnnnttaggatttatcgaagttaaagttattagaaatgaagacagaccgtccgtccatcgttattcttcttaccaaagtgttaacgtctcacagtcaataagcacctcacccgcacaggtcacacacatttctccttgaccactcccactcttttactgcacttcatacttgttctgtgtcctaacagtccacttggaccccaaattctacgacaacgtcatctccctgcataacacatttggggtctcttcagcctctgctcccaacaccacaggcactstcccayccccagacctgccttgacatgtcttttgccactcacctctagtcctggccctgcacatcaaatcccacatcttggaagtatttgaatgtttctgcctaaatcagttaacccagcacagctacgtggcagcagctctctttcactgcccacacgctttgctagccrttttaattcagactggaaacgtctgcctttctaaggatataattatatttgtttagtcccracatgaaaacaccctgcggatcatcagagcaaaagcagttcttcatgcattgaggtaggacrtactcctcaac

SEQ ID NO: 29646 - DNA, 600 bp, Chicken  19866894248761_3
tttactgcacttcatacttgttctgtgtcctaacagtccacttggaccccaaattctacgacaacgtcatctccctgcataacacatttggggtctcttcagcctctgctcccaacaccacaggcactstcccayccccagacctgccttgacatgtcttttgccactcacctctagtcctggccctgcacatcaaatcccacatcttggaagtatttgaatgtttctgcctaaatcagttaacccagcacagctacgtggcagcagctctctttcactgcccacacgctttgctagccrttttaattcagactggaaacgtctgcctttctaaggatataattatatttgtttagtcccracatgaaaacaccctgcggatcatcagagcaaaagcagttcttcatgcattgaggtaggacrtactcctcaacacatggcaattccagtattttatgaagctggcactgccatttattaaatacattacaagcacgaggttttcctaagcttcagcctcccgcacttagcacagatacctcatttctaagaattctgcaaatgaaaygaagagctggcccaaacccaacctggcacgac

SEQ ID NO: 29647 - DNA, 600 bp, Chicken  19866894248761_4
caacgtcatctccctgcataacacatttggggtctcttcagcctctgctcccaacaccacaggcactstcccayccccagacctgccttgacatgtcttttgccactcacctctagtcctggccctgcacatcaaatcccacatcttggaagtatttgaatgtttctgcctaaatcagttaacccagcacagctacgtggcagcagctctctttcactgcccacacgctttgctagccrttttaattcagactggaaacgtctgcctttctaaggatataattatatttgtttagtcccracatgaaaacaccctgcggatcatcagagcaaaagcagttcttcatgcattgaggtaggacrtactcctcaacacatggcaattccagtattttatgaagctggcactgccatttattaaatacattacaagcacgaggttttcctaagcttcagcctcccgcacttagcacagatacctcatttctaagaattctgcaaatgaaaygaagagctggcccaaacccaacctggcacgactccaaggaacgcrcgacagtacagctctgcacttcyttcattcattctaagtagatgagtt

SEQ ID NO: 29648 - DNA, 600 bp, Chicken  19866894248761_5
gcactstcccayccccagacctgccttgacatgtcttttgccactcacctctagtcctggccctgcacatcaaatcccacatcttggaagtatttgaatgtttctgcctaaatcagttaacccagcacagctacgtggcagcagctctctttcactgcccacacgctttgctagccrttttaattcagactggaaacgtctgcctttctaaggatataattatatttgtttagtcccracatgaaaacaccctgcggatcatcagagcaaaagcagttcttcatgcattgaggtaggacrtactcctcaacacatggcaattccagtattttatgaagctggcactgccatttattaaatacattacaagcacgaggttttcctaagcttcagcctcccgcacttagcacagatacctcatttctaagaattctgcaaatgaaaygaagagctggcccaaacccaacctggcacgactccaaggaacgcrcgacagtacagctctgcacttcyttcattcattctaagtagatgagttcaggtgagatgaaagtaacttcggtgcttttaaggatctactggaatcatttttcataactg

SEQ ID NO: 29649 - DNA, 600 bp, Chicken  19866894248761_6
tctctttcactgcccacacgctttgctagccrttttaattcagactggaaacgtctgcctttctaaggatataattatatttgtttagtcccracatgaaaacaccctgcggatcatcagagcaaaagcagttcttcatgcattgaggtaggacrtactcctcaacacatggcaattccagtattttatgaagctggcactgccatttattaaatacattacaagcacgaggttttcctaagcttcagcctcccgcacttagcacagatacctcatttctaagaattctgcaaatgaaaygaagagctggcccaaacccaacctggcacgactccaaggaacgcrcgacagtacagctctgcacttcyttcattcattctaagtagatgagttcaggtgagatgaaagtaacttcggtgcttttaaggatctactggaatcatttttcataactgcgctctaccaacaacaacaacaagaagtcaccgttggataattcagtaatttttctctattgtgtagcaatgttcaccagcgagaatcacagatggagatctaatgctggagccctgattctccaacacagcagcaccaggaatg

SEQ ID NO: 29650 - DNA, 600 bp, Chicken  19866894248761_7
tggaaacgtctgcctttctaaggatataattatatttgtttagtcccracatgaaaacaccctgcggatcatcagagcaaaagcagttcttcatgcattgaggtaggacrtactcctcaacacatggcaattccagtattttatgaagctggcactgccatttattaaatacattacaagcacgaggttttcctaagcttcagcctcccgcacttagcacagatacctcatttctaagaattctgcaaatgaaaygaagagctggcccaaacccaacctggcacgactccaaggaacgcrcgacagtacagctctgcacttcyttcattcattctaagtagatgagttcaggtgagatgaaagtaacttcggtgcttttaaggatctactggaatcatttttcataactgcgctctaccaacaacaacaacaagaagtcaccgttggataattcagtaatttttctctattgtgtagcaatgttcaccagcgagaatcacagatggagatctaatgctggagccctgattctccaacacagcagcaccaggaatggcagtaagttaataatcacagcacaggcttgagctcacacagccc

SEQ ID NO: 29651 - DNA, 600 bp, Chicken  19866894248761_8
atataattatatttgtttagtcccracatgaaaacaccctgcggatcatcagagcaaaagcagttcttcatgcattgaggtaggacrtactcctcaacacatggcaattccagtattttatgaagctggcactgccatttattaaatacattacaagcacgaggttttcctaagcttcagcctcccgcacttagcacagatacctcatttctaagaattctgcaaatgaaaygaagagctggcccaaacccaacctggcacgactccaaggaacgcrcgacagtacagctctgcacttcyttcattcattctaagtagatgagttcaggtgagatgaaagtaacttcggtgcttttaaggatctactggaatcatttttcataactgcgctctaccaacaacaacaacaagaagtcaccgttggataattcagtaatttttctctattgtgtagcaatgttcaccagcgagaatcacagatggagatctaatgctggagccctgattctccaacacagcagcaccaggaatggcagtaagttaataatcacagcacaggcttgagctcacacagccctgtatggaaagctgagtgtgaaa

SEQ ID NO: 29652 - DNA, 600 bp, Chicken  19866894248761_9
gctctaccaacaacaacaacaagaagtcaccgttggataattcagtaatttttctctattgtgtagcaatgttcaccagcgagaatcacagatggagatctaatgctggagccctgattctccaacacagcagcaccaggaatggcagtaagttaataatcacagcacaggcttgagctcacacagccctgtatggaaagctgagtgtgaaaatcccctgaacaatctacagaggctccagatgctaagagacgactcacgttcactgatcaggcagattcagaacacagagtcagccgygttagcttggtgagtattcaaaaataagcaaagtcacaatgccaacacagattggcagacacttacctggtgataaaagtcatcatcatcaaatatttcctcatctatgtccttcaggtgcctgttggaatctgcctgagggaggacttcctggaagcacaaagaaaatactgaaagctcttatgtgcatgtttccatccccagctcttgacaactttacatgcagcagcttgtaaacacttgaaaataggaaggaatggagatcagttcccaccatagaaagcttttaaggactaggaa

SEQ ID NO: 29653 - DNA, 600 bp, Chicken  19866894248767_1
tgagggagtcaggaaagtttgaaagattcatactgcccttggataaacttaatgaccacagggtggattgtggcctttgaaagggcaaaacccagtgctctttccagcctagataaccccatgtcagaggtggatagtgctgggtgtcccgcaggctgtaatcctcacgaggccaatcacaagttgcttcccatgacacttacattctgcctgatgacagagcacacatcccagtgtgtttttgaaggttttaaggtattattcagtctggatgaatgattaccttttgctttctcatcrgagaatatttatgattgttgaagcaaggctgagttcctggagacaggataacgcgtggctttgtgctgccagacagagagttccttttggtggtcacaccaatgttttttcatactcccacggacaccgcagcttctttggataaggaagaagatgatggaacacagatgaggggaagaaatggcctcagagaacttggatacgtgggggtatttttaccctttggggttttttcttcctgaatttcaatgagtaacttattggaaacttctttgggtttgaagtgttttgttcttgttc

SEQ ID NO: 29654 - DNA, 600 bp, Chicken  19866894248770_1
ttattcctccaacttttaaaacattaattacaattatattctgaatgtgtcactcctgttaggattgatctgtgcttgcactgtactcgttagctattttagttttgtaacttgaagataaggcactggtcatttaatttctttgctatataatcaaacatataaaggcttatctggagctcctgctaattggtccctgttaatttgtataaaggcacatttgataacagagaataaaggcaagagagaataatttgaagctgtgatttgaacactcctgtactagctgagtcctcacartacttgctatgtgcatggaagtggaatcagttctataaagagtggaaccaaagatttcatcccttcagaaaatagtacagtgaatatacacttaactccacacactattctgcatttgaatactaaaagtactgtagtcttatgacaggcagagccttcctataagcacagagtattcattttgtctcatagcaatacatctctcatggcaatataaaggatttaggatcagaacattaacttaaaacttatttgtatgtttgaaatgtacctatactgaaaagcagtgacagagatttt

SEQ ID NO: 29655 - DNA, 599 bp, Chicken  19866894248772_1
  misc_feature (1)..(22): n is any nucleotide
nnnnnnnnnnnnnnnnnnnnnncgaagaatctattgcaattgttacactggaatttagttagcagagctacaaaaacgcaagtccaaatcccaagtagctagtggagatttctgaacagttctgtacaccttcacgcagacaatccagtggagctaacaacctactgtagcactcttttgtgataggcaaataccattcatttccattttccacagaagaactgcactccacagagcttcagcaatgtaaacaaggccaggtacagcattacagctgtggttcaggcaacaacattcctygtcctctgacacaacacttacacatcatacttgtaacactacctagttcaagttggtggtcaataccacctaattagcagagtaaaagtgcaattttgaaaccaacttacaaaactgctacaaccaacctacaaaactccatcataccaaagaaaaattatggctctaaatttcacaatcactctctrccaaccaaaaactcacctttaagaagagtcagggctgaaagctgaaagttgaggcagtcatctctcaacgtgtagaactcctcacgttgctatgaaggtacagcacggttg

SEQ ID NO: 29656 - DNA, 534 bp, Chicken  19866894248772_2
aaataccattcatttccattttccacagaagaactgcactccacagagcttcagcaatgtaaacaaggccaggtacagcattacagctgtggttcaggcaacaacattcctygtcctctgacacaacacttacacatcatacttgtaacactacctagttcaagttggtggtcaataccacctaattagcagagtaaaagtgcaattttgaaaccaacttacaaaactgctacaaccaacctacaaaactccatcataccaaagaaaaattatggctctaaatttcacaatcactctctrccaaccaaaaactcacctttaagaagagtcagggctgaaagctgaaagttgaggcagtcatctctcaacgtgtagaactcctcacgttgctatgaaggtacagcacggttgttcagtgtttggataaagtactgcatgggaactgttgaatcacagcctgaaccaccaattgatcacctgaggcaaggactgaatcagctgtgggagcacaggtgaaagcaattcagctatgtg

SEQ ID NO: 29657 - DNA, 599 bp, Chicken  19866894248774_1
  misc_feature (1)..(42): n is any nucleotide
nnnnnnnnnnnnnnnnnnnnnnnnnnnnnnnnnnnnnnnnnncatagtctggacctggtggcttattcgtataaataaatcagaaggatctggcagagcacacagggtcctttgagtgtttctatatagcctgtctgagcagcaagcccttaaccacacactcaaacaacctctgggagcactcagtcaatttgggcaactaacaacctgtcctaaaactgagccttcaagcatttgccattcaaaaaaggctgctagccaactacgccaagagttcatggaaattctcctacttataaracgccatctttagaacaccttttctttattttcagttgttaagtagacaaagtgttttttggttttttttgtttttttttccttgcttgtagggactttaatcgggcaagttttatggggctatttcaagagaaggcatttaattaattccagaccttcctcctgccctgcttttgttcatctacatacctgtctgtaacaactgaggtaaaaatcctaygagacttctaagaagcttggttcatctttcattagatcacagcagaactgaaccatattctctcactgctagacatttt

SEQ ID NO: 29658 - DNA, 600 bp, Chicken  19866894248774_2
gagccttcaagcatttgccattcaaaaaaggctgctagccaactacgccaagagttcatggaaattctcctacttataaracgccatctttagaacaccttttctttattttcagttgttaagtagacaaagtgttttttggttttttttgtttttttttccttgcttgtagggactttaatcgggcaagttttatggggctatttcaagagaaggcatttaattaattccagaccttcctcctgccctgcttttgttcatctacatacctgtctgtaacaactgaggtaaaaatcctaygagacttctaagaagcttggttcatctttcattagatcacagcagaactgaaccatattctctcactgctagacattttttgaactaggcttttcccagtctcactggggtatgyatgtgagctgaaagcttcacaatgcattaagatttcatgagggcctaattctgttctctcatatacttccctgaatttccagtgctcagtgcctctgcttcatcgtcgcttaagtgagaatacttctcagaagggctccaagaagccaagctccattgaatggaccatccaaaaactgatgttct

SEQ ID NO: 29659 - DNA, 600 bp, Chicken  19866894248774_3
ttgttaagtagacaaagtgttttttggttttttttgtttttttttccttgcttgtagggactttaatcgggcaagttttatggggctatttcaagagaaggcatttaattaattccagaccttcctcctgccctgcttttgttcatctacatacctgtctgtaacaactgaggtaaaaatcctaygagacttctaagaagcttggttcatctttcattagatcacagcagaactgaaccatattctctcactgctagacattttttgaactaggcttttcccagtctcactggggtatgyatgtgagctgaaagcttcacaatgcattaagatttcatgagggcctaattctgttctctcatatacttccctgaatttccagtgctcagtgcctctgcttcatcgtcgcttaagtgagaatacttctcagaagggctccaagaagccaagctccattgaatggaccatccaaaaactgatgttctagacatgaagtttgtgatttttatcttcaacagacaaaaggttagtgtcatgacttcactcctattagataagtgttttggagacaggaaagacattttggcttgtactaaaaac

SEQ ID NO: 29660 - DNA, 600 bp, Chicken  19866894248775_1
tttgtttaaaattattctatgttattcactcatttctgctttatggagaacattctcttctgtccccagcgccaagcattaggaaccagttttggcaccaggcattcctcaggattttaaagaagggaatgtacgccccgcaggccaacgctggtctgcaggagctctgctggccctgcattgaggctcaccagcaaaactatgcagctccatgtctactaagcatgtaccagggattctctttcccaaactgctcttcacattcaacacctcctcatgcagataggacagccctgggcygagctccttacagtgctcactgagccggcccaagcctatcctttgagttcagcacaacacaacacggctcgtggcctcttctgctgccatcagctgatacagagtaccatcaccacgcctgctcagcagcacgggtcaaacgcagctcaactcttggtagtttgtctaaattttgactcacagaatgacctgtcagtttgtaccgaacgacccacggaccacacgcctttactcagagctgacggatctgatgtggcatttgcatcactcactcatttctctcaggctacctgcctgtaa

SEQ ID NO: 29661 - DNA, 600 bp, Chicken  19866894248782_1
gaactggaataacttaaattggatgcaagtgtgttggctaaattaacactgtatggtgctgtgatcttctatggacactgtatggtgctgtgatcttctatggacactgtctggaagatactacactgcaacaggagcattcatcttttacctaccatctctgcagtaagcgaggacagctgccaatgaagaagagacataggaaagaagatgagatggaggaaccagtgattcatcttggcttctcaactgcaaactgggaaggactgtttttgtttgtgtgttttgctatttgggggrgttgtttttaagaagggagaaaggaaattcatacttctaaattttcatttccctctagttttggtattttgcaggcaaatctagcattatctgtctccttaaaatctctccttcaggtctctttttccatctgctgtagtacctaacaatctccctctctcaggttttctgctgccttggctggcatactgaatcactgatgtgcactgtattttggatgatgaggtggatgtgttttaatccacaatccaaaacttggctactccttttcctcacctttagatacttaaaaaaaagagg

SEQ ID NO: 29662 - DNA, 600 bp, Chicken  19866894248790_1
accacaaattttgaccagtgttgactatgaactgttgttattttccacagagatttcagatttgccccaacaatgagtagaagatggagcattctgcttcctccagtcaaacacctcagattgtgtctgagatacgaatttctccccatgctcagtattcaaaaccctcacacaaggcactgtggaaagattgccttatttgtggatctggagatgccactttttgttaattttgcccttgttaattaaagcaagtaagaaatgttcattagacatttgctttaagagcacaaaatgagrtaaattaatacagaaaggaaggagctcgaaaacaggtacagggatcctggaccctttgaatttcttcaggatttagggatagtagttcttacactcatctctagcaagaaagaagtgcattttatggatttttttcttcttgaagctcttgtaaccttggaaatgatagaaatgtctgccttttttcctccttgtttatcttgcaaatctcagagctgtaacatctgtgacgccgatgcctctggctatgacaggtttctcgtgtgtcatgtacagctgcaagatattgcaaaagcatgc

SEQ ID NO: 29663 - DNA, 600 bp, Chicken  19866894248796_1
aataagaggttttttttttttttttttcattcatgctttgaattgctggagattgactttaacttcttcctttttgcctaagtgatgttttaccatccctttttactttcacacttatctttattggttaaatgataatctttatgggaggggaaaaataaaatgtctgcaatactgaaatgctttggaatgtaactcattcagttagaaatccagcttgtagaatatcagaatgcaatattgccagtactgtgaatatggtgatgggaatgttatggttacaagcaggacattcataaycctaatagaaatttgcgtactcattctggttttcaattacttcaatttaaggagatttaattattggaatctgctgtactgagaatggctgggaactatgagttaagcactgtgaccttagggaaggaacaagtcccttaaatattcaaccagaagagatttgaacaggaaataaaaaggaatgagtcaaagtagggaggacatttaggtggtaatggatgtttcataatacatagagtggaatattgttctctatttactcagagaaacaggcggtaaagataaatccttaaatcttca

SEQ ID NO: 29664 - DNA, 599 bp, Chicken  19866894248797_1
  misc_feature (1)..(42): n is any nucleotide
nnnnnnnnnnnnnnnnnnnnnnnnnnnnnnnnnnnnnnnnnncaaaatgggattgcatttttaatctaattatccattagactctggaaaaccctgggagttttctgttaacgctgcttggctttatcacttcaaggctctgtgacaccacagatctgattcagcaaaacactaaaacacacactcagcccaagcactttgaggacctgccttcttgtgagccaatactttcaaccacttagagaattttaagcatgcacttatgtcccctcaacttcactgaagcataagatctacttwaaaacattgtttaatgagagtatacagaattaaaatatcatcgatgcagtttggtttacgttgctaactcctttccaagtagcccagcttgttagatctatttgtttgtattcattttaaattcagagctgtgtgggggagctttacaatcaaattcttgattctctttttttggtttcctctgcagatgtgggggttccaggcccttttgggaagtgcagtgctgcaaaggatttagtacatcactgaagtcaaacatggctacgaatcagattcactgcatgtgacagaagatgagt

SEQ ID NO: 29665 - DNA, 600 bp, Chicken  19866894248803_1
gtccacattaactccttctgtttgccttgtgtcgtggtttgaaagcactcagctttctgttagctgggataaatgtatgtcatgaagctgtaagtactaaagttggctgattccacacagacttgaagactgtggtcttgctttctttatcttcacttctatggctgttgggaaatatttacctttctggtttattgcactaaattagctctttcataattgtgtcagttattgtacggagcaattgatcaactgaaatcagtagttcctgttggccagaggtgagtgaaggatgtccaktttgcttactgaggagtagtgagttgccctgcatttctggacagctgtaaacccttaatgcctagaaagcataacagtggtcacctttaagaaaaaggtgatgcatttgccagcttgtatttttcctgttttcccactgtggagtcctaaagccagcagcctggagcagagcacagacactcagtatgcagcacagggctcgtgtgctgttaacaaagggttcctgcagctctcataagcatgcttctctttatggagttatcccyttaggggctctgtgttcttgtttggcttcttttg

SEQ ID NO: 29666 - DNA, 600 bp, Chicken  19866894248803_2
tcctgttggccagaggtgagtgaaggatgtccaktttgcttactgaggagtagtgagttgccctgcatttctggacagctgtaaacccttaatgcctagaaagcataacagtggtcacctttaagaaaaaggtgatgcatttgccagcttgtatttttcctgttttcccactgtggagtcctaaagccagcagcctggagcagagcacagacactcagtatgcagcacagggctcgtgtgctgttaacaaagggttcctgcagctctcataagcatgcttctctttatggagttatcccyttaggggctctgtgttcttgtttggcttcttttgcagcctggccagaggtacgtgcaggaagcactggcagaaggcaggatggaaacttcagttcctgttgccttggaggagaaagagcacagggcagcaggctgctgtagcagggtctgtcccagcacagcagctggttgcagatgggtggcaggagatgagcagctgggtgtttttctggtaactgctgtggcacactgagtgctgcactgtcacttcagttctgtaggaatccccacagagggtgctttgagaaatgggtgaattac

SEQ ID NO: 29667 - DNA, 600 bp, Chicken  19866894248805_1
tgcttaatgatgtcgggatacttggggaatcataaaagactcaaatagcattaagagttttgaacggtatagcccatcggtgctggaatgctggagaatacagcttttctagacctgatgtcattcagcatacacacacaggacatcacattacaatctgaaaatcaaataaaagcctaaagcaaagtctgataaaatacaaaataataactatgggatggctcattaactttcaaagttcctaagaggttgaagatctctgcaatgtctgtacctctgtagtgcctgcaagcctgatawgagatttaatgagtcctctgtatcaacagagaacgaaagaaatgttctcttgtttccaattcagctagctgtctttttacctccacaaaaatacagtcatgctagagatttaactgcaattcctttttcagcacagtgctctgttttactaatatggattagaagaccagtgtctcaacagttaaaaatgaatgcttttatgtagcagataaaaaccttgtagattttatttattctataatccatttttattactatttttctccaagaaaagtaaaatcaataagaggaaggatttct

SEQ ID NO: 29668 - DNA, 600 bp, Chicken  19866894248807_1
aagtgttatgtggtaccaatatataaagcaggaaccatagtgtatagttattgttaaatacattttcacagtagtataaattctcaagaattgcatttcatttaacagattcctagaaatagtaatgctagagttgaagtcagtgagaagaatgagttgtttagcttaaatatttcaaaaatatttttaagtaagattttagtgtagatggaccaattgtttttcattaaaaagatagctttaatcaactccaggaggtataacaaattaaagtggaaatagtaaactgaaaacaagtgratcatctactaacaacttgtagcattaagcttctagtagataaagctgcatcatcctttgggaaggatttgcactgtttcttctaaaaggaaggtgtgcatctcatcaggtgtgctgtaaagatgcatgcaagagaagaccaccagcacaagttagtatgttgttcaggacaactgaacagctgctttatgatgattactggtgtttcctatacacaaaggacagaaaaaaaaatactgaaaaaatgtttccttgagattttttatgcagtaaatttgctttcacggagtgtcttactca

SEQ ID NO: 29669 - DNA, 600 bp, Chicken  19866894248807_2
gtagcattaagcttctagtagataaagctgcatcatcctttgggaaggatttgcactgtttcttctaaaaggaaggtgtgcatctcatcaggtgtgctgtaaagatgcatgcaagagaagaccaccagcacaagttagtatgttgttcaggacaactgaacagctgctttatgatgattactggtgtttcctatacacaaaggacagaaaaaaaaatactgaaaaaatgtttccttgagattttttatgcagtaaatttgctttcacggagtgtcttactcagacaatcttatgtctgtratgaagccagcaaatgtaatataatgcaatatgcatcacacagagggaactggctagttggcagtcttattttttctccaacttgctgctctgcaggatgtttttgtagcatcatacattgcagcagcactgttctgtcctaaaatattttgtagctgtcttttttagtatatattttgttccaccctccttcccttgtttcatattttgtggtatttgcgcgcaacataatgctggtctcctgaaagaactaagaggtgcacagaaatccatgacctgcagcttcttctgtggggagtt

SEQ ID NO: 29670 - DNA, 464 bp, Chicken  19866894248810_1
ctgagagctgtctttgttaacgtgccatccaaatttcatcaaggtcacatttttcattacaacacgtctggttggcagcaggtagaaatgcctccttccttgccactcagcttggtttccttggagagtgagaaactgctaacagaagggacaggagaaacagggaacaaatgagcactcattcagcccagaactgtaatgctgggaacaaaattaacgtagacaccaaagaatacaaagagaaagtgacctttaattgcttatctagtgctggcagctggcataataagcaattggggrrggcaaagtgatgacacctgagcactgagctggtggggtctgcctggcccccagtgtttgggatagtcctcacagaaagggcaggcagggggaatggatcctggtggcaggatcctggcctgtataagcaggatcgcctgtgttccagctgtaaaacaaatgtt

SEQ ID NO: 29671 - DNA, 463 bp, Chicken  19866894248810_2
tgagagctgtctttgttaacgtgccatccaaatttcatcaaggtcacatttttcattacaacacgtctggttggcagcaggtagaaatgcctccttccttgccactcagcttggtttccttggagagtgagaaactgctaacagaagggacaggagaaacagggaacaaatgagcactcattcagcccagaactgtaatgctgggaacaaaattaacgtagacaccaaagaatacaaagagaaagtgacctttaattgcttatctagtgctggcagctggcataataagcaattggggrrggcaaagtgatgacacctgagcactgagctggtggggtctgcctggcccccagtgtttgggatagtcctcacagaaagggcaggcagggggaatggatcctggtggcaggatcctggcctgtataagcaggatcgcctgtgttccagctgtaaaacaaatgtt

SEQ ID NO: 29672 - DNA, 600 bp, Chicken  19866894248814_1
ttgttagcatgcatcttacaggtagatactactctttgcatttgtatattactaacctacaagctcaaagggattctttaaaaaatcctcataagatttgatgtgtggatgttattaaactgatcaaatatctaacaggtggaaattcacatatatcttccttcaagtcctttcattaaagcaagaactgttatctccctcctttctcttactcttccgtgccaagttccattctgaaatgcgtagctccttcaggcaggccagtaaatgactggcctgtttggattactgcagctagcsctggtactgtaatcacccatgtcccagtaggtactgttcctgctcagattgccaacaaatccaaagaggaatctatctagaggttatctttcctctggcatcaagatagggggagataatttccctctctggcgcaatgcagttcccatgtcaattggtgtcaagagaaactgcagagaaacagcagtaaaaggagaaacagcagccaaactcctctatcatattttaaaactatttttttaatttcttttttaataattgacctgtcaagataattactgcagatcatgggacaatgtt

SEQ ID NO: 29673 - DNA, 600 bp, Chicken  19866894248823_1
taactgtcaatcaagcactgacctatgcttgcagatcactttcatcatgcaaacaagcactgaaagtgtaacgctactatttgcaattgcattcatattatagaatcatagaatggtttgggttggaagggacctttaagatcatctcgttccaaccccctgctacaggcagggacacctccctctacaccaggttgctcaaagccccatccagcctggccctgaacgcctccagggcatccacaacctcactgggcaacctgttgcagtgtctcaccactgtcataataaagaatttcytcctaatatttagtctaaatctaccctcttccagtttaaagccacatccccttgtcctgtcactacctgctcttataaaaagtccctcccctacattcctgtgggcccccttcatgtactggcaggcgctataagatccccttagagccttttcttttccaggctgaaaagccccagctttctcagtccacataagggaggtgctccagccctgatttcatgagacaggaccatatttaagcagaacttaattctggaaatatgcccaagtcaggccttttaggttgtattaagggagca

SEQ ID NO: 29674 - DNA, 600 bp, Chicken  19866894248828_1
tgcagcagatccatcccacctccttggcacaagcccaaggcagccagtctcaaaggagaggcttcagctgaacactgcttcttgctgctctccttgtgtgcaaaactaaccttggggaaggtgcagagagagcaggatgggaaaagcgtcagcaaatagatcaattatcaatattgatcaataatctatattgaaggagtttagctgggatgatcgatacaaagaaaaccccaaatgctcggaaaagcttaagaagccaagacccttggatccacaagatcagtacacatcagcctttgygaggactggcttctgctctggcatttttgagatatcaggtasgacataaatgaagwgttcttccatttcactgcttctcacctcctttcctgcagggttgaccagacagcgtcagtgcagacttgcaaggaccagatgccacgcgccctcccatccacaggctcatccagcaaagcaactcccacctcttcctcagctctctgagggaagccataaagccttctgaaagcaaaggccaagtactgcatttcctaggctgcaagcagaaggattctcgatgtgtttatctaaattgagtgt

SEQ ID NO: 29675 - DNA, 600 bp, Chicken  19866894248828_2
gccagtctcaaaggagaggcttcagctgaacactgcttcttgctgctctccttgtgtgcaaaactaaccttggggaaggtgcagagagagcaggatgggaaaagcgtcagcaaatagatcaattatcaatattgatcaataatctatattgaaggagtttagctgggatgatcgatacaaagaaaaccccaaatgctcggaaaagcttaagaagccaagacccttggatccacaagatcagtacacatcagcctttgygaggactggcttctgctctggcatttttgagatatcaggtasgacataaatgaagwgttcttccatttcactgcttctcacctcctttcctgcagggttgaccagacagcgtcagtgcagacttgcaaggaccagatgccacgcgccctcccatccacaggctcatccagcaaagcaactcccacctcttcctcagctctctgagggaagccataaagccttctgaaagcaaaggccaagtactgcatttcctaggctgcaagcagaaggattctcgatgtgtttatctaaattgagtgttgctgatttcttttgtacagctccccagagcttccccatgct

SEQ ID NO: 29676 - DNA, 600 bp, Chicken  19866894248828_3
agaggcttcagctgaacactgcttcttgctgctctccttgtgtgcaaaactaaccttggggaaggtgcagagagagcaggatgggaaaagcgtcagcaaatagatcaattatcaatattgatcaataatctatattgaaggagtttagctgggatgatcgatacaaagaaaaccccaaatgctcggaaaagcttaagaagccaagacccttggatccacaagatcagtacacatcagcctttgygaggactggcttctgctctggcatttttgagatatcaggtasgacataaatgaagwgttcttccatttcactgcttctcacctcctttcctgcagggttgaccagacagcgtcagtgcagacttgcaaggaccagatgccacgcgccctcccatccacaggctcatccagcaaagcaactcccacctcttcctcagctctctgagggaagccataaagccttctgaaagcaaaggccaagtactgcatttcctaggctgcaagcagaaggattctcgatgtgtttatctaaattgagtgttgctgatttcttttgtacagctccccagagcttccccatgctggcatgctgtaggc

SEQ ID NO: 29677 - DNA, 600 bp, Chicken  19866894248834_1
tccaggatctctgctgcagaaaatgtcttgtttatccaacagtgtgtacacatgaaataaacgtttagccactcagctacttccagactgctcccagacctgggcatacccagaaccaaatggaaacattacatgggggagcaaagtaaaattacaaggtgcctctgcaggaactgcgtgggtagttttcaggatcatctgtttaggacttccaggcttacaggcttgcattccttactggatcttgtttacagactttaatcactattttcaatcacccagggcaatctctctgatggrtaaatggggaacacactcagtgaagctaggtattatctaacatttcgggatgaacgctagatctttttaagtgctccaaatacctgtactaattccataactcagtatggaagttaattattttaatgtgcttttcyaggttatttcttctttgtggcatttgatacgtgcatgttgggaagaaggtattagctccattacgcagktgggaaaatgaaacaagtttgacaaagcaaaatgtatccatgtatctatgcatttagaaagcccagtgtgaaacacccaaagctggatattttg

SEQ ID NO: 29678 - DNA, 600 bp, Chicken  19866894248834_2
ggagcaaagtaaaattacaaggtgcctctgcaggaactgcgtgggtagttttcaggatcatctgtttaggacttccaggcttacaggcttgcattccttactggatcttgtttacagactttaatcactattttcaatcacccagggcaatctctctgatggrtaaatggggaacacactcagtgaagctaggtattatctaacatttcgggatgaacgctagatctttttaagtgctccaaatacctgtactaattccataactcagtatggaagttaattattttaatgtgcttttcyaggttatttcttctttgtggcatttgatacgtgcatgttgggaagaaggtattagctccattacgcagktgggaaaatgaaacaagtttgacaaagcaaaatgtatccatgtatctatgcatttagaaagcccagtgtgaaacacccaaagctggatattttgagaacacttagtatcatacattcaaaccacagctgtgaggctcatggctcacttcaccatcgtcagaatcattgtagctgtcagtttctagaagtctcaagcctacatgagcctttcattctgtagtgccctagctt

SEQ ID NO: 29679 - DNA, 600 bp, Chicken  19866894248834_3
gacttccaggcttacaggcttgcattccttactggatcttgtttacagactttaatcactattttcaatcacccagggcaatctctctgatggrtaaatggggaacacactcagtgaagctaggtattatctaacatttcgggatgaacgctagatctttttaagtgctccaaatacctgtactaattccataactcagtatggaagttaattattttaatgtgcttttcyaggttatttcttctttgtggcatttgatacgtgcatgttgggaagaaggtattagctccattacgcagktgggaaaatgaaacaagtttgacaaagcaaaatgtatccatgtatctatgcatttagaaagcccagtgtgaaacacccaaagctggatattttgagaacacttagtatcatacattcaaaccacagctgtgaggctcatggctcacttcaccatcgtcagaatcattgtagctgtcagtttctagaagtctcaagcctacatgagcctttcattctgtagtgccctagctttttagaatttcattggtcgtcttgctttttacggtttttatgttaaaaagtctttcaaataagaaagaa

SEQ ID NO: 29680 - DNA, 596 bp, Chicken  19866894248834_4
agtgtgaaacacccaaagctggatattttgagaacacttagtatcatacattcaaaccacagctgtgaggctcatggctcacttcaccatcgtcagaatcattgtagctgtcagtttctagaagtctcaagcctacatgagcctttcattctgtagtgccctagctttttagaatttcattggtcgtcttgctttttacggtttttatgttaaaaagtctttcaaataagaaagaaaacaacggtaaaaaagcaaagactcctctaaatagcagctttatctgccagactgttgacacayacacccctccttaaaatagatataatacaagaacctgccaagtgtgcaatagctcgggtattaatgaggacttgaactatttgggcctttttatgggtctgtgatgagcacccttaaaaccagacagttctgttggactttgtactgctgatcaccactctgtacccaatagcccatccagctgcacacccaccttatggtccactccatatctcacaaattattctcccacaatgctcttgtagcctatgttgaatgtcttcctaaagtcaaggtaaacagcatgcactgctctt

SEQ ID NO: 29681 - DNA, 600 bp, Chicken  19866894248837_1
actgggtctgctcagcctccaaatgtgggctgctgtactgcaggtacagggacaggccagtcgagctcgtgtaagaacccactgggagaagaggaggcttggctgcatgatcagatttatcagcaggactttgccctccagaacagactggcaagttggaagatttggatttgatcatcctcttttgcagtctgatactctgtacccagcagatatggagacctcgtgcattggtggcgagcagtaggccacagttgaatcttctaaaagcaaaggtattttttgtctaactaacggctytgggcaaatacaagggtacrtggatggaacatagcagcatcttaatgattataggggagatctgaccagatgacttatgactcgctttgaccagaaatctgtggaacaacatgttgtcccttgctgggcaaagacttctgagaagctcataatttagtccataatatagaagaggtttaatatcacaaggctgagaacaatggcttgaagagaaccagacaggtcttgacatcaccagccttttcttcccctcagttccccagcacagttgctattgtttgagcctcatcactaataaca

SEQ ID NO: 29682 - DNA, 600 bp, Chicken  19866894248837_2
aaatgtgggctgctgtactgcaggtacagggacaggccagtcgagctcgtgtaagaacccactgggagaagaggaggcttggctgcatgatcagatttatcagcaggactttgccctccagaacagactggcaagttggaagatttggatttgatcatcctcttttgcagtctgatactctgtacccagcagatatggagacctcgtgcattggtggcgagcagtaggccacagttgaatcttctaaaagcaaaggtattttttgtctaactaacggctytgggcaaatacaagggtacrtggatggaacatagcagcatcttaatgattataggggagatctgaccagatgacttatgactcgctttgaccagaaatctgtggaacaacatgttgtcccttgctgggcaaagacttctgagaagctcataatttagtccataatatagaagaggtttaatatcacaaggctgagaacaatggcttgaagagaaccagacaggtcttgacatcaccagccttttcttcccctcagttccccagcacagttgctattgtttgagcctcatcactaataacatcggaagagggatccaacgc

SEQ ID NO: 29683 - DNA, 600 bp, Chicken  19866894248837_3
attgtttgagcctcatcactaataacatcggaagagggatccaacgctggccaaccactagggctcttaccattgtatcattatttctgctcctggtacatgtagacagggccatgatcaaaataccatgggctgccagaaaacttctgcagccaggagaggagccgagccgctgtttgtgaggggaggatggaaatttcaaagttaatcgggttcccatttctggaaccatttaactgtggcacacaaagcgttcacagtacactgaggattcagttgttttatgcaggtcagcctttygctgaaaaattctgtatcaaaatstttarcttcaaaaagggttagactcgatttcctggtgaaagctggagtcagttctcattttaatctcacctgtgtgcctgcccctaggtaaaatgtcattgtattaccacgtttgattgtaataatcatagccatttggccagtaacaaaatcacaggcctgagcatacctgatgatttaatccaaattcagatccagatatgtcgcctgtcccatttttgaaatgagtgaagccatttatttgcacctggatcatcaaattaggatgtatctctg

SEQ ID NO: 29684 - DNA, 600 bp, Chicken  19866894248837_4
acatcggaagagggatccaacgctggccaaccactagggctcttaccattgtatcattatttctgctcctggtacatgtagacagggccatgatcaaaataccatgggctgccagaaaacttctgcagccaggagaggagccgagccgctgtttgtgaggggaggatggaaatttcaaagttaatcgggttcccatttctggaaccatttaactgtggcacacaaagcgttcacagtacactgaggattcagttgttttatgcaggtcagcctttygctgaaaaattctgtatcaaaatstttarcttcaaaaagggttagactcgatttcctggtgaaagctggagtcagttctcattttaatctcacctgtgtgcctgcccctaggtaaaatgtcattgtattaccacgtttgattgtaataatcatagccatttggccagtaacaaaatcacaggcctgagcatacctgatgatttaatccaaattcagatccagatatgtcgcctgtcccatttttgaaatgagtgaagccatttatttgcacctggatcatcaaattaggatgtatctctgtcctctgaggtccttgtttctatc

SEQ ID NO: 29685 - DNA, 600 bp, Chicken  19866894248837_5
ggaagagggatccaacgctggccaaccactagggctcttaccattgtatcattatttctgctcctggtacatgtagacagggccatgatcaaaataccatgggctgccagaaaacttctgcagccaggagaggagccgagccgctgtttgtgaggggaggatggaaatttcaaagttaatcgggttcccatttctggaaccatttaactgtggcacacaaagcgttcacagtacactgaggattcagttgttttatgcaggtcagcctttygctgaaaaattctgtatcaaaatstttarcttcaaaaagggttagactcgatttcctggtgaaagctggagtcagttctcattttaatctcacctgtgtgcctgcccctaggtaaaatgtcattgtattaccacgtttgattgtaataatcatagccatttggccagtaacaaaatcacaggcctgagcatacctgatgatttaatccaaattcagatccagatatgtcgcctgtcccatttttgaaatgagtgaagccatttatttgcacctggatcatcaaattaggatgtatctctgtcctctgaggtccttgtttctatcttagc

SEQ ID NO: 29686 - DNA, 600 bp, Chicken  19866894248841_1
aatgactttttgagcgctctccttcgacaaaagccataacagcccaaggaacatcagccatcctgctcccggtgtgctcccactccagccctgccctacgctggaggagctgagcaaggaagcaccggggccctgcagagtgctgctcctgcaccgacttgtgccaagagcagcaccaggactgcagcccaacctgctggcacagcttcacccctggaaaacaccaggagacaacgctggtctctaccaggggtgactcccaaagctcctgtggccctgagcttttgcattcctacctgrggaaagagattttggaaagtatgtgggaatgaggtagcggtgaggagaggctgcctgaaaaccttcagctgggacagcaaggagaacagatgtgcaggcagtaagaggaattaccccagggatacagtgcattcctgggaaggctgatgccaggcagccctgagcagcgctgatctgtctcagcacagacctcagtgtcactcagcaccgtcacctctggcagtgagaattctgctgttagaggctgctcaccaggcaggacrtacagggccagcatctgccacgcagcatgagtgcccc

SEQ ID NO: 29687 - DNA, 600 bp, Chicken  19866894248841_2
agctcctgtggccctgagcttttgcattcctacctgrggaaagagattttggaaagtatgtgggaatgaggtagcggtgaggagaggctgcctgaaaaccttcagctgggacagcaaggagaacagatgtgcaggcagtaagaggaattaccccagggatacagtgcattcctgggaaggctgatgccaggcagccctgagcagcgctgatctgtctcagcacagacctcagtgtcactcagcaccgtcacctctggcagtgagaattctgctgttagaggctgctcaccaggcaggacrtacagggccagcatctgccacgcagcatgagtgccccaggcttgtttctgaagcagcccagagcaatttctccataatgtyccattaatgtgacagctaaagccctggcctgctgtaaaaacatcgctcccatttacattaattgcaacgattttcatgcaatttgcttccaaatgtgaccaaccgtatcttcagtggctgggagctgatgaagtcccattgaagttcatcacatttatcaccctctagctggagtacagttattagtctggctaaggatgtggctctgcacccattcaa

SEQ ID NO: 29688 - DNA, 600 bp, Chicken  19866894248841_3
gagaggctgcctgaaaaccttcagctgggacagcaaggagaacagatgtgcaggcagtaagaggaattaccccagggatacagtgcattcctgggaaggctgatgccaggcagccctgagcagcgctgatctgtctcagcacagacctcagtgtcactcagcaccgtcacctctggcagtgagaattctgctgttagaggctgctcaccaggcaggacrtacagggccagcatctgccacgcagcatgagtgccccaggcttgtttctgaagcagcccagagcaatttctccataatgtyccattaatgtgacagctaaagccctggcctgctgtaaaaacatcgctcccatttacattaattgcaacgattttcatgcaatttgcttccaaatgtgaccaaccgtatcttcagtggctgggagctgatgaagtcccattgaagttcatcacatttatcaccctctagctggagtacagttattagtctggctaaggatgtggctctgcacccattcaaggtactgaacaacacctggtcagaaacagagtgcagccctggcccatcctgctccatttgctcaaagaagctgtggatgcc

SEQ ID NO: 29689 - DNA, 600 bp, Chicken  19866894248841_4
gtcccattgaagttcatcacatttatcaccctctagctggagtacagttattagtctggctaaggatgtggctctgcacccattcaaggtactgaacaacacctggtcagaaacagagtgcagccctggcccatcctgctccatttgctcaaagaagctgtggatgccccatccctggaggtacccaaggccacggatggagccctgagcaacctgtgctggtggggggcaaccagcccatggcaggaggccaaaagaagatgatctttaaggtcccttccaatctgagccactctacgrttggatgatcctgcacctgacaagcctttggacttcttcagcccctgaccagccacggggcaaaccagctgcccgcagagcagcagcgtcacatgcctgaggaggaatgaagtatcaccttatgtaaataatagctggcgactacagcaacgtcgctgcgctctgaccaacttctataataacacagaggtttcttcatatgcccgggacatttttgctacagctatttggtatttgtagaatcatagaatggattggattggaagggaccttaaagatgggtgtggttccaagtcccct

SEQ ID NO: 29690 - DNA, 600 bp, Chicken  19866894248843_1
cagatagagaaggctcctgggagacctcattgcggccttccaatacttgaaggaagcatataaacaggagggggaatggctgtttacgagggtggatagtgataggacaagggggaatggttttaaactgagacagaggaggtttaggttaggtattaggaggaagtttttcacacggagggtggtgacgcactggaacaggttgcccaaggaggttgtggatgccccatccctggaggcattcaaggccaggctggatgtggctctgggcagcctggtctgctggttggtgaccctgcmcatagcagggggttgaaacttgatgatcaccgtggtccttttcaacccaggccattctatgattctattgttaatgggacatttttctgagcaactgaaatggcatgctgggtgttctttagagaactgatcagaaagtctgtaacaacacgtgtcagatagcagggrcacgtattttctgagggttgtgccttcagggccaaggcttcttcagcattcagaagacgaatgggcctgtgtaaggtgtgagttttcagaccttattgtattaacgtttggtactttcagaactcttaagtt

SEQ ID NO: 29691 - DNA, 600 bp, Chicken  19866894248843_2
tttcacacggagggtggtgacgcactggaacaggttgcccaaggaggttgtggatgccccatccctggaggcattcaaggccaggctggatgtggctctgggcagcctggtctgctggttggtgaccctgcmcatagcagggggttgaaacttgatgatcaccgtggtccttttcaacccaggccattctatgattctattgttaatgggacatttttctgagcaactgaaatggcatgctgggtgttctttagagaactgatcagaaagtctgtaacaacacgtgtcagatagcagggrcacgtattttctgagggttgtgccttcagggccaaggcttcttcagcattcagaagacgaatgggcctgtgtaaggtgtgagttttcagaccttattgtattaacgtttggtactttcagaactcttaagttctgcttgcttgtggttgtttcatttgttttgtgaatgaaatacataataataataagccactgtgcacacaactgtgagtttttctttgacaacttctcacgatatactagttccatttctcatttaattttctaggaaaatacattagaaggactaaaccagggaca

SEQ ID NO: 29692 - DNA, 591 bp, Chicken  19866894248855_1
tgcagggtgaggcagggcgaggcgagccaaaggtgaggagaggcgaggcaaggcagggcatggcgtggcaagccgaggcgatagtgaggtgcggcgaggcgagaataggcaaaggcgaggtgaggcgaggcctggcgaggcagggcgaggtgaggcaaaggcgaggcgcggcgaaaagaggcgatgcgaggcaaatgcgaggcgaggcgaggcgaggtgagacgaggcaaaggtgaggcgaggcgaggtatggtgaggcgaggcgtggtgaggcgtagtgaagcaaggcgagccgaggcraggcaaaggtgaggcgtggtgtggcgaggcagtgtgaggcgtggcgagccgaggagaggtgaagaaaaggcgaggcgaggagggcaaggcctggcgagatgaagtgaggcgaggctaggctaggcagggagaggcagggcaaggtgaggcaaaggcgaggcgcagtgaggcaaggcatggcgaggcagggtgaggcgaagcaaaggcgaggcgaggcaaaagcgaggcgaggcgaggcgaggtgaggcgaggctaggcaaaaacgaggcgaggcgggcaaggcgaggcgag

SEQ ID NO: 29693 - DNA, 600 bp, Chicken  19866894248861_1
gaaccctaccttttcttactgcagtgagataacaaggccatctgatgaaggaggtagccgttattcccaccttttcactagtaacactgtcataatgtattgagacctcacaggcctgtattaactcaatatccttgtataatcacaaatcattggaaactatgtattgcactgattatttaaggaagcaaagcaaattttccagtctgcacagtttcttgcatgccattttgctttattgtgtattcttttaaactgttttgagaagtgtgtcagttcaaaatctctactaactcccayttacagtgttgaggtgaaagcgctttgtgtttttgcaaaacttgcatgagtcagatttttttttctcttggaaagcaaaatataactgaaaaaaataatsctctcaactgaaaaaattgaatttaccatgttctttttagtgagcaaatcaaccacataaaagcattttattgacggaactacttcttcccatatcaagttgtgcaggttcttgtggctctctgtttccatcctaaaaggaaacgtaggaaagtctgacagctttctcctatgtgaaagttttcttagagactttttttt

SEQ ID NO: 29694 - DNA, 600 bp, Chicken  19866894248861_2
tgagacctcacaggcctgtattaactcaatatccttgtataatcacaaatcattggaaactatgtattgcactgattatttaaggaagcaaagcaaattttccagtctgcacagtttcttgcatgccattttgctttattgtgtattcttttaaactgttttgagaagtgtgtcagttcaaaatctctactaactcccayttacagtgttgaggtgaaagcgctttgtgtttttgcaaaacttgcatgagtcagatttttttttctcttggaaagcaaaatataactgaaaaaaataatsctctcaactgaaaaaattgaatttaccatgttctttttagtgagcaaatcaaccacataaaagcattttattgacggaactacttcttcccatatcaagttgtgcaggttcttgtggctctctgtttccatcctaaaaggaaacgtaggaaagtctgacagctttctcctatgtgaaagttttcttagagacttttttttaagggtttttattttagacacactctgcatatttttctcagtagttccatctctggagactgaagcagggaaagaactagagtgttatgtgtgagaggat

SEQ ID NO: 29695 - DNA, 599 bp, Chicken  19866894248863_1
  misc_feature (1)..(107): n is any nucleotide
nnnnnnnnnnnnnnnnnnnnnnnnnnnnnnnnnnnnnnnnnnnnnnnnnnnnnnnnnnnnnnnnnnnnnnnnnnnnnnnnnnnnnnnnnnnnnnnnnnnnnnnnnnntgcagtagtgggactggaagacactgcaaatgtaggatttaaagctaagatatcttatgtttgaagaacaccaaatagaagtgcacagaaaaaaatagtgcgttagtaacatacatggcagctttaacagtaaaaataatcataaaaaaaaaaaatcagggatagaatgctaaactgtttggaacttaatttrcaaaactgtcagagttcaaaccaacacagtgaccccaggtgttaaaatgccaataaagcaggaaaacatgcaggtagggcagctaatgtgctttagctttaaagtgcaaactgctatcaaggccgagtccacttcacacttggctcattttttcttttcaaacttgtgcctcatggcaatgtggtatgcaaggatggaaatttgttgcatcatagcctaggaatgaactttcccacctcccccagaagcgctttgcctaaggagtaatcacatgagaatcagtaggatttctcaccaac

SEQ ID NO: 29696 - DNA, 600 bp, Chicken  19866894248863_2
ataaagcaggaaaacatgcaggtagggcagctaatgtgctttagctttaaagtgcaaactgctatcaaggccgagtccacttcacacttggctcattttttcttttcaaacttgtgcctcatggcaatgtggtatgcaaggatggaaatttgttgcatcatagcctaggaatgaactttcccacctcccccagaagcgctttgcctaaggagtaatcacatgagaatcagtaggatttctcaccaactgaggtagtactcagcatgagcactgtgggcagaactggactctaaattaaaytgacatccttattcttctgcacatttcctctccyggtgttgttccactgacacaataatagcatcaatcctgcatacctgatacaaattctagttctgatactactggaaggatgaaaaaaattatctttaaaatccacagagtcttttccccatcccttatgaagcaacaattaaataaatttgccaaaaggaaaaatgtattaccacatcataaaaaaaaaaaaaaagaggaaatgagatgaaggtctggaatatatctattgtaaaaccagttactttgttagtctgtgacttcttc

SEQ ID NO: 29697 - DNA, 600 bp, Chicken  19866894248863_3
tgtgctttagctttaaagtgcaaactgctatcaaggccgagtccacttcacacttggctcattttttcttttcaaacttgtgcctcatggcaatgtggtatgcaaggatggaaatttgttgcatcatagcctaggaatgaactttcccacctcccccagaagcgctttgcctaaggagtaatcacatgagaatcagtaggatttctcaccaactgaggtagtactcagcatgagcactgtgggcagaactggactctaaattaaaytgacatccttattcttctgcacatttcctctccyggtgttgttccactgacacaataatagcatcaatcctgcatacctgatacaaattctagttctgatactactggaaggatgaaaaaaattatctttaaaatccacagagtcttttccccatcccttatgaagcaacaattaaataaatttgccaaaaggaaaaatgtattaccacatcataaaaaaaaaaaaaaagaggaaatgagatgaaggtctggaatatatctattgtaaaaccagttactttgttagtctgtgacttcttcatccttactagttttgttcttgctagtaggataa

SEQ ID NO: 29698 - DNA, 600 bp, Chicken  19866894248866_1
gaaacagcagtgcaattatggactgcaaagtgcagcaggtcagaaaatgtttcttcacctccccagagagaaatccactgtttttggcttgaaatcaaaatatttattggagcaaaatagattaactgtttggattatgaaatgctgctccatgggtttcttagacactcgctcagcaatcaaattctctctactttaagatccctgttgacagcccttctgtaatgcaggacagctgttttggcaactaggaacatcaaatcccagcagccaggtgagctaagatgtctcactgccacrggaacggcaccttgggaagacgactttggctgtagggcaggatgtctgctccagaagcctaaaataagcctagaattaaagtattcagatttcactgctctactctaaaattttgatagtaaaataaaccccattaagcagtttcccatacagycactctcctgtgccagcacacacgacccaggtcagctgaagacaatgggctattctctctcaagtctgtggtgcgccatctcataacccattgctatggtggcccacggggacttccttccagatgtcaccatggggtcagaagag

SEQ ID NO: 29699 - DNA, 600 bp, Chicken  19866894248866_2
ggtttcttagacactcgctcagcaatcaaattctctctactttaagatccctgttgacagcccttctgtaatgcaggacagctgttttggcaactaggaacatcaaatcccagcagccaggtgagctaagatgtctcactgccacrggaacggcaccttgggaagacgactttggctgtagggcaggatgtctgctccagaagcctaaaataagcctagaattaaagtattcagatttcactgctctactctaaaattttgatagtaaaataaaccccattaagcagtttcccatacagycactctcctgtgccagcacacacgacccaggtcagctgaagacaatgggctattctctctcaagtctgtggtgcgccatctcataacccattgctatggtggcccacggggacttccttccagatgtcaccatggggtcagaagagtgctgagcatggaaaaatgtctgccccaaggttccagtcttcgggacagcagtgtagagaaagactatttccgttctgagtgcagagaagacaacatctaagcaaagggaggaggaaagaatgatcccgagagtgtgatgaggctgagatgaaa

SEQ ID NO: 29700 - DNA, 600 bp, Chicken  19866894248872_1
gagaagaaaaagaggaaagcattgaaatcaggaataatgcactctgctgtgtgtgtgcaagcacacatgtatgtatgcacatatgcttgcatatttgcacacgtgtgaactagaaacgaaatcaggaactgcaattgttgattttaaaacagaaaacatgcaatgcttttagaattgcattatttgtaaatggcgtaaagcaaagaatatgcaggtaagatttttaaataaagatcagcactcggataattagctccatctcataacacagctgttgctgcagtttaactaaagctgtgygactttgttgggtagaaagggcctcaacacaaatcctactgggctgagcatcgaagcatttctgaccccaggaacctgagtgggggacagctctgtgcttaagatgtgccatcagtcctggggtcttcaaactgtggyaagcataaactatttctaaatagtatgtaccaccaagcctcaagaaatccaccatcaaagccagtcccatctgcctttcctctggaggggacaagcagragccaaccagatccgccctgtatgcagagcttggagctcaaggatgggggacaaggactgggg

SEQ ID NO: 29701 - DNA, 600 bp, Chicken  19866894248872_2
tgattttaaaacagaaaacatgcaatgcttttagaattgcattatttgtaaatggcgtaaagcaaagaatatgcaggtaagatttttaaataaagatcagcactcggataattagctccatctcataacacagctgttgctgcagtttaactaaagctgtgygactttgttgggtagaaagggcctcaacacaaatcctactgggctgagcatcgaagcatttctgaccccaggaacctgagtgggggacagctctgtgcttaagatgtgccatcagtcctggggtcttcaaactgtggyaagcataaactatttctaaatagtatgtaccaccaagcctcaagaaatccaccatcaaagccagtcccatctgcctttcctctggaggggacaagcagragccaaccagatccgccctgtatgcagagcttggagctcaaggatgggggacaaggactgggggaggacacagttgagaaatgcagcttctgaatggagagcaggctttggccagtccttcaagggctgtcataggaagcaggactgggcatgctacacacagccctgctggtggaggaaccrgccccttcccgttcagtg

SEQ ID NO: 29702 - DNA, 600 bp, Chicken  19866894248872_3
gcactcggataattagctccatctcataacacagctgttgctgcagtttaactaaagctgtgygactttgttgggtagaaagggcctcaacacaaatcctactgggctgagcatcgaagcatttctgaccccaggaacctgagtgggggacagctctgtgcttaagatgtgccatcagtcctggggtcttcaaactgtggyaagcataaactatttctaaatagtatgtaccaccaagcctcaagaaatccaccatcaaagccagtcccatctgcctttcctctggaggggacaagcagragccaaccagatccgccctgtatgcagagcttggagctcaaggatgggggacaaggactgggggaggacacagttgagaaatgcagcttctgaatggagagcaggctttggccagtccttcaagggctgtcataggaagcaggactgggcatgctacacacagccctgctggtggaggaaccrgccccttcccgttcagtgcagctgrgcctkaagttcattataggaataacttaaaatagcagttgagagttgaatcgtcacgacccagaggaatgggtcaatgtctcattggaggtt

SEQ ID NO: 29703 - DNA, 600 bp, Chicken  19866894248872_4
gggtcttcaaactgtggyaagcataaactatttctaaatagtatgtaccaccaagcctcaagaaatccaccatcaaagccagtcccatctgcctttcctctggaggggacaagcagragccaaccagatccgccctgtatgcagagcttggagctcaaggatgggggacaaggactgggggaggacacagttgagaaatgcagcttctgaatggagagcaggctttggccagtccttcaagggctgtcataggaagcaggactgggcatgctacacacagccctgctggtggaggaaccrgccccttcccgttcagtgcagctgrgcctkaagttcattataggaataacttaaaatagcagttgagagttgaatcgtcacgacccagaggaatgggtcaatgtctcattggaggtttactgctctcagcatggcacaggagaagtatggtgggtttgcagctatgctacatgcatatttggggggctgaaagtgtggctctattgctattgaggttaatgtgcwacttggaaggaaagagaatttgcatatgctcttgaaaatgttgactgagtctgctcttcctgctgaaatrctgct

SEQ ID NO: 29704 - DNA, 600 bp, Chicken  19866894248872_5
aactatttctaaatagtatgtaccaccaagcctcaagaaatccaccatcaaagccagtcccatctgcctttcctctggaggggacaagcagragccaaccagatccgccctgtatgcagagcttggagctcaaggatgggggacaaggactgggggaggacacagttgagaaatgcagcttctgaatggagagcaggctttggccagtccttcaagggctgtcataggaagcaggactgggcatgctacacacagccctgctggtggaggaaccrgccccttcccgttcagtgcagctgrgcctkaagttcattataggaataacttaaaatagcagttgagagttgaatcgtcacgacccagaggaatgggtcaatgtctcattggaggtttactgctctcagcatggcacaggagaagtatggtgggtttgcagctatgctacatgcatatttggggggctgaaagtgtggctctattgctattgaggttaatgtgcwacttggaaggaaagagaatttgcatatgctcttgaaaatgttgactgagtctgctcttcctgctgaaatrctgctgttaatgtttgatagcagctgccca

SEQ ID NO: 29705 - DNA, 600 bp, Chicken  19866894248872_6
tttctaaatagtatgtaccaccaagcctcaagaaatccaccatcaaagccagtcccatctgcctttcctctggaggggacaagcagragccaaccagatccgccctgtatgcagagcttggagctcaaggatgggggacaaggactgggggaggacacagttgagaaatgcagcttctgaatggagagcaggctttggccagtccttcaagggctgtcataggaagcaggactgggcatgctacacacagccctgctggtggaggaaccrgccccttcccgttcagtgcagctgrgcctkaagttcattataggaataacttaaaatagcagttgagagttgaatcgtcacgacccagaggaatgggtcaatgtctcattggaggtttactgctctcagcatggcacaggagaagtatggtgggtttgcagctatgctacatgcatatttggggggctgaaagtgtggctctattgctattgaggttaatgtgcwacttggaaggaaagagaatttgcatatgctcttgaaaatgttgactgagtctgctcttcctgctgaaatrctgctgttaatgtttgatagcagctgcccaacacc

SEQ ID NO: 29706 - DNA, 600 bp, Chicken  19866894248872_7
tggccagtccttcaagggctgtcataggaagcaggactgggcatgctacacacagccctgctggtggaggaaccrgccccttcccgttcagtgcagctgrgcctkaagttcattataggaataacttaaaatagcagttgagagttgaatcgtcacgacccagaggaatgggtcaatgtctcattggaggtttactgctctcagcatggcacaggagaagtatggtgggtttgcagctatgctacatgcatatttggggggctgaaagtgtggctctattgctattgaggttaatgtgcwacttggaaggaaagagaatttgcatatgctcttgaaaatgttgactgagtctgctcttcctgctgaaatrctgctgttaatgtttgatagcagctgcccaacaccagaagcctttgagctgtttattgctcttgagaggtgcttatatttatttattatgtgtttgttgttgttttgttgttgctccgctacatagctaaacccaaacctagctgagagatgctgggccaaggtgcaaatgatcagagctctgttcaaaagcactgttggctttaaatagtcttttcagatatcaccatt

SEQ ID NO: 29707 - DNA, 600 bp, Chicken  19866894248872_8
aaccrgccccttcccgttcagtgcagctgrgcctkaagttcattataggaataacttaaaatagcagttgagagttgaatcgtcacgacccagaggaatgggtcaatgtctcattggaggtttactgctctcagcatggcacaggagaagtatggtgggtttgcagctatgctacatgcatatttggggggctgaaagtgtggctctattgctattgaggttaatgtgcwacttggaaggaaagagaatttgcatatgctcttgaaaatgttgactgagtctgctcttcctgctgaaatrctgctgttaatgtttgatagcagctgcccaacaccagaagcctttgagctgtttattgctcttgagaggtgcttatatttatttattatgtgtttgttgttgttttgttgttgctccgctacatagctaaacccaaacctagctgagagatgctgggccaaggtgcaaatgatcagagctctgttcaaaagcactgttggctttaaatagtcttttcagatatcaccattcctcctttcaagcaaaacccctactgatgaagcgcagcgctgtgtgctcacacagctctaaggagtggtt

SEQ ID NO: 29708 - DNA, 600 bp, Chicken  19866894248873_1
taataacacaagccaataacagagagagacttacttatctttctgttcagctgagcaatggacactgtagtcactgttcctctgagagtttttatgttcgtgacagttttgcgtgtgaggttgaatttttcttgtttgccatccaggggggttgaacctaccaactctcagtgggatataattagagatggcccaaggagctggagaagacattgcagataatccagtctgacaatatgctgaggagggcagcaacacagaggcacaggaggtggagttcagaatatttggtgggaaatwatcggtcaattaagcagctggatgatggctttggatttcaatgattagctgtagtcatgacatctcgtgacctttgtgcttttcatgcagttcatccatgaatatttagaactaaacctttgatttaggtagactttgttttatctcagcttggctttgtaaatgctgagggatgacaatcttagctgaaatccatcagtatagcaggtgctcagcatctatggaaatcagtctctctatgaaatattaaacatatacccagaacttgagtggtaataatttaacaagaagacctgtatt

SEQ ID NO: 29709 - DNA, 539 bp, Chicken  19866894248886_1
cacagggaatgcttcagaaccagtgaagccctgcagtccctcatcacagcgcacttcttaagcccaggaaaaactgtgataatcgatattgattgatctctgcatttagtcccgcagctgcttctaaatcacaaaaagcacttcatcagataatgcatctttttaaatttaccaaagaggtagttacgcataggcttcgggggctagacatgcgagagtgcactgatgactcctagaatagatgggaataattaaatgcctaaaaacacagctcagactggagtgctgacacagatcccrctttgctgcctaaacagcatgccaaggagcatggattaaacaccctccaagcagctgagatccctgccccaccatccacagctgtgaacccaagtaaagtggggcctctggaaaaggaggcagtagattagtcttctggatttgtcaattggcacgtggatgatatgcattttatacccccttctacttgagacatggcataaagctctcctttcccacctctctaaaaggccccaaaa

SEQ ID NO: 29710 - DNA, 599 bp, Chicken  19866894248895_1
  misc_feature (1)..(88): n is any nucleotide
nnnnnnnnnnnnnnnnnnnnnnnnnnnnnnnnnnnnnnnnnnnnnnnnnnnnnnnnnnnnnnnnnnnnnnnnnnnnnnnnnnnnnnnnagctacgcacaagcatcatgtgggaatgcagacaaattttactcataaaaatgaaataaaagaaaatgggagcccttcatggtgtctctgtaacctgagcaacagttttaaacacaattttctctgctgtctcctgtttaacttttgattacttcaaaaaatattaaaatagaaaaataaaataaactttctgtggtttatttattcaactrcagtaaaaaatatttctctgatgttctgaatattttgaagattgttaacatacatgctttctttccttcctttccagaaacagaagaaagtgcagacagtcagagcccttcgcatttgatactcagcgctattatgttctcttcattgccggatgtcaagtctcgatatcagaacagcttcagtgaagtactctcctattaagctgaggtaattcttcctaacaacttgtttttaagcattaccggaagtcttctgttccctgccaataaaagtttttctgggcagaacattttgctgg

SEQ ID NO: 29711 - DNA, 600 bp, Chicken  19866894248896_1
aaggccagggcagcacagggcactgagatggctgagtcagcagggttctgcatccacagcagtcccccaaagaggagacaggggcttgtcgtgcccttgtaccttctgagctgtggatttagtggtgagctgagcaggtttgtgcagggtagcagagtactggggaggtggtgagggtatccccctactgtttgcactgaaacagttcctgtgcctccttgggtgtgctttggctcacaagggtaaaactgtctttgcaaacgaccaggattcactggaggaagcatctcttgcaggtcmagtggctggtgtcttgctgctccaagccaaggctactacaagccaagagtggtttggtgttggaatatgtgacagaagcatgccagcaaggagctagggcaagaccatcccacccgccctgctttgacaatgatcttggaaatcttcagtcctcagagtcatcttcctttacaccagattgatatgaaacattggactttctctgtctagtagcaaatacttctcttgtggctgtcaggaaacagagaagagtgaaaatggagaggtaaggcacttctgtatgtccatcagatgttactg

SEQ ID NO: 29712 - DNA, 600 bp, Chicken  19866894248897_1
ctggctgtttggacctggaagtgttgggggatatatagcattcaaggtcactgtgtgattaaggacagcgagctgccatcacatacacaaggtgttagcatagccttgtccagaaaaaaaaaaccaacccagaaatgaatcattactgtttgctctttaccatagtggtagacacttcaaggaacagagaaagcaatttcttacttataaattgttttaccctttttcctttgagccatcactctcaggtccctcccttctgatcgactgattgacagtttcaatggaaaaagcagttgrctgctaaaaaaaaaaacacatcacaaccttctctttagttttgtatgtgggaatgcaagtttgaaatgaatcctgtgagactaattggatgtgattggcatctgccactggcacagtgaggagaggaaagacctccgttcctgatggggagaaaaccgacaccttgcaggatgtgatcctttctccttcattcatcatctctcagcgttcacagcgatagctaaataacagaaaacaaattccaggttccaagtctgctttttgaaatgctaaaaagcaaatcaacagcctggttcttcc

SEQ ID NO: 29713 - DNA, 600 bp, Chicken  19866894248901_1
cactggtaattgaactgttcatgtaacgctaagggtttttactaagtccagtaagttctgcatgtttacagctgttcagtttgaatccatttttatactcttccttttctctagagttggaggctgccaaaaagcaagcagagattgacaagaaagctattgacgatcttgtgagggaaagggatacactaagcaaggtgagcttgcatttgtaatactgataaacaaattttgcaacttgagaatgaaatgtctatagtttaaactctcacagagaggcataaatactgtaggataaawaatgatgagtcaaacagtcagatccttaagcaggtgcttatagtgtgcactgaagtagtgctaatacytgtaagcacacaaaatatttctaagctataacatataaaccatcatggacttagacaaaaaaaagtgacacgttcatyttgaaaatccattgcttaatgtctgaaaagttgattacatctgtgcttttacactctgtagcatatcaaagttaatattaatctaggcaaattaattctgtagtagcaaaagaacaaaccaaaatgttggtgcaccatgtagcagcttggcaga

SEQ ID NO: 29714 - DNA, 600 bp, Chicken  19866894248901_2
cagctgttcagtttgaatccatttttatactcttccttttctctagagttggaggctgccaaaaagcaagcagagattgacaagaaagctattgacgatcttgtgagggaaagggatacactaagcaaggtgagcttgcatttgtaatactgataaacaaattttgcaacttgagaatgaaatgtctatagtttaaactctcacagagaggcataaatactgtaggataaawaatgatgagtcaaacagtcagatccttaagcaggtgcttatagtgtgcactgaagtagtgctaatacytgtaagcacacaaaatatttctaagctataacatataaaccatcatggacttagacaaaaaaaagtgacacgttcatyttgaaaatccattgcttaatgtctgaaaagttgattacatctgtgcttttacactctgtagcatatcaaagttaatattaatctaggcaaattaattctgtagtagcaaaagaacaaaccaaaatgttggtgcaccatgtagcagcttggcagactatgctaatactaatcttttttcagtccatttctcttactgatcattttccatcagcccaaagtttt

SEQ ID NO: 29715 - DNA, 600 bp, Chicken  19866894248901_3
tgccaaaaagcaagcagagattgacaagaaagctattgacgatcttgtgagggaaagggatacactaagcaaggtgagcttgcatttgtaatactgataaacaaattttgcaacttgagaatgaaatgtctatagtttaaactctcacagagaggcataaatactgtaggataaawaatgatgagtcaaacagtcagatccttaagcaggtgcttatagtgtgcactgaagtagtgctaatacytgtaagcacacaaaatatttctaagctataacatataaaccatcatggacttagayaaaaaaaagtgacacgttcatyttgaaaatccattgcttaatgtctgaaaagttgattacatctgtgcttttacactctgtagcatatcaaagttaatattaatctaggcaaattaattctgtagtagcaaaagaacaaaccaaaatgttggtgcaccatgtagcagcttggcagactatgctaatactaatcttttttcagtccatttctcttactgatcattttccatcagcccaaagtttttgtactgcaagatagcatctcatgttattgtcattcgtgaagtgtaatctagtaaa

SEQ ID NO: 29716 - DNA, 600 bp, Chicken  19866894248901_4
gacaagaaagctattgacgatcttgtgagggaaagggatacactaagcaaggtgagcttgcatttgtaatactgataaacaaattttgcaacttgagaatgaaatgtctatagtttaaactctcacagagaggcataaatactgtaggataaawaatgatgagtcaaacagtcagatccttaagcaggtgcttatagtgtgcactgaagtagtgctaatacytgtaagcacacaaaatatttctaagctataacatataaaccatcatggacttagacaaaaaaaagtgacacgttcatyttgaaaatccattgcttaatgtctgaaaagttgattacatctgtgcttttacactctgtagcatatcaaagttaatattaatctaggcaaattaattctgtagtagcaaaagaacaaaccaaaatgttggtgcaccatgtagcagcttggcagactatgctaatactaatcttttttcagtccatttctcttactgatcattttccatcagcccaaagtttttgtactgcaagatagcatctcatgttattgtcattcgtgaagtgtaatctagtaaattcaatgctaaaagattatttt

SEQ ID NO: 29717 - DNA, 599 bp, Chicken  19866894248904_1
  misc_feature (1)..(105): n is any nucleotide
nnnnnnnnnnnnnnnnnnnnnnnnnnnnnnnnnnnnnnnnnnnnnnnnnnnnnnnnnnnnnnnnnnnnnnnnnnnnnnnnnnnnnnnnnnnnnnnnnnnnnnnnnttaatctaaaaatgatacacaaccacgtttacagtaaacagctactatactgcataataggtacacaaaacaaaatagaaaaaaatacttacctcttctagatttctatgccaatgacattttctttgtttatctgagggtaaaattgacttcagggttttctcttagttctgtgggcaagttgtcattagttgrttggtctcaaactcaggaggttaatttcacctaaccaaaacatatatatcatagaagaaatatataaatatataaatccacaacaaaaaatatttcagaatcatgctttcctgagatatgaagacacyagatttccagctgcaatgagcttgggtgacttcttgaacagaaagctgtggcttggttagataggtgggtttcagttccaaaaggattwaaaaaactgtacagtactttcaggtatctcaaggaatccatacatgttaaaaagagagttggggtgatccttaatttacatc

SEQ ID NO: 29718 - DNA, 600 bp, Chicken  19866894248904_2
cacgtttacagtaaacagctactatactgcataataggtacacaaaacaaaatagaaaaaaatacttacctcttctagatttctatgccaatgacattttctttgtttatctgagggtaaaattgacttcagggttttctcttagttctgtgggcaagttgtcattagttgrttggtctcaaactcaggaggttaatttcacctaaccaaaacatatatatcatagaagaaatatataaatatataaatccacaacaaaaaatatttcagaatcatgctttcctgagatatgaagacacyagatttccagctgcaatgagcttgggtgacttcttgaacagaaagctgtggcttggttagataggtgggtttcagttccaaaaggattwaaaaaactgtacagtactttcaggtatctcaaggaatccatacatgttaaaaagagagttggggtgatccttaatttacatctatcctgtaatgaggatggtattaaagttatcaatgtcttctgcatatgctgagaatcacagacaccactgccaaaaaatgtcattatttkcacaaggagcactagacttggcctaagaacagaatttt

SEQ ID NO: 29719 - DNA, 600 bp, Chicken  19866894248904_3
aatgacattttctttgtttatctgagggtaaaattgacttcagggttttctcttagttctgtgggcaagttgtcattagttgrttggtctcaaactcaggaggttaatttcacctaaccaaaacatatatatcatagaagaaatatataaatatataaatccacaacaaaaaatatttcagaatcatgctttcctgagatatgaagacacyagatttccagctgcaatgagcttgggtgacttcttgaacagaaagctgtggcttggttagataggtgggtttcagttccaaaaggattwaaaaaactgtacagtactttcaggtatctcaaggaatccatacatgttaaaaagagagttggggtgatccttaatttacatctatcctgtaatgaggatggtattaaagttatcaatgtcttctgcatatgctgagaatcacagacaccactgccaaaaaatgtcattatttkcacaaggagcactagacttggcctaagaacagaatttttaagatagaccatagacctctgtgaagttgcagcaaycagcaatgcatcctgttaaatgaagcccactgatggcatcatagttatcaga

SEQ ID NO: 29720 - DNA, 600 bp, Chicken  19866894248904_4
tatttcagaatcatgctttcctgagatatgaagacacyagatttccagctgcaatgagcttgggtgacttcttgaacagaaagctgtggcttggttagataggtgggtttcagttccaaaaggattwaaaaaactgtacagtactttcaggtatctcaaggaatccatacatgttaaaaagagagttggggtgatccttaatttacatctatcctgtaatgaggatggtattaaagttatcaatgtcttctgcatatgctgagaatcacagacaccactgccaaaaaatgtcattatttkcacaaggagcactagacttggcctaagaacagaatttttaagatagaccatagacctctgtgaagttgcagcaaycagcaatgcatcctgttaaatgaagcccactgatggcatcatagttatcagagtactgctacaggcagtgatgctaagatgaaaggtaagtagaaagttagaagtgatagaatgaaagcaaagatagaagcattgcattaagcaaataagtgaataaacatccttctctcaccagaccataaaatatatacggcaaaccataaccatatgattactgaaaactat

SEQ ID NO: 29721 - DNA, 588 bp, Chicken  19866894248904_5
acagaaagctgtggcttggttagataggtgggtttcagttccaaaaggattwaaaaaactgtacagtactttcaggtatctcaaggaatccatacatgttaaaaagagagttggggtgatccttaatttacatctatcctgtaatgaggatggtattaaagttatcaatgtcttctgcatatgctgagaatcacagacaccactgccaaaaaatgtcattatttkcacaaggagcactagacttggcctaagaacagaatttttaagatagaccatagacctctgtgaagttgcagcaaycagcaatgcatcctgttaaatgaagcccactgatggcatcatagttatcagagtactgctacaggcagtgatgctaagatgaaaggtaagtagaaagttagaagtgatagaatgaaagcaaagatagaagcattgcattaagcaaataagtgaataaacatccttctctcaccagaccataaaatatatacggcaaaccataaccatatgattactgaaaactattttatttgatgatgcatacttactccatttgatgtatttatagctctttaattccttccacct

SEQ ID NO: 29722 - DNA, 600 bp, Chicken  19866894248905_1
tgaggtgccacttcactctgaagtcttcaaaaacttgtttattttctcccagctgagcagctctgctccaccaccgtacagaagatgcacacaaccattcaccctgaagctgctcgtagcagaaggaaggctgatgctcaaaaagtttgattcacataattgcattcaaaaccaaaacaaggtgtcaggatagcacagaacacagggtgacaagacccaaccaacacatacctacccccactgaagaatactcaggttttatttgaatgctgaatacaacaagcagagggtttgcactgytagagcagtcaccagcaactcaaagctgggagagctcaactgcccacccttcctgctgagtgtgaatgggagttaagagatattacaaccacagctctttgaaatttctctttaccacttacaaagctattcactttgtgcatctgctttccttgatataagcttttcacattcccatatgtccaaccaacacatcacagaacagggcgttccagtttaggaacaatcagacttgaatgctcttggtgcaatttttctgccaactgcattgtgctggaaaggaatatytgggagatgtaa

SEQ ID NO: 29723 - DNA, 600 bp, Chicken  19866894248905_2
ggtttgcactgytagagcagtcaccagcaactcaaagctgggagagctcaactgcccacccttcctgctgagtgtgaatgggagttaagagatattacaaccacagctctttgaaatttctctttaccacttacaaagctattcactttgtgcatctgctttccttgatataagcttttcacattcccatatgtccaaccaacacatcacagaacagggcgttccagtttaggaacaatcagacttgaatgctcttggtgcaatttttctgccaactgcattgtgctggaaaggaatatytgggagatgtaaataagtttaaaagctaggacagaaggaggggaagttgtgaacagtgaagcacccgctarcagccagacactccttattgctgaccttttctgcagggagcccargttacactattgagtactcagcactcaattttaataccaaatatctgaatgacaaatacagcagaagtttcagaagggtttggttgtccatactgacagagaaagttgtcattactacttatcctagacagattgaagctatgagaatgagaaactcaattatttcccagcagtaaagcaaatt

SEQ ID NO: 29724 - DNA, 600 bp, Chicken  19866894248905_3
gtgtgaatgggagttaagagatattacaaccacagctctttgaaatttctctttaccacttacaaagctattcactttgtgcatctgctttccttgatataagcttttcacattcccatatgtccaaccaacacatcacagaacagggcgttccagtttaggaacaatcagacttgaatgctcttggtgcaatttttctgccaactgcattgtgctggaaaggaatatytgggagatgtaaataagtttaaaagctaggacagaaggaggggaagttgtgaacagtgaagcacccgctarcagccagacactccttattgctgaccttttctgcagggagcccargttacactattgagtactcagcactcaattttaataccaaatatctgaatgacaaatacagcagaagtttcagaagggtttggttgtccatactgacagagaaagttgtcattactacttatcctagacagattgaagctatgagaatgagaaactcaattatttcccagcagtaaagcaaatttccagtgctaggtgctacctggtcaatctggagatacagatgaaaaatctgctctgtattgcaaagtatga

SEQ ID NO: 29725 - DNA, 600 bp, Chicken  19866894248905_4
tttctctttaccacttacaaagctattcactttgtgcatctgctttccttgatataagcttttcacattcccatatgtccaaccaacacatcacagaacagggcgttccagtttaggaacaatcagacttgaatgctcttggtgcaatttttctgccaactgcattgtgctggaaaggaatatytgggagatgtaaataagtttaaaagctaggacagaaggaggggaagttgtgaacagtgaagcacccgctarcagccagacactccttattgctgaccttttctgcagggagcccargttacactattgagtactcagcactcaattttaataccaaatatctgaatgacaaatacagcagaagtttcagaagggtttggttgtccatactgacagagaaagttgtcattactacttatcctagacagattgaagctatgagaatgagaaactcaattatttcccagcagtaaagcaaatttccagtgctaggtgctacctggtcaatctggagatacagatgaaaaatctgctctgtattgcaaagtatgacaccttcttccactgctgttactgcaacagagcacaggcacaaag

SEQ ID NO: 29726 - DNA, 599 bp, Chicken  19866894248918_1
  misc_feature (1)..(128): n is any nucleotide
nnnnnnnnnnnnnnnnnnnnnnnnnnnnnnnnnnnnnnnnnnnnnnnnnnnnnnnnnnnnnnnnnnnnnnnnnnnnnnnnnnnnnnnnnnnnnnnnnnnnnnnnnnnnnnnnnnnnnnnnnnnnnnnncaacttgctgagtgtgcacttgatcccactgttgatgtaattgaggaagatatgaaaggtcattggtcccattactgaccccagagcatctggtgggctggctgagtcagagttagtgatgatgtaccatttctgccattgtaggaattctatcagagtgcctactttctcygaacatttatcattaaagggttccatgcttatctagactctaatttttttcactacaataattaattttatttggaaataagattatttttcctcttatttctgcaatacaaaataaaattgtttcagtgtatcatctctatgtgcttaaatacattttaaattgctgtgacttttaaatcttgtgattaaatctaattgtgattgattacctgataccagtctcgcatgacttctagaaatctcagaaattaaagctttcatcccaacaagaattaccagttaaaataatcttttaat

SEQ ID NO: 29727 - DNA, 600 bp, Chicken  19866894248918_2
attatttttcctcttatttctgcaatacaaaataaaattgtttcagtgtatcatctctatgtgcttaaatacattttaaattgctgtgacttttaaatcttgtgattaaatctaattgtgattgattacctgataccagtctcgcatgacttctagaaatctcagaaattaaagctttcatcccaacaagaattaccagttaaaataatcttttaataagcaactctttccccttatgtatatttagtaattctaagggaaggacttcttattgaatgcacttgatgcataactgtaatrgaaaaaaggaaggtagcatccagtaaatcttcagcactgagaggagatcgattcagttgatatatgattaattccatttggtgtaacaacagaaatgttctcttctagtgaagactattttattgttgacctcaagatgagtgcagattttttcctggttagttaaaaacaaatatcaaagcaatattatgtataaatgtgtttatagctaattacttcattttctcgtaaactcacatgtgtggttttaaaccatctatatcagtggtgacatgtacagtcaaaattctaatgtcatct

SEQ ID NO: 29728 - DNA, 600 bp, Chicken  19866894248923_1
gatagagaggacaaaggtgggaaccgtggagcagctcaggttgagaagacggccctaagagacagcaggagaggggcgctgagagctgagagtgcctccgaggcaaaacaaatcaaacctggagataggactcacctctatccctctatccctccctgggacaggggacaggcacagggcagtgattcaagagccacccatgggaccagagtgcctcagtttccaccccagccctcagctctggggagtggggattctgtggctgcttggaactgggagtctctcctactgccaggagakctccagggggaagaggagacaaccaacccgtttgctgggtgggaaaccctgtaacagcccgatgcagagggtgtttggctgacagggatggcttctggctmaaagaacaaatcagatggcacctctgtggctgcgtgtggtacgtggtacctcctcagcctcaagagaaaggataatcacaacgaaaagacatcgagaaacccyttcctgagctctcccggctacgaagcgtgccagcacctttccacctgcttaaacctccctttccaattctgaccctcagaggtttcctggtggacg

SEQ ID NO: 29729 - DNA, 600 bp, Chicken  19866894248923_2
ggcaaaacaaatcaaacctggagataggactcacctctatccctctatccctccctgggacaggggacaggcacagggcagtgattcaagagccacccatgggaccagagtgcctcagtttccaccccagccctcagctctggggagtggggattctgtggctgcttggaactgggagtctctcctactgccaggagakctccagggggaagaggagacaaccaacccgtttgctgggtgggaaaccctgtaacagcccgatgcagagggtgtttggctgacagggatggcttctggctmaaagaacaaatcagatggcacctctgtggctgcgtgtggtacgtggtacctcctcagcctcaagagaaaggataatcacaacgaaaagacatcgagaaacccyttcctgagctctcccggctacgaagcgtgccagcacctttccacctgcttaaacctccctttccaattctgaccctcagaggtttcctggtggacgcacagctcccagcgcacctcggccagcagcaccacccgcttcccatccggccagatggacgtggtccacttgggaacggacccgctcccaggtcagcttcg

SEQ ID NO: 29730 - DNA, 600 bp, Chicken  19866894248923_3
accagagtgcctcagtttccaccccagccctcagctctggggagtggggattctgtggctgcttggaactgggagtctctcctactgccaggagakctccagggggaagaggagacaaccaacccgtttgctgggtgggaaaccctgtaacagcccgatgcagagggtgtttggctgacagggatggcttctggctmaaagaacaaatcagatggcacctctgtggctgcgtgtggtacgtggtacctcctcagcctcaagagaaaggataatcacaacgaaaagacatcgagaaacccyttcctgagctctcccggctacgaagcgtgccagcacctttccacctgcttaaacctccctttccaattctgaccctcagaggtttcctggtggacgcacagctcccagcgcacctcggccagcagcaccacccgcttcccatccggccagatggacgtggtccacttgggaacggacccgctcccaggtcagcttcggggggtcctgaggctggtctgcaggcaggatggagaggctggagtcaccacggggcgaccacggggtaggcaggggcggcagggacactcaccacatcgatct

SEQ ID NO: 29731 - DNA, 591 bp, Chicken  19866894248926_1
cctgttgctgtgattttggcttgatctctcttatttaacacggcttcaagaaaggaagacagcaaaactcactcgtgtttcatgatgttgtgctgaggtagagtaccatcaggggttacaaaactcatccgggcacagatatccttatagtcctgattccgccgctcaaagtcctccacgtgagcagccaagtgggaattgacaatgcagaaggtggtgttgtggaacacgaaccgcaccgccacgccgcccttgttgccctgggcagaacaggtatcagtggttgttagaggagaacgsacatgaggcatcagggagaacacagggatggcacagagatgagaacaggatcagaccgtgccatttcttgtatgggtacacaggagcaatagaccggcctcggtgactcaccatctttccgatgatcccggtgcccacagactctgacatgacctctctgatgttgctcagctgatccttcctagcaaacacaagcagcatcatcccaactaggcggaccatctgcacctgcaaaaaataaaagcaatcctgagtttccagaaggggagtggtaacacacgtccaatttgc

SEQ ID NO: 29732 - DNA, 594 bp, Chicken  19866894248928_1
ctggagcttgccagtgccccccctccatcatcacacctcctactattctgaagactattttgtgggaaagctgaacatatttgctggctcactggcccctagcgcactgactgctcattcagtaacattcacacaagactggaaaagacttgtcatcctcttactatctggcactctgttactagcttactactgtttccctctgcagtacgggtccaaattggatgtcagacacagaaaaatgccagcaaaagctctggtttgcagtcagtaaccagtcaccggacgcagtccaaaacyagacacacgctggcacgttatcgttagcacagtgtttgccatgaacaagcccttttccattcatctgcttgccagaaaaggatgggcggggaagggggggggggaaggaaatagggtgattacaaaataatttcaaggtgctaacatcctgtagagttagtcaaacatttgggcagatactgggatagacagatcttcttgcttctgcagccagaagcaaattcccacagagattctacgacctccatgcaattgctttctggtgcctaaacgtccaggtaaggaaggaaggga

SEQ ID NO: 29733 - DNA, 600 bp, Chicken  19866894248930_1
gtaggataataggccctagaatatctgcaaaatggtgaatataaagaagatgtgccttatgaagtattaaaaaactggattcaagtgctcagatgcagaaagtaagaataaaaccaccacaagtgtatgggctgagggcctgccagtgaggagaaggtggcatttgttcagttgagctttgtaggaatatgaaggagcatgggctactgctcttctgagctcttcacaagcagctcagtggcttcagggcaggactgctccgtgctgccactttcatacacgccttgttctgcataattrgctgtgtagaaataatgatttcttcaatacaaatcatattttttctcaggaagtcgacctccagtgaagtaatacgtagcacatgagctctagagttactgatgttactaatgcaaactttgtacattttatttttgtggtgaaggtttgtcatctttttcatcttaaatgcctcatttagagagcataatcttctgttaatcatgaattactgttattggaggaaagtcgtcttctgagtcacttttatgaaatttcttcattttctcttttagtcttactttggtaagattatgttta

SEQ ID NO: 29734 - DNA, 599 bp, Chicken  19866894248937_1
  misc_feature (1)..(110): n is any nucleotide
nnnnnnnnnnnnnnnnnnnnnnnnnnnnnnnnnnnnnnnnnnnnnnnnnnnnnnnnnnnnnnnnnnnnnnnnnnnnnnnnnnnnnnnnnnnnnnnnnnnnnnnnnnnnnncacatgattctgcccatgggtagggattttgtctcatgcgtagggtgggctgcgcctccctaaaacttgggacttgctgcgtgtccatcatgcatcacattccctgcacaagatgtgcacgtagatggcagcatcatgtctgaggggctcataggcgttgcagcctctggtgtgctgtaatctgaaaatwcttggcaaatggccaaatcccttctgttccaatcagactattatttatttatttgtttrtttatgatggagaaagcagtgccgtttgrgctggtaaagctaacaaaggaacttaaaaccatgccggtttttccttgccctcctttttgcaaattggctggcataatttctaaagatacagctcatcagttcaatgcccagcttcctagagagagctggataccaggatttccatgtaacctttgtaaatctcttccaaaatctttcgcctttcagtggattagyacaatcagtaagcaa

SEQ ID NO: 29735 - DNA, 599 bp, Chicken  19866894248937_2
  misc_feature (1)..(51): n is any nucleotide
nnnnnnnnnnnnnnnnnnnnnnnnnnnnnnnnnnnnnnnnnnnnnnnnnnncacatgattctgcccatgggtagggattttgtctcatgcgtagggtgggctgcgcctccctaaaacttgggacttgctgcgtgtccatcatgcatcacattccctgcacaagatgtgcacgtagatggcagcatcatgtctgaggggctcataggcgttgcagcctctggtgtgctgtaatctgaaaatwcttggcaaatggccaaatcccttctgttccaatcagactattatttatttatttgtttrtttatgatggagaaagcagtgccgtttgrgctggtaaagctaacaaaggaacttaaaaccatgccggtttttccttgccctcctttttgcaaattggctggcataatttctaaagatacagctcatcagttcaatgcccagcttcctagagagagctggataccaggatttccatgtaacctttgtaaatctcttccaaaatctttcgcctttcagtggattagyacaatcagtaagcaaatctcaaatgaatgaggagcaaccaaacatgtcaaagcggtgaatgactaattggtgct

SEQ ID NO: 29736 - DNA, 599 bp, Chicken  19866894248937_3
  misc_feature (1)..(22): n is any nucleotide
nnnnnnnnnnnnnnnnnnnnnncacatgattctgcccatgggtagggattttgtctcatgcgtagggtgggctgcgcctccctaaaacttgggacttgctgcgtgtccatcatgcatcacattccctgcacaagatgtgcacgtagatggcagcatcatgtctgaggggctcataggcgttgcagcctctggtgtgctgtaatctgaaaatwcttggcaaatggccaaatcccttctgttccaatcagactattatttatttatttgtttrtttatgatggagaaagcagtgccgtttgrgctggtaaagctaacaaaggaacttaaaaccatgccggtttttccttgccctcctttttgcaaattggctggcataatttctaaagatacagctcatcagttcaatgcccagcttcctagagagagctggataccaggatttccatgtaacctttgtaaatctcttccaaaatctttcgcctttcagtggattagyacaatcagtaagcaaatctcaaatgaatgaggagcaaccaaacatgtcaaagcggtgaatgactaattggtgcttgtcaccattcttccaatttgcagtgaca

SEQ ID NO: 29737 - DNA, 600 bp, Chicken  19866894248937_4
ctgtaatctgaaaatwcttggcaaatggccaaatcccttctgttccaatcagactattatttatttatttgtttrtttatgatggagaaagcagtgccgtttgrgctggtaaagctaacaaaggaacttaaaaccatgccggtttttccttgccctcctttttgcaaattggctggcataatttctaaagatacagctcatcagttcaatgcccagcttcctagagagagctggataccaggatttccatgtaacctttgtaaatctcttccaaaatctttcgcctttcagtggattagyacaatcagtaagcaaatctcaaatgaatgaggagcaaccaaacatgtcaaagcggtgaatgactaattggtgcttgtcaccattcttccaatttgcagtgacagttcctcctggtagcactgagaggcgtctgttctcagagaggccagaaatcctgttggaccatttcatatgtaattgtatgtttttgtttctcctttcctaagcacagtagcatgttctcctataaggtttgaaaagaacaccaacctactgtatctgttagcattcctcgtttcttcttctattctattttgtcat

SEQ ID NO: 29738 - DNA, 535 bp, Chicken  19866894248937_5
gcaaccaaacatgtcaaagcggtgaatgactaattggtgcttgtcaccattcttccaatttgcagtgacagttcctcctggtagcactgagaggcgtctgttctcagagaggccagaaatcctgttggaccatttcatatgtaattgtatgtttttgtttctcctttcctaagcacagtagcatgttctcctataaggtttgaaaagaacaccaacctactgtatctgttagcattcctcgtttcttcttctattctattttgtcatctaaatatggctgccctttggattccgactcayaaacacaaggagcagtataatttgacagtccttgatrccactctctgcatactccatttccatagccttagaaggacataagcagaactcacttccaagagtttacgaagcagttctgataaacagagactgttattcagataaaaagttgatgagttgggtgaatttttagaaagaatacttaaagggaagggaataaagggcaatgatttatgcctgttggaacatttcatgg

SEQ ID NO: 29739 - DNA, 498 bp, Chicken  19866894248937_6
tgcttgtcaccattcttccaatttgcagtgacagttcctcctggtagcactgagaggcgtctgttctcagagaggccagaaatcctgttggaccatttcatatgtaattgtatgtttttgtttctcctttcctaagcacagtagcatgttctcctataaggtttgaaaagaacaccaacctactgtatctgttagcattcctcgtttcttcttctattctattttgtcatctaaatatggctgccctttggattccgactcayaaacacaaggagcagtataatttgacagtccttgatrccactctctgcatactccatttccatagccttagaaggacataagcagaactcacttccaagagtttacgaagcagttctgataaacagagactgttattcagataaaaagttgatgagttgggtgaatttttagaaagaatacttaaagggaagggaataaagggcaatgatttatgcctgttggaacatttcatgg

SEQ ID NO: 29740 - DNA, 599 bp, Chicken  19866894248939_1
  misc_feature (1)..(50): n is any nucleotide
nnnnnnnnnnnnnnnnnnnnnnnnnnnnnnnnnnnnnnnnnnnnnnnnnncattgcacatattgttattctaggaattgtttcccccttgtgccctaataacctcccacacaacacacgcagaagtgaaacaactgcaatactcagtgctgttacacacatcatcaccgatataagcaaacatttctttaactttcccttccccattttgttttcgttaagagggaaccaactcattgacaccagtgctaagagctgtgctcatcaccggacaagccagtttccattagtgctcacactscaggcagttctgtgtcccgaaacaaaagaaaggtctgaaataagcttcatgctctgcaatgatcacctttggagagaagctatcctgtaagayctggaaaagtcttaaatgcctcatttaaaaataatggaattcttgctttatggcttcaagtaatggttgtcatgtcactgcctgtccacagctggtatcgaagtgcctctctgagatgtctacaaacacaataagcaacccaagagtggatatcttcctgcagcacagaatttattcttatgcgacttctatcccaacaaaaccac

SEQ ID NO: 29741 - DNA, 600 bp, Chicken  19866894248939_2
cctaataacctcccacacaacacacgcagaagtgaaacaactgcaatactcagtgctgttacacacatcatcaccgatataagcaaacatttctttaactttcccttccccattttgttttcgttaagagggaaccaactcattgacaccagtgctaagagctgtgctcatcaccggacaagccagtttccattagtgctcacactscaggcagttctgtgtcccgaaacaaaagaaaggtctgaaataagcttcatgctctgcaatgatcacctttggagagaagctatcctgtaagayctggaaaagtcttaaatgcctcatttaaaaataatggaattcttgctttatggcttcaagtaatggttgtcatgtcactgcctgtccacagctggtatcgaagtgcctctctgagatgtctacaaacacaataagcaacccaagagtggatatcttcctgcagcacagaatttattcttatgcgacttctatcccaacaaaaccaccttcatacacgcagacacagcacacacacgcatacacattctgaggtgtggttcttcagcaccctgtacatggcagtcactctaccacactgct

SEQ ID NO: 29742 - DNA, 599 bp, Chicken  19866894248943_1
  misc_feature (1)..(127): n is any nucleotide
nnnnnnnnnnnnnnnnnnnnnnnnnnnnnnnnnnnnnnnnnnnnnnnnnnnnnnnnnnnnnnnnnnnnnnnnnnnnnnnnnnnnnnnnnnnnnnnnnnnnnnnnnnnnnnnnnnnnnnnnnnnnnnnagcaggagtagaagtcaacaggccaaactgcagcacagttagagctgttagagtctctttttgatttccaacagtatccaaggcattctctgataaaaatacaaaaggcaagatctcccttctttgttatatgaaatggctctgcaagttggtttagctaagagtcagtacayttatatatgtgtaaatgaagctaatttcccttacttttattctaaattttctctaaaaaatatttttgagttattgaattctgttatttttttattattatttttatatgcatttttttcttttcattcttctgactcaagctgtcctacaggtaaagtggacagcaactacgctctcagtctgtaaattcctgttcatctgcaacgtacccaagtacatatatgggtacagtagccatgaaggatgttgaaggggggttcaacacatctcctcagcttcctctgctggcagggcctaa

SEQ ID NO: 29743 - DNA, 600 bp, Chicken  19866894248944_1
caaaggaaagtctgattatcacctcagaaatataaaaactttattcttcctgtatctcagaatctctctaagattgtgaaggaaatcagcatattcctgggtataagcatcagtgatgaagatatccaagatatctgcaagaaatcatccttctcagagatgaaaaaggacacagaaaaagaaaacagtgatcccagtcacactgtctgtgccctgacatccaacaggaacctaattttccgaaaaggtaagtttatagtcctgacttaatacagaatcatcaactgggacctatccaamagaagcccagatrgattttaagacattttgagtcactcccaggaaacagcaattggattctccaatttgaagcctttttaaaaagcattctctaagttcttcagttgcaaatgcacgcttacgctagagaaacatggaaggggttcttaagagtttgttctacatgagctttggagcttaaaggaaagttcacagagtattaccctttatctgcatttttgtatttaaagtttaccctcagtctctcacaagcctctatgtgtctcctctcgaattaccagtgaaggtcacttggtttgc

SEQ ID NO: 29744 - DNA, 600 bp, Chicken  19866894248944_2
gattatcacctcagaaatataaaaactttattcttcctgtatctcagaatctctctaagattgtgaaggaaatcagcatattcctgggtataagcatcagtgatgaagatatccaagatatctgcaagaaatcatccttctcagagatgaaaaaggacacagaaaaagaaaacagtgatcccagtcacactgtctgtgccctgacatccaacaggaacctaattttccgaaaaggtaagtttatagtcctgacttaatacagaatcatcaactgggacctatccaamagaagcccagatrgattttaagacattttgagtcactcccaggaaacagcaattggattctccaatttgaagcctttttaaaaagcattctctaagttcttcagttgcaaatgcacgcttacgctagagaaacatggaaggggttcttaagagtttgttctacatgagctttggagcttaaaggaaagttcacagagtattaccctttatctgcatttttgtatttaaagtttaccctcagtctctcacaagcctctatgtgtctcctctcgaattaccagtgaaggtcacttggtttgctagaatgggaaag

SEQ ID NO: 29745 - DNA, 600 bp, Chicken  19866894248950_1
tgttagtttttgcttcacgtacttttaaagaaaactatagtatttcatactaaccgaacatttaagaacttaaattccaactctgtctcctttatattgtacctcgaagaagagatactaactgattctttatggctctttataaaagagtaagagaagatgctctaggtatttcttgggatgatttaacttgtctagattttaagtattttcttataaattttagctattactacttctactaaactgactaaagcttatggaatctattcagtatttaagacaatgtagatttaactyaaatgctttctcttctcaggaaatgtgagactgctgtcatgtcacaaagtaaagaggcaggtgactcaaaacagacttactcaccagcgtttgacagttactcagagtcctcaagatcaaaggttcatgatcgaaggtaagaagagattaggtttgggttttttttctgtttacctgctgtaaataagaactacattttgaaaatgcttgcaaagtaattttgagacatgttgttcccttgtttgcttcttaaagagagaaagtgggtattaaaccttaacacttctgggatgttattca

SEQ ID NO: 29746 - DNA, 441 bp, Chicken  19866894248956_1
cataactggaagcaattttactttgctgctcttaatgctcatgatgctagcaagagggaagagcaggcagttattccaacatgcccaacctgcacttctgtagctccacaacagctacgagtctacatttgccgtagaggaaagtgaaaaccacagccaactttcttcagtggtgcccttggctgtgaactatggtggttcagcgggaccctgaagagaggaaacgtgaacgaggcaggaacgtttccatgcaccttaccttgagccagggctttttttccctaaggtcttgagcattgyacatcagaagaagctaagtgacatgacctgtgatacttactctaaattacgcatgtttaacagcacccaaggacctcatgaaatctattacactggacactgaacactggaaaggtttgcaacccaaagggctgtttttca

SEQ ID NO: 29747 - DNA, 600 bp, Chicken  19866894248957_1
cattcttgccttcagggagcatagcaagataatgagacacagaccttgggaaggacttgatgcaacagctcacagcactgacttcacctcccagtcctgcgcagccgtccctgtccccacgctctggctggagggaacaaagcaggacactgctacagctggaagaagacaagaggtaaccaatcacatcagaaaaaataaggtcttggtgtttgaacctttgacaaacatggttcagaccccagacaaagcaaagcgattcgcacacagccctgctggagctaggtaatgatgcaggarctgccctggttcagagcactaccagcactctggtttgttttttcccctcctcgaggtcccagctattaaatacatgactgcaggatctcttggtcactctcaaaaaagcacatttaccatttcatccatcacttgaacaggaaaaagccccaaagcctcctacacaaagactccaagcacacaaagcctctcactactgacattttcaagtcttaatatattgtctttgaacagtttgtaaatggtttgggtttggcagaactggcttccagcctcccaggaggcatttttaagtgccct

SEQ ID NO: 29748 - DNA, 600 bp, Chicken  19866894248957_2
caaaacacttctgtcaagtcagagctgtcccagacaggacagagcgccatgcacagacccaaaaatggcaccatccccatcccagagagcttcttgcccatgcaggacacagccaaacagtgtcacaaactgctggaaaaggcacctcatgtgcacctgcactacacctccctccccctgccatgctgcccaggacaagatggcacacctgcatggattgggcctaacatttccacatgtccttacccaaactacacatcagaaaggtttaggacctggtcatgccagctctaaccccawcacctacccacgtgcccacaccttcaacgctttcagccttgctgcagaaaacttttgctgccattttcgctctcccacttcctgctcacatcaggcagccaagcaggaaggactaaaatccacagagcagaccaggaagcaccagagatctgctgcgatgtgctgggtgaagcgctctgtggacacctgggcagaggcttcccaaagcaaacagctttgcaaggagctgagaccgttctctaggctaagagcaaggcgaaaatcacagcacagcccaaatcctgagggcgttcgctccca

SEQ ID NO: 29749 - DNA, 600 bp, Chicken  19866894248958_1
gatggctccgccataatagagccttccagctggccctggactttgtctgttctctagatatacgtagtgtcctgtcaccaggtgatggatcaggttcaacgagcagatggagctgattagatgggtgatctattattttctgctgagcaagtaattcttctgttgggtaatttatccctggagtctgcgtgctgtgttattctcaaggctgtgcattcgtatgggaaaatcacgtatgcattttgccacggagcagctttgcatggctgggccagcatgagcatcgtgagctcacgtgtrctagagcccttgtgcccttggtgggtccccagactattctcacgcctcaggcccttttcaacctctttggacaacactgtcatatagaaataacacagagcagaggattctggagacttgagcagggccgggagctgcaggaggcttacaatgccaggtaccccactggatgataatggctgcattagcatttctccctccaccgaagtctaagctatctctacaggaacagctgctaaactatttgcaaagttcaaagagtacgtattaatattttttcttctccgagtcacattcttc

SEQ ID NO: 29750 - DNA, 600 bp, Chicken  19866894248962_1
tatcatgctggcttttaaggtatctctgtattgcatattgcaagctcatgcaggtttgctatgtccgatgtccaagccagacaaatgtgaagcagctccaggcagtatgctggctaaacaatgactgccacatgtgaaatgcagatgggatgcagtgctttactaactgctcagagaagtgaatttctctttcaggtgagcaaggtcaggaaattcagaatggtgccctatatagtcaagtgcgctgctcaagtgccttgctgctttgaaagatgacgttgaagctttcaaataatgggkttagatgggaaaattcaagaacctgcaatagaaaattgttgtccttaaatgcaatctactgagaactgaggattattttataactaagtgaatatttaatgttttttttttttttaataaaaatattatctgtgactataaagatattcatgaggggaaggagttacaggactgtatgtttatcctagcagaaactggataaaaaatatcaccacagaagaatgggggaccagaggctatgatgattctaacaagaccaatactataaaaataaagcatgtttatctggtaacccctttg

SEQ ID NO: 29751 - DNA, 600 bp, Chicken  19866894248962_2
tactgagaactgaggattattttataactaagtgaatatttaatgttttttttttttttaataaaaatattatctgtgactataaagatattcatgaggggaaggagttacaggactgtatgtttatcctagcagaaactggataaaaaatatcaccacagaagaatgggggaccagaggctatgatgattctaacaagaccaatactataaaaataaagcatgtttatctggtaacccctttgggcacatggctagttgatatctcacactcattattttgagatgtcctatatcttcytttgtctactcccattttggggaaaaaaaaaaaaaaaagtttcctggtgaaaggaggaaatatgtaagctaagcagaatcactgttcccacttctctcaggtccagtgaccaactctttgtataagaagaaggtgtcagggtgaaatcccatgcccatgggcatcaggtaccccacaggaaaagtaagttggaaacaccttcatcttttgtccaaaaggactcacactgtggtgggacttctaagttatagagatgctgcaggggagacattttaagtacacttatcaaatccatgtcag

SEQ ID NO: 29752 - DNA, 600 bp, Chicken  19866894248962_3
ataactaagtgaatatttaatgttttttttttttttaataaaaatattatctgtgactataaagatattcatgaggggaaggagttacaggactgtatgtttatcctagcagaaactggataaaaaatatcaccacagaagaatgggggaccagaggctatgatgattctaacaagaccaatactataaaaataaagcatgtttatctggtaacccctttgggcacatggctagttgatatctcacactcattattttgagatgtcctatatcttcytttgtctactcccattttggggyaaaaaaaaaaaaaaagtttcctggtgaaaggaggaaatatgtaagctaagcagaatcactgttcccacttctctcaggtccagtgaccaactctttgtataagaagaaggtgtcagggtgaaatcccatgcccatgggcatcaggtaccccacaggaaaagtaagttggaaacaccttcatcttttgtccaaaaggactcacactgtggtgggacttctaagttatagagatgctgcaggggagacattttaagtacacttatcaaatccatgtcagaggaaataatgagcatttacttc

SEQ ID NO: 29753 - DNA, 600 bp, Chicken  19866894248962_4; identical to SEQ ID NO: 29752

SEQ ID NO: 29754 - DNA, 600 bp, Chicken  19866894248965_1
ttaacaatgtaaaaatatttttaggtaatgacaatttaattcaaagattttgatatagctataacatcttttccataaagcatgaataaaaataagacaagtacaggtaactatgtgtaatggtccctttaaataattttgacatgttttcttgatttttttcatggtgataattcaagagatctatcagataattacttaaatatatgagatgtgctattcatctaaggaaaaggttagggccatcataggccatgtaaatcttattttatgaaaaggaacgcaaatgaaatgatcacmtaagtcaaggttttataaaatattgactaggattatgtttgctttgggagtaattttattttaatcccttatttgagattctattcctatttacattagacaatcaatcaagaaatgtcattgaatggcagttgggaataaggtcaaaactgcaatatgcttaccttaggaattattgaataactcttttatagacatgcaaatagtggcatggatctttattttccagtgatctgcctcatagatcctctgtgtgggaaatagagaatatgctgctcccaacggatgcttagattgatc

SEQ ID NO: 29755 - DNA, 600 bp, Chicken  19866894248968_1
aacattgggatgtcctcagcaggtacggatccaagaaggatgcatctctatttctgaaggctgtccaccattcctgtgagctgttcagaccacagtaagagaaatacactcagcaggttgccgtgctatttcacacagtcccattaacctgtttattgtaacctgcttcacctcatacctagaaatacgtccaaacctttgtcctgctgcttgggaaaccttgctgactttccccttgctttctgggggagaacaactctgctcttctaagggttggcaacacagggttagtgagctccrtcacctccaacctcccttccacaagcatcactcactgcctagaaagggagcaccaacagctgcataggaactgctctgcctgtagatgctatgcacccgaagaaggctgctaatgcagcatgaggcaccatgcactgcaaccatttgggtgtcctccaactgatgtccgtttgcttgccccacgactgtcagggccaattagcattttgcagttggaaatttacacaacttctgcaaaaatttgcaaccaaatgcaaaaaagggtgtgtttgcaagacagtctgtacaaagagctctgct

SEQ ID NO: 29756 - DNA, 566 bp, Chicken  19866894248968_2
ccatgctgctcctcctaggatcacaactgcttcccaaggcagaagtcatggtggggatgctcacgctgaaggagcagttgggacgtttcttactgctttgtggtttatctatctgcgtctacaagacctacgtgggagcttacagcaggattaattcctagtgtaaacaccatgagccctgctggagtgttttacaaggcttaggtgagaatgttgctgtgtattaccagccaggctgtgggaggaggagggaatgaggggaaagccatataacggagagaggggaaataagggggtccygactgctgaattcacactggttggcacaaatctctatgtctttaccacaaggggcaaacccatttccacccgggcctgctgcccaagtacaggacagcagctcatgctggtttcagaagaaaatcattttttgttgggtctgtggggattttttcccctccagtttgtgtcttaagatgccagcagctaccagaggagagcaggcaggctggggcaaagtgctggggcaaaagcaagcacagggaatgcacggggcttcccaagct

SEQ ID NO: 29757 - DNA, 599 bp, Chicken  19866894248973_1
  misc_feature (1)..(19): n is any nucleotide
nnnnnnnnnnnnnnnnnnntgcttttcctctgcccgtttcggtaacaacaagcagtaattgagctcacagggttagctacttgatattaaaacaactctgtaaagtttcacactgtcaaaattcagaattttgcagctttgcaaggcccagtggatggcctggccgctgtgaaccttaatccagattgcaaatgctctctttgttctggcttttccgctcctacacccataacacgttacatcccacagacagccagtcagcaagcattgcttccagcgttggaaatggtctgtggaaaygggggaccacctcaacgaggcatcctgcaggaagagaaacacctcccaaaggtgagggaagaaaatgcactagcagaagccacacaacacagggggmaaagccctctgcccatgctaggcgtcactgccaaacagagctcctacasagctcctcagttggtcactaagtagctggggataagtgcatcaaactgagatgctgtaatgggcaaatgcttatacacagagaatcttaacctcatttcacatgtgacttcatcttaggtgacttcacaaatgcaattactctgccacctgca

SEQ ID NO: 29758 - DNA, 600 bp, Chicken  19866894248973_2
ctgtaaagtttcacactgtcaaaattcagaattttgcagctttgcaaggcccagtggatggcctggccgctgtgaaccttaatccagattgcaaatgctctctttgttctggcttttccgctcctacacccataacacgttacatcccacagacagccagtcagcaagcattgcttccagcgttggaaatggtctgtggaaaygggggaccacctcaacgaggcatcctgcaggaagagaaacacctcccaaaggtgagggaagaaaatgcactagcagaagccacacaacacagggggmaaagccctctgcccatgctaggcgtcactgccaaacagagctcctacasagctcctcagttggtcactaagtagctggggataagtgcatcaaactgagatgctgtaatgggcaaatgcttatacacagagaatcttaacctcatttcacatgtgacttcatcttaggtgacttcacaaatgcaattactctgccacctgcacagctctgtatgttttatgtgctccttttaccctctaaagcctgaaaaactagttaatttattatttttcatgatcagtcccagatggatgatgtctg

SEQ ID NO: 29759 - DNA, 600 bp, Chicken  19866894248973_3
cccagtggatggcctggccgctgtgaaccttaatccagattgcaaatgctctctttgttctggcttttccgctcctacacccataacacgttacatcccacagacagccagtcagcaagcattgcttccagcgttggaaatggtctgtggaaaygggggaccacctcaacgaggcatcctgcaggaagagaaacacctcccaaaggtgagggaagaaaatgcactagcagaagccacacaacacagggggmaaagccctctgcccatgctaggcgtcactgccaaacagagctcctacasagctcctcagttggtcactaagtagctggggataagtgcatcaaactgagatgctgtaatgggcaaatgcttatacacagagaatcttaacctcatttcacatgtgacttcatcttaggtgacttcacaaatgcaattactctgccacctgcacagctctgtatgttttatgtgctccttttaccctctaaagcctgaaaaactagttaatttattatttttcatgatcagtcccagatggatgatgtctgtcagcatttactgatttacataacatttatcatgttcaaagctctttat

SEQ ID NO: 29760 - DNA, 600 bp, Chicken  19866894248975_1
cagtcccattatcaaatggtataaccatatctcaggggttctgagtctttgaaaatattcacataaaaataccaaggggtccggggctctagctatcctggaaagttacaacgtgtagcaaaatctatgtacagcattttcacatttttaatgacggttgcagattaacctccagcggtttgaatgttttaatacatttttacaaaaacaaacaaacaaacaaacctgaatgcagtgagaacatccaaaacgtacagtggagatgagtgcgcattgcaccgcaccatcactgggggagaraagagctctgacagcacaaggctgggaactgcctggcacttacagctgtataaactgaaaacacgtggggagaggggttaaaaaacatattgaaaacaggagatttgatggttataaggtctcccataaataatgcaccggttggtaattgtgtatttgagcacagtaagagctcttgctctggcatcggcatggggaaagtcacctaggcgtcagcgagtggggggctcaggtgggtcggatgtgcacagcagtggctgtgctgtgcactgagcagtgcctcgctatggtaacgtgctg

SEQ ID NO: 29761 - DNA, 600 bp, Chicken  19866894248975_2
ctcaggtgggtcggatgtgcacagcagtggctgtgctgtgcactgagcagtgcctcgctatggtaacgtgctgcggtgttgtgccgcaaagctggcgggcgctgcgtggtctggaggcacgtgcatggaccatagggtgctgctagccctttattctgggacatctcggggggaattgccttgattataacaatcagccgctgctgcaggatgggtgtgcatgcttctcaggcccccggtacagcccgcacggactgctcaagtcattgtgtatgccaaagggacccaagccctgtgagygagttccagagggcacggggtgcattctggctgctctctgctgccctcagagcagaaccagggcaccagaggactcccactagtttttaagctagcaaagattttgtgctttccaaggaggcaccaaaatgctcagggattcctggctcctggtgcgttcagataagtctagtgctgatgatattagattattggggaagatttctctctcagtcactgacaaacccttaagcaaagctgatggccaggaagggctatggagcttttcttgctctcccgagcagctgggcagaaccagtc

SEQ ID NO: 29762 - DNA, 599 bp, Chicken  19866894248977_1
  misc_feature (1)..(164): n is any nucleotide
nnnnnnnnnnnnnnnnnnnnnnnnnnnnnnnnnnnnnnnnnnnnnnnnnnnnnnnnnnnnnnnnnnnnnnnnnnnnnnnnnnnnnnnnnnnnnnnnnnnnnnnnnnnnnnnnnnnnnnnnnnnnnnnnnnnnnnnnnnnnnnnnnnnnnnnnnnnnnnnnnnnncactgatgcatctgtggtggggcctactcctgtctccaaaacattttcccagcaccactgcccacccctgtactccctaagcagtgattttgtgctgctgattgcctccactcaagtggaaacagtctttactgarctactgcagcggatgtattttatgagtaagtagtctccagtagcatccctttgtgcatcatacagccaaaagtccttagcacaaactcttgaaaaaggcacatttgggactttggggattttttttagtacttagtactataatatgctaaaatgacattagaaattcaccaaagttacaacaccatcaacatttggatgctgacattccctccagamcatattttccatttcagagcatgcaggtgactttgactttgcagcagggtcatacatatgaaatctgtggtggattacttt

SEQ ID NO: 29763 - DNA, 600 bp, Chicken  19866894248977_2
ccactgcccacccctgtactccctaagcagtgattttgtgctgctgattgcctccactcaagtggaaacagtctttactgarctactgcagcggatgtattttatgagtaagtagtctccagtagcatccctttgtgcatcatacagccaaaagtccttagcacaaactcttgaaaaaggcacatttgggactttggggattttttttagtacttagtactataatatgctaaaatgacattagaaattcaccaaagttacaacaccatcaacatttggatgctgacattccctccagamcatattttccatttcagagcatgcaggtgactttgactttgcagcagggtcatacatatgaaatctgtggtggattactttagtactgaggaaaggaggactgaatgtgttatcgctcaggtctgcaatacaggtagcttgcacctaacccatagagagacctgggtgtgtattatcctgagctgaaacatcgctcacactacgtgttacagacaaagttgmcatcccacctgcttcagttcacctggagatacattgctctgatatttcagtcactgagagcctcccagttgcactcat

SEQ ID NO: 29764 - DNA, 496 bp, Chicken  19866894248977_3
taatatgctaaaatgacattagaaattcaccaaagttacaacaccatcaacatttggatgctgacattccctccagamcatattttccatttcagagcatgcaggtgactttgactttgcagcagggtcatacatatgaaatctgtggtggattactttagtactgaggaaaggaggactgaatgtgttatcgctcaggtctgcaatacaggtagcttgcacctaacccatagagagacctgggtgtgtattatcctgagctgaaacatcgctcacactacgtgttacagacaaagttgmcatcccacctgcttcagttcacctggagatacattgctctgatatttcagtcactgagagcctcccagttgcactcatatacacagaaatttggagataatgtgttattactaacagcacaaaaaataaagaagtgatttatagtccgatagaaatttactgactgaaagaaaacaagactttgaaaaagaagata

SEQ ID NO: 29765 - DNA, 554 bp, Chicken  19866894248979_1
  misc_feature (1)..(27): n is any nucleotide
nnnnnnnnnnnnnnnnnnnnnnnnnnncctgccctacgctttcctaagctgcttccccatcccctctgagtgagctttagcaagcagcgaaaatgtttaagcgctgtgtttttgatgtgtcacatccatcactggttcaatcaggagagattgtgtagatgctgacaagatgttttgtctgtgaaactatttagattgatttaaagcgccaggacttgtgcttccaggatgcgtgcgtgcctggaaacagttgttatggcaaacacaggcagccagcggggctgtcagaagcaatgagcrttgggagccagggggggcyttgsggggggtcccttcccagtggcagattcagcggggtcagagtstgygtgttctgggagaggcagtgtgtgggcagggatgctgccatcccagtctggctacgaaggtggcgcataagggtattttcttgcaggctcttgtgccaaagaagtgcagtgatgggaccaggcgagatcccagagtcctttaggctttgcccagtgatgggacagagtgaagttgagctgccgtga

SEQ ID NO: 29766 - DNA, 535 bp, Chicken  19866894248979_2
  misc_feature (1)..(8): n is any nucleotide
nnnnnnnncctgccctacgctttcctaagctgcttccccatcccctctgagtgagctttagcaagcagcgaaaatgtttaagcgctgtgtttttgatgtgtcacatccatcactggttcaatcaggagagattgtgtagatgctgacaagatgttttgtctgtgaaactatttagattgatttaaagcgccaggacttgtgcttccaggatgcgtgcgtgcctggaaacagttgttatggcaaacacaggcagccagcggggctgtcagaagcaatgagcrttgggagccagggggggcyttgsggggggtcccttcccagtggcagattcagcggggtcagagtstgygtgttctgggagaggcagtgtgtgggcagggatgctgccatcccagtctggctacgaaggtggcgcataagggtattttcttgcaggctcttgtgccaaagaagtgcagtgatgggaccaggcgagatcccagagtcctttaggctttgcccagtgatgggacagagtgaagttgagctgccgtga

SEQ ID NO: 29767 - DNA, 531 bp, Chicken  19866894248979_3
  misc_feature (1)..(4): n is any nucleotide
nnnncctgccctacgctttcctaagctgcttccccatcccctctgagtgagctttagcaagcagcgaaaatgtttaagcgctgtgtttttgatgtgtcacatccatcactggttcaatcaggagagattgtgtagatgctgacaagatgttttgtctgtgaaactatttagattgatttaaagcgccaggacttgtgcttccaggatgcgtgcgtgcctggaaacagttgttatggcaaacacaggcagccagcggggctgtcagaagcaatgagcrttgggagccagggggggcyttgsggggggtcccttcccagtggcagattcagcggggtcagagtstgygtgttctgggagaggcagtgtgtgggcagggatgctgccatcccagtctggctacgaaggtggcgcataagggtattttcttgcaggctcttgtgccaaagaagtgcagtgatgggaccaggcgagatcccagagtcctttaggctttgcccagtgatgggacagagtgaagttgagctgccgtga

SEQ ID NO: 29768 - DNA, 489 bp, Chicken  19866894248979_4
cctgccctacgctttcctaagctgcttccccatcccctctgagtgagctttagcaagcagcgaaaatgtttaagcgctgtgtttttgatgtgtcacatccatcactggttcaatcaggagagattgtgtagatgctgacaagatgttttgtctgtgaaactatttagattgatttaaagcgccaggacttgtgcttccaggatgcgtgcgtgcctggaaacagttgttatggcaaacacaggcagccagcggggctgtcagaagcaatgagcrttgggagccagggggggcyttgsgggstgygtgttctgggagaggcagtgtgtgggcagggatgctgccatcccagtctggctacgaaggtggcgcataagggtattttcttgcaggctcttgtgccaaagaagtgcagtgatgggaccaggcgagatcccagagtcctttaggctttgcccagtgatgggacagagtgaagttgagctgccgtga

SEQ ID NO: 29769 - DNA, 486 bp, Chicken  19866894248979_5
cctgccctacgctttcctaagctgcttccccatcccctctgagtgagctttagcaagcagcgaaaatgtttaagcgctgtgtttttgatgtgtcacatccatcactggttcaatcaggagagattgtgtagatgctgacaagatgttttgtctgtgaaactatttagattgatttaaagcgccaggacttgtgcttccaggatgcgtgcgtgcctggaaacagttgttatggcaaacacaggcagccagcggggctgtcagaagcaatgagcrttgggagccagggggggcyttgsgggygtgttctgggagaggcagtgtgtgggcagggatgctgccatcccagtctggctacgaaggtggcgcataagggtattttcttgcaggctcttgtgccaaagaagtgcagtgatgggaccaggcgagatcccagagtcctttaggctttgcccagtgatgggacagagtgaagttgagctgccgtga

SEQ ID NO: 29770 - DNA, 600 bp, Chicken  19866894248986_1
agtctttttcttacacctcccttgagtcacatccattacttcttagtgatgcaagaaatgtttgtcagacacagaacaaaataatgtctacaacagtatgctagtgttaaatgcctagatccccaatgcaaaacctaaaattcatcatattcatcatattcaactcatcatatatgtatcacactgatatatattaagataaaacaaaaacttaactgaggctttaaaatttgcctttttactgcagtttcataacagctattttctctacagctaagactgcgaacacgccaaaacctraggaaatagatggctacattcagaagatcygcagaagcaaagcttgaaacaaaagcctctttaggagaagagcccttaattagcctagtggcatatttctctaaatctctcctgtgttacagtggtggttagaggacacaatacatgtagagcactggctgcacttcacgttgttttcagcctgacttaaatcaaagctgccattcccagatgttgctctgtggcctctggctgtgggttcccgctgatgctggcactcacatttgtgccccagggccgagagaatttctcacccaggca

SEQ ID NO: 29771 - DNA, 600 bp, Chicken  19866894248986_2
atccattacttcttagtgatgcaagaaatgtttgtcagacacagaacaaaataatgtctacaacagtatgctagtgttaaatgcctagatccccaatgcaaaacctaaaattcatcatattcatcatattcaactcatcatatatgtatcacactgatatatattaagataaaacaaaaacttaactgaggctttaaaatttgcctttttactgcagtttcataacagctattttctctacagctaagactgcgaacacgccaaaacctraggaaatagatggctacattcagaagatcygcagaagcaaagcttgaaacaaaagcctctttaggagaagagcccttaattagcctagtggcatatttctctaaatctctcctgtgttacagtggtggttagaggacacaatacatgtagagcactggctgcacttcacgttgttttcagcctgacttaaatcaaagctgccattcccagatgttgctctgtggcctctggctgtgggttcccgctgatgctggcactcacatttgtgccccagggccgagagaatttctcacccaggcaaaaagtaacacggtgaaggaaaggggcagg

SEQ ID NO: 29772 - DNA, 600 bp, Chicken  19866894248993_1
agaagaatttctgtaccttaggaacaatgttggtttagtaaagctagtttgaaattttatccttcagtacctcttaatataaagatactgaatgtaaatatactgatacaaagctttttttcttattccattgaaaactagtggaacatttttaaacatccaagtaaagcaagatttattaatatatatttattttttaagtaggaggtaaaactattcctttcaaactttttgagaccactgtggtttttggctcactgaatcagaaagatactggaaaatcagctgatattgaggatytctgtggagaaggacctgagtgttcttgtgtacaacatgttggccatgagacagcagtgtgccctggtggccaaaaaggccaatggtatcctgggctacatttcacacaaacatgcagaagaacattttggtaagagtattggagcactggaacacgttgcccagagaggctgtgaagtctccttctatggaggtattcaatacctgtctggacacctccctgtgtgacctgctatagggaatctgctttagctggacttgttgatctcttgaggtcccttccaatgattgtgattctgt

SEQ ID NO: 29773 - DNA, 600 bp, Chicken  19866894248995_1
gtaaaaccacccaaaatctacctctgacaatgtgggccaacagagtaaaataggaggcattactttcagaacagcccttgtaaatgtaatggtggtgtaatgtatagaatatgttgttcctctcgtgttacttttgtaacatgattgataattgggaagaactttcccatgttctatgggaaaattctaatgaataccacagtgaaactgggatttttatttcacaatgatgaatttattgtgatagcaacaatactaggggacaaagaactgagaaataccattctgtttgtttctttktatttttttggtctgagatctcattattcctgcagtcttactatttactaccccacagtaatactgttttaaaatgcacaagaatatctgaaatcttttgtgtgataggactgaatggaatctaagtaactggagatgtggctggtttcatcttatcagtctcagcttttgatcttaarggcttcaaccaagcacagacactgcttgggtgaacagttaaacttcttggcatttcaaagataatcctaacttaattcaaactcaaacactacagaactcgaaggagtctatatgtgaatc

SEQ ID NO: 29774 - DNA, 600 bp, Chicken  19866894248995_2
gaaaattctaatgaataccacagtgaaactgggatttttatttcacaatgatgaatttattgtgatagcaacaatactaggggacaaagaactgagaaataccattctgtttgtttctttktatttttttggtctgagatctcattattcctgcagtcttactatttactaccccacagtaatactgttttaaaatgcacaagaatatctgaaatcttttgtgtgataggactgaatggaatctaagtaactggagatgtggctggtttcatcttatcagtctcagcttttgatcttaarggcttcaaccaagcacagacactgcttgggtgaacagttaaacttcttggcatttcaaagataatcctaacttaattcaaactcaaacactacagaactcgaaggagtctatatgtgaatcaagtaaaaattcctttccacttttacaatgcaatgaagcatcaaaaataactgccatatcaaagtccttsaagtttaattttagtttttgcaaaaaattgcttttttattccatggatataaatatactttatgttcctccctaatcctctgcttaaaataaagaaactaccaaaataa

SEQ ID NO: 29775 - DNA, 494 bp, Chicken  19866894248995_3
aaaatgcacaagaatatctgaaatcttttgtgtgataggactgaatggaatctaagtaactggagatgtggctggtttcatcttatcagtctcagcttttgatcttaarggcttcaaccaagcacagacactgcttgggtgaacagttaaacttcttggcatttcaaagataatcctaacttaattcaaactcaaacactacagaactcgaaggagtctatatgtgaatcaagtaaaaattcctttccacttttacaatgcaatgaagcatcaaaaataactgccatatcaaagtccttsaagtttaattttagtttttgcaaaaaattgcttttttattccatggatataaatatactttatgttcctccctaatcctctgcttaaaataaagaaactaccaaaataaaaatcaaaatttagcatcagagagaaactctgtcagcatagacatttgtaaagattcttagaatgttggaataattataaaattg

SEQ ID NO: 29776 - DNA, 599 bp, Chicken  19866894249001_1
  misc_feature (1)..(69): n is any nucleotide
nnnnnnnnnnnnnnnnnnnnnnnnnnnnnnnnnnnnnnnnnnnnnnnnnnnnnnnnnnnnnnnnnnnnntgaatcttctcaaactgcatgattttttctactgtttgattatgagaggagttagttctaccactattcattctaacaaagtttaaattaacttgacagttttatgtcttcccgataacaaacagagagggaaacaaattcatccagaagatcattcaaagcaaaaagctgactttcttcctttgagatgggacctgtacctcccttggtaccaatgcttgagacccaagyacttgatacaacaatttggtcagtagtttcaaatcctggagatygctcatgaactctcctgcctgcttttccctgcctggggaagctgccagctctcccaaacaggttggcacagaggcatgtacaggttgggctcaggagtcagctcaaactgactgagctcatctgtatatagatggcttatgaagacctgagtctagaattaccttctagaaagctttgattttaacaccaagaagcgagagaggttgggagatttcccaactaaatcacgcttgacttcgtgatttccctttccc

SEQ ID NO: 29777 - DNA, 599 bp, Chicken  19866894249001_2
  misc_feature (1)..(25): n is any nucleotide
nnnnnnnnnnnnnnnnnnnnnnnnntgaatcttctcaaactgcatgattttttctactgtttgattatgagaggagttagttctaccactattcattctaacaaagtttaaattaacttgacagttttatgtcttcccgataacaaacagagagggaaacaaattcatccagaagatcattcaaagcaaaaagctgactttcttcctttgagatgggacctgtacctcccttggtaccaatgcttgagacccaagyacttgatacaacaatttggtcagtagtttcaaatcctggagatygctcatgaactctcctgcctgcttttccctgcctggggaagctgccagctctcccaaacaggttggcacagaggcatgtacaggttgggctcaggagtcagctcaaactgactgagctcatctgtatatagatggcttatgaagacctgagtctagaattaccttctagaaagctttgattttaacaccaagaagcgagagaggttgggagatttcccaactaaatcacgcttgacttcgtgatttccctttcccttccactctcacttttatttacaagtcaggcgtgctttaacaca

SEQ ID NO: 29778 - DNA, 600 bp, Chicken  19866894249001_3
aagcacacagtgtatagtacatgaagtacaaatgtcatcaatctactgtttacagtctctctagcctgaatggctaataagtttaacacatacatttttcagtacaaattaagcctgtcagaatgactcacacttctatataaaggcagttctaaacatatttatggggaaattttgttgtcaaagtcagttagcttgttgagtaagaggaatcccatgtttctttctaacctttcagacaacatggtgtttggcagatgcagaccagtgcaagataagtggtttttaaacttgtttgtrtatggatgtgtgtgtgaagagagcaattacagactcaggagagcaattctgtggaagttgaagacattcttctttgccttttaggaaaggcaagggcctttccattaactagtgaaaactgaggaagagcttgtataccttttttttttttttttttttttttcccagtgatacagttgatatactgaaagacattacctacaactcttgctttgctggtattctcagttcataacacatactacttgttgcatttcaagaccatctttagtctctagtttctgaaatgtttatataaat

SEQ ID NO: 29779 - DNA, 600 bp, Chicken  19866894249002_1
caacatagtatgtaaagggggaaaacaatgccttatttaattactgtcattactttcttcaacatccatccgtaacggcaaatcctcatatctttttaatggttacttaatacgtgattatatctggggccttctcgctgctgagaactgaacactgatgtttgctaggatagcagcaggcttggctgtcactcaagctcctccagtgtcttcttactcataggttaacacctcagtcatcacctcttctgaaaccgaaacaggctgccgaacatgaccacatgtatgttattccaaccygaaatccaccagttattagcctgagagagccatgcarcacaccggttctgctcgtcctgtcacagagcaggctctcattagaccacagcattttgctcagaacgaattaggggaaaaaaaacaaccaaaaaaacagggagagattcaggtccctttgcaacacttcatttcagacgccgatgaagttcccaggatcactcagccagacctgtaatgctgaagccacaaaccacccatggtctactgacgagatggagcgctgctcagagcccgtgcaaccattcggttccacctctcagc

SEQ ID NO: 29780 - DNA, 600 bp, Chicken  19866894249002_2
taattactgtcattactttcttcaacatccatccgtaacggcaaatcctcatatctttttaatggttacttaatacgtgattatatctggggccttctcgctgctgagaactgaacactgatgtttgctaggatagcagcaggcttggctgtcactcaagctcctccagtgtcttcttactcataggttaacacctcagtcatcacctcttctgaaaccgaaacaggctgccgaacatgaccacatgtatgttattccaaccygaaatccaccagttattagcctgagagagccatgcarcacaccggttctgctcgtcctgtcacagagcaggctctcattagaccacagcattttgctcagaacgaattaggggaaaaaaaacaaccaaaaaaacagggagagattcaggtccctttgcaacacttcatttcagacgccgatgaagttcccaggatcactcagccagacctgtaatgctgaagccacaaaccacccatggtctactgacgagatggagcgctgctcagagcccgtgcaaccattcggttccacctctcagcccccgggttctgcagacygctcaggagcccgcrctgt

SEQ ID NO: 29781 - DNA, 600 bp, Chicken  19866894249002_3
gcctgagagagccatgcarcacaccggttctgctcgtcctgtcacagagcaggctctcattagaccacagcattttgctcagaacgaattaggggaaaaaaaacaaccaaaaaaacagggagagattcaggtccctttgcaacacttcatttcagacgccgatgaagttcccaggatcactcagccagacctgtaatgctgaagccacaaaccacccatggtctactgacgagatggagcgctgctcagagcccgtgcaaccattcggttccacctctcagcccccgggttctgcagacygctcaggagcccgcrctgtctgtactgctaacgtatcaccacaagagaagagctcctcctctgaggactagaaatggaagagcatcacagctaacccaaacaatacayrtgcttctgaacaagaaaaacaggagcgtgccgtttctcacctcactcagcagtccaccaccacagccaacatccagaatcttgaccccagaaagggggcttccccgctggtaggcgctgcccatgttcagcacagtgtctctgggagaaaagggcaaacacatagggtggctcagtaaacgcaacgtgcag

SEQ ID NO: 29782 - DNA, 600 bp, Chicken  19866894249002_4
gcarcacaccggttctgctcgtcctgtcacagagcaggctctcattagaccacagcattttgctcagaacgaattaggggaaaaaaaacaaccaaaaaaacagggagagattcaggtccctttgcaacacttcatttcagacgccgatgaagttcccaggatcactcagccagacctgtaatgctgaagccacaaaccacccatggtctactgacgagatggagcgctgctcagagcccgtgcaaccattcggttccacctctcagcccccgggttctgcagacygctcaggagcccgcrctgtctgtactgctaacgtatcaccacaagagaagagctcctcctctgaggactagaaatggaagagcatcacagctaacccaaacaatacayrtgcttctgaacaagaaaaacaggagcgtgccgtttctcacctcactcagcagtccaccaccacagccaacatccagaatcttgaccccagaaagggggcttccccgctggtaggcgctgcccatgttcagcacagtgtctctgggagaaaagggcaaacacatagggtggctcagtaaacgcaacgtgcagttaacccgcatgctg

SEQ ID NO: 29783 - DNA, 600 bp, Chicken  19866894249002_5
aaaaaaacagggagagattcaggtccctttgcaacacttcatttcagacgccgatgaagttcccaggatcactcagccagacctgtaatgctgaagccacaaaccacccatggtctactgacgagatggagcgctgctcagagcccgtgcaaccattcggttccacctctcagcccccgggttctgcagacygctcaggagcccgcrctgtctgtactgctaacgtatcaccacaagagaagagctcctcctctgaggactagaaatggaagagcatcacagctaacccaaacaatacayrtgcttctgaacaagaaaaacaggagcgtgccgtttctcacctcactcagcagtccaccaccacagccaacatccagaatcttgaccccagaaagggggcttccccgctggtaggcgctgcccatgttcagcacagtgtctctgggagaaaagggcaaacacatagggtggctcagtaaacgcaacgtgcagttaacccgcatgctgctaacggttatacattctcggcgtttactgaggttgcggagaaacagtacccataaaaacacctgtcttcaaacccacacctaataaacggca

SEQ ID NO: 29784 - DNA, 600 bp, Chicken  19866894249002_6
aaaaaacagggagagattcaggtccctttgcaacacttcatttcagacgccgatgaagttcccaggatcactcagccagacctgtaatgctgaagccacaaaccacccatggtctactgacgagatggagcgctgctcagagcccgtgcaaccattcggttccacctctcagcccccgggttctgcagacygctcaggagcccgcrctgtctgtactgctaacgtatcaccacaagagaagagctcctcctctgaggactagaaatggaagagcatcacagctaacccaaacaatacayrtgcttctgaacaagaaaaacaggagcgtgccgtttctcacctcactcagcagtccaccaccacagccaacatccagaatcttgaccccagaaagggggcttccccgctggtaggcgctgcccatgttcagcacagtgtctctgggagaaaagggcaaacacatagggtggctcagtaaacgcaacgtgcagttaacccgcatgctgctaacggttatacattctcggcgtttactgaggttgcggagaaacagtacccataaaaacacctgtcttcaaacccacacctaataaacggcac

SEQ ID NO: 29785 - DNA, 600 bp, Chicken  19866894249018_1
ggttttgccctctctttgatttctgccctcctcccccagcagcagagttcccagggcatcatccctcatgaaacagccttttgttcctgggtgcccaaagctgatgcatctctctgacttgctgctccgtttcactgccctggctgctggtgtcaccttcccagcacctcctggcctgggtggagtttcagtatcactgtttttcatctgcagtcccactcccgccagccagaagccaaaacccctgcacttgccttgccccatccaccatcagcgggcctcctgctgcccagccactgrctgtgggtggccaaccatgggtacctggaagcagagctgagcttggttcaaaatgcctgtctcttcaggaatgacagaatggcttgggttggaaggaaccccaggttctaacccctctgccacaggcagggttgctaacagctagatcaagtactaaatcagattgcccagggccccatccaacctgggcatgaatacctccagggatgacrgggcatctaccatctctctgggcaatctgttccagcacctcaccactctctcagtgataaacctccccctgacatctaaataaacrat

SEQ ID NO: 29786 - DNA, 542 bp, Chicken  19866894249018_2
gtcccactcccgccagccagaagccaaaacccctgcacttgccttgccccatccaccatcagcgggcctcctgctgcccagccactgrctgtgggtggccaaccatgggtacctggaagcagagctgagcttggttcaaaatgcctgtctcttcaggaatgacagaatggcttgggttggaaggaaccccaggttctaacccctctgccacaggcagggttgctaacagctagatcaagtactaaatcagattgcccagggccccatccaacctgggcatgaatacctccagggatgacrgggcatctaccatctctctgggcaatctgttccagcacctcaccactctctcagtgataaacctccccctgacatctaaataaacratagaatcatagaatcatagaatggcttgggttgaaagggatctcaaggatcatcaagctgcaacccccacaccacaggcagggccaccaacctccatatctaatactagaccagacagcccagggccccatccaacctggccttgaacacctcca

SEQ ID NO: 29787 - DNA, 456 bp, Chicken  19866894249018_3
grctgtgggtggccaaccatgggtacctggaagcagagctgagcttggttcaaaatgcctgtctcttcaggaatgacagaatggcttgggttggaaggaaccccaggttctaacccctctgccacaggcagggttgctaacagctagatcaagtactaaatcagattgcccagggccccatccaacctgggcatgaatacctccagggatgacrgggcatctaccatctctctgggcaatctgttccagcacctcaccactctctcagtgataaacctccccctgacatctaaataaacratagaatcatagaatcatagaatggcttgggttgaaagggatctcaaggatcatcaagctgcaacccccacaccacaggcagggccaccaacctccatatctaatactagaccagacagcccagggccccatccaacctggccttgaacacctcca

SEQ ID NO: 29788 - DNA, 599 bp, Chicken  19866894249021_1
  misc_feature (1)..(2): n is any nucleotide
nnttttgttacagaaaagcagataatctctcaagttaaaatacataagtagttaaagacacactacgaactcttcagacgtcctggaaaacaggtatcaaaggaccagtcacttcagaaaccaggtagttcaaatgaatatgtcaccttatgattcaaccacatacttaaaatatcccttaaagaaaaatgtagaatcatagaatcacagaatcatagaatgtcctgggttgaaaaggaccttgaagatcatctagtttcaactgtggttgccaaccactagactaggctgcccagaacyacatccagcctcaccttgaatgcccccagggatggggcatccacaacctstccgggcaacctgttccagtgcatcaccaccctctgggtgaaaaacctcctcctaatatctaacctaaacctctcctgtcttagtttaaaaccattcccccttgccctaccactatccaccctcataaactgccattccccctcctgtttataggctccctccaagtacygaaaggctgcaatgagttctccccagagccttctcttctccaagctaaacaaacccagttccctcaacctttcttcata

SEQ ID NO: 29789 - DNA, 600 bp, Chicken  19866894249021_2
gttaaagacacactacgaactcttcagacgtcctggaaaacaggtatcaaaggaccagtcacttcagaaaccaggtagttcaaatgaatatgtcaccttatgattcaaccacatacttaaaatatcccttaaagaaaaatgtagaatcatagaatcacagaatcatagaatgtcctgggttgaaaaggaccttgaagatcatctagtttcaactgtggttgccaaccactagactaggctgcccagaacyacatccagcctcaccttgaatgcccccagggatggggcatccacaacctstccgggcaacctgttccagtgcatcaccaccctctgggtgaaaaacctcctcctaatatctaacctaaacctctcctgtcttagtttaaaaccattcccccttgccctaccactatccaccctcataaactgccattccccctcctgtttataggctccctccaagtacygaaaggctgcaatgagttctccccagagccttctcttctccaagctaaacaaacccagttccctcaacctttcttcatagggagaggtgctccagccctctgattatcttagtgtcccctcctctggacc

SEQ ID NO: 29790 - DNA, 471 bp, Chicken  19866894249021_3
tgtcctgggttgaaaaggaccttgaagatcatctagtttcaactgtggttgccaaccactagactaggctgcccagaacyacatccagcctcaccttgaatgcccccagggatggggcatccacaacctstccgggcaacctgttccagtgcatcaccaccctctgggtgaaaaacctcctcctaatatctaacctaaacctctcctgtcttagtttaaaaccattcccccttgccctaccactatccaccctcataaactgccattccccctcctgtttataggctccctccaagtacygaaaggctgcaatgagttctccccagagccttctcttctccaagctaaacaaacccagttccctcaacctttcttcatagggagaggtgctccagccctctgattatcttagtgtcccctcctctggacctgctccaagagctgtgcatctttcttgtgctgggggcccca

SEQ ID NO: 29791 - DNA, 599 bp, Chicken  19866894249027_1
  misc_feature (1)..(3): n is any nucleotide
nnnctgttgattttgctgggttttatgaagctggaagcacccaaagcggagcctgagttgagcagatagaacgtgggacctggagccccggggcaccacaaactggagtttaacatcagatgtgtaaattgaaaccctttgactcggaggcccaaatatgaggcaggctgatttcagagagatggctttaagggtacatcccagcccctgctcaggagcctgccaggatttctgatgggagggtgaaaggagtggtgtgcatttgtatgcagagcgagcattaagcaacaacagtagggraaaaaaaaaaaaaccaaacacgtttatcagcaggaaaaagaaagaagggagcacaaatgttctcactcgtttccactcagccagctgaagctccgagtcagaaccgtggaggctgaggatctgttttctctcactgacagcaccttgcagcgggcagcccagtacctgaggcaggcagccagcagggtgatgctgccccacagctcactctccctgcaacgccagcacgaacctggcagccccagtgctgctctgcacacctcagcctccccagctctgcagtctttgtgctgctgggg

SEQ ID NO: 29792 - DNA, 600 bp, Chicken  19866894249028_1
atgttctcaccttgtggttctggaaagtgctttgggagaagtgccgtcccatgtacaatttggctgatgctgcagtcagtattctcccttttcttgatccctctggagcagttcacaagacttacttatctcacatggaatatttgatacactgtattatttaattggcatatttttttaaattatcataggcttataaaatctggcaatcttcctattaaggaaattgagtcagtttgttctctctcatagaatttcaaaacaagttgtgttttccatttcgtcatttttctgactggraatttcagttttgagtaatgaatygcttatgctttccaattttgaagcaaaatttgcattagagagtagccayatagtgaaaataaaaagtttatccaccactgacccaataggagtttggagtaattcaaattacttggaggcggttaaaaatggttgaacgcagcaggttaactatgacgtgaaagtatgctttcccttccgtgcacataaattgttcagggagaaagtggtagttctgctggtccccagagaaacatttttagtatcttaaatgttgtaatgcgtcttcatgttttc

SEQ ID NO: 29793 - DNA, 600 bp, Chicken  19866894249028_2
aagtgctttgggagaagtgccgtcccatgtacaatttggctgatgctgcagtcagtattctcccttttcttgatccctctggagcagttcacaagacttacttatctcacatggaatatttgatacactgtattatttaattggcatatttttttaaattatcataggcttataaaatctggcaatcttcctattaaggaaattgagtcagtttgttctctctcatagaatttcaaaacaagttgtgttttccatttcgtcatttttctgactggraatttcagttttgagtaatgaatygcttatgctttccaattttgaagcaaaatttgcattagagagtagccayatagtgaaaataaaaagtttatccaccactgacccaataggagtttggagtaattcaaattacttggaggcggttaaaaatggttgaacgcagcaggttaactatgacgtgaaagtatgctttcccttccgtgcacataaattgttcagggagaaagtggtagttctgctggtccccagagaaacatttttagtatcttaaatgttgtaatgcgtcttcatgttttcacctatttgagttctgaggtcagt

SEQ ID NO: 29794 - DNA, 600 bp, Chicken  19866894249028_3
agtcagtattctcccttttcttgatccctctggagcagttcacaagacttacttatctcacatggaatatttgatacactgtattatttaattggcatatttttttaaattatcataggcttataaaatctggcaatcttcctattaaggaaattgagtcagtttgttctctctcatagaatttcaaaacaagttgtgttttccatttcgtcatttttctgactggraatttcagttttgagtaatgaatygcttatgctttccaattttgaagcaaaatttgcattagagagtagccayatagtgaaaataaaaagtttatccaccactgacccaataggagtttggagtaattcaaattacttggaggcggttaaaaatggttgaacgcagcaggttaactatgacgtgaaagtatgctttcccttccgtgcacataaattgttcagggagaaagtggtagttctgctggtccccagagaaacatttttagtatcttaaatgttgtaatgcgtcttcatgttttcacctatttgagttctgaggtcagtggttgtttgctagcaatcagcagctgtttaggatggaatcatgaactca

SEQ ID NO: 29795 - DNA, 600 bp, Chicken  19866894249032_1
taacttcaacatccccttatttgttagatttatttgttttgggttttgttttgaacatgcaagttagatccagaaatcatatccaaggctgcaagacactgaggtctctgttaaacatcatgtccaaactgcagagtttcaggaatactaaattcagtcagatactgcacagaatcatgtgtgtgacttcagaagcagagtatcaagctgcttgtctccagctgtgcttaaaggcaaacctacttcatggatatacggttggactgcactatgtaagactgcggtttgaattcctactcrtgtcctggcatattacgtggcagacatacactgaatatatatttttgtggttcagtttggacattacagtgggtacctgtggggaattgtatgcttttgggtagatgaccccaagggagcgtgaaggctgtgttacctgaaaggggttttcatagagaaacactgtctctgagctttggtggggagaggcagctctgcatgttgagtgctgcatccaggcctggggctcccagcgacagaaagacgtggagctgttacagcaggtccagaggaccatgaatttgatcagagggctggagc

SEQ ID NO: 29796 - DNA, 600 bp, Chicken  19866894249034_1
aacatgggctagtgggcatggtggagatgggtctacagttggattagattatgtcagtagtcttttccaaccttgattcaatgattctctgatttacaagcatcagtgcaacactatgggcaccactagtgcttcaccatccacatttcagcctgctttcaggtgcttgaatccttctctggctgcgcatgaggtgatttcaattcagcaggcccccagcgttgcaaagattgcgaacaatactttagggcttttctgaatcagagatttgtacagtagctgtgaactttagcattcacygccttccttcactggggagcaattctcagtgcatttgttgggggacaatatttcctctgtaaataatgatgctaatttagaggagttggttgaagcagcaataactccagctagaagaaaataagagtaaagcttgatttacataaagtataataaagataacaatttctctagcacagttaatttttaacgttacatgcagactaattacagtaatagaaatgtaaaattgctcctcacaccccagagagcagtttaatcaaacatgctaaaatacaaagaaaatatttgttgcaaaga

SEQ ID NO: 29797 - DNA, 600 bp, Chicken  19866894249035_1
ttcctatgaagattccttggcttgctgtttgatttgcaaaaggttatagaaaaatatgtataaagtaataacttttgaaacttttgaaacatgatcactaatgttcttgatcacttggatgttttgttctgctcagcaggggtaaagatttgcttgttggcttgaaaaaaatactaaaaagaaaattctgattcacacattcacaaattccagcccgaataactttcattttatacggagtgtttctaaagataattttgttgaacacttaagtgtcatacagatatgtgaacctccccrgctctcctgcaagagagctgacctagagaaagcagatgtgtgggagaatagaatgatacacaaacacacagggacacaggaatactcactaagccaaaattttacagttcttgaaatgtttatagtatgagattaatcttgaatatttcagtaaagaaaatacaattaatgtaatatgttgagaactgaatatcataaacaacatcaaatagcctgttcacaaatcagtttccaaaaattttctttgaattctttccactgaacagtcataggatccactaatgtgtgtcactttgtgct

SEQ ID NO: 29798 - DNA, 599 bp, Chicken  19866894249037_1
  misc_feature (1)..(52): n is any nucleotide
nnnnnnnnnnnnnnnnnnnnnnnnnnnnnnnnnnnnnnnnnnnnnnnnnnnngacgtggcggaagtgctcgatgaggtcccccttgatggtcccgttgagtgggcagtaggggcagatggagagcggccctttggcacctttagggtaccgtgagtcccccaccgtggccgcagggtaagcgggtggcagagccttggtggtgccggcgggggccgttttgtccccttcgccgtcgcggtgtcctttgggcacagcccctttgatcttctggaggtgctccatggcaccgggctgcaacrgggtggcggggcaggagaacttcttgtgggccaggtagctgtccaggctgttgaagctgaggcggcacgccgtgcactcgtggtagtcggcgaacggcagcaacgtggctgcgttctgctccccgccgcgccgccgcggcttcttgctcagatcgatgggaccctcggcatcggggctggagctgggcgaaggggcggccgccggggctttggggtcgggcggtgggggtggctcagccccgtggatttcgtagagcttgcggcgcttgcgggtgcggaggggctgcgggacgaagggc

SEQ ID NO: 29799 - DNA, 600 bp, Chicken  19866894249043_1
ggatttaataggataaagtacatatatatgtgtgcatgactgcgtggtgctttgaagcggccgtttgcacaaagccaaaaataattatgagtaaattggaacttaaatatcagcatgtgaatgataattggggactgcttaagaacaagttgctgaatagcctgaaagctgtgatttcacaagagggagaaaatatttacagcctaagcctgcctctgaggggaacagaaagcttcgtgcatgagaagaaattacaattagaaaaggtgtcggggggacatgggaggctttctctactcwcacagagtggtgtttgccaatgggaagctggaggcatgctggttaattagccttacatggggctgcccaagcaccagcactgctgaggtctctaatgaagagctaatggagggcagcgagcccggccwgtgtggggaaggaatccacagacatcrttgctggccttggtttgagtttgcwcagttctggtacacagacttcagccaaacaccactcacagccttttaattaacaaacgaaagtgatgctaagtggggytgacacggcaaggctggaggcaggcctgcagtgcactgtcca

SEQ ID NO: 29800 - DNA, 600 bp, Chicken  19866894249043_2
tggggactgcttaagaacaagttgctgaatagcctgaaagctgtgatttcacaagagggagaaaatatttacagcctaagcctgcctctgaggggaacagaaagcttcgtgcatgagaagaaattacaattagaaaaggtgtcggggggacatgggaggctttctctactcwcacagagtggtgtttgccaatgggaagctggaggcatgctggttaattagccttacatggggctgcccaagcaccagcactgctgaggtctctaatgaagagctaatggagggcagcgagcccggccwgtgtggggaaggaatccacagacatcrttgctggccttggtttgagtttgcwcagttctggtacacagacttcagccaaacaccactcacagccttttaattaacaaacgaaagtgatgctaagtggggytgacacggcaaggctggaggcaggcctgcagtgcactgtccaagctcactgctaacgaggtgcggcctaacgaggcctggtcaccaygaaccagaccttgctgggaagctgctgcatatccaggcaacacttaaaattcactacagccgctccaagctgcgacattgatc

SEQ ID NO: 29801 - DNA, 600 bp, Chicken  19866894249043_3
aatagcctgaaagctgtgatttcacaagagggagaaaatatttacagcctaagcctgcctctgaggggaacagaaagcttcgtgcatgagaagaaattacaattagaaaaggtgtcggggggacatgggaggctttctctactcwcacagagtggtgtttgccaatgggaagctggaggcatgctggttaattagccttacatggggctgcccaagcaccagcactgctgaggtctctaatgaagagctaatggagggcagcgagcccggccwgtgtggggaaggaatccacagacatcrttgctggccttggtttgagtttgcwcagttctggtacacagacttcagccaaacaccactcacagccttttaattaacaaacgaaagtgatgctaagtggggytgacacggcaaggctggaggcaggcctgcagtgcactgtccaagctcactgctaacgaggtgcggcctaacgaggcctggtcaccaygaaccagaccttgctgggaagctgctgcatatccaggcaacacttaaaattcactacagccgctccaagctgcgacattgatcattaaagctcatctgcaagctgtcagg

SEQ ID NO: 29802 - DNA, 600 bp, Chicken  19866894249043_4
aagagggagaaaatatttacagcctaagcctgcctctgaggggaacagaaagcttcgtgcatgagaagaaattacaattagaaaaggtgtcggggggacatgggaggctttctctactcwcacagagtggtgtttgccaatgggaagctggaggcatgctggttaattagccttacatggggctgcccaagcaccagcactgctgaggtctctaatgaagagctaatggagggcagcgagcccggccwgtgtggggaaggaatccacagacatcrttgctggccttggtttgagtttgcwcagttctggtacacagacttcagccaaacaccactcacagccttttaattaacaaacgaaagtgatgctaagtggggytgacacggcaaggctggaggcaggcctgcagtgcactgtccaagctcactgctaacgaggtgcggcctaacgaggcctggtcaccaygaaccagaccttgctgggaagctgctgcatatccaggcaacacttaaaattcactacagccgctccaagctgcgacattgatcattaaagctcatctgcaagctgtcaggcttgtaggcgcttcaggccctgttc

SEQ ID NO: 29803 - DNA, 600 bp, Chicken  19866894249043_5
tagaaaaggtgtcggggggacatgggaggctttctctactcwcacagagtggtgtttgccaatgggaagctggaggcatgctggttaattagccttacatggggctgcccaagcaccagcactgctgaggtctctaatgaagagctaatggagggcagcgagcccggccwgtgtggggaaggaatccacagacatcrttgctggccttggtttgagtttgcwcagttctggtacacagacttcagccaaacaccactcacagccttttaattaacaaacgaaagtgatgctaagtggggytgacacggcaaggctggaggcaggcctgcagtgcactgtccaagctcactgctaacgaggtgcggcctaacgaggcctggtcaccaygaaccagaccttgctgggaagctgctgcatatccaggcaacacttaaaattcactacagccgctccaagctgcgacattgatcattaaagctcatctgcaagctgtcaggcttgtaggcgcttcaggccctgttctgaagtctgactgaggaaatcctgaaagatttgaatctcaattttgagttaagcctttgttaaatagaaacggaactt

SEQ ID NO: 29804 - DNA, 600 bp, Chicken  19866894249043_6
attagccttacatggggctgcccaagcaccagcactgctgaggtctctaatgaagagctaatggagggcagcgagcccggccwgtgtggggaaggaatccacagacatcrttgctggccttggtttgagtttgcwcagttctggtacacagacttcagccaaacaccactcacagccttttaattaacaaacgaaagtgatgctaagtggggytgacacggcaaggctggaggcaggcctgcagtgcactgtccaagctcactgctaacgaggtgcggcctaacgaggcctggtcaccaygaaccagaccttgctgggaagctgctgcatatccaggcaacacttaaaattcactacagccgctccaagctgcgacattgatcattaaagctcatctgcaagctgtcaggcttgtaggcgcttcaggccctgttctgaagtctgactgaggaaatcctgaaagatttgaatctcaattttgagttaagcctttgttaaatagaaacggaactttgcagtggtcataaataacatatccatcttcccttgcatctgccttcccgttccataaagaacagctttgtttggctgaatgacctc

SEQ ID NO: 29805 - DNA, 600 bp, Chicken  19866894249045_1
tcatcctcaatgtaatccttccagttaaatgtgctcacagttgtattaataaatgtaccattttcatccattgtgctattaaagtaggaaataacatttatttcaaaagtagaattgtctggaggccactgcaggcatttattcctcaagttgcccatgaacagctgcagccctattagtgcaaatacactcagacaaaacacagtcaggatcataacatccgagagcttcttcacagactgaattagggctcctacaatagtctttaggcctgcaaagagaaaagtttcataggtttaycaaagaggatctttgcccttcccatataactcagatgtcatgcagacacttraattactrttatctgtcaaaaaataaagcttcatgaacagcctcagagcttgtgaagatgaatgaaagaaaaataattttatttttatgaataagcaatgtacatacattcaaatacacaaaaatatcatataattctcaagcaggaaatttatcaaccatgcttttctgttatagatttgatctctttaatttttctctccacttaatattatatttgatattcaataatagtatttactacaatat

SEQ ID NO: 29806 - DNA, 600 bp, Chicken  19866894249045_2
atgtaccattttcatccattgtgctattaaagtaggaaataacatttatttcaaaagtagaattgtctggaggccactgcaggcatttattcctcaagttgcccatgaacagctgcagccctattagtgcaaatacactcagacaaaacacagtcaggatcataacatccgagagcttcttcacagactgaattagggctcctacaatagtctttaggcctgcaaagagaaaagtttcataggtttaycaaagaggatctttgcccttcccatataactcagatgtcatgcagacacttraattactrttatctgtcaaaaaataaagcttcatgaacagcctcagagcttgtgaagatgaatgaaagaaaaataattttatttttatgaataagcaatgtacatacattcaaatacacaaaaatatcatataattctcaagcaggaaatttatcaaccatgcttttctgttatagatttgatctctttaatttttctctccacttaatattatatttgatattcaataatagtatttactacaatatttaatatttaataataataacaatttatattatagttactatttttatgttc

SEQ ID NO: 29807 - DNA, 600 bp, Chicken  19866894249045_3
ttttcatccattgtgctattaaagtaggaaataacatttatttcaaaagtagaattgtctggaggccactgcaggcatttattcctcaagttgcccatgaacagctgcagccctattagtgcaaatacactcagacaaaacacagtcaggatcataacatccgagagcttcttcacagactgaattagggctcctacaatagtctttaggcctgcaaagagaaaagtttcataggtttaycaaagaggatctttgcccttcccatataactcagatgtcatgcagacacttraattactrttatctgtcaaaaaataaagcttcatgaacagcctcagagcttgtgaagatgaatgaaagaaaaataattttatttttatgaataagcaatgtacatacattcaaatacacaaaaatatcatataattctcaagcaggaaatttatcaaccatgcttttctgttatagatttgatctctttaatttttctctccacttaatattatatttgatattcaataatagtatttactacaatatttaatatttaataataataacaatttatattatagttactatttttatgttctgccaata

SEQ ID NO: 29808 - DNA, 600 bp, Chicken  19866894249054_1
aagtgagtaaaaaatagaagcaattgtggcagaatttattctcaaatgttacactatagaccataactatctactctatcccacattgcaacagccagatatggcaaataccagttaggtcatcctgttcatagctgtgacactttaaaattaatcccaacacttcacaccattttttgttaaatttagttttaaacgaccaaagcatttaggcttttacagtttgctatggaaagtgttctgcaaaagagtagagctcaattttagaatatgtcttctgcaggctttaatcttcctccrctttattcacactgtcctagccaataactatttcagggctatcctcagacatggacctcactttgcctgacctatttgcatgctagacacataagaagatgagatatgctgggatgcagaaacacacccgacatttgctgccaaggcaacaagaacaggatgcgttttctaatggttcagataaagaaggtgtaacttttcagtcttgccaacatccaccatttccctcaggagaagccaacattgccagcagatctagaagtcatcgaggataaacactgtgttcttggcttaccttga

SEQ ID NO: 29809 - DNA, 600 bp, Chicken  19866894249063_1
aataaaaatattacattataactagctttaaaaataacaatttttgcagcctacatttgttcatgatgagttttttattttaaggaacaggatagaaaactgaatgaaataatatacattctttttgttgtaccttaacctgaatcaaacacaaatctgcttatgaggtacaagaaaatattcccttctatttcaaacctggttttagcaacaaagtttaaaggctagagctatcttggtgatgttagggtgaaagttagcctaatctcccttaaagcacaaaagaaatgaagttgctakcagtttttgactcatacacagacatttatttgattcacacaacccaggtagtctttccttgtgatggatggactcacgctctaaactttctattattctgagatggcccttggtgttgtgcagcaggctgcacttacagcatctattatcacaatgtgcctaaaacaaaatacattcatcaagaaaaaaagtgacagatctacaccacaggattcccagggtgagcgtacaagagagctatcagtattctagccatatttgttaagttgcttgatttttttttcccctttttaaagtatc

SEQ ID NO: 29810 - DNA, 599 bp, Chicken  19866894249071_1
  misc_feature (1)..(95): n is any nucleotide
nnnnnnnnnnnnnnnnnnnnnnnnnnnnnnnnnnnnnnnnnnnnnnnnnnnnnnnnnnnnnnnnnnnnnnnnnnnnnnnnnnnnnnnnnnnnnnnccagagtgagaactgctggccaatcagcatcaacatcgtgccttactgaaggccaacaacccccgtccctaattacattcacctaaaatgtttgtaaagtcaaattatgtcccttttttgtctcaaacgcaggaatgcaataagtaaaaaggttgttctccttctttgttgcaagggattcctatggctgtgtttccaaaggccyggcaggaaaggtcttayaggagcaaggatagggagggctacgcactgaggcatgatttattacagaagctgtgtgttgtttgsatcagaagctgctggactctgtgcacagcagaaattatatcattagctttcaagaggaacagaaagctccaagatgacaagctctttgttgtgtaagtgttgtctaagaaacctctgcccttcctttgaccaattaaagcacctttcctggtaggagtacatgggtggctgtactgagctcagaaayatctcctttccaacttctaaatatttctg

SEQ ID NO: 29811 - DNA, 599 bp, Chicken  19866894249071_2
  misc_feature (1)..(78): n is any nucleotide
nnnnnnnnnnnnnnnnnnnnnnnnnnnnnnnnnnnnnnnnnnnnnnnnnnnnnnnnnnnnnnnnnnnnnnnnnnnnnnccagagtgagaactgctggccaatcagcatcaacatcgtgccttactgaaggccaacaacccccgtccctaattacattcacctaaaatgtttgtaaagtcaaattatgtcccttttttgtctcaaacgcaggaatgcaataagtaaaaaggttgttctccttctttgttgcaagggattcctatggctgtgtttccaaaggccyggcaggaaaggtcttayaggagcaaggatagggagggctacgcactgaggcatgatttattacagaagctgtgtgttgtttgsatcagaagctgctggactctgtgcacagcagaaattatatcattagctttcaagaggaacagaaagctccaagatgacaagctctttgttgtgtaagtgttgtctaagaaacctctgcccttcctttgaccaattaaagcacctttcctggtaggagtacatgggtggctgtactgagctcagaaayatctcctttccaacttctaaatatttctgactagtcagagcggggc

SEQ ID NO: 29812 - DNA, 599 bp, Chicken  19866894249071_3
  misc_feature (1)..(12): n is any nucleotide
nnnnnnnnnnnnccagagtgagaactgctggccaatcagcatcaacatcgtgccttactgaaggccaacaacccccgtccctaattacattcacctaaaatgtttgtaaagtcaaattatgtcccttttttgtctcaaacgcaggaatgcaataagtaaaaaggttgttctccttctttgttgcaagggattcctatggctgtgtttccaaaggccyggcaggaaaggtcttayaggagcaaggatagggagggctacgcactgaggcatgatttattacagaagctgtgtgttgtttgsatcagaagctgctggactctgtgcacagcagaaattatatcattagctttcaagaggaacagaaagctccaagatgacaagctctttgttgtgtaagtgttgtctaagaaacctctgcccttcctttgaccaattaaagcacctttcctggtaggagtacatgggtggctgtactgagctcagaaayatctcctttccaacttctaaatatttctgactagtcagagcggggccacaagcattttgccacaaaaaaaaaccctttcctgataggctgcagggcttctgcagccacagcc

SEQ ID NO: 29813 - DNA, 600 bp, Chicken  19866894249071_4
ggattcctatggctgtgtttccaaaggccyggcaggaaaggtcttayaggagcaaggatagggagggctacgcactgaggcatgatttattacagaagctgtgtgttgtttgsatcagaagctgctggactctgtgcacagcagaaattatatcattagctttcaagaggaacagaaagctccaagatgacaagctctttgttgtgtaagtgttgtctaagaaacctctgcccttcctttgaccaattaaagcacctttcctggtaggagtacatgggtggctgtactgagctcagaaayatctcctttccaacttctaaatatttctgactagtcagagcggggccacaagcattttgccacaaaaaaaaaccctttcctgataggctgcagggcttctgcagccacagcctatgaggatgtgggaacagataagcaattaaaaactacaccatcagcaattgcacctttctgataaaacagcactgacacactaggattcttacctcatgtcctggaggactgtagtggaagtgctaagtcagggcttgaagaagtgaccgaacacctggtgggaaggcaggaccaacccaggggagc

SEQ ID NO: 29814 - DNA, 600 bp, Chicken  19866894249072_1
tgccaccactgtactattagctttccaagtgttgactgtatgaaggtactgtttctcaatttttgaagacttaagcaaaggttgggatgctgcccataaatgtcagattcccagtccagattctgatgcacacctctgcttttttccttttttattttaacgtaaggctttgcttgttggtacttaaagtagtctccgattccaggccccacagtttcaccattttaaggaacagcctatttttaaggcaaatgctgcctactcagagttgcctgaacgcccggattacaccagggcttytgagcactcatctccaagactcttaggctgtgtttctcagtcttcagtaaagcacagtcaatcaggtgttcttctttccctgacagtgtcgtccttgcaaacttcccggagaacgaaccggtgtccatttcagttgtgttaggccatgcggtccaggaggtcaacgtaacgcaagacgcggatgatgaaatgaaggcacggctttcccgcatatttgagcctgaggaaagcaaagcttacagcccagaggagctcgacaagaggaagaacgacttgaagaagtggctggaaacaaaccac

SEQ ID NO: 29815 - DNA, 600 bp, Chicken  19866894249073_1
cttcagtcctctctattcattgcaagtcaacagtctaagtaagatacttacagtttttgagacagtggtcactcacagcaatgcctgtaactaagtaccatagtttcatagtgtgtatactacacactatactacactatcaaagcttttcaaacagcagtatgaagaacttcaatctctttggaaaacgcatctgcaagcttgctttctcaatctcttctacagccaaataaataatttttttaataaatatacttaccttgtaaaagacaaataagcaagcacaaatgttaaaaattycttttactacatcgyaggaatgtaagtagaataattatgaagtatactycttctctgctttacaagaatacccatatctgctgacacacagtaaaagttactatgtctgaattccttcagcagaccaatactgaccatgtagcctatcttaaaaacaaaaatacattgaagaaatttaaggtaattgaatgctttggtctccaacaaaacaggcaatcttccttacagagtactgaaaaattgggacaatacacagaagtctaatgtaagattgcatttcttttaacataaaatataatt

SEQ ID NO: 29816 - DNA, 600 bp, Chicken  19866894249073_2
ttcattgcaagtcaacagtctaagtaagatacttacagtttttgagacagtggtcactcacagcaatgcctgtaactaagtaccatagtttcatagtgtgtatactacacactatactacactatcaaagcttttcaaacagcagtatgaagaacttcaatctctttggaaaacgcatctgcaagcttgctttctcaatctcttctacagccaaataaataatttttttaataaatatacttaccttgtaaaagacaaataagcaagcacaaatgttaaaaattycttttactacatcgyaggaatgtaagtagaataattatgaagtatactycttctctgctttacaagaatacccatatctgctgacacacagtaaaagttactatgtctgaattccttcagcagaccaatactgaccatgtagcctatcttaaaaacaaaaatacattgaagaaatttaaggtaattgaatgctttggtctccaacaaaacaggcaatcttccttacagagtactgaaaaattgggacaatacacagaagtctaatgtaagattgcatttcttttaacataaaatataattttaatatgttctcag

SEQ ID NO: 29817 - DNA, 600 bp, Chicken  19866894249073_3
acagtttttgagacagtggtcactcacagcaatgcctgtaactaagtaccatagtttcatagtgtgtatactacacactatactacactatcaaagcttttcaaacagcagtatgaagaacttcaatctctttggaaaacgcatctgcaagcttgctttctcaatctcttctacagccaaataaataatttttttaataaatatacttaccttgtaaaagacaaataagcaagcacaaatgttaaaaattycttttactacatcgyaggaatgtaagtagaataattatgaagtatactycttctctgctttacaagaatacccatatctgctgacacacagtaaaagttactatgtctgaattccttcagcagaccaatactgaccatgtagcctatcttaaaaacaaaaatacattgaagaaatttaaggtaattgaatgctttggtctccaacaaaacaggcaatcttccttacagagtactgaaaaattgggacaatacacagaagtctaatgtaagattgcatttcttttaacataaaatataattttaatatgttctcagtagcagaaatgctgcacctatattacctaaacat

SEQ ID NO: 29818 - DNA, 599 bp, Chicken  19866894249076_1
  misc_feature (1)..(107): n is any nucleotide
nnnnnnnnnnnnnnnnnnnnnnnnnnnnnnnnnnnnnnnnnnnnnnnnnnnnnnnnnnnnnnnnnnnnnnnnnnnnnnnnnnnnnnnnnnnnnnnnnnnnnnnnnnntccaacacacagaaaaggttggaggagaaatgcaggcagcttcaggagatcagcagaaagctgaggccacatggaagtcccagacaggaatcacaggcccagcactgcctgctgagagaagaacgccctccagaagtgggccaggagcttcaaaggctccagcaggctggggccaaacttggagtgctcaccragatgctgcaggagaaattcaggcagctccaggacatcrggagagagctgaggccacagggaaatcctatacagcaatggaaggcccagccatgccttctgagagaggaatgccctcctgacaagtgccaggagctgcagaggctccagsaggctggggcmatacttggagtgctcagtgagcaactggaggagaaatgcaaacagctccagatcgggagaaagctgagtccacaygaaaatcccaaacagcaatggaaggctcagcactgcctgctgagtgtggaacaccctcctgaa

SEQ ID NO: 29819 - DNA, 599 bp, Chicken  19866894249076_2
  misc_feature (1)..(68): n is any nucleotide
nnnnnnnnnnnnnnnnnnnnnnnnnnnnnnnnnnnnnnnnnnnnnnnnnnnnnnnnnnnnnnnnnnnntccaacacacagaaaaggttggaggagaaatgcaggcagcttcaggagatcagcagaaagctgaggccacatggaagtcccagacaggaatcacaggcccagcactgcctgctgagagaagaacgccctccagaagtgggccaggagcttcaaaggctccagcaggctggggccaaacttggagtgctcaccragatgctgcaggagaaattcaggcagctccaggacatcrggagagagctgaggccacagggaaatcctatacagcaatggaaggcccagccatgccttctgagagaggaatgccctcctgacaagtgccaggagctgcagaggctccagsaggctggggcmatacttggagtgctcagtgagcaactggaggagaaatgcaaacagctccagatcgggagaaagctgagtccacaygaaaatcccaaacagcaatggaaggctcagcactgcctgctgagtgtggaacaccctcctgaagagtgccaggagctgcagagggtccagcaggctgggaca

SEQ ID NO: 29820 - DNA, 600 bp, Chicken  19866894249076_3
aggagatcagcagaaagctgaggccacatggaagtcccagacaggaatcacaggcccagcactgcctgctgagagaagaacgccctccagaagtgggccaggagcttcaaaggctccagcaggctggggccaaacttggagtgctcaccragatgctgcaggagaaattcaggcagctccaggacatcrggagagagctgaggccacagggaaatcctatacagcaatggaaggcccagccatgccttctgagagaggaatgccctcctgacaagtgccaggagctgcagaggctccagsaggctggggcmatacttggagtgctcagtgagcaactggaggagaaatgcaaacagctccagatcgggagaaagctgagtccacaygaaaatcccaaacagcaatggaaggctcagcactgcctgctgagtgtggaacaccctcctgaagagtgccaggagctgcagagggtccagcaggctgggacaaaacgtgcaatactcaggaatcagctgaaggcgacatgcaggcagctccagatggggagaaagctgaggccacagagaaatccacaacaacaatggatggcccagcattgcc

SEQ ID NO: 29821 - DNA, 600 bp, Chicken  19866894249076_4
agaaagctgaggccacatggaagtcccagacaggaatcacaggcccagcactgcctgctgagagaagaacgccctccagaagtgggccaggagcttcaaaggctccagcaggctggggccaaacttggagtgctcaccragatgctgcaggagaaattcaggcagctccaggacatcrggagagagctgaggccacagggaaatcctatacagcaatggaaggcccagccatgccttctgagagaggaatgccctcctgacaagtgccaggagctgcagaggctccagsaggctggggcmatacttggagtgctcagtgagcaactggaggagaaatgcaaacagctccagatcgggagaaagctgagtccacaygaaaatcccaaacagcaatggaaggctcagcactgcctgctgagtgtggaacaccctcctgaagagtgccaggagctgcagagggtccagcaggctgggacaaaacgtgcaatactcaggaatcagctgaaggcgacatgcaggcagctccagatggggagaaagctgaggccacagagaaatccacaacaacaatggatggcccagcattgcctgctgagggag

SEQ ID NO: 29822 - DNA, 600 bp, Chicken  19866894249076_5
ccagaagtgggccaggagcttcaaaggctccagcaggctggggccaaacttggagtgctcaccragatgctgcaggagaaattcaggcagctccaggacatcrggagagagctgaggccacagggaaatcctatacagcaatggaaggcccagccatgccttctgagagaggaatgccctcctgacaagtgccaggagctgcagaggctccagsaggctggggcmatacttggagtgctcagtgagcaactggaggagaaatgcaaacagctccagatcgggagaaagctgagtccacaygaaaatcccaaacagcaatggaaggctcagcactgcctgctgagtgtggaacaccctcctgaagagtgccaggagctgcagagggtccagcaggctgggacaaaacgtgcaatactcaggaatcagctgaaggcgacatgcaggcagctccagatggggagaaagctgaggccacagagaaatccacaacaacaatggatggcccagcattgcctgctgagggaggaaggccctcctgaagagtgccaggagctgcagaggctccagcagtctgtcgccaaacttggagtgctcagcgag

SEQ ID NO: 29823 - DNA, 423 bp, Chicken  19866894249078_1
cttgtcatgtagaaagaatatttcctacctctagcaagattatacaaatgacttcagatagcacccaagaagggaaggaagtacctgagaaatttgagtatttagtgtcatacaggcaaaggatgtttgtaatcacccatgacagcagaactggttgagcgttcatcacgtatcaccacgccacggtcaggaaagctctgcactgtgcttctcgcaccttctgttacctccagctacccaattgtgtcacagtgccacctagcaatgatctggttaaaagctcatcttcattttgcaacrtatggaggatatggtcctccgaacacagatgtttgggacttccttcaatttttatgaaaagactacttatcttattttgttgcattgttctatgattaaacaattacacatttaaatacttat

SEQ ID NO: 29824 - DNA, 599 bp, Chicken  19866894249082_1
  misc_feature (1)..(46): n is any nucleotide
nnnnnnnnnnnnnnnnnnnnnnnnnnnnnnnnnnnnnnnnnnnnnncgtccttcgtcgccgctctccttgtctggatggtttgtttgctcctgacaccctgtgctcacacgccatctgcttgctcctgttcttgccaaggacgccctctctctgggggctgggcactgcttggaggtttttcggccgcacacagtctgtcgagctccttgtctccgtgtgatgggtggtttaactgactaaccggctgcgacgcaccctcccgactgatgggctctaatcaataccccgctgcaagcccrgttgtctttggccacgagcagctggactgatgcgctctccctttcccccgcagaccagcctgacgctggatgagaggttctctgggctgaggaataagaggcgctttgcagcagcccgcagcgcccgccggacggtcaccatgccctagcaccacgcactcatcatggggacagcgggcagcagcccgggccctgtaacaggtggctcaaaaaaactcgatagattccctctgagatagctgattcggcaacccgctgtctacctccttccatccacaacgagcgagtgattgagggca

SEQ ID NO: 29825 - DNA, 454 bp, Chicken  19866894249085_1
ggttccagccatcagatcaagtactggaccaggctgcccagggccccatacaacctggccttaaacacctccagagatggggcacccacagctctctgggcagctgttccagcacttcaccactctctcagtaaaaaacttctccctgacatctaatctaaatcccccttccttcagtttaaaaccattcccccttgtcctatcaccatctacccttgtaaaaagttgacttccctcctgtttataatctccctttaaatatcggaaggccgtaatgaggtctcctcgcagccttcattycttacagttcataaccttctgtagtagattaattctcagttaacacttgcagaactaagaggatagaatctattagaaaaacgactcttttggaaaaagtaaaaaataaaaaatcctgtgttgcaaactggtgagatgcactgatgtactgagg

SEQ ID NO: 29826 - DNA, 600 bp, Chicken  19866894249091_1
catcatttatctgccttttgatttctgtatctccagggagtgttttactaaggcttttaaactgctcttggcaatacaaatgtagaaaggggctttatttaactggtatgaagcttttgccactgtaaataccctaaatgtagtagtatcacgttaaattacttgctgtgataaatatttcaggttatagttatgatactgctgtgacttgtaacaactaggaaagtgagggtgacgtgacatatggtctctgttttgtgccagtagaagttctgtgtacatgaagttatactggcaaarctgttgttgctgtaatctgttctgtgaattatgacttttcttggtgtaagtataatgcacatcactgcatcattcaaaataggaggagtttgaggtttccttgtactggtgtggttatagcatgaatggatgacaggcacatttctgtacaagatattaacacaagtaaatgagttttagtacaatttaactatgaagtttgaggcccctgaatacaaggtcataaaggaaattcagggtttgcgcagaatattagttggcttttttgttgttgtttgcttgttcggttttttttctcct

SEQ ID NO: 29827 - DNA, 600 bp, Chicken  19866894249098_1
tctgtgattcctgtatgcactcagaagtcagatatctgcagacctaaaagggctctggccatcgatagaggacatagcatatacaagggctgctctgaaagaaaggcctcctgttttgttacgttggcccactacatcagaggtggatgttggtggtacggcagtagaggctgaaccttcccaccaatatcccattccatgttgttgctgtgtgacagacggcagcagaggggtactctgacacaatggcgtctgacatggaaatgtggatgaagcaaaggggtgtcactgaattcttcyatgcagaaaaaaatggcacccactgacattcatcgacactcgctgtacattcatggagaccaaacagtggatgtgagcacagtgaggtggtgggtgatgcgttccagcagtgactacagccacagtggagcacatctgctggtgccgatttttatgagcacggcatgcagcctcttgctaatctctgtcaaaaatgcacagctaatgctggtgactgtgttgaaaaacaatgctctgaagctgacaatttgctctatcaaatagtgttattgcgctctttgtaactgttgtagtttccat

SEQ ID NO: 29828 - DNA, 600 bp, Chicken  19866894249098_2
accaaacagtggatgtgagcacagtgaggtggtgggtgatgcgttccagcagtgactacagccacagtggagcacatctgctggtgccgatttttatgagcacggcatgcagcctcttgctaatctctgtcaaaaatgcacagctaatgctggtgactgtgttgaaaaacaatgctctgaagctgacaatttgctctatcaaatagtgttattgcgctctttgtaactgttgtagtttccatgcaaataaataggaggcattacctttggagtgaactactgctgccagccccaaaagcyttggagccctaaagagtcaaatctcccgtgggatacagcactgagaggtcagcaggacacaatacacgactctcagtagaaggggtttyagttttaccaaatagaagacaaccgtatgccaggtaatggctgctttacaggaagcagtgtggtactttgataccttgtataccttcattctgtcaaagactacttctgtttttgctttttctttcccttcctgccttctcctcgttgtcttctccttctcccayccattcccagaccccggacagaagtgttccaccagagtaaaggtgg

SEQ ID NO: 29829 - DNA, 600 bp, Chicken  19866894249098_3
atttttatgagcacggcatgcagcctcttgctaatctctgtcaaaaatgcacagctaatgctggtgactgtgttgaaaaacaatgctctgaagctgacaatttgctctatcaaatagtgttattgcgctctttgtaactgttgtagtttccatgcaaataaataggaggcattacctttggagtgaactactgctgccagccccaaaagcyttggagccctaaagagtcaaatctcccgtgggatacagcactgagaggtcagcaggacacaatacacgactctcagtagaaggggtttyagttttaccaaatagaagacaaccgtatgccaggtaatggctgctttacaggaagcagtgtggtactttgataccttgtataccttcattctgtcaaagactacttctgtttttgctttttctttcccttcctgccttctcctcgttgtcttctccttctcccayccattcccagaccccggacagaagtgttccaccagagtaaaggtggcactttcctgaatgctggggaccatctgagtgcctttatatttaaaaactaaacagcactgaaataaaagctgttagcacctacatttt

SEQ ID NO: 29830 - DNA, 461 bp, Chicken  19866894249098_4
gaggcattacctttggagtgaactactgctgccagccccaaaagcyttggagccctaaagagtcaaatctcccgtgggatacagcactgagaggtcagcaggacacaatacacgactctcagtagaaggggtttyagttttaccaaatagaagacaaccgtatgccaggtaatggctgctttacaggaagcagtgtggtactttgataccttgtataccttcattctgtcaaagactacttctgtttttgctttttctttcccttcctgccttctcctcgttgtcttctccttctcccayccattcccagaccccggacagaagtgttccaccagagtaaaggtggcactttcctgaatgctggggaccatctgagtgcctttatatttaaaaactaaacagcactgaaataaaagctgttagcacctacatttttttctctttatgaaatactggaaatt

SEQ ID NO: 29831 - DNA, 536 bp, Chicken  19866894249106_1
gcaccttggtggtcatagcattgctccttgctccttctagagctgtccttgccaaatgccactcagttcccttggttcttattatggctgcagtcagttctgaggaaagccacaggctgagctgctcctattggggtctcccagccctggaaagctcctgtctggtctggctgtgacctgctggtcctgcctctcccagatggcatgaccaggcatgaccagcctttgtgtcccttttccatttcagatgttaataaattctgtgcttgaattgccaagggcagcctgtcctccatctgytttgcatttctgccatctaccaaagagcagatgatttcttttcacctgtttcttcaactcccattcaaacagaattcaaactattttaatctagtctgcctaaaattcacaatgatcagagatgtttgagatatctgtagcactcactggccatcacaatgtccgtttctgtctaaaatatacagggcacgacaaccttaaattgaatagccaggaacatttctctctaaaatgca

SEQ ID NO: 29832 - DNA, 600 bp, Chicken  19866894249110_1
accaagatggctcaagtcagaggagtgaatccacctggtctgcctgagggagatgtggcacagcggaggcttacctgaatggttggtagtgaagccatagaggatgactcagaactgatttcctccctggcagcacccatccaccacaagggaaagacccaacgctgtagtcacagcgccagcacgaagccctcagtccctgtcccaccgcctggcttcccaactgacctgacccagactgaccaccataacgccccgttccagcacggctgaccttacagacgtctgcttcttcccatrgcttttatcctcccatcactcaatgggaacaccttccttaagccttactgcatcgcctgtgatttatcgagattattgctgctaacagcaaactgctaaacctcaactagatcaaagatgtgcaacgaggaatggattgacagagctcttcaggctgtggtgattcccaaggcttttttccttccttctgtcacaagaatttatatgcttgtgagaaactgattgggcggggagctttcctgctttgtcaacgtcaaagtccgcatgtttgcaaattgctataagccattctttgcattt

SEQ ID NO: 29833 - DNA, 600 bp, Chicken  19866894249111_1
gcatgccttgcaagatgtgggctcaaacccacattttcccagttccccagtgagagataaggcagcttagaattagggcttttttttttccttcaaattctccacagttttaatgcgaaaactcttgtgcataaagttcgtgtgagtgtttgactcaggactataactaaggtacctttttacaaggtaattgcctgggtcatgattgctgcaacacaccctttcttatacacaaagtcctcttctacccagcccttcctaggaattctgaccattctatgagagagagaaaaaaaagtytgaatttgattttctgaagatgggttctaaatgggaaacaacaaaaggaccctcctgtaactggatacaataagcactataaagaagaaagtttagagttttcttcatattctgacttttgattgactaactaaagggaccttttggttccttttgggatggatgctattataaaggagctaattctccaagatactttttctggcaaattcaggctcctacctaaggttctggagttcacttctaggatctgctgcataaaatgtaataaggtaagttttaggtaccagggactggacc

SEQ ID NO: 29834 - DNA, 600 bp, Chicken  19866894249113_1
cctcgtgctcacaactgtgtgttaatctaataggcccacactcagagtgtgagctacacacttgtagttggggagagagtccctgtgcacgttaaatattcacttaaatgaagtgataccgtgtctgtcaaccatgctttgcagtacagtgcagggaggacatgatcaagggctggagcacaacaagagtcccctgctggtctttggttgatgtccaaatgcctgtagcctgcaggtacttggtttctcagactgctgttgcctgtggtgggagccatgattgaggctggagttaggcawaatatgcctatgatgagcaggttacagcctctctagtcctaccttctccctagctaaaggtgtttatcgtggtgcacagacttccatgaccagctaggctttcatctgacagctggtttaaaaaccaacccttgagacttgaactgtggccaccatcactctggctgtagcatatgctttgtctctgggagttaaattcacaaaccactaaaaatcatccctttctctatgtctctttcaagacttctgtgctgctagtaatttgagaggaatcttgtaatttgggggatggggggaaaa

SEQ ID NO: 29835 - DNA, 600 bp, Chicken  19866894249118_1
cagatcatccgaagttaaaagacgttcttctaaaaccctgccaatatactgcaccaacaacagacaaggaacatccactccctctcaatctttctgttaacagccaccataaatcagcatgttgcaacttgcaggacaaactgcagaaccacagaaataaaaaaaactgtccagtgttgaacaaacggactcatgattccagaacacatttcagtttgaccttttacattcatcatgtttatgacattacttatctgcaatagctcagaaggaaatcccaaaaagcatactgtctaaccmcaacttaattatgaatattttaaacagcattctcctacacattacatacaagtcagttctacaagttagacctcagggtggtcaactgtgatagagttatttgtggaaggaatttgttttcatggcccttccttcacatacacataaaaatatattccaaatattccttaatgtcatgctcctgcatccactagttgaatgacatctcgagctgaaataagcagactatcaaaagatcattcttattaagtgtcagaacagacacattcaaagtgaaaatacagtggcatcagtaaacca

SEQ ID NO: 29836 - DNA, 600 bp, Chicken  19866894249120_1
gaacaatgtggaatgttactggaaatcatccctgaaaactggggcattgtgctgggtgaaagcacaccctccactgcctcgaaatgagcacccacttctgggtgctctgctgatgtttctgtgtgctcatctattactgcacacgaggtggccttcaggaacttgaggttttcttctcagagagtatttaccttgcattgacttaaagtagcgggcaagaattaacattcttagcactgttgatggatttggacctcaacctcagcctgagtcaacggcttgttgcctggggtgagagaygccctgaggaaaacagtcggtagaaagcttttgtaatgtttagtaggacacatcctttgtcttccgtaaaccatgtaaattctggtagaaagcatacagctacgattccatgcataaatgcaaaagtgaattaattgtatgcctcacaataagcatctttgtcaaccagggtttttctaagagaaatgcaaccaaggaaaggggacgtactgctgagtaacagagaagagtcagagtacgcagtgagcagcttgagagaatattctctctcttgctctcctgagcgtgtccttgacatcc

SEQ ID NO: 29837 - DNA, 600 bp, Chicken  19866894249126_1
gctaaaccacacatagagctctccttccataataacatgcaacaaatcctgcactgaaatctaactgcaatactgcaagttgctctccccataccacagtgctctttgcattcagcacatggatcatttaaccatgtgctagcataaatgtgaccctcaagaacatttttccaatgcagaaacacattcatttttcctacaagtgagattcttgggctggcaaatgggcctggcttgggaattttcagtgaaaagaaataactgtccacacatcactgttaaaagccacactatcagagmtttaagcaactgggttggaatcacccacagtattctgcagaaaacaaagaagtgaagataagaggatttctgcctttcagagtttatacatccatctgtgattaatatttggaggaaaatgagggtcaaagcctatctctgactgtagaatacagccaggagcgtctaactgtgcattatatcagcttcttattaacgcatctgagcctgaagaattcaccatgatagttgcttcggagtctaattactgtatgttgatctaattatgtctgtttttacactttgtgtgcagtgtctggg

SEQ ID NO: 29838 - DNA, 600 bp, Chicken  19866894249127_1
aatgatcatcaagtttcaacccccctgctatgtgcagggtcaccaaccaatcttgtatgtgccttaacatagcttctaggaggatctgctccctggagatgacttttgtatacaagtagaatcagagctttccgctcttggtgcatacagatttccaacatgcaagtcacagttctctaattgttaaaagttttcaatttttattaagtgggtttgttgttttcgttgttgttttttttccaattataaagctttagggatgggttgactacctagtgagaaatggtctgactacctggrgagagttggaagatgaactgataactgaaaatctgactcaacctaatggtaaaggactcyggaaacccaaaaataccttcagagtagaaacagtggatctcatacgtatttttaacttttagatagaatataaagtctgtgtgtcatgcattatgtatatttgctgtattgttctagtcttgagttttaaggactttggataatcagttattcaaaatattgctgactgaactagatgtaactagaaagtcttwttatggtacctttcagaaatcaatatgttctggcttcaaaacagcr

SEQ ID NO: 29839 - DNA, 600 bp, Chicken  19866894249127_2
gccttaacatagcttctaggaggatctgctccctggagatgacttttgtatacaagtagaatcagagctttccgctcttggtgcatacagatttccaacatgcaagtcacagttctctaattgttaaaagttttcaatttttattaagtgggtttgttgttttcgttgttgttttttttccaattataaagctttagggatgggttgactacctagtgagaaatggtctgactacctggrgagagttggaagatgaactgataactgaaaatctgactcaacctaatggtaaaggactcyggaaacccaaaaataccttcagagtagaaacagtggatctcatacgtatttttaacttttagatagaatataaagtctgtgtgtcatgcattatgtatatttgctgtattgttctagtcttgagttttaaggactttggataatcagttattcaaaatattgctgactgaactagatgtaactagaaagtcttwttatggtacctttcagaaatcaatatgttctggcttcaaaacagcrtggcattattaataaaccacttctctattgttttcattaaccatgtggcctcaatgttcr

SEQ ID NO: 29840 - DNA, 600 bp, Chicken  19866894249127_3
tagggatgggttgactacctagtgagaaatggtctgactacctggrgagagttggaagatgaactgataactgaaaatctgactcaacctaatggtaaaggactcyggaaacccaaaaataccttcagagtagaaacagtggatctcatacgtatttttaacttttagatagaatataaagtctgtgtgtcatgcattatgtatatttgctgtattgttctagtcttgagttttaaggactttggataatcagttattcaaaatattgctgactgaactagatgtaactagaaagtcttwttatggtacctttcagaaatcaatatgttctggcttcaaaacagcrtggcattattaataaaccacttctctattgttttcattaaccatgtggcctcaatgttcrctttattcatttcagatttttaaattacatctgttattgttttatttatatttgaaattacagaatttttccatacttcaatgtaagtagcaaatagaatattgtccagaggaaggaaaattggcattaatgaacaaaaaatccccataagcacccagaaaaacaggtgatattgctacataattgcttctttt

SEQ ID NO: 29841 - DNA, 600 bp, Chicken  19866894249127_4
gagagttggaagatgaactgataactgaaaatctgactcaacctaatggtaaaggactcyggaaacccaaaaataccttcagagtagaaacagtggatctcatacgtatttttaacttttagatagaatataaagtctgtgtgtcatgcattatgtatatttgctgtattgttctagtcttgagttttaaggactttggataatcagttattcaaaatattgctgactgaactagatgtaactagaaagtcttwttatggtacctttcagaaatcaatatgttctggcttcaaaacagcrtggcattattaataaaccacttctctattgttttcattaaccatgtggcctcaatgttcrctttattcatttcagatttttaaattacatctgttattgttttatttatatttgaaattacagaatttttccatacttcaatgtaagtagcaaatagaatattgtccagaggaaggaaaattggcattaatgaacaaaaaatccccataagcacccagaaaaacaggtgatattgctacataattgcttcttttatatttactcacccttatacttcagtcaacatcatcttcttttact

SEQ ID NO: 29842 - DNA, 600 bp, Chicken  19866894249127_5
ggaaacccaaaaataccttcagagtagaaacagtggatctcatacgtatttttaacttttagatagaatataaagtctgtgtgtcatgcattatgtatatttgctgtattgttctagtcttgagttttaaggactttggataatcagttattcaaaatattgctgactgaactagatgtaactagaaagtcttwttatggtacctttcagaaatcaatatgttctggcttcaaaacagcrtggcattattaataaaccacttctctattgttttcattaaccatgtggcctcaatgttcrctttattcatttcagatttttaaattacatctgttattgttttatttatatttgaaattacagaatttttccatacttcaatgtaagtagcaaatagaatattgtccagaggaaggaaaattggcattaatgaacaaaaaatccccataagcacccagaaaaacaggtgatattgctacataattgcttcttttatatttactcacccttatacttcagtcaacatcatcttcttttactaatgtagatgtctgctttcactggaagttattggatttggattccataagtaatatttaa

SEQ ID NO: 29843 - DNA, 600 bp, Chicken  19866894249127_6
ttcrctttattcatttcagatttttaaattacatctgttattgttttatttatatttgaaattacagaatttttccatacttcaatgtaagtagcaaatagaatattgtccagaggaaggaaaattggcattaatgaacaaaaaatccccataagcacccagaaaaacaggtgatattgctacataattgcttcttttatatttactcacccttatacttcagtcaacatcatcttcttttactaatgtagatgtctgctttcactggaagttattggatttggattccataagtaatarttaaaaaaaaattcagtctgaggtctgaccattgaaatacgttttttatttttccactaattccattatgctttatgaatgttgccattagaagtaattgaagctgtagcagacattctgggaattaatttacattttcatttttattattgtttttctagcatgttagtgacactcctcagtagaagaatctctcatggtaaaactaaatgggtttatggatgatagaatcatagagttgctcaggttggaaaagaccttcaagatcatgaagtccaaccacaacctaaccatactacc

SEQ ID NO: 29844 - DNA, 600 bp, Chicken  19866894249132_1
ctccttccctgcacagctccggtttaagggacacagatgacgtccccacgctggtgggggcccgggacagctgccacatcctctccgctaagccaggaatgcactgacgcggggctggacaggactcagagccttgggatgggcatcgctccccaggctgagctgggtgactcccccaccctggggacaactagtggccaccaagggggacgcaaggcactgtctgggggggttgcaaaagtgcacacatggctgcagatttccactgtggagctatacacatctcttcaggggatatgrggaaacygaggcatggagctcctttggtccccaaacccaaatccagctcctcttcccagagctctgccatcacccccaccaacacagaagggggggacgtgggttgtcacctacccctcccttatcccgcattgctrctgagaacagctgatggggtcagggacagctgtcccgtcccagtgggcgccaggcccagaacgctggtgtgcaggcgactgagcagagccycagccccgcgcccgcagctccaacatgcgctgctccgatctcctcctcctcttcctcctcgccctctgtgtc

SEQ ID NO: 29845 - DNA, 600 bp, Chicken  19866894249132_2
cctgcacagctccggtttaagggacacagatgacgtccccacgctggtgggggcccgggacagctgccacatcctctccgctaagccaggaatgcactgacgcggggctggacaggactcagagccttgggatgggcatcgctccccaggctgagctgggtgactcccccaccctggggacaactagtggccaccaagggggacgcaaggcactgtctgggggggttgcaaaagtgcacacatggctgcagatttccactgtggagctatacacatctcttcaggggatatgrggaaacygaggcatggagctcctttggtccccaaacccaaatccagctcctcttcccagagctctgccatcacccccaccaacacagaagggggggacgtgggttgtcacctacccctcccttatcccgcattgctrctgagaacagctgatggggtcagggacagctgtcccgtcccagtgggcgccaggcccagaacgctggtgtgcaggcgactgagcagagccycagccccgcgcccgcagctccaacatgcgctgctccgatctcctcctcctcttcctcctcgccctctgtgtcctgccag

SEQ ID NO: 29846 - DNA, 548 bp, Chicken  19866894249132_3
gatgggcatcgctccccaggctgagctgggtgactcccccaccctggggacaactagtggccaccaagggggacgcaaggcactgtctgggggggttgcaaaagtgcacacatggctgcagatttccactgtggagctatacacatctcttcaggggatatgrggaaacygaggcatggagctcctttggtccccaaacccaaatccagctcctcttcccagagctctgccatcacccccaccaacacagaagggggggacgtgggttgtcacctacccctcccttatcccgcattgctrctgagaacagctgatggggtcagggacagctgtcccgtcccagtgggcgccaggcccagaacgctggtgtgcaggcgactgagcagagccycagccccgcgcccgcagctccaacatgcgctgctccgatctcctcctcctcttcctcctcgccctctgtgtcctgccaggtaaggtgcacccaccccagggagaggggaggctgaagggtccctggtgcccccttccaccaccttttccctggggtt

SEQ ID NO: 29847 - DNA, 457 bp, Chicken  19866894249132_4
ggggttgcaaaagtgcacacatggctgcagatttccactgtggagctatacacatctcttcaggggatatgrggaaacygaggcatggagctcctttggtccccaaacccaaatccagctcctcttcccagagctctgccatcacccccaccaacacagaagggggggacgtgggttgtcacctacccctcccttatcccgcattgctrctgagaacagctgatggggtcagggacagctgtcccgtcccagtgggcgccaggcccagaacgctggtgtgcaggcgactgagcagagccycagccccgcgcccgcagctccaacatgcgctgctccgatctcctcctcctcttcctcctcgccctctgtgtcctgccaggtaaggtgcacccaccccagggagaggggaggctgaagggtccctggtgcccccttccaccaccttttccctggggtt

SEQ ID NO: 29848 - DNA, 600 bp, Chicken  19866894249134_1
caggtcctccatttctggcagcagtctttcacagggaggagcaagcagacggagaaaacctgcctgaagacatttccagcagaactgaaggagcttctgagagggaggtggaacaaagtgtctctctgctgggagtaactgtcttgagaaaaacaattatgggaatgggaaagtctaatagatgtgagaaaatgaactcatcagtttgggaattattaccttcagggaagggctggagcaagttaaagagggagggagagctagatccagactccagttttcaaggttcatttctcatayacttcatcagtagtttggttcgctgagccgctaaaatgtgtttctgtcttaaaatatcccagaaacactaaagcaaagcagcattacgtactgcaataactagtatatctatttctctctcacacaattcacagctagggatttgacacagcatactttaaaaatgtatttgtcatcagtgatctattaagccctctatctgcagcaagctaatgagaattttttttaaaattatgctagttagcagctacacaaagaactacagacagcaaggattataccctaaggtgtattcacata

SEQ ID NO: 29849 - DNA, 600 bp, Chicken  19866894249134_2
ttaagccctctatctgcagcaagctaatgagaattttttttaaaattatgctagttagcagctacacaaagaactacagacagcaaggattataccctaaggtgtattcacatatataacacatgttgtttggattagacagcacaacaggaagaatttactgagacattatggcaccaaacccaaattatatcattttctaagacacaatcattgagagggttggtctttccccatagatataaaagaaaaccttacactaatttttataaaaaataggattagtccctgagtcattayaatactcaggacaagaaaatcaccttgtctatggttataaataaaaacatatggatctcagcagccacaaaagaatcaaaacaactgaaaaatcaagggacctgtgccagggcaagtaaagaagggtgaaagcagagtgggcaaaccactgatacaataccaaagagctgacagcaacatatttatataatgaggatggagaaaatggccttttgtctgccacatgcacggatagatcaggaagaaaacctctcaagcaaactgcttctaattctcccatgctccaaggagggcttgctg

SEQ ID NO: 29850 - DNA, 600 bp, Chicken  19866894249137_1
agtcatgttatgctggcctccggagagcaaaatgtcatctccaaaacattctttccagttatattttgaagtcagagagcgcatatctccacatctgtgccttgctgcaagccccaagagttgtcagaagttgttgtgggtggtaagggtggctgtgccgaaccttggaaagaagcaagtcaaggtggctgctgcatcagatgctgcaaacaagaggcacaggcttccccattacccctgctgcggcaggcagtgccactgtgacaactcagatgcagcccctcccaaagtgcagtcacmcaccgttccagatgcattctgtacacggcagaggcaatatacagaagcacctgtcttcacagggctccccacgccctccagcttccagaacgcttgccttcagggagtaggatcaggccacagatttagggcagccccccctaaaaatgatagcctaagtagcaatctggacacaagcttgcagggacagaacaatttggccttaattaagattgtatgcatcttgcttctttcttccaagaaaggggaaggttctgctgcccccggatagcaattccacactttggaccctgcaagtta

SEQ ID NO: 29851 - DNA, 600 bp, Chicken  19866894249148_1
actggaggcaatgcaaatacttaatcggagcagttaattttgatttttctaatcaaaagatttacaacttttcgtatctgtacaggaccacctctaagctcttttgcattcaaagtgaagtgcttagcatatagagaagaaacatgctgagggaaatgattgctgctcatttcttgtttctttcatgttgctggatttcctcaactagctgtgcagtatgctgcccttcacaatgcccttgaataaacatagataacatctttttcttctatgctaggtgcaagcttgtagagtgagtcrtagaaaagcctgaagagattacttaggtgtctccagttgagaatctctcaaatgacttcctctttcctccagatgacaaatccataatgccaaaaatatttaaaatatttatttatcctrtattaagcctagaagacattttctgtgtaagaagtgatctatgaaatttttcaacagatatatttgggtgaagaggaaataaggtattacactgcagaaattagttaattttgttattttacaattttttcttttaaaaaccagaagaatttttaaaatgtccaaccagataaaaatatt

SEQ ID NO: 29852 - DNA, 491 bp, Chicken  19866894249148_2
tgcttagcatatagagaagaaacatgctgagggaaatgattgctgctcatttcttgtttctttcatgttgctggatttcctcaactagctgtgcagtatgctgcccttcacaatgcccttgaataaacatagataacatctttttcttctatgctaggtgcaagcttgtagagtgagtcrtagaaaagcctgaagagattacttaggtgtctccagttgagaatctctcaaatgacttcctctttcctccagatgacaaatccataatgccaaaaatatttaaaatatttatttatcctrtattaagcctagaagacattttctgtgtaagaagtgatctatgaaatttttcaacagatatatttgggtgaagaggaaataaggtattacactgcagaaattagttaattttgttattttacaattttttcttttaaaaaccagaagaatttttaaaatgtccaaccagataaaaatattctatcttaaaa

SEQ ID NO: 29853 - DNA, 600 bp, Chicken  19866894249152_1
gggaagcagcaaaataaatcagcatggtgataaataacccaaagagccacctacagcatgcagcagccctgcttggcacagagcagggagcttcccctggccagcagtggcattgctgtctggctcctcctctgccctttgccactcacagcagcgtgcacctggatactgctatgggagctgatgccaagctgccttgggaagagagaagcaggctgctccaggatgcagggactgcagaaccacaggaatctgagagcatgcccatattactccactgcccccagtcagcctcatgtkgaaacacaaagctttagagcccattggaggtctgattgacattgccctaattaaaacttcctacaacagctgctaactcattcccccacccctatttgtagcacaagatcagagcttggctgaggttctgggagtgcagtcacaccaatacagctcagtagagccccatcccggagccaggcacaggagtacctcaccttgagtagcaaatcccagcacacaactcaacaaggcctaaatccatttctgagctactgcagagacagctctccttgtcacacagcttggacattgtgggtg

SEQ ID NO: 29854 - DNA, 436 bp, Chicken  19866894249156_1
atgtcatttgttgtcttgtcaggtgtagtgaagggacaccggaaggagtctggagagctatattactgcattgaaaaggaaggtcagaggaagtggtacaagcgaatggctgttattctgtctctggaacaaggaaataagctccgagagcagtttgggctaggcccttatgaacctgtcacccccctgactaaggcagctgacatcagtcttggtaaggggtgatgctgttaggttctgtgaactacaaatctgtcagcctgaccttggtgccagggaaagttatggaacaggtcatcyggagtgcaatatcatggcacttgtgggacagccagggaatcaggcctgacagacatgggtgggttcatggaaagcaggtagtgcctgaccaacctcgtcagcaccttctataactgggtgatccatttggtggata

SEQ ID NO: 29855 - DNA, 589 bp, Chicken  19866894249161_1
taggcattgtcccagctacagcacgcagttaatctaagaaaagcaaggtggcttgctggaatgtagttctcctcaacttccagggtgagcgtgggaatttcatggcttacaactcgtggcttttttgaagttacaggtcttcagtgaattccaataaatcatatagtatttaaaaacagtaagactattattttttttttaattaatgtggggtaaaaaataattaaaaataaatctaattcatccagccttaggaaaaggattttcttaattctcagtttcataaccaattttcagagmtactgctgagttccaactaatgctgagttctaacttacaagtgtacaaagtattactgaaacttcacagtaagcatgcataaataacactaatcattcaaccagtgcttgtcatgttctaatttgctgatgatgttcaatgattccacaggtgtgaaactaaaaacaagttttaatgtgaatatattcccaagtgaaattgacacttattctctgtcaaaaatgtgccttttcttatttaatgaaagataccaaaagtacaagaaagcctatttctgcaaacctgtttt

SEQ ID NO: 29856 - DNA, 599 bp, Chicken  19866894249178_1
  misc_feature (1)..(38): n is any nucleotide
nnnnnnnnnnnnnnnnnnnnnnnnnnnnnnnnnnnnnnaaagtgggtcccctgaagatgagaaggagattgaagaactgaagggacttctccctgaaatcaaagaaaagatagaggattcaaaggagtctcaaaagagtgcaagggtagctgagctggcattgaaagcaactctggttagtgcatcctgcattttcctttgaaccaaacattcttctagagaggcttgaagtaaaccaataatgggagaagttcagacttcatgtacagcaagatgttaactaatgcagttaaaatcctraagataagtttaatagcaaatatactgaaattaattgttccaacctaaacttgaatttgttaggcttctaagcaataagtctaagtcaaatgtgagactcatgtgagygttacatcactacatgagctcttcttctgtctcacctgtatgtcagtgtagaagcagaatgcagtaagacacaattggattttctgccacttcataaactgtgtattggccttttgtgaataggtgacaaygtgctgsttaactatttcttctgcttttctaggttggaactacatctggtttttcacaaa

SEQ ID NO: 29857 - DNA, 600 bp, Chicken  19866894249178_2
gatagaggattcaaaggagtctcaaaagagtgcaagggtagctgagctggcattgaaagcaactctggttagtgcatcctgcattttcctttgaaccaaacattcttctagagaggcttgaagtaaaccaataatgggagaagttcagacttcatgtacagcaagatgttaactaatgcagttaaaatcctraagataagtttaatagcaaatatactgaaattaattgttccaacctaaacttgaatttgttaggcttctaagcaataagtctaagtcaaatgtgagactcatgtgagygttacatcactacatgagctcttcttctgtctcacctgtatgtcagtgtagaagcagaatgcagtaagacacaattggattttctgccacttcataaactgtgtattggccttttgtgaataggtgacaaygtgctgsttaactatttcttctgcttttctaggttggaactacatctggtttttcacaaagtgaaggcagcggctctgtttctacagtaagttggacagaggaaagttactgagaattcatgtctgctttaaggattatggcttgctgttattgacatgtcagtgtctc

SEQ ID NO: 29858 - DNA, 600 bp, Chicken  19866894249178_3
taatgggagaagttcagacttcatgtacagcaagatgttaactaatgcagttaaaatcctraagataagtttaatagcaaatatactgaaattaattgttccaacctaaacttgaatttgttaggcttctaagcaataagtctaagtcaaatgtgagactcatgtgagygttacatcactacatgagctcttcttctgtctcacctgtatgtcagtgtagaagcagaatgcagtaagacacaattggattttctgccacttcataaactgtgtattggccttttgtgaataggtgacaaygtgctgsttaactatttcttctgcttttctaggttggaactacatctggtttttcacaaagtgaaggcagcggctctgtttctacagtaagttggacagaggaaagttactgagaattcatgtctgctttaaggattatggcttgctgttattgacatgtcagtgtctctattcttaatagattccagtaagaaaagcagctgatggagcatctcagtgcgttacagacatctctcacctggtcaggaaaaaggtgagtccagcaatgactaatagagtaaacagcttgtcagagtacca

SEQ ID NO: 29859 - DNA, 600 bp, Chicken  19866894249178_4
agaagttcagacttcatgtacagcaagatgttaactaatgcagttaaaatcctraagataagtttaatagcaaatatactgaaattaattgttccaacctaaacttgaatttgttaggcttctaagcaataagtctaagtcaaatgtgagactcatgtgagygttacatcactacatgagctcttcttctgtctcacctgtatgtcagtgtagaagcagaatgcagtaagacacaattggattttctgccacttcataaactgtgtattggccttttgtgaataggtgacaaygtgctgsttaactatttcttctgcttttctaggttggaactacatctggtttttcacaaagtgaaggcagcggctctgtttctacagtaagttggacagaggaaagttactgagaattcatgtctgctttaaggattatggcttgctgttattgacatgtcagtgtctctattcttaatagattccagtaagaaaagcagctgatggagcatctcagtgcgttacagacatctctcacctggtcaggaaaaaggtgagtccagcaatgactaatagagtaaacagcttgtcagagtaccattgtttt

SEQ ID NO: 29860 - DNA, 600 bp, Chicken  19866894249182_1
aaacatggtaaagagatgcaagggaaataacagtgcaaacgtagtaggtgttccaagtacatcaatgtttcatattcttaggaactgtataatgaaatattctttcaaaagagtacttaattctttggtttctccctttctattcttagtagccattactgagctgcagtaatagttgtgtcgtttttggattagtaagcatcacaacttttttatgggatagctgttagaggatacagatgctgcatgcaggcggctaaaggcttattttgtgtatttggttgcaaagtcatcagtttygcttcaactcataagcastgaaaagaactttttttttactagcttgagtgtcgaaacactgaacttggacttcagtagtgatgtyttttaagtgcgttcttgtcttgaaggttgctgccactgaagatctcgtaagtggcagtactcggggtagggcatgcgctgcagatagcaacagctctgcagcaatttcacttgggagaatcaaggactcaaccaattgtggcgcttacagagtcagcagttgcacagaattacagaagtgctggctagaagggtcactggatgttcttacgagtt

SEQ ID NO: 29861 - DNA, 600 bp, Chicken  19866894249182_2
caagggaaataacagtgcaaacgtagtaggtgttccaagtacatcaatgtttcatattcttaggaactgtataatgaaatattctttcaaaagagtacttaattctttggtttctccctttctattcttagtagccattactgagctgcagtaatagttgtgtcgtttttggattagtaagcatcacaacttttttatgggatagctgttagaggatacagatgctgcatgcaggcggctaaaggcttattttgtgtatttggttgcaaagtcatcagtttygcttcaactcataagcastgaaaagaactttttttttactagcttgagtgtcgaaacactgaacttggacttcagtagtgatgtyttttaagtgcgttcttgtcttgaaggttgctgccactgaagatctcgtaagtggcagtactcggggtagggcatgcgctgcagatagcaacagctctgcagcaatttcacttgggagaatcaaggactcaaccaattgtggcgcttacagagtcagcagttgcacagaattacagaagtgctggctagaagggtcactggatgttcttacgagtttcctctcaatacaggatt

SEQ ID NO: 29862 - DNA, 600 bp, Chicken  19866894249182_3
tgtataatgaaatattctttcaaaagagtacttaattctttggtttctccctttctattcttagtagccattactgagctgcagtaatagttgtgtcgtttttggattagtaagcatcacaacttttttatgggatagctgttagaggatacagatgctgcatgcaggcggctaaaggcttattttgtgtatttggttgcaaagtcatcagtttygcttcaactcataagcastgaaaagaactttttttttactagcttgagtgtcgaaacactgaacttggacttcagtagtgatgtyttttaagtgcgttcttgtcttgaaggttgctgccactgaagatctcgtaagtggcagtactcggggtagggcatgcgctgcagatagcaacagctctgcagcaatttcacttgggagaatcaaggactcaaccaattgtggcgcttacagagtcagcagttgcacagaattacagaagtgctggctagaagggtcactggatgttcttacgagtttcctctcaatacaggattgttggcaccgtatgagggggtcagctgtggctttttcacccaagttatgaatatagatgaggatgga

SEQ ID NO: 29863 - DNA, 600 bp, Chicken  19866894249184_1
gaaaacttcaaatgaatctgttaggctgctgttaattgagacattgcaagaaatgtattcttctgcctgtttagttaggatttgtttcaagtaatgccacaatgaaaacatttttgttaattattctcagtaaatctagcaaatacttcaacacttaagaaaatccaggtgattgaacgaatcattacacttgaatgcatcacgggctgttgactaaatgtgcattcatttttgcacatgacttctgttttaagagctcaccaagttgaaaggagcaaatatactctaaactgagccccyagcttctctccttgcaggaactcgacaacttcaagccataccctgtagaaatactgcctggaaagttatacatgggcaatttcaggcaggcctgcgaccaacaaattcagaaagatttgaagatcaaagcacaagtcaacatttctgaacagcctgcaacgctgtaagttgttcagggtatattcttcccaatgtctgtgcctgtgaaaaaaagtgaggtagcagaggagtgaatgcctgtaaacttcaaaggaaaactgttttttcacagcagatttgagtgctatttcacacgtagtt

SEQ ID NO: 29864 - DNA, 600 bp, Chicken  19866894249188_1
tttcgctttaccagacttcagctcaaattatttccctctttccttggtgtattttgcatctttcaaatatttgtaggcagttatcatatccccattttagctgtctggcagccaagttaaacataattagcttttctaatcttcctccataaatccagcttgctttcttgaaatccagtgcctttctcctacttgtctttttggtatgatgaagctacatactttgtggttgtttttcacacgccatcactgataccaataggaagagacatcacaaaatcagacagtacatttgaaatrgtttctattctaggttcactttttgctctttgtaatataaacttagctttactgtcagataatttagggtttccttggaatatttgtatcagtgagcatttacaaaactcaatccctgttcagtatcttcaaagtgaatttctgtaagagatagattaagagttttgtgcttgttttataggcagagtgtacacaagtagacatcagggaagactaatttacctgtcatgaaaatctgttaacttgatgggggaaagcgatgttttgtcaaaaaagtgtgctacacaaacggtgtggaaa

SEQ ID NO: 29865 - DNA, 600 bp, Chicken  19866894249194_1
cagttcttttccacatccttttttaaatgaccatacatcaaattttccatatataaaatgcctcctgttatatatactttccaagaggtacaaatggctaaatggcaattctagctcaacactaacttctggacaaatttgatatgcttcattataataatttttgaaatacagttacaattttaaatattattacagaaacttcttcaagcactataatcacacattcagtgaagcatttcaaactttttcctctgcttttcaaaagtgcactgactgcatatgtcagcttccacaacrtattgttttaggccaagtgtaggacttgaaatccctatccatttcaagtgacaatctgatctggccacaaaaaacactgtgtttcagtctgartatctagtgtccttttccaaaagaatttgctacttccatggtgatgcctgatagctgtagtataatcttgcactgtccaaagaagaggctatagaatccagcctatacaagtagagatttatgaagtggcaaatatttgcttgagacaattgctgacctcaaaggaacatcttcaggagaacaggcatgctgagcgttgccatatga

SEQ ID NO: 29866 - DNA, 509 bp, Chicken  19866894249194_2
atggctaaatggcaattctagctcaacactaacttctggacaaatttgatatgcttcattataataatttttgaaatacagttacaattttaaatattattacagaaacttcttcaagcactataatcacacattcagtgaagcatttcaaactttttcctctgcttttcaaaagtgcactgactgcatatgtcagcttccacaacrtattgttttaggccaagtgtaggacttgaaatccctatccatttcaagtgacaatctgatctggccacaaaaaacactgtgtttcagtctgartatctagtgtccttttccaaaagaatttgctacttccatggtgatgcctgatagctgtagtataatcttgcactgtccaaagaagaggctatagaatccagcctatacaagtagagatttatgaagtggcaaatatttgcttgagacaattgctgacctcaaaggaacatcttcaggagaacaggcatgctgagcgttgccatatgatt

SEQ ID NO: 29867 - DNA, 600 bp, Chicken  19866894249197_1
aacaaagggcactagctcaaaagctgatggaacaggacactgagcctggagcacttggccagctgacggagcgagcacagagctctgtcctacccgtgcaaaaagactctcctttacaagtggcatttatggcttcttggcattttttctgggcactttcaaactggcagcctttacagcaggggctgttccgatcactgcagaaagatcaaaatgaaaggaagaaatactgagcatttctttatgtactttaaagaagtatgagcacaacaaaaggcaaagaaagaaattctctccccyacaaacgagatgctgcagtgcatcttcccttacctgcatttggcaccatctttcagtttgcagtctgcagagcagcagggatcaactcgttggtacaagaggccrggatcgcattcctccccttcgtccaccctggagttcccacacactttgttgttgcgctctttgaagcactcctgggccttgacctctatggtcctatggatggattttttgctgcagcttgagaacatctggagaatcataaagagaaagagcagcactgaggagtgcacccttctgtcaacaagtacatctacg

SEQ ID NO: 29868 - DNA, 600 bp, Chicken  19866894249197_2
actctcctttacaagtggcatttatggcttcttggcattttttctgggcactttcaaactggcagcctttacagcaggggctgttccgatcactgcagaaagatcaaaatgaaaggaagaaatactgagcatttctttatgtactttaaagaagtatgagcacaacaaaaggcaaagaaagaaattctctccccyacaaacgagatgctgcagtgcatcttcccttacctgcatttggcaccatctttcagtttgcagtctgcagagcagcagggatcaactcgttggtacaagaggccrggatcgcattcctccccttcgtccaccctggagttcccacacactttgttgttgcgctctttgaagcactcctgggccttgacctctatggtcctatggatggattttttgctgcagcttgagaacatctggagaatcataaagagaaagagcagcactgaggagtgcacccttctgtcaacaagtacatctacgacagcctcaacctcttcagacctccaaattctgctgtcttagaaagcatgtattctctccatgctgccatcttgatggctctgaaagattttaagatgggaaaat

SEQ ID NO: 29869 - DNA, 600 bp, Chicken  19866894249201_1
ctttcactggtttctaaaaccatcttactatacagaacagtctcccttcccaggctcagttcatggcctgtaatccatttgtacaattcagatttaagctaccatacctagatcaatgtgagcacttaattcaagatgtgcttgcatccgagagaatacatatcaatatttaataaatctatcagttgtaagtattttgctacttgcaataatactgctgactacttgctttttgtttaggcttaatatggaggatacagaagtaaaaggaaagaacaaagccattaaaaaaaaaaaaamaaaaacccaaagacacaaaaaccaaccaacctccaagagcaccaacaaaacagaaaaaataagccaggaagaaataaacatagaatggaaattttcagtttagataataaaaatatagaaaatttagtagcagctcacagtcatagaattatttattgactaaacttacatataggaaatactatcaactaagaacccataaaattaatgttgggatcatttgatgtttggagatagttatgtaatactgaaatggttataraaagatctaatgttttctttgccaaatctaatagtgac

SEQ ID NO: 29870 - DNA, 600 bp, Chicken  19866894249201_2
gtaaaaggaaagaacaaagccattaaaaaaaaaaaaamaaaaacccaaagacacaaaaaccaaccaacctccaagagcaccaacaaaacagaaaaaataagccaggaagaaataaacatagaatggaaattttcagtttagataataaaaatatagaaaatttagtagcagctcacagtcatagaattatttattgactaaacttacatataggaaatactatcaactaagaacccataaaattaatgttgggatcatttgatgtttggagatagttatgtaatactgaaatggttataraaagatctaatgttttctttgccaaatctaatagtgacaaacatattgaagatgtgaatgagtcctgattaccacagaatctgtatgcttacagcacaggctttcccagctcaggaaacttgttctgtacctataactctacaataataaaagtaatgggaatgtaagctttatgttcttaggtttttagagggagtaggtctgatagatgattaataatgcactgaacatctatgtaaaatatttacttttctaaatcagccttatgcagcaatcttatttctatccagtaatagcacc

SEQ ID NO: 29871 - DNA, 567 bp, Chicken  19866894249203_1
gtgtattgtagtgagggagcccatgacccaaattacagaggaagtccgggatcagttactggaggcctctgcagctacaagaaaggcgtacagcacctaccggagggaagctgattctgatgaccattattcagcggcagaaggcgcacagtcagcagcagacaagagcaaagatgacctggagatgagtgctgtgatctccataatgcaacccatcctccgcttcttgcagctgctctgtgaaaaccacaaccgggatttgcaggtcagtctgattgctgagcagctgtgcccacaccrmctcacacggtcactgcagagaggcaatgggcacaaactggaaagtccatttaaacaacaaaaatgctattactgccagggtgatggaagcctggaatgagctgcccttgggagtttgtggcatctctgttcatggagacgcttaaaacccaactggtggcattcgtgggaagcctgctgtctgtgccacccccagtggcgtgtgatactctctgatatgtttgtacagttctgagtggtgagcactgtctcatctagcacatacct

SEQ ID NO: 29872 - DNA, 566 bp, Chicken  19866894249203_2
tgtattgtagtgagggagcccatgacccaaattacagaggaagtccgggatcagttactggaggcctctgcagctacaagaaaggcgtacagcacctaccggagggaagctgattctgatgaccattattcagcggcagaaggcgcacagtcagcagcagacaagagcaaagatgacctggagatgagtgctgtgatctccataatgcaacccatcctccgcttcttgcagctgctctgtgaaaaccacaaccgggatttgcaggtcagtctgattgctgagcagctgtgcccacaccrmctcacacggtcactgcagagaggcaatgggcacaaactggaaagtccatttaaacaacaaaaatgctattactgccagggtgatggaagcctggaatgagctgcccttgggagtttgtggcatctctgttcatggagacgcttaaaacccaactggtggcattcgtgggaagcctgctgtctgtgccacccccagtggcgtgtgatactctctgatatgtttgtacagttctgagtggtgagcactgtctcatctagcacatacct

SEQ ID NO: 29873 - DNA, 600 bp, Chicken  19866894249207_1
ggctccaagggttctggtaaaagtaagtaaataaaaattcttttttcgttgtgctaggctgccctccagaagaagggtatttccaaaaaagcacagattatgcagtgttttttcttctgccaatttactaaactctaactcaagactttcagaggacagtgcctcagcttcctgtgttctgaatggttgctttatttttatttatttatttatttatttatttcaatttctaactttggcttccacctacaaacataccttttttcctttcctgaggtgtacttccattgctttggattyctatcttgcttagtgcccagtactgtaacttactgctaatgttaacttacaaaatttgaagtttcaaataggaattaatttaagttaaaaaaaaaaacaacaaaagtttaagcaattgctacggtcctcacagggggaacaagacagcacagagataacatttttgttcaattagcragttgtctcrtactgacaataacctgtgttatccacagatgtgataaaggaaatgcaagtagatgggacacatctgttcattctaaacattccttcattagtgtcatcacatttacttttagg

SEQ ID NO: 29874 - DNA, 600 bp, Chicken  19866894249207_2
tctgaatggttgctttatttttatttatttatttatttatttatttcaatttctaactttggcttccacctacaaacataccttttttcctttcctgaggtgtacttccattgctttggattyctatcttgcttagtgcccagtactgtaacttactgctaatgttaacttacaaaatttgaagtttcaaataggaattaatttaagttaaaaaaaaaaacaacaaaagtttaagcaattgctacggtcctcacagggggaacaagacagcacagagataacatttttgttcaattagcragttgtctcrtactgacaataacctgtgttatccacagatgtgataaaggaaatgcaagtagatgggacacatctgttcattctaaacattccttcattagtgtcatcacatttacttttagggatgtttatgtttaaaatgtaagctaatgaggacatgaattcataaatayacaatctagacaataatcttattaactggacattagttacaacaasaaaaacaaacttgtatgattctgtcaagttcttaagtccttttcttcaacttgaaatggtatcattgacagtaaccacaac

SEQ ID NO: 29875 - DNA, 600 bp, Chicken  19866894249207_3
tgctttatttttatttatttatttatttatttatttcaatttctaactttggcttccacctacaaacataccttttttcctttcctgaggtgtacttccattgctttggattyctatcttgcttagtgcccagtactgtaacttactgctaatgttaacttacaaaatttgaagtttcaaataggaattaatttaagttaaaaaaaaaaacaacaaaagtttaagcaattgctacggtcctcacagggggaacaagacagcacagagataacatttttgttcaattagcragttgtctcrtactgacaataacctgtgttatccacagatgtgataaaggaaatgcaagtagatgggacacatctgttcattctaaacattccttcattagtgtcatcacatttacttttagggatgtttatgtttaaaatgtaagctaatgaggacatgaattcataaatayacaatctagacaataatcttattaactggacattagttacaacaasaaaaacaaacttgtatgattctgtcaagttcttaagtccttttcttcaacttgaaatggtatcattgacagtaaccacaactagttgtcaa

SEQ ID NO: 29876 - DNA, 600 bp, Chicken  19866894249207_4
aaaatttgaagtttcaaataggaattaatttaagttaaaaaaaaaaacaacaaaagtttaagcaattgctacggtcctcacagggggaacaagacagcacagagataacatttttgttcaattagcragttgtctcrtactgacaataacctgtgttatccacagatgtgataaaggaaatgcaagtagatgggacacatctgttcattctaaacattccttcattagtgtcatcacatttacttttagggatgtttatgtttaaaatgtaagctaatgaggacatgaattcataaatayacaatctagacaataatcttattaactggacattagttacaacaasaaaaacaaacttgtatgattctgtcaagttcttaagtccttttcttcaacttgaaatggtatcattgacagtaaccacaactagttgtcaaatgatctaataagcctgaagtcatagctcatgcactatggtcctcagctgcccagtagtatcaggaaaaatatgttttttctggcaaagcattgcacattggagaaggcaaacaaatttgtcttctctttcctgaagcagtaaataccgatcagaagataatg

SEQ ID NO: 29877 - DNA, 600 bp, Chicken  19866894249207_5
acaacaaaagtttaagcaattgctacggtcctcacagggggaacaagacagcacagagataacatttttgttcaattagcragttgtctcrtactgacaataacctgtgttatccacagatgtgataaaggaaatgcaagtagatgggacacatctgttcattctaaacattccttcattagtgtcatcacatttacttttagggatgtttatgtttaaaatgtaagctaatgaggacatgaattcataaatayacaatctagacaataatcttattaactggacattagttacaacaasaaaaacaaacttgtatgattctgtcaagttcttaagtccttttcttcaacttgaaatggtatcattgacagtaaccacaactagttgtcaaatgatctaataagcctgaagtcatagctcatgcactatggtcctcagctgcccagtagtatcaggaaaaatatgttttttctggcaaagcattgcacattggagaaggcaaacaaatttgtcttctctttcctgaagcagtaaataccgatcagaagataatgacacagattccatgtctcagagatctaatgtgggcagaaaacctgt

SEQ ID NO: 29878 - DNA, 600 bp, Chicken  19866894249209_1
tcatcattagccgttggtcaaacatctctgcaatgccttgcaagaaaactgtgacagctgcacttggccttggtacttaaattgtctagggtgcttaaggggaaatgacatgaatgcacagcagtgggcacaggctttgttctcaagagatacttgaggaagaccaaagtaaaagatgacatggtttagtctgacatggtttagtaggcatggtggtgatgggttgatagttggactagatgatctaagtggtcttttccaacactaatgatttcatgattctatatgttcattcatctyaaatgcagagagaggtgcctgtcaaaatactgcactgtaacagacagaaggatgagcctccagrgagagtttcatacccgagatctccatatagcascctgaactttgcatggcaagttgaagcagcacacagactttgaggcctcagcaaaaggtttgggaaagcatcatcatgctaagagacatctcacaagatgcttccagaacaaaatttgcaaacttgcttagctaaatataaagttatatgtagactgaaagtaagaaatacacatttgaatattaatgtcattttctgagttc

SEQ ID NO: 29879 - DNA, 600 bp, Chicken  19866894249209_2
tggccttggtacttaaattgtctagggtgcttaaggggaaatgacatgaatgcacagcagtgggcacaggctttgttctcaagagatacttgaggaagaccaaagtaaaagatgacatggtttagtctgacatggtttagtaggcatggtggtgatgggttgatagttggactagatgatctaagtggtcttttccaacactaatgatttcatgattctatatgttcattcatctyaaatgcagagagaggtgcctgtcaaaatactgcactgtaacagacagaaggatgagcctccagrgagagtttcatacccgagatctccatatagcascctgaactttgcatggcaagttgaagcagcacacagactttgaggcctcagcaaaaggtttgggaaagcatcatcatgctaagagacatctcacaagatgcttccagaacaaaatttgcaaacttgcttagctaaatataaagttatatgtagactgaaagtaagaaatacacatttgaatattaatgtcattttctgagttcaacaacagaacagtgaagtaagattccataattttatgtggaagaggttcctataaatccccca

SEQ ID NO: 29880 - DNA, 600 bp, Chicken  19866894249209_3
aggggaaatgacatgaatgcacagcagtgggcacaggctttgttctcaagagatacttgaggaagaccaaagtaaaagatgacatggtttagtctgacatggtttagtaggcatggtggtgatgggttgatagttggactagatgatctaagtggtcttttccaacactaatgatttcatgattctatatgttcattcatctyaaatgcagagagaggtgcctgtcaaaatactgcactgtaacagacagaaggatgagcctccagrgagagtttcatacccgagatctccatatagcascctgaactttgcatggcaagttgaagcagcacacagactttgaggcctcagcaaaaggtttgggaaagcatcatcatgctaagagacatctcacaagatgcttccagaacaaaatttgcaaacttgcttagctaaatataaagttatatgtagactgaaagtaagaaatacacatttgaatattaatgtcattttctgagttcaacaacagaacagtgaagtaagattccataattttatgtggaagaggttcctataaatcccccactgatttaaatgaattattttttttcttctatt

SEQ ID NO: 29881 - DNA, 600 bp, Chicken  19866894249212_1
ttcaaatgggctataaataaataaaattccaaaaagaatcagagttcggaagtatttcccacatcttttattcgtattcatcatgcactttattcatgtctttacattttgttgacttcagcttctagtcaatagctcttatgtaactcagacatttccgtcatttgtttcattttcactacataaaaataagatgtcacttgattattttttcttggcattcacttacagtgaaggctttttcaatattttgtccctggttgttttaataaaaagccatcttaatagatattttagatraaggaaaaaaatgcaagttaatgatcatggaaatattttggcaactgaaagatttcacaacaaggagcttaaactcaattttaataactagactagttggaatatttgccacagaattattatctagatgttcagtagatcaatwatattaattaaacagacaagactgaagacaactgttgtcaataaatatgtcaatatgttaataaagacaccaatgccacctctctccccagggcaaatataaaaaaaacctctagctggagatttcacgggcgcattgctgatggaagcactgtt

SEQ ID NO: 29882 - DNA, 600 bp, Chicken  19866894249212_2
actcagacatttccgtcatttgtttcattttcactacataaaaataagatgtcacttgattattttttcttggcattcacttacagtgaaggctttttcaatattttgtccctggttgttttaataaaaagccatcttaatagatattttagatraaggaaaaaaatgcaagttaatgatcatggaaatattttggcaactgaaagatttcacaacaaggagcttaaactcaattttaataactagactagttggaatatttgccacagaattattatctagatgttcagtagatcaatwatattaattaaacagacaagactgaagacaactgttgtcaataaatatgtcaatatgttaataaagacaccaatgccacctctctccccagggcaaatataaaaaaaacctctagctggagatttcacgggcgcattgctgatggaagcactgttatcacatttacaacaattaacatactccttgagcttatagaagatcctgagcacataataaagaaagcacagctaagatcctgaattacaggtgtttatggctgtgttaatcccaccccctggaaatgcttgggaagtacctgag

SEQ ID NO: 29883 - DNA, 600 bp, Chicken  19866894249214_1
tcttcagtttcctccatggctataacatgattcagaatccatgaaggacagaagtgttgctgtgaagctagagttagtttctttctttcctacagagaaaaattcaaaccaaggtatgtgtagttttacatgaacatcaggttgccattttaactatccaaagctaaaagcagtaacttctttggatagggtgtctggaaggagagcaacacacttagagtgggaaatgcctttatttaggagacctggtggacaggcatcttggaatatagatgcagacttcacactcagccaaacacygaactactttgtttgcttggattctaggtagmtgtagttctgataaaggtttaaataacttagctgtgtaagaatttaacatctttctccacctcagaagggatacgtacttatgtccttcacctagtttctactttataatttagaaaaatatcaaaattacaaaaattcaaaaccaaaattcccttgttgtctttgtcatacatcatcaatcaatactcaaggtaaagctgggacagaattaaactttagaatccattgtccatcaaaaaacatggtttagtactttatagtattgtt

SEQ ID NO: 29884 - DNA, 600 bp, Chicken  19866894249214_2
cagaatccatgaaggacagaagtgttgctgtgaagctagagttagtttctttctttcctacagagaaaaattcaaaccaaggtatgtgtagttttacatgaacatcaggttgccattttaactatccaaagctaaaagcagtaacttctttggatagggtgtctggaaggagagcaacacacttagagtgggaaatgcctttatttaggagacctggtggacaggcatcttggaatatagatgcagacttcacactcagccaaacacygaactactttgtttgcttggattctaggtagmtgtagttctgataaaggtttaaataacttagctgtgtaagaatttaacatctttctccacctcagaagggatacgtacttatgtccttcacctagtttctactttataatttagaaaaatatcaaaattacaaaaattcaaaaccaaaattcccttgttgtctttgtcatacatcatcaatcaatactcaaggtaaagctgggacagaattaaactttagaatccattgtccatcaaaaaacatggtttagtactttatagtattgttatacagtwtaacatcttacactagattttaga

SEQ ID NO: 29885 - DNA, 410 bp, Chicken  19866894249214_3
ttgtttgcttggattctaggtagmtgtagttctgataaaggtttaaataacttagctgtgtaagaatttaacatctttctccacctcagaagggatacgtacttatgtccttcacctagtttctactttataatttagaaaaatatcaaaattacaaaaattcaaaaccaaaattcccttgttgtctttgtcatacatcatcaatcaatactcaaggtaaagctgggacagaattaaactttagaatccattgtccatcaaaaaacatggtttagtactttatagtattgttatacagtwtaacatcttacactagattttagaattgaagttcaaggagtaaaatacagaattaaaattcagtacaagtgaggaaaaggaaatttctatgggacaagatgtaatgaaat

SEQ ID NO: 29886 - DNA, 600 bp, Chicken  19866894249215_1
caaactgaataatccaattacttactgagctagttttacatttacctttctggagtcaacttaagatgaaccacatgagatttctttcataaactagtagcagtaatattagtttaagtgaatatagtatagacaatataatgagaatatataaatattgaatagcaatacactatttttgccatagctaaacaaaactattagtaattccctattttttgtactactaattacatgctgatactagtttttcaactaaacagagccagttctgtattgttttcttttttttaagagcayaaattcacattattatcacaaattacaaagaacagtctcctaacgcagaacaaattctgaatttcttttatgtacccrttaagtaacatcagagtgagcatttcactttgaatgttttctgtaatgctgacaacataggtgaactatgttgagaaagccattgaggtctgaaaaatatcaaatccaaggtctaaaataacaccttaagtttatatttatttcctctagatagtcattgaatccatgctgaataaatttttacttttttttaatgtcagactttctctgaaagtcagtaca

SEQ ID NO: 29887 - DNA, 600 bp, Chicken  19866894249215_2
gatttctttcataaactagtagcagtaatattagtttaagtgaatatagtatagacaatataatgagaatatataaatattgaatagcaatacactatttttgccatagctaaacaaaactattagtaattccctattttttgtactactaattacatgctgatactagtttttcaactaaacagagccagttctgtattgttttcttttttttaagagcayaaattcacattattatcacaaattacaaagaacagtctcctaacgcagaacaaattctgaatttcttttatgtacccrttaagtaacatcagagtgagcatttcactttgaatgttttctgtaatgctgacaacataggtgaactatgttgagaaagccattgaggtctgaaaaatatcaaatccaaggtctaaaataacaccttaagtttatatttatttcctctagatagtcattgaatccatgctgaataaatttttacttttttttaatgtcagactttctctgaaagtcagtacacatctcactgatttgctgcatcacagaccatttacaacaaaatgccatcggtctgtgacaaagaagatgagaaatgga

SEQ ID NO: 29888 - DNA, 600 bp, Chicken  19866894249218_1
agatgtttgtatgtctagtaactgagatccggtccttctactatcactcataatgctactcaatctgaataacagagtggaaggaatgggctgtctagtatgagtgataataacagtatatgaagtgaggcacaaaggctgccttttctatacttaagttgcacatgtccataactctaccaaagaaagatgagaggaatgtgctctctcacaaaatatcagagattgaaaaaaaatcagaagagaagcttccaaggattggaaagctcgggctctgtagtattgatttccttgtgaacstgaacaatctgacattgtgtgactgtaccggtgggtgaatgacccaaacatctggtgtttcagaagtggaaatatatgggtttccatagttcaatctaatcccctgtctctttaggaattcytaaaacaaatcaggtgtgaatttgagcagagtaacttcataagtattataaatcttactatcagtaagttatacaactaaagatgaaaatgaaagcaaccaaataaaatagctgcatacaaattaaactaagccccttagcggatttagattatcacctcagaagcaactgaagtatt

SEQ ID NO: 29889 - DNA, 600 bp, Chicken  19866894249218_2
aagtgaggcacaaaggctgccttttctatacttaagttgcacatgtccataactctaccaaagaaagatgagaggaatgtgctctctcacaaaatatcagagattgaaaaaaaatcagaagagaagcttccaaggattggaaagctcgggctctgtagtattgatttccttgtgaacstgaacaatctgacattgtgtgactgtaccggtgggtgaatgacccaaacatctggtgtttcagaagtggaaatatatgggtttccatagttcaatctaatcccctgtctctttaggaattcytaaaacaaatcaggtgtgaatttgagcagagtaacttcataagtattataaatcttactatcagtaagttatacaactaaagatgaaaatgaaagcaaccaaataaaatagctgcatacaaattaaactaagccccttagcggatttagattatcacctcagaagcaactgaagtattgaaattaaatctcaagaatttgaaacttgttactgttatacctaccaggactaaatttcttctatttacagggtaaaagagtaaaagggtaaaagggtatctcattggaatatatgaagttt

SEQ ID NO: 29890 - DNA, 600 bp, Chicken  19866894249227_1
ccaagtactcagttcccatagtcatctcctcattccaggggcagcagttcctctgatacccacaaattacttaaaggggattttgcatttagccctacaatagggccgcactgtaacagctgcacatcttaagcccaagttcaagaagcactggtaccccaagtgtgttgctgtataagccttcggaaagccaaggatttttcttgtcccagctcttctcagggccctgccttgcaccacgggcctcaggaaactttccaaagctccagattagctgggcactgtgccacatgagccccrccatcctactgttccagcaccaagtgctctccctgtgggactgcacaacgagcagccagtacacagcagcgccagttcacgggtctgcccacagctctctacacaaatggagatatccccttccaaaaaggctttgtatttgttggttttccaaagcctgcggacagtgggcatcctgaggagcagcacagcgttcctgtggggaagcatcagaggctggcagtgcagacacactgccccagaacagccacatgttgctacagcagagaaaggcctttcagcagagcaccgcaaaaacag

SEQ ID NO: 29891 - DNA, 567 bp, Chicken  19866894249234_1
ctggacatctgaagctatttactctgcaaagtgctgaacacaaatacagagtgtattgcaccataagtactgctactacagtgatttaggggattgaaacatgactaataatgtgaagtgcgaagtttccaccccaccaacattcctatcagaactgctgtcagagtaagtcttacctagatgttatatagcattaagcaggaggctacaggtatatatccctatatttccttcttgctttcgagaaattatactatctaggtgggaataaaactgaaagataatgctgacagatttgcstttcctatgcttacctcggaatatgggaaatgcattaatcctgacactttaatcaaagcttgcatgtgtttattaaatttatttcttctctgacttcctctggatacaatatctctaaaaagagttaccagaaaggtaaataatatatcttctcattaaattcaaggtatgaccctatggaatgaatgtttggctgcaaattacctatttatttttcttcatggtctgtctagcaaagttaattactgaaataataaataaataaat

SEQ ID NO: 29892 - DNA, 600 bp, Chicken  19866894249236_1
cttcactcaccctctccagtacttttccagcttccacatacattacaaagtttcattataatagtcactggcttgtttgattttgttgattatggattaaaaccatttgaaatcattataatccatatggttatgctcttctagctgcagctggctgatagttattacagcctgtttgtaaatagtttcctggaagtacagaaggtttacatgcaaactgaataaatgttccccctgaaagcggaagtttgatgtaactttgtaaataaaacagtaagtccgtgagttcaaaccatcagmagaaacttataacaaatattaaaaataccttmtttcrtaaagcagtaacacacagcagaacctgggtgccggtgtctgttctgggatctgaagcaggctttatgaaatgccagctyttccaggcttctataacattacctttttattgtaggagtccttcttaaattcctaatctgtatttcacttactccatcccagccyatcactgtcatatctactttttttctgagttaataagagagctagggcctgagaaggacaatacatgcttgccaacctccttttagcatctcccctttt

SEQ ID NO: 29893 - DNA, 600 bp, Chicken  19866894249236_2
tccacatacattacaaagtttcattataatagtcactggcttgtttgattttgttgattatggattaaaaccatttgaaatcattataatccatatggttatgctcttctagctgcagctggctgatagttattacagcctgtttgtaaatagtttcctggaagtacagaaggtttacatgcaaactgaataaatgttccccctgaaagcggaagtttgatgtaactttgtaaataaaacagtaagtccgtgagttcaaaccatcagmagaaacttataacaaatattaaaaataccttmtttcrtaaagcagtaacacacagcagaacctgggtgccggtgtctgttctgggatctgaagcaggctttatgaaatgccagctyttccaggcttctataacattacctttttattgtaggagtccttcttaaattcctaatctgtatttcacttactccatcccagccyatcactgtcatatctactttttttctgagttaataagagagctagggcctgagaaggacaatacatgcttgccaacctccttttagcatctcccctttttccagcttatctgatgcaccattaaatatata

SEQ ID NO: 29894 - DNA, 600 bp, Chicken  19866894249236_3
atacattacaaagtttcattataatagtcactggcttgtttgattttgttgattatggattaaaaccatttgaaatcattataatccatatggttatgctcttctagctgcagctggctgatagttattacagcctgtttgtaaatagtttcctggaagtacagaaggtttacatgcaaactgaataaatgttccccctgaaagcggaagtttgatgtaactttgtaaataaaacagtaagtccgtgagttcaaaccatcagmagaaacttataacaaatattaaaaataccttmtttcrtaaagcagtaacacacagcagaacctgggtgccggtgtctgttctgggatctgaagcaggctttatgaaatgccagctyttccaggcttctataacattacctttttattgtaggagtccttcttaaattcctaatctgtatttcacttactccatcccagccyatcactgtcatatctactttttttctgagttaataagagagctagggcctgagaaggacaatacatgcttgccaacctccttttagcatctcccctttttccagcttatctgatgcaccattaaatatatatatcc

SEQ ID NO: 29895 - DNA, 600 bp, Chicken  19866894249236_4
tataatccatatggttatgctcttctagctgcagctggctgatagttattacagcctgtttgtaaatagtttcctggaagtacagaaggtttacatgcaaactgaataaatgttccccctgaaagcggaagtttgatgtaactttgtaaataaaacagtaagtccgtgagttcaaaccatcagmagaaacttataacaaatattaaaaataccttmtttcrtaaagcagtaacacacagcagaacctgggtgccggtgtctgttctgggatctgaagcaggctttatgaaatgccagctyttccaggcttctataacattacctttttattgtaggagtccttcttaaattcctaatctgtatttcacttactccatcccagccyatcactgtcatatctactttttttctgagttaataagagagctagggcctgagaaggacaatacatgcttgccaacctccttttagcatctcccctttttccagcttatctgatgcaccattaaatatatatatcctcaaagaagccatgacatgagacagccttggttgcctggatgaacggaccatcattttacatgtgagctctgtaagttc

SEQ ID NO: 29896 - DNA, 600 bp, Chicken  19866894249236_5
aaggtttacatgcaaactgaataaatgttccccctgaaagcggaagtttgatgtaactttgtaaataaaacagtaagtccgtgagttcaaaccatcagmagaaacttataacaaatattaaaaataccttmtttcrtaaagcagtaacacacagcagaacctgggtgccggtgtctgttctgggatctgaagcaggctttatgaaatgccagctyttccaggcttctataacattacctttttattgtaggagtccttcttaaattcctaatctgtatttcacttactccatcccagccyatcactgtcatatctactttttttctgagttaataagagagctagggcctgagaaggacaatacatgcttgccaacctccttttagcatctcccctttttccagcttatctgatgcaccattaaatatatatatcctcaaagaagccatgacatgagacagccttggttgcctggatgaacggaccatcattttacatgtgagctctgtaagttcacaagatctttgagcaaaatttcaaacactcttaaattgaattcatttttgctttcaaaaaggaaggtgaaggcttgtcaatcaa

SEQ ID NO: 29897 - DNA, 599 bp, Chicken  19866894249240_1
  misc_feature (1)..(224): n is any nucleotide
nnnnnnnnnnnnnnnnnnnnnnnnnnnnnnnnnnnnnnnnnnnnnnnnnnnnnnnnnnnnnnnnnnnnnnnnnnnnnnnnnnnnnnnnnnnnnnnnnnnnnnnnnnnnnnnnnnnnnnnnnnnnnnnnnnnnnnnnnnnnnnnnnnnnnnnnnnnnnnnnnnnnnnnnnnnnnnnnnnnnnnnnnnnnnnnnnnnnnnnnnnnnnnnnnnnnnnnnnnnnnnnntgcacagatgcttgccagtgaaggatttgtaccttcccattaggtgcatacatggtacgaggaggtgtacatgtarggtttatgtggcttttgcttggtagggtagaggttgctgtggccacattaactcagtttcctgttcatgtgcataggcagtttctacatctgctgctgagagctgtctggcttcagggtgaggcacagcagctgctgaagagcctgaagtatcagcatgcagttcatggcaggaagtgatattcatggcaggcagccatattgatgtgatgtggtgggggatggagaatacaatctactaatctgtagggttgtaaatggccatgttgtggggcacaagagactaaatagtgaggatta

SEQ ID NO: 29898 - DNA, 600 bp, Chicken  19866894249240_2
actaaatagtgaggattaggaagattaccttcctctttacagagctgcctgctaatttttttgtggaaggctctttctgtgaagtaggcaatcaattccccagtaactagatgatggtttttcctgacactgtccacaagtagtgtgacacccattgagcttcgttttgggaaggggaattggccagcagggacctagagctcctcagagcatcaaagagaagagttgagatcattgtatttggggcagtagttgaagtgattgaaacctaccctgtttatgtcttgtcttcctcatagrctcctctaaaggtaaactgttctctgaaactgtgcgtttaccccctttctgagggctcttatcagatgggataatctggcctgcaagtgttctgtcagtcgtctgctccttcagtgctctgggttactacaaatccttgcagcacagctagctttgcgtgacttcctttgcatgggtactgcagctccctgtagcaggtgtgtgtgaaagctactcagtgcctgagcattgcttatgcatcctgtcaggctcactcaagacccacagccactttgcaggggtgaggatgaggacttgacc

SEQ ID NO: 29899 - DNA, 599 bp, Chicken  19866894249247_1
  misc_feature (1)..(10): n is any nucleotide
nnnnnnnnnntgtaaaaaaaaaaaaaaaaaaaaaaaccttttaagatagaacatggaagaaatatggacagggtttatttaacttgaactttgtaattctgatatctgtaccagtctagatggagtaatatcaaactcaagaagtctgaattatcaatgagttgttggggcttttttgcttgtttatttgttttccagtaaggcttggcaccagactccagtgaaatgaacagattccaggtgaacatgatgagaacacaatctaacaaacagccatgctttggctgcctgctctgatarcagcagctgcttggaaaactaagctgcttcacaattgaaagaggtatgcaggggacagaagttacctgtaggtgggatttggcttctaccatgttaccgctgttccccacagcagcaacagcaaagacacctcttggttctcttctctcaaagacccctttacctcttcccctattctttctctcaactcttcttctatgattttaaagcttcccctgttcctgaggttctgatttaattcatttaatgtgtttagcaatgaactaacctaggactggtcttgagctgcatgcaaacat

SEQ ID NO: 29900 - DNA, 600 bp, Chicken  19866894249250_1
cagtaggaatattaaagcatacagaattaaggagattgttgtcctaagaaaatatcctaatcttctgagactgtcttaaggctgtataaatgaatcattcacatgtttgctacaggcacctggatgtgcacatggatataggcacctggatgtgcacacggacacatacatgtttctgtgaagaaatacagttatgtgaaactttctcaagaaaccatctaacaaagcacataaagctatcatcatttatcctggtggatatgggttgtactcagtatttttaatcacatggtggggtcrttttctaaggagaagatggtgaatgaagtagtatttattacaaacaacaagatgtgggattttgacaaaatgttctcaggcttctggagaataagttcaggagccctttgtaaatccaaatgcatgatagatgaatttcaaaatatgtcacctcttgttttcacgggtcaactcaacccacgtcaatggcattttgcactttgatttaatcttatcctaggttctaagggctgtgtttggatcatttgttcaaattatatagaagacataactggtcagcagaacagacatcatactgga

SEQ ID NO: 29901 - DNA, 600 bp, Chicken  19866894249250_2
atgcatgatagatgaatttcaaaatatgtcacctcttgttttcacgggtcaactcaacccacgtcaatggcattttgcactttgatttaatcttatcctaggttctaagggctgtgtttggatcatttgttcaaattatatagaagacataactggtcagcagaacagacatcatactggagcaataacgcatgctgagtctaaactcagagagaaggtacttgcaactcgtatgtacgcatcttggtgagccaggtccagtgagtcaataaatcaagtggttgttgcagtagtacaagrggtctttatacatccaccacattgctcccattgctgccaaacaagtgacttatgacccccctacttttcgcaactgaactccacacctcaggatctcagaaggcagaagctaaaactaccagtaagattaatttcagagttttatgacttagtgagaaaaatgcagaggaggatggcttagaaattatgtcctggacacagaaatatggtatttatagcacagtggtgcttaaaagaacgtacacttttcccaaattgctgtcagtttatagcatataaagtgaatgaatattggtgaaa

SEQ ID NO: 29902 - DNA, 600 bp, Chicken  19866894249255_1
gtgaagtatttcctatttcaatatttctttgttgaaaattatgtctggcatgcatacaatctatacaagggttggaaataagagagaaggaaggaaattataaaataaccaatacttgaaaaatctgcacaagtctggatttttttataccacacatagaaaatgtgaggtgtatgtttcttcactttactgcagtattagtacctctgactacaataaccacagaaacctcagaaaataaatggcaagtctcaagtttcaatgaataaactttggggaaaaaaaagtgcacacacacaraaaaaaaytgggaagatacaactcagtatgtgtgtgcgtrtatgcgtgttgcaaaaatactttgatcttaatgtagaattgttttactttactaaactatgtgccccttagcaaactggtatgtaagtaaaactttaattgaaagacaatcttggtgaaaactgatatttcccttacagagtgcctcccctgagacactaggtttatttgagagttttaaattccacatgtggaatattttactttgacctgcaagagcagtttgttaagaataatttcccgctattactgtactttgca

SEQ ID NO: 29903 - DNA, 600 bp, Chicken  19866894249255_2
tttcctatttcaatatttctttgttgaaaattatgtctggcatgcatacaatctatacaagggttggaaataagagagaaggaaggaaattataaaataaccaatacttgaaaaatctgcacaagtctggatttttttataccacacatagaaaatgtgaggtgtatgtttcttcactttactgcagtattagtacctctgactacaataaccacagaaacctcagaaaataaatggcaagtctcaagtttcaatgaataaactttggggaaaaaaaagtgcacacacacacaaaaaaaytgggaagatacaactcagtatgtgtgtgcgtrtatgcgtgttgcaaaaatactttgatcttaatgtagaattgttttactttactaaactatgtgccccttagcaaactggtatgtaagtaaaactttaattgaaagacaatcttggtgaaaactgatatttcccttacagagtgcctcccctgagacactaggtttatttgagagttttaaattccacatgtggaatattttactttgacctgcaagagcagtttgttaagaataatttcccgctattactgtactttgcataaaacag

SEQ ID NO: 29904 - DNA, 600 bp, Chicken  19866894249255_3
atgtctggcatgcatacaatctatacaagggttggaaataagagagaaggaaggaaattataaaataaccaatacttgaaaaatctgcacaagtctggatttttttataccacacatagaaaatgtgaggtgtatgtttcttcactttactgcagtattagtacctctgactacaataaccacagaaacctcagaaaataaatggcaagtctcaagtttcaatgaataaactttggggaaaaaaaagtgcacacacacacaaaaaaaytgggaagatacaactcagtatgtgtgtgcgtrtatgcgtgttgcaaaaatactttgatcttaatgtagaattgttttactttactaaactatgtgccccttagcaaactggtatgtaagtaaaactttaattgaaagacaatcttggtgaaaactgatatttcccttacagagtgcctcccctgagacactaggtttatttgagagttttaaattccacatgtggaatattttactttgacctgcaagagcagtttgttaagaataatttcccgctattactgtactttgcataaaacagttactgctgtcaagtttttacctttgcacaac

SEQ ID NO: 29905 - DNA, 600 bp, Chicken  19866894249255_4
cctgagacactaggtttatttgagagttttaaattccacatgtggaatattttactttgacctgcaagagcagtttgttaagaataatttcccgctattactgtactttgcataaaacagttactgctgtcaagtttttacctttgcacaactgatttcagaatttgtgtcttaataaactaacagtacaataaaccattattgctactactgctatactagtgactgtggcctttgacttcattcaaatataatttatgttaggaataaagatttttgagtctttaggaattgatgaawtttttttctggatttttttttcctgttgtttaaacataatttttggagagatgtaaatgtacacatcattttacaaaggcggtataagatacactcattaccctgaaatgttcatagtctaaaatagaaaaacgataaatgaagaccaggctcaggaaagcaatttatacagagtggtgtgagaaagaagaaagaaggggagacaaaaggaaaattggaaaaatatctccttgttgaaggtgagatctcatggaagctgtagactgcttcagtgcattatctgaccagtgacacatactc

SEQ ID NO: 29906 - DNA, 540 bp, Chicken  19866894249255_5
agcaggagtagaaggagacagaaaggctacaaaataaaaagtttgggaagtacaaaggcagtgagtgagagtggcagactttagggctatggacagggtcatttgaggctgacttgcatctgtgaaaacatcagatagtgttccctaaatattaactagatatatgtcgaagcatcttttcagctttgtgaatgatattccaagctaaggtgaaagcattccttagaatgccagcactacttctttcactactggacaatttacttcaaccagtgtaaattaacttttccagaagacatraagagcgatcattctaagcatgagtgcatgtcttcttcctatttttgctggctttacctttaaaaccaattgtgaaacttctctctagtgagtctgaaggcagaaaatcagggtgtaacctttactccttttgcctaaagacataatctagcacctcttccccattcttcttgttacttagtagggaataataacaagccccttatgatgcaacatgtcaggagcgcttattttctcagt

SEQ ID NO: 29907 - DNA, 600 bp, Chicken  19866894249257_1
gaagagatagacaatgattttcagcaatacagtagtattctattttctaatgatttatgatccttaggaactatagctgttcttttcatgaccgcaatggatggctgcaaaatgctaccaaatgccttctttgaattgatacaggctggtgatttcagatgacagaaccaattctattgaaggaggattgaaattataactgtaaaaaacaaacaccttacctgtactatgacaaattaatttaactgtgatatactgcagtgtcttctgagcctccttaatgcccacttatgcttgcaygatgagagaaattctgctttatttaagccctaatgttttcaagtctggggtcaagttgaaagtgttacctgttcctttactgatagaagagaccgtattctctaccccaaggacagtaaggcaattctaatttaagatccaaaatactgtgcttcttgaaagtgtaatgtgaagatcagggaaaagcaatttagaaagtattacattgctccagcaatttttttgaattctggccactttatttttcatgttcaggatattaccacggcatataaaaatgtaacattatcttaccatgat

SEQ ID NO: 29908 - DNA, 600 bp, Chicken  19866894249270_1
tcaagaggactgtttcattacaattttaaattttatatgcaaaatgcctgtcttaggcttcatttacattagcatatttgttcagagcagttgtgcagtcttgaaataactctttcagttatccctgcttacttcacattgactgagttcacagagcattttcagtgtttacaaaccagatcccttctggaggttgtgtgataggtgcacaccaaatgtgcctgagccctctaaggggatacaggacatttgatcctttagttagctcagaaacatgtagggatgttcaatcaagagcayagcactaaatctaggctgaagtaaaggtccaaaaagtacatacagaacagaaattagatttcatactatttgctttaattttttgtgttctattaagtcaattattttctagtagagtcatattcttatgccaactgaactcactcagactttccttcccccttctactgttttggtacttctgttttaattctattgctccaaactactgtgtgcacttcccttgactttacttttcctgtaatagctctcttttatatttttcctacccagaatctttccatcttagtaattcaatcc

SEQ ID NO: 29909 - DNA, 600 bp, Chicken  19866894249272_1
tcgtgctggccatgtggcaatgaatgcccataagctgcagctgctgttgggaatgctgctgatgccctttggctgcagcatcctgggggcaaaatctctgcagagcaaaaagggaaaagagggtgggagctcccaagctgctcccgagcatccctgaatggaggggtgcaaaggttcttgataccaacaggagccacgctaccaacgtgactttgggctgggtgtgcacattgcgtattcctttctattttcttttaaaagaaccctgattgaatgctacctccagagctaacagacttytgggggctgatcggcggagctgggattacaaccaacagcccccaggtggacgtgccctgctctcccatcctgcctgctgatttccctcacgaggtgtgaaactacttgcaaaagcaaaaatatttgttttcccacttgaggaagccacgacagcttgtgacccggggctcccaccatctgccacacacgttgcccacttggtgacaccttcatgtgttcagcagcttcgagaaaaccccgacgggaagctctgcagccagcaggatatgctgctgatttctccttccttcttccacaaat

SEQ ID NO: 29910 - DNA, 600 bp, Chicken  19866894249276_1
ggctcacggggtgccaacctgctcgtccttgtgccaatcagctgcactgtgggcttccagctgtcctccttatctcttccccactgaggttcccagccagaaggggccaaggtgatggagcagcagcacttactaagtggctgctggggcagtgtgggaaggattggatgaagctgtgtgaaaaggggtggggaagggaggaccagtcgagcctctgtgcctaccaaggtgctccatttgatacacttaagaaaagcatataaaaggagaaatagaaaagacccacaagtgccttgtgawaagcatccagacacagggcaggaggactgtycctgccttaaccctcccagccaagcagcaccgtattccaggagagggactcagtcctgtgtgaaataccaccctgcatcagcgacagtttagcagcccagtgttaaagttcttcctgcacaaagtacttagagatcttgtcttccctaggctccctaaatgctttataaacatttataaacaggcagagtgaaaaatcaatgcagagatactgtggggagggagagagagcagggaatgagaagaaaaactcaatgaaacatgaaatag

SEQ ID NO: 29911 - DNA, 600 bp, Chicken  19866894249276_2
tgccaatcagctgcactgtgggcttccagctgtcctccttatctcttccccactgaggttcccagccagaaggggccaaggtgatggagcagcagcacttactaagtggctgctggggcagtgtgggaaggattggatgaagctgtgtgaaaaggggtggggaagggaggaccagtcgagcctctgtgcctaccaaggtgctccatttgatacacttaagaaaagcatataaaaggagaaatagaaaagacccacaagtgccttgtgawaagcatccagacacagggcaggaggactgtycctgccttaaccctcccagccaagcagcaccgtattccaggagagggactcagtcctgtgtgaaataccaccctgcatcagcgacagtttagcagcccagtgttaaagttcttcctgcacaaagtacttagagatcttgtcttccctaggctccctaaatgctttataaacatttataaacaggcagagtgaaaaatcaatgcagagatactgtggggagggagagagagcagggaatgagaagaaaaactcaatgaaacatgaaatagtgcccaaacatcagctaccatcagctccagg

SEQ ID NO: 29912 - DNA, 600 bp, Chicken  19866894249279_1
ttcctactttcacatctgcatatacagatatcaggtgtttcaagaaacctcatacctcagaggacactaaaactgtagaaaatctatattttgcaggaaggaagaggaaatctggtagcaacaggcctgggaataaaataacatctaacaacatcaagtacctcttactcagctggtgaagagttcctgacattatatcaaaacacgcagagtatgtcaaataagtgctgaataaattgacatattcagccatcagttttcctatggaaattgccatagatacgaatgaagttagatgcraaaaagagaaaagattctcctctcattagccatawaaaatgataactagggacgggtttctgaaaaactttctttcaactcctgatttctgaaaagaaaaaaaaaatgcctgttgtggcatctgggaatattagagagttagccaaggcacagagggacgatagagaacataggtagttcttaagatttttctgtgcatgcacacaagcagcatgtgcggaatactcagaagaaccatgtcaagcccactgtgtacacactatctggacaaaaatctcagacagaaacattggattcact

SEQ ID NO: 29913 - DNA, 600 bp, Chicken  19866894249279_2
tgtttcaagaaacctcatacctcagaggacactaaaactgtagaaaatctatattttgcaggaaggaagaggaaatctggtagcaacaggcctgggaataaaataacatctaacaacatcaagtacctcttactcagctggtgaagagttcctgacattatatcaaaacacgcagagtatgtcaaataagtgctgaataaattgacatattcagccatcagttttcctatggaaattgccatagatacgaatgaagttagatgcraaaaagagaaaagattctcctctcattagccatawaaaatgataactagggacgggtttctgaaaaactttctttcaactcctgatttctgaaaagaaaaaaaaaatgcctgttgtggcatctgggaatattagagagttagccaaggcacagagggacgatagagaacataggtagttcttaagatttttctgtgcatgcacacaagcagcatgtgcggaatactcagaagaaccatgtcaagcccactgtgtacacactatctggacaaaaatctcagacagaaacattggattcactgaaaaaagtcaatttgcctagatattatccacaga

SEQ ID NO: 29914 - DNA, 600 bp, Chicken  19866894249280_1
ctcccagaacccatcccagcagggatgagggatgcaggaaacagctttccttaacccaaacgacacaaagcaccgagaggggatggtcgtggaagaaacacgtccaccttctcatttgagagcagcaaacaggcacagaaagcaccgcattccagcactgcctccaccctacaggtgaggaatgcagtgggacttgtcaccagctcttcatgatcttgttatgcctgtctagcgatgtaaaatatactgacaggagtcctgttaacacagtgaatccaaatcagctcctctgccaatacrcccgtaaggagcataggaacaagggagaagcagggcagcaaggaaagatttgacatcgcactcccaaatcagctgtcacatagaaagggatcgccggaggtacagaaatgtggtgggagagaaaacgggagcaagagggatgttaaggcagaaaaaagtgagtagaaattgcacttgtctttaggactgagcctgcacaggacacatctatgtcagaaatcccagtgactcagaagaatcatttccttcaccacaccatcctgcagcgtggtgcaccgaagccacagcactgctcgctcc

SEQ ID NO: 29915 - DNA, 600 bp, Chicken  19866894249280_2
gcagcaaggaaagatttgacatcgcactcccaaatcagctgtcacatagaaagggatcgccggaggtacagaaatgtggtgggagagaaaacgggagcaagagggatgttaaggcagaaaaaagtgagtagaaattgcacttgtctttaggactgagcctgcacaggacacatctatgtcagaaatcccagtgactcagaagaatcatttccttcaccacaccatcctgcagcgtggtgcaccgaagccacagcactgctcgctccttctctgagcagcagctgaaatccacaggtctcytctccatcccagcttgtaattctgcctgcaatagcaacacgtgacagagggaaaagcgcagcatttccccagtgttgtaaataaggctgagattactgacggctagaataggactgactattgcaatatttaatttgctgggtgggcaattcattaaaacagatatctagggctttaatcactctgccaggctgccatctgcttccctcactctccctcctggcttaggccgggtctcgatataggaggggacagcttgtgagaggctctttggggcctgtgtcataattcatcttgtgc

SEQ ID NO: 29916 - DNA, 599 bp, Chicken  19866894249291_1
  misc_feature (1)..(27): n is any nucleotide
nnnnnnnnnnnnnnnnnnnnnnnnnnntgctaaatggaagcagatccatgcaagtgcttgccttgcaagtcacatctgctctttgaaagtctatttcccttctttccattcccccaggaagtttgctagagcattattagattttctttttcctttttctctctctctcttttttttttcttcatctctttagatgcaatagcttccctccagctaaatctcttttctgcttcttatccaggcagcttctgctaatgcccagatggactaagggaaaccagagcccccactgggcggtgrtgggccaggggaagctggagagtctgcatggcaggggaaaaggggttgggattgatagccatggtgcccaggctccctttgcaacccctaagtggagttggaaacaaacaaacaagcaaaatcacaacaaatcaaactgaataaccacgagcaacaacaggaattgtcaagtggrggactgctggaaagggaagggaccccagtgcagcaatgacctgctccttaggagtggaggtaaagccacgtgtatctcttctcagagcwctgtgagcctccttggatggcaaggttcaaagcat

SEQ ID NO: 29917 - DNA, 600 bp, Chicken  19866894249291_2
ttttcttcatctctttagatgcaatagcttccctccagctaaatctcttttctgcttcttatccaggcagcttctgctaatgcccagatggactaagggaaaccagagcccccactgggcggtgrtgggccaggggaagctggagagtctgcatggcaggggaaaaggggttgggattgatagccatggtgcccaggctccctttgcaacccctaagtggagttggaaacaaacaaacaagcaaaatcacaacaaatcaaactgaataaccacgagcaacaacaggaattgtcaagtggrggactgctggaaagggaagggaccccagtgcagcaatgacctgctccttaggagtggaggtaaagccacgtgtatctcttctcagagcwctgtgagcctccttggatggcaaggttcaaagcatcacagaaactgagcccyaytgcacagagacaagagatttcatcccttttgtgtgaagtttgtgtactgtttgtgtgctgtaagtgcccacatgtgcactgagagtaccttggctgctccaccaaaggagcatgcaccactttaaagtagcaattatggggcccaagcagagcaaac

SEQ ID NO: 29918 - DNA, 600 bp, Chicken  19866894249291_3
ggactaagggaaaccagagcccccactgggcggtgrtgggccaggggaagctggagagtctgcatggcaggggaaaaggggttgggattgatagccatggtgcccaggctccctttgcaacccctaagtggagttggaaacaaacaaacaagcaaaatcacaacaaatcaaactgaataaccacgagcaacaacaggaattgtcaagtggrggactgctggaaagggaagggaccccagtgcagcaatgacctgctccttaggagtggaggtaaagccacgtgtatctcttctcagagcwctgtgagcctccttggatggcaaggttcaaagcatcacagaaactgagcccyaytgcacagagacaagagatttcatcccttttgtgtgaagtttgtgtactgtttgtgtgctgtaagtgcccacatgtgcactgagagtaccttggctgctccaccaaaggagcatgcaccactttaaagtagcaattatggggcccaagcagagcaaacacagtggttgcgacatcaccttgtgcctagtgtgccagaagagctatgtccaagggcagtggtagaggatcagcctttttatggtcacc

SEQ ID NO: 29919 - DNA, 600 bp, Chicken  19866894249291_4
ggagagtctgcatggcaggggaaaaggggttgggattgatagccatggtgcccaggctccctttgcaacccctaagtggagttggaaacaaacaaacaagcaaaatcacaacaaatcaaactgaataaccacgagcaacaacaggaattgtcaagtggrggactgctggaaagggaagggaccccagtgcagcaatgacctgctccttaggagtggaggtaaagccacgtgtatctcttctcagagcwctgtgagcctccttggatggcaaggttcaaagcatcacagaaactgagcccyaytgcacagagacaagagatttcatcccttttgtgtgaagtttgtgtactgtttgtgtgctgtaagtgcccacatgtgcactgagagtaccttggctgctccaccaaaggagcatgcaccactttaaagtagcaattatggggcccaagcagagcaaacacagtggttgcgacatcaccttgtgcctagtgtgccagaagagctatgtccaagggcagtggtagaggatcagcctttttatggtcaccaaaatatgcaatagtttgcaaatgtgcatgcatttctttcctgggcagggtg

SEQ ID NO: 29920 - DNA, 600 bp, Chicken  19866894249291_5
agagtctgcatggcaggggaaaaggggttgggattgatagccatggtgcccaggctccctttgcaacccctaagtggagttggaaacaaacaaacaagcaaaatcacaacaaatcaaactgaataaccacgagcaacaacaggaattgtcaagtggrggactgctggaaagggaagggaccccagtgcagcaatgacctgctccttaggagtggaggtaaagccacgtgtatctcttctcagagcwctgtgagcctccttggatggcaaggttcaaagcatcacagaaactgagcccyaytgcacagagacaagagatttcatcccttttgtgtgaagtttgtgtactgtttgtgtgctgtaagtgcccacatgtgcactgagagtaccttggctgctccaccaaaggagcatgcaccactttaaagtagcaattatggggcccaagcagagcaaacacagtggttgcgacatcaccttgtgcctagtgtgccagaagagctatgtccaagggcagtggtagaggatcagcctttttatggtcaccaaaatatgcaatagtttgcaaatgtgcatgcatttctttcctgggcagggtgtg

SEQ ID NO: 29921 - DNA, 599 bp, Chicken  19866894249292_1
  misc_feature (1)..(19): n is any nucleotide
nnnnnnnnnnnnnnnnnnnaaggtgcttgtacactattgtagtcatctcttaatctaaattttcatatgctaagctgatggagccctttaattgcggcagtctctgaagtccttgagtatgtctgtggctcttttcgctaccctaatttcttaaaattctaagatgaatgacagaacagtttgtagtatgccactattagcctcattcctcctgtgtataaaggaacaaatatctctttttggtgcagtattttactgaatgaatataacaagatgtttgcctgctaaacccttgatttyagtcactggtttacgaggttcagcactatattttaagcttggcatgccttccatatcctgagatgtgcagtttcacagttgggtatgttcagacacttagtttcagtgactgctcagtggcataggccgtgtgttatacttttgcagtgttcatacaattttggtgacatggactatgtaagagttaagattaatgttatatacattatatcttgtttgaaattgtttgtcaaattaaatgatattttctgaggaagagaaaggctggaaatagggccagcagacaggctgacagacag

SEQ ID NO: 29922 - DNA, 600 bp, Chicken  19866894249295_1
gtttcttctttaaacatcctttggccttcaggtgttgtggttctctcaacatgggttgaccctacagaagtaatagtggtatttgtctgagcaggtccaccatgctgatgcccagattgggttcttgacatgcctttgtagaggcgaggcttgaaagtgctcatttgtctgttttagcttcagtttttcacttgcttaaactatgtaggaaacgcctgctgtaatctcagaggatgataacttgattacctccctgtgcactgactgaactacctgtactttttctttctcaaaaaaaawaaaaagcttaaaatttttaaaagaattttctacacagtaatcaacagtggtgaagacatgcaagtagttagtgaataggacttcgaatttaatctgcattgagttctcagctggaaaaggaccccctcaacattgtgtgcacatgaagctgatactactttgcctgggggtgtgcagtgacctcctgggaagaggagaacggtgctaaatattcatttaaaatgtgagttcccaaagaaaattagcttatgatggaaaatggtcccatttataaacttctgcaaggttatctttctgtaa

SEQ ID NO: 29923 - DNA, 600 bp, Chicken  19866894249295_10
aatagccatgttgttggagggtctctgcaaagaagggatgatgttttcctgttacgcattaaagctaccctatttaactgaattcttggtgaaattatctwggagatggaggaataaacakgcttgatagaagagattatctactaaatgaggtaggactttcccacartgtataatttcatagataagcaagtatcaaactagagaatgcactttgtcttcagccaagacgcttwgtctgtgcaatgcatgttcaacacacctccatgagtctgccagttgagcctgtaggagtatccyctctgcctatctcaggtaataagtgtcttctagatggcccagctgctctctgtctgctgccagaagacaataactcagtaactgagatctcagctgaaaggcttgctgtagttacgcttcattgcagagataaggtggcaccgaaactgttgatggcagaatgagggaaaacaaattatcatgtctgaaataaaatgaattttaattaatgtctctaatctgtctagcgaatgttttaaatgccatttctatcttcattggtgctctaaatggtgacaaactcatcagaggtaaacaaat

SEQ ID NO: 29924 - DNA, 600 bp, Chicken  19866894249295_2
ttgtgtgcacatgaagctgatactactttgcctgggggtgtgcagtgacctcctgggaagaggagaacggtgctaaatattcatttaaaatgtgagttcccaaagaaaattagcttatgatggaaaatggtcccatttataaacttctgcaaggttatctttctgtaaaggtcgttgggttaaccatagctagaaggaccatgttaggttgttttaatcactcagcagtgaatgtttaagttaggattcttatgggaaagtcctgaaaaaatatgtatttttttttttgtattccactartgcatgcaggattcagtggagataagagctccatgggccatctgtaccaatgtgcagcgaagggaagcttcgaacagtatgatagygtgcctgtatgggtgccagggtcagaatatacagctttgtttttctggaggacaaatccatctccrtgasgcttcttccaggctaaccctgtaataataaatagccatgttgttggagggtctctgcaaagaagggatgatgttttcctgttacgcattaaagctaccctatttaactgaattcttggtgaaattatctwggagatggaggaat

SEQ ID NO: 29925 - DNA, 600 bp, Chicken  19866894249295_3
aaaatgtgagttcccaaagaaaattagcttatgatggaaaatggtcccatttataaacttctgcaaggttatctttctgtaaaggtcgttgggttaaccatagctagaaggaccatgttaggttgttttaatcactcagcagtgaatgtttaagttaggattcttatgggaaagtcctgaaaaaatatgtatttttttttttgtattccactartgcatgcaggattcagtggagataagagctccatgggccatctgtaccaatgtgcagcgaagggaagcttcgaacagtatgatagygtgcctgtatgggtgccagggtcagaatatacagctttgtttttctggaggacaaatccatctccrtgasgcttcttccaggctaaccctgtaataataaatagccatgttgttggagggtctctgcaaagaagggatgatgttttcctgttacgcattaaagctaccctatttaactgaattcttggtgaaattatctwggagatggaggaataaacakgcttgatagaagagattatctactaaatgaggtaggactttcccacartgtataatttcatagataagcaagtatcaaac

SEQ ID NO: 29926 - DNA, 600 bp, Chicken  19866894249295_4
ggttatctttctgtaaaggtcgttgggttaaccatagctagaaggaccatgttaggttgttttaatcactcagcagtgaatgtttaagttaggattcttatgggaaagtcctgaaaaaatatgtatttttttttttgtattccactartgcatgcaggattcagtggagataagagctccatgggccatctgtaccaatgtgcagcgaagggaagcttcgaacagtatgatagygtgcctgtatgggtgccagggtcagaatatacagctttgtttttctggaggacaaatccatctccrtgasgcttcttccaggctaaccctgtaataataaatagccatgttgttggagggtctctgcaaagaagggatgatgttttcctgttacgcattaaagctaccctatttaactgaattcttggtgaaattatctwggagatggaggaataaacakgcttgatagaagagattatctactaaatgaggtaggactttcccacartgtataatttcatagataagcaagtatcaaactagagaatgcactttgtcttcagccaagacgcttwgtctgtgcaatgcatgttcaacacacctcca

SEQ ID NO: 29927 - DNA, 600 bp, Chicken  19866894249295_5
atctttctgtaaaggtcgttgggttaaccatagctagaaggaccatgttaggttgttttaatcactcagcagtgaatgtttaagttaggattcttatgggaaagtcctgaaaaaatatgtatttttttttttgtattccactartgcatgcaggattcagtggagataagagctccatgggccatctgtaccaatgtgcagcgaagggaagcttcgaacagtatgatagygtgcctgtatgggtgccagggtcagaatatacagctttgtttttctggaggacaaatccatctccrtgasgcttcttccaggctaaccctgtaataataaatagccatgttgttggagggtctctgcaaagaagggatgatgttttcctgttacgcattaaagctaccctatttaactgaattcttggtgaaattatctwggagatggaggaataaacakgcttgatagaagagattatctactaaatgaggtaggactttcccacartgtataatttcatagataagcaagtatcaaactagagaatgcactttgtcttcagccaagacgcttwgtctgtgcaatgcatgttcaacacacctccatgag

SEQ ID NO: 29928 - DNA, 600 bp, Chicken  19866894249295_6
ttgtattccactartgcatgcaggattcagtggagataagagctccatgggccatctgtaccaatgtgcagcgaagggaagcttcgaacagtatgatagygtgcctgtatgggtgccagggtcagaatatacagctttgtttttctggaggacaaatccatctccrtgasgcttcttccaggctaaccctgtaataataaatagccatgttgttggagggtctctgcaaagaagggatgatgttttcctgttacgcattaaagctaccctatttaactgaattcttggtgaaattatctwggagatggaggaataaacakgcttgatagaagagattatctactaaatgaggtaggactttcccacartgtataatttcatagataagcaagtatcaaactagagaatgcactttgtcttcagccaagacgcttwgtctgtgcaatgcatgttcaacacacctccatgagtctgccagttgagcctgtaggagtatccyctctgcctatctcaggtaataagtgtcttctagatggcccagctgctctctgtctgctgccagaagacaataactcagtaactgagatctcagctgaaagg

SEQ ID NO: 29929 - DNA, 600 bp, Chicken  19866894249295_7
caggattcagtggagataagagctccatgggccatctgtaccaatgtgcagcgaagggaagcttcgaacagtatgatagygtgcctgtatgggtgccagggtcagaatatacagctttgtttttctggaggacaaatccatctccrtgasgcttcttccaggctaaccctgtaataataaatagccatgttgttggagggtctctgcaaagaagggatgatgttttcctgttacgcattaaagctaccctatttaactgaattcttggtgaaattatctwggagatggaggaataaacakgcttgatagaagagattatctactaaatgaggtaggactttcccacartgtataatttcatagataagcaagtatcaaactagagaatgcactttgtcttcagccaagacgcttwgtctgtgcaatgcatgttcaacacacctccatgagtctgccagttgagcctgtaggagtatccyctctgcctatctcaggtaataagtgtcttctagatggcccagctgctctctgtctgctgccagaagacaataactcagtaactgagatctcagctgaaaggcttgctgtagttacgcttca

SEQ ID NO: 29930 - DNA, 600 bp, Chicken  19866894249295_8
cagcgaagggaagcttcgaacagtatgatagygtgcctgtatgggtgccagggtcagaatatacagctttgtttttctggaggacaaatccatctccrtgasgcttcttccaggctaaccctgtaataataaatagccatgttgttggagggtctctgcaaagaagggatgatgttttcctgttacgcattaaagctaccctatttaactgaattcttggtgaaattatctwggagatggaggaataaacakgcttgatagaagagattatctactaaatgaggtaggactttcccacartgtataatttcatagataagcaagtatcaaactagagaatgcactttgtcttcagccaagacgcttwgtctgtgcaatgcatgttcaacacacctccatgagtctgccagttgagcctgtaggagtatccyctctgcctatctcaggtaataagtgtcttctagatggcccagctgctctctgtctgctgccagaagacaataactcagtaactgagatctcagctgaaaggcttgctgtagttacgcttcattgcagagataaggtggcaccgaaactgttgatggcagaatgagggaa

SEQ ID NO: 29931 - DNA, 600 bp, Chicken  19866894249295_9
tttgtttttctggaggacaaatccatctccrtgasgcttcttccaggctaaccctgtaataataaatagccatgttgttggagggtctctgcaaagaagggatgatgttttcctgttacgcattaaagctaccctatttaactgaattcttggtgaaattatctwggagatggaggaataaacakgcttgatagaagagattatctactaaatgaggtaggactttcccacartgtataatttcatagataagcaagtatcaaactagagaatgcactttgtcttcagccaagacgcttwgtctgtgcaatgcatgttcaacacacctccatgagtctgccagttgagcctgtaggagtatccyctctgcctatctcaggtaataagtgtcttctagatggcccagctgctctctgtctgctgccagaagacaataactcagtaactgagatctcagctgaaaggcttgctgtagttacgcttcattgcagagataaggtggcaccgaaactgttgatggcagaatgagggaaaacaaattatcatgtctgaaataaaatgaattttaattaatgtctctaatctgtctagcgaatgttt

SEQ ID NO: 29932 - DNA, 600 bp, Chicken  19866894249296_1
atgtcatttcattgtgtcttcagttctcttcagaggaaaaggatgagaacgagacaatcatgtgatacagaaaaggacactctccaaacagaaaaaaatatcactgtggaacccacctgctcaatttcaagaagtcaactgtgttcccacttctgatgggatgtgtgcatagcacagtgacaagcaaagtgctaagcagctaagcttagccactaaaaatgtcattattcatttttttttcccaatttaaatgggttagaagaaagttatttagattaaacaaaagattaaaaaattgawaatcaatccaatgagaacttttctaattgtaaatgagtgtgtgggtatagccacagctgcatttgtttgtgttccagtcatcacactgccatcagtaaggagcaaggaggaatttgcttggagagggtagatctagattctaggtggcctcagcctacagatgattagcaaatgtaaagttctgagtaatccaaattgatattttgtctcttaacttctaatcagcttcagatgacagatatatttcattatttttcaaggcaaaaaattttcctatcaattgatgattaataatttcat

SEQ ID NO: 29933 - DNA, 600 bp, Chicken  19866894249306_1
ttcagtgggaatctcaatacattcaagtgatgaggactcaagttatcttctccatgaagtttgatgcattaattatatgctaccaaatatgtattagttgtgttaaaatgtaacactacttgatctggactatgaaataacatgaaaataaaaaacacagtttttgagagaagtatcagagttgaagactcaaggagcacttcatagcttattcttttgtcaattgtgtggtactgaaaatgtctaaggtctaggatgaatgacttgactgagtggaagctgttttctgtttgtggtgargtttggttagaagatgctgatggagaagtggtaattatgagatgagggagtactaaaagacattgaaatactaaatcagtgtaaaggcagatagagacagtaagaaagaactggaaagagaaagcccatgtgataattgaaaaagggttgatcagatttagagaaaagttcacatagtgcctaattgacagctgtactgctctggtttcgtttggtggcagaaagctgttgtagacatggaataaatcgataataaattagggcttcagtgcctgtgtggttaagcagctgttctttgct

SEQ ID NO: 29934 - DNA, 600 bp, Chicken  19866894249308_1
gaggtacagcaacagcccgacctgaagcacagggaggacaggggaaagacactctgcccctcttacctggagctctcagctcacctggcccagggctgcggagccgcagcagggagcggccgctcccacgcggtgacgtgttgattcagatgactgcaccttaaggaagggaaccaggaatcgaagccaccacggggacatcctgccctgaggccttccgggctgagagggctccaggccctgggttgggttttgcacacctggagctgccaccaacccctcacactcacagggctgcaragcccacagagccatcccacacctgcaccaccactgctcagcacagagaagcactgtgggtcagagccacacagacaagaatatgaactacactgaccccccacaacagtccctttgttttattaacacccctaaatgcactccggtcaaagcataaaagaatgacagcaaccatttgttgaataacagtgttttaatacaatcaaatgggacaaattgaaacgtgtcaagaaacattcagctatccaccccagaacagagcagcagctctgagcaatacaggcagcatcactccagttc

SEQ ID NO: 29935 - DNA, 600 bp, Chicken  19866894249308_2
gcacagagaagcactgtgggtcagagccacacagacaagaatatgaactacactgaccccccacaacagtccctttgttttattaacacccctaaatgcactccggtcaaagcataaaagaatgacagcaaccatttgttgaataacagtgttttaatacaatcaaatgggacaaattgaaacgtgtcaagaaacattcagctatccaccccagaacagagcagcagctctgagcaatacaggcagcatcactccagttcttctacagcacatccaaaattaaccatcactttggtggartgaaagtggcacctcctccaactcctgcaattaatcattccacctgaacatgtgtctttttcacatcatctcaggccattcgaacaaacagctgccaacaattaacgatacgcaaacagccatccacctgcctgcacgtggcatgaaataagtaattaacagtatgaagaacgcctgtactttggtctggaagaaatgaaaacaatcagagacctctaacagttccagctctgctcttttttccccacaagaaaagcaaaaacttcaacaccagaaatcagaccaaattgcagcagcatt

SEQ ID NO: 29936 - DNA, 600 bp, Chicken  19866894249310_1
atctatctgcaatttgttcctcaaaaaactgatattttaaaggtgacgtcattcatatcttctagtcctgatctgtccaactcctatttcactactgtaatttctattcctctgaagcagaaatttcctgaaaactggttccagaccaaggtgtatcattatgcttaaaacaaataatatagtctacattttgataggagcattgtgtgtttgaaatctgcccatttgtatctatggtgatctttagagttatcacaaaatagactattgttctttgtcttcagtgctttaccattaaartttttttcagtgaatgctgaagctttttcatgtggtactcagcaccacattgttcctgtgtactattattacaatgcttctgtttttgttttctttttcaaactctcttgtattaattgcagaaagactacaccttatttggaaattctgatacatggatatttttcctcaggtttctacaatagtgactgatatgcactgattatacccacattaaaaaaaaaaaaaagaaaaagatgaattatggcttaaaacattcatgtagcttatgcaattaaaagtaacttcccactaaaggta

SEQ ID NO: 29937 - DNA, 600 bp, Chicken  19866894249322_1
tccactgattcacgagcctcttaagattgtcttttaattggttctctggtgacaagctgttatgattatcattccacatcaattataactggaactaccaatgtacctctaaaatctgaccacaagtgtaacaaggaatgttctatttcagaattttgctactgaagatggataaatgaataacttaggtttgagtgttcttgtggtgatctgcacgtaaaagctgacagctgaaaccaggaaaagatcaaacttacctctctgtagcaacagtattcattgggtcatctgcactacagmaattacagggcaaatactgctgcaactgagagtgaatttcagccatctttaaaactaacgtactagcttcagtatttcctcccaaccttaaaaaataaaacaaaaaaagtatgatttgagatgacaacaccatgcagtacttattatttgtcttggttgcactgatcaaaatgcagatattttggacagcagtgtatttgatatccactctcactttctgctattttagttttccctctatcttacgactttctttctccatttaagaacagccttttctgtttcagcagtcttcttaat

SEQ ID NO: 29938 - DNA, 600 bp, Chicken  19866894249323_1
cctctccagttggaggtctagcttacttattggctgccttccacacaacaaatctaatcatggtttccactaggcagaaagcccttgtgaaaaagaatgcggctacccagaccaagtgtctgtccagaaatgcagctgttcaggtctctggctgcagggagtgcctgagcctgctgctgacaccagaggatggtagagacatcatctgtgtgaggtgagagcaggtggatgatctgctcagcctggtcatagaggtcaaagaggagatggagagattaaggagtatcaggaagtgtaagyggaaaatagactggtggagcaactccctgtcacatttatgagaaaggtaggtatcacctcaactgggtaatacaccccaagcagtgctggatcccctgccstgttgctgccaggaaatgggaggagacccaaaagatggagaggaatggaagcaggtccccactcaacatttcaagaaacccccccccccttacccaccctccttccaggtgcccttatgaaacagatttaaggctttaaaacctgagggaaaggtaagtggggatgtggtagaaggtcaaccaaggaggctgtctaggg

SEQ ID NO: 29939 - DNA, 600 bp, Chicken  19866894249323_2
gctacccagaccaagtgtctgtccagaaatgcagctgttcaggtctctggctgcagggagtgcctgagcctgctgctgacaccagaggatggtagagacatcatctgtgtgaggtgagagcaggtggatgatctgctcagcctggtcatagaggtcaaagaggagatggagagattaaggagtatcaggaagtgtaagyggaaaatagactggtggagcaactccctgtcacatttatgagaaaggtaggtatcacctcaactgggtaatacaccccaagcagtgctggatcccctgccstgttgctgccaggaaatgggaggagacccaaaagatggagaggaatggaagcaggtccccactcaacatttcaagaaacccccccccccttacccaccctccttccaggtgcccttatgaaacagatttaaggctttaaaacctgagggaaaggtaagtggggatgtggtagaaggtcaaccaaggaggctgtctagggcaacaaggttgactccatgcctcaagactgcttccaccaaaaaggaaacaagggtaattgccatgggcgactccttctgagaggaatgaagagccccatat

SEQ ID NO: 29940 - DNA, 599 bp, Chicken  19866894249327_1
  misc_feature (1)..(141): n is any nucleotide
nnnnnnnnnnnnnnnnnnnnnnnnnnnnnnnnnnnnnnnnnnnnnnnnnnnnnnnnnnnnnnnnnnnnnnnnnnnnnnnnnnnnnnnnnnnnnnnnnnnnnnnnnnnnnnnnnnnnnnnnnnnnnnnnnnnnnnnnnnnnnctctagggtctccccagttggccatcaagtgtggggcgatgccctgctgggctccaagagaggccctggaggttagcccccatgttttgctctcctgcctgcattcgtcagttggtttttgctgtgcccaatgcccagggcaactgacaggggcacttwgctgggctgtgctttgcttctttgcccagacctcatgggggctgcctagggaggaggcttgtgtgcaacaccggckrtggaaaaaaaaaccctgaccacaggtttctctgtggtctccctatcccttcagcttatccctgcaactgctgctgtgggatgaagtgctgagctcctcttccttctggatctcatctaaaaaaaatcagagtcaacaagtttcatctcgatgtgctagctaagatcagaatcctgttttgtgaggctccatacaaggacaggattatattcagtctgcctcg

SEQ ID NO: 29941 - DNA, 599 bp, Chicken  19866894249327_2
  misc_feature (1)..(65): n is any nucleotide
nnnnnnnnnnnnnnnnnnnnnnnnnnnnnnnnnnnnnnnnnnnnnnnnnnnnnnnnnnnnnnnnnctctagggtctccccagttggccatcaagtgtggggcgatgccctgctgggctccaagagaggccctggaggttagcccccatgttttgctctcctgcctgcattcgtcagttggtttttgctgtgcccaatgcccagggcaactgacaggggcacttwgctgggctgtgctttgcttctttgcccagacctcatgggggctgcctagggaggaggcttgtgtgcaacaccggckrtggaaaaaaaaaccctgaccacaggtttctctgtggtctccctatcccttcagcttatccctgcaactgctgctgtgggatgaagtgctgagctcctcttccttctggatctcatctaaaaaaaatcagagtcaacaagtttcatctcgatgtgctagctaagatcagaatcctgttttgtgaggctccatacaaggacaggattatattcagtctgcctcgcaaagtgcttgcaacttcacgaactggaagggaaacagctgcaagaaaaaatgccttgccaaaattccccccacag

SEQ ID NO: 29942 - DNA, 599 bp, Chicken  19866894249327_3
  misc_feature (1)..(64): n is any nucleotide
nnnnnnnnnnnnnnnnnnnnnnnnnnnnnnnnnnnnnnnnnnnnnnnnnnnnnnnnnnnnnnnnctctagggtctccccagttggccatcaagtgtggggcgatgccctgctgggctccaagagaggccctggaggttagcccccatgttttgctctcctgcctgcattcgtcagttggtttttgctgtgcccaatgcccagggcaactgacaggggcacttwgctgggctgtgctttgcttctttgcccagacctcatgggggctgcctagggaggaggcttgtgtgcaacaccggckrtggaaaaaaaaaccctgaccacaggtttctctgtggtctccctatcccttcagcttatccctgcaactgctgctgtgggatgaagtgctgagctcctcttccttctggatctcatctaaaaaaaatcagagtcaacaagtttcatctcgatgtgctagctaagatcagaatcctgttttgtgaggctccatacaaggacaggattatattcagtctgcctcgcaaagtgcttgcaacttcacgaactggaagggaaacagctgcaagaaaaaatgccttgccaaaattccccccacagc

SEQ ID NO: 29943 - DNA, 600 bp, Chicken  19866894249330_1
attctttgtttttcttgttgatagtggcgtcgtggaatatgatgcagaaggcttcactaagcttactctgttgctgatgtggaaagatttttgcttccttgttcacagtgagtaactctttgcctcaggcacaagtgtctatcctcttgaagttacaagttcaaaagggaaaaagtacaattacaggaaacaatctaaaagttttagctatttttatccagtgcttaatgcattttttcatatggccgtgacactttgaaaacacgaaatcccaatcatacttggaggagagatgatccrcaccgatggatcgtgctgctcactttacaggrcgccaaaagcatcctgggaagtttttgtggtagcttgacttgagtccccatttgtaacccctcttatcggaagtgtcaataataaggaccagtactgttcataaactggggatatctaaaaccttatgtaactgtcaggaattaatgaaacgatcatggcaataatgacaattcagtgtaggaaaaacagaagaaaaatagtaacacagtgctgtgtttaaaagacagactttttttcttggaatgaaactattgcaggcaaaatgcc

SEQ ID NO: 29944 - DNA, 600 bp, Chicken  19866894249330_2
tggaatatgatgcagaaggcttcactaagcttactctgttgctgatgtggaaagatttttgcttccttgttcacagtgagtaactctttgcctcaggcacaagtgtctatcctcttgaagttacaagttcaaaagggaaaaagtacaattacaggaaacaatctaaaagttttagctatttttatccagtgcttaatgcattttttcatatggccgtgacactttgaaaacacgaaatcccaatcatacttggaggagagatgatccrcaccgatggatcgtgctgctcactttacaggrcgccaaaagcatcctgggaagtttttgtggtagcttgacttgagtccccatttgtaacccctcttatcggaagtgtcaataataaggaccagtactgttcataaactggggatatctaaaaccttatgtaactgtcaggaattaatgaaacgatcatggcaataatgacaattcagtgtaggaaaaacagaagaaaaatagtaacacagtgctgtgtttaaaagacagactttttttcttggaatgaaactattgcaggcaaaatgcctgtcagttttcagcagtgtgtagctgaattct

SEQ ID NO: 29945 - DNA, 600 bp, Chicken  19866894249330_3
atcctgggaagtttttgtggtagcttgacttgagtccccatttgtaacccctcttatcggaagtgtcaataataaggaccagtactgttcataaactggggatatctaaaaccttatgtaactgtcaggaattaatgaaacgatcatggcaataatgacaattcagtgtaggaaaaacagaagaaaaatagtaacacagtgctgtgtttaaaagacagactttttttcttggaatgaaactattgcaggcaaaatgcctgtcagttttcagcagtgtgtagctgaattctccatcatttkagatctttagatcaaaatggaattgcttccaaaaacttgttttaactgaaatatatagcaattttgtgtaggaattagtaagtatggctccgttactgtcttacatggtaaatagaaattgttatttttccttacagggtcgaattcacaggtattaaagatattttggtgtgaggaaattcagtcatcttatcctttattttttcattaatacacttcttgtcttttttaaatgattacaacatagtctgggcagctgcaacattggtgattgttaacacttcagctttgcagtacttc

SEQ ID NO: 29946 - DNA, 599 bp, Chicken  19866894249331_1
  misc_feature (1)..(175): n is any nucleotide
nnnnnnnnnnnnnnnnnnnnnnnnnnnnnnnnnnnnnnnnnnnnnnnnnnnnnnnnnnnnnnnnnnnnnnnnnnnnnnnnnnnnnnnnnnnnnnnnnnnnnnnnnnnnnnnnnnnnnnnnnnnnnnnnnnnnnnnnnnnnnnnnnnnnnnnnnnnnnnnnnnnnnnnnnnnnnnnaatcgaagcaaaattgtagaagttgtccttacaaacactcattgacaacatccatatgaaacataccttgtaaaaccaaagaaacacacacgcacacatgcaccgatttaggacaacctgagagracagacactgaatctcatctgcagtcaagcccaagctcctaagcacacttcagataaagcagtatgaatggcatggcaccttccttgtttaaacttcaatttctctgtcaagttcatgtccacatgtggtgrtatagtccacataagagaagtccacacaaaygcagcagaaccaccagagaacaaaactgttctacaatcttattataacccttatacttcctttccraagtattcttttggtccaatacattcatttcctacactacacccgaatttatactgtacacaccctaaag

SEQ ID NO: 29947 - DNA, 599 bp, Chicken  19866894249331_2
  misc_feature (1)..(43): n is any nucleotide
nnnnnnnnnnnnnnnnnnnnnnnnnnnnnnnnnnnnnnnnnnnaatcgaagcaaaattgtagaagttgtccttacaaacactcattgacaacatccatatgaaacataccttgtaaaaccaaagaaacacacacgcacacatgcaccgatttaggacaacctgagagracagacactgaatctcatctgcagtcaagcccaagctcctaagcacacttcagataaagcagtatgaatggcatggcaccttccttgtttaaacttcaatttctctgtcaagttcatgtccacatgtggtgrtatagtccacataagagaagtccacacaaaygcagcagaaccaccagagaacaaaactgttctacaatcttattataacccttatacttcctttccraagtattcttttggtccaatacattcatttcctacactacacccgaatttatactgtacacaccctaaagcagagatcaaaaagcttaagcagaagatggcacttcacctacttgcacacatcagcccattttacctgtttccttaaaccttctgtctgccctttgcattaaactgagctacaccttccaataaggcatctg

SEQ ID NO: 29948 - DNA, 599 bp, Chicken  19866894249331_3
  misc_feature (1)..(12): n is any nucleotide
nnnnnnnnnnnnaatcgaagcaaaattgtagaagttgtccttacaaacactcattgacaacatccatatgaaacataccttgtaaaaccaaagaaacacacacgcacacatgcaccgatttaggacaacctgagagracagacactgaatctcatctgcagtcaagcccaagctcctaagcacacttcagataaagcagtatgaatggcatggcaccttccttgtttaaacttcaatttctctgtcaagttcatgtccacatgtggtgrtatagtccacataagagaagtccacacaaaygcagcagaaccaccagagaacaaaactgttctacaatcttattataacccttatacttcctttccraagtattcttttggtccaatacattcatttcctacactacacccgaatttatactgtacacaccctaaagcagagatcaaaaagcttaagcagaagatggcacttcacctacttgcacacatcagcccattttacctgtttccttaaaccttctgtctgccctttgcattaaactgagctacaccttccaataaggcatctggtcttcatgtgaagtagacgaaagatgaaaa

SEQ ID NO: 29949 - DNA, 600 bp, Chicken  19866894249331_4
tatgaaacataccttgtaaaaccaaagaaacacacacgcacacatgcaccgatttaggacaacctgagagracagacactgaatctcatctgcagtcaagcccaagctcctaagcacacttcagataaagcagtatgaatggcatggcaccttccttgtttaaacttcaatttctctgtcaagttcatgtccacatgtggtgrtatagtccacataagagaagtccacacaaaygcagcagaaccaccagagaacaaaactgttctacaatcttattataacccttatacttcctttccraagtattcttttggtccaatacattcatttcctacactacacccgaatttatactgtacacaccctaaagcagagatcaaaaagcttaagcagaagatggcacttcacctacttgcacacatcagcccattttacctgtttccttaaaccttctgtctgccctttgcattaaactgagctacaccttccaataaggcatctggtcttcatgtgaagtagacgaaagatgaaaagcccatctcttctgtggttgcttgcatagcagttaatcatcctcacctcagctaggccggactcgcc

SEQ ID NO: 29950 - DNA, 599 bp, Chicken  19866894249332_1
  misc_feature (1)..(29): n is any nucleotide
nnnnnnnnnnnnnnnnnnnnnnnnnnnnnaaacgactgcttcctttatagataaaggactgaaagatgcatcttaaacaagcaaaaagatatatatatgtattttttttaaacagagacagatttttatcaaatataccatgaaaccatttggttttgattattcagcatgaaaagaagaaagggttttgctgccatatagaactaaatatctcaaatgaactccgtcaggatgtgtcggaacgctttccaacatctatattttactaatggatcggtgatacatcaattattgtgtacsaataacccaattaaaattgcactccgaataaacaatctggcccagctccaaacccagactatttaaaccagctaatggaaacattaggcgccaggctgcacattttgtttcctaatgaagatagtatttggctgacacggaaccaatttacatggaaaagccaaataattaaaaaggtcacacatctacaactcaggcgtttcacacatgcaaaccaagctacccaacatgaaacaaattgacacagtcaaacaagactgagttatgatgcatgtggcttgttaacagagaactgcacc

SEQ ID NO: 29951 - DNA, 600 bp, Chicken  19866894249335_1
gagcaggtcattcctttgctgggttttcctttataaccactgtgtgcttcacagctttcactctcaggactgccaaaactcttatccagccactcatcctcttttggctctaccactgtcatcccttcccatccacaactgtcacggttgcccccttgagcccatcccacaagcaggctcctggcatccttctgtcctgcacagcctgccccagctctatccctgcttgctacagtttgccatggaaggttctcccaccagcatccaggctaaccagtttccccatccatgttcacaccyggccacagtacactcaccccgatattgcctctccccagggggtggagggaataattcactttgttttgtgataagcaataaattttctggaaaaaagaaatttggtggtatctaaactgttaacaaattaggtcaggctcaataaattttcagccaatgaaaaaatatcagggaagtggcaggtggcaagagatgttgaaaaccttgagacaattcactctggcatttcaaaaaatgagccttttgactcctctgtcttgaaatgcatttctcaattacaaactgacccacaagagtaga

SEQ ID NO: 29952 - DNA, 563 bp, Chicken  19866894249338_1
gactcagacagtccctgttgttgtcctaccatgttaagagatacatttgataggaagcccagaaaccataattttctgttccaattcttctgctaattgctgttaatatttctattgcctttgcattacacatggttcatatttctacctttcagagtatctttcagtggttcattttcacaaataaaatattggagagcttcttcaaggtcactttaagtagaactgggaacagacttcagatttccattacactggcactgagtctcatctgctttgccagtctttcaacaggattawggaaaataatttttgtattgcaaaacatttgcacttagaagtgaatttggatggtgtggtaatgttcatttttatgttttcagctgagaaaaactattccactgaaaacagttttgtattcatcctaacgtgtacactcagtgactgttatagtatattttgcctatttcttataagcaggatatctactgatgtcagctacaaaaatgtcagaatctgagttaataagcttgtctttcagacaatggatctcactcttatag

SEQ ID NO: 29953 - DNA, 532 bp, Chicken  19866894249344_1
agtgggaaaagggaacagggtagaaaaacatcaacccaaaggatgcaagttaaagactaagtcttgttctttttgccttgccttgccttgcctgttacaaacagatgccagtctgtacttgctcatcacagaatcatagtaatttacagtcatttaatattaacatgtcatcaccaaagtacaaggaattatgtttcttcccagtaccactgtgcagtagctataaccagctggcatcttccaacaggccctctgcttggtatatgcccttcatactaaattagtgcaaatatgctatakttacaaactaaagtgttttctggtatacaagaggattccctctcgtctgttattcaaagcaagttgcatgttcatcttttcaccagtggtggggtttaaaaacaaagcttacctgaaacaaaactctctgagcagattaagttatacctgttagtgtaactaagcagggagctgactggtgctgtcatttgtttatatgctgttatacctagtaccagagtcccacagagca

SEQ ID NO: 29954 - DNA, 600 bp, Chicken  19866894249347_1
gaggtaggtgggagcagacagctcagggcagctgtatctcaacctcttcattcctggtccccaaactagaagagctcagagtttccccaaagccaacaaactgatcccccccccccttccttctccctccagagcatgttatgatctgagaaggaacagagccgctgtagttgcaggcacttaagaacctccctgtgtttgttctgagagagctgctctccatccatctccttcgctagcgctggatagatggagctaataccactaaagatcaaacacacacgtcagcagcagctcttrccctataaagggcaggaggtgccctgccagcttgccaccttgcacttatctacacagtattacctttcaaggaagtgcccacaggaggggagacagcagcttcactcacccacgccagcactgcagacccagcatggcattaagcaccacctctcctcctttcactcctatccctaccagataacaccacctggctggccccacctgctgaaaaccacctgggtcagctttaaaaccccatttgtctcccattgcacattaatgtgggtctctttcctgagcctatgttgtagtcggagc

SEQ ID NO: 29955 - DNA, 600 bp, Chicken  19866894249353_1
aagagaaccttgcagtgttgtcggtatgtgttagcgtggctgttaggccatcacagtgctatatgccattctagaacttttccaaccaaaagcttgttctcctggcactagctcccacctgaatccagccttttgaggagtttcactctgaccttctttatccaaacagaatgcagcaaagaagagagatcaagagcaagtggaaatagaaggtgagaactcggcgccgccacgaaaaatcgctcggacagacagccaggatatgaatgaggacacttaaactctcgggcctctgctctyctactttgcaggcgcttcccattttgtctcaaagtgtgtaaattttgccccttgccgccatctctcacccctccactatgcagcccaaaccacttctgacttcataggagccaatgtatttattttttttcctcctttttttttttttttaatttatgccgtaaaagttgcggagcaatggtggaacaatccagtacaacatgtagtgtaaccctagtttcccctttctaacaacacacgctgtcactttaacaggttttgttaaatctgttacctaatcaaccagctctagctgtggaa

SEQ ID NO: 29956 - DNA, 599 bp, Chicken  19866894249358_1
  misc_feature (1)..(66): n is any nucleotide
nnnnnnnnnnnnnnnnnnnnnnnnnnnnnnnnnnnnnnnnnnnnnnnnnnnnnnnnnnnnnnnnnncaatgatttgtggaaattctgaaagtcaccctcctgagtgcatccctcttctgtaacgatgccttggggccacgataatcagcatgagaagcagctaatagatttaagagctttcatcttgaagctgatttatattcttccgcttatgtacagttcctacataggtctgcatcaccccatgctggagcgctaatgcaatgcattcctcaagaattcaaagcagataatctcccyatttccaagcaaatcttacgaaaaggtatccaagagcagaggacattgccttatyttatttgtgttgtttccccaaaggccactccatggccatacttgcacaatccttctgctattcagggagtatcattaaggagraaaaaaaaaaccacaaactatgcacagtaagttttaataaatcactcgagtctatcaacttaatcttcattacaatctattactacaaagattcctacagtatgacagaagatttactgggtataaagatttgcctgaaggctgaatgtaatcagaaatgg

SEQ ID NO: 29957 - DNA, 599 bp, Chicken  19866894249358_2
  misc_feature (1)..(11): n is any nucleotide
nnnnnnnnnnncaatgatttgtggaaattctgaaagtcaccctcctgagtgcatccctcttctgtaacgatgccttggggccacgataatcagcatgagaagcagctaatagatttaagagctttcatcttgaagctgatttatattcttccgcttatgtacagttcctacataggtctgcatcaccccatgctggagcgctaatgcaatgcattcctcaagaattcaaagcagataatctcccyatttccaagcaaatcttacgaaaaggtatccaagagcagaggacattgccttatyttatttgtgttgtttccccaaaggccactccatggccatacttgcacaatccttctgctattcagggagtatcattaaggagraaaaaaaaaaccacaaactatgcacagtaagttttaataaatcactcgagtctatcaacttaatcttcattacaatctattactacaaagattcctacagtatgacagaagatttactgggtataaagatttgcctgaaggctgaatgtaatcagaaatggtacagaatgaaaaaaaacacatgagcttgtcagcactgctacacagaaacatacg

SEQ ID NO: 29958 - DNA, 600 bp, Chicken  19866894249358_3
cgataatcagcatgagaagcagctaatagatttaagagctttcatcttgaagctgatttatattcttccgcttatgtacagttcctacataggtctgcatcaccccatgctggagcgctaatgcaatgcattcctcaagaattcaaagcagataatctcccyatttccaagcaaatcttacgaaaaggtatccaagagcagaggacattgccttatyttatttgtgttgtttccccaaaggccactccatggccatacttgcacaatccttctgctattcagggagtatcattaaggagraaaaaaaaaaccacaaactatgcacagtaagttttaataaatcactcgagtctatcaacttaatcttcattacaatctattactacaaagattcctacagtatgacagaagatttactgggtataaagatttgcctgaaggctgaatgtaatcagaaatggtacagaatgaaaaaaaacacatgagcttgtcagcactgctacacagaaacatacgaagaactcttaataatggtaaaacccrtgggaaaagatggagctttcctcagtagtacttcccagsaagtcaagaccttgccac

SEQ ID NO: 29959 - DNA, 600 bp, Chicken  19866894249358_4
caaatcttacgaaaaggtatccaagagcagaggacattgccttatyttatttgtgttgtttccccaaaggccactccatggccatacttgcacaatccttctgctattcagggagtatcattaaggagraaaaaaaaaaccacaaactatgcacagtaagttttaataaatcactcgagtctatcaacttaatcttcattacaatctattactacaaagattcctacagtatgacagaagatttactgggtataaagatttgcctgaaggctgaatgtaatcagaaatggtacagaatgraaaaaaacacatgagcttgtcagcactgctacacagaaacatacgaagaactcttaataatggtaaaacccrtgggaaaagatggagctttcctcagtagtacttcccagsaagtcaagaccttgccacatacaatacacatttcacagtgatattctcactgatttcaggaagacatctggtttagcctacggaaagtttttattcctgaacacctacctgtatgcttaatctgggagacagaaggacccagcaattgctctgaaattgcaaaatacttctctttgctatttcagtaaa

SEQ ID NO: 29960 - DNA, 600 bp, Chicken  19866894249358_5
actccatggccatacttgcacaatccttctgctattcagggagtatcattaaggagraaaaaaaaaaccacaaactatgcacagtaagttttaataaatcactcgagtctatcaacttaatcttcattacaatctattactacaaagattcctacagtatgacagaagatttactgggtataaagatttgcctgaaggctgaatgtaatcagaaatggtacagaatgaaaaaaaacacatgagcttgtcagcactgctacacagaaacatacgaagaactcttaataatggtaaaacccrtgggaaaagatggagctttcctcagtagtacttcccagsaagtcaagaccttgccacatacaatacacatttcacagtgatattctcactgatttcaggaagacatctggtttagcctacggaaagtttttattcctgaacacctacctgtatgcttaatctgggagacagaaggacccagcaattgctctgaaattgcaaaatacttctctttgctatttcagtaaaaatacccctcagaaaacagagggatagacacaaagatgatgatgatcaaaacagttaatattcatttctatt

SEQ ID NO: 29961 - DNA, 600 bp, Chicken  19866894249358_6
ggagtatcattaaggagraaaaaaaaaaccacaaactatgcacagtaagttttaataaatcactcgagtctatcaacttaatcttcattacaatctattactacaaagattcctacagtatgacagaagatttactgggtataaagatttgcctgaaggctgaatgtaatcagaaatggtacagaatgaaaaaaaacacatgagcttgtcagcactgctacacagaaacatacgaagaactcttaataatggtaaaacccrtgggaaaagatggagctttcctcagtagtacttcccagsaagtcaagaccttgccacatacaatacacatttcacagtgatattctcactgatttcaggaagacatctggtttagcctacggaaagtttttattcctgaacacctacctgtatgcttaatctgggagacagaaggacccagcaattgctctgaaattgcaaaatacttctctttgctatttcagtaaaaatacccctcagaaaacagagggatagacacaaagatgatgatgatcaaaacagttaatattcatttctattctgcatacgttcccttacaactgaccgtgccaggtaaaa

SEQ ID NO: 29962 - DNA, 600 bp, Chicken  19866894249359_1
gcagagtgcccagtgttaattcctgaagagccctaggaggggtggatttacgtagaatgttaatgtggtgaagttatattattgagccttattaaaatagttctcaaacatcacactgctataaccttgtagctcatttttcagtacggtttggtacttctttttaacctagtggtagatttgtgcagcgttgtggaagcgggcagtagatccatgcagagggctggtttggagctgctgaaatacttagcagctttgtgacaggttttgccaaattaaagattacggttttggaagctyctgtgaaggtgggagcggtggggaagcagtggggaagcwgaggtggatgggagctgctcctgcaggggggatggctggagctgtgctgcagtgctttgacacccgcagcagggaacggagtttgaggcgggatgctgtgacattgcccgactgcacacacacatcttttgccagtagcactttcctataaaaaccgccttcgtgggccttacagcagcacagcagcccttctgtttcacagctttgttttggttctcaaaattcttgtttatgaaagtcttggtgtggctctctgcagtg

SEQ ID NO: 29963 - DNA, 568 bp, Chicken  19866894249359_2
gggtggatttacgtagaatgttaatgtggtgaagttatattattgagccttattaaaatagttctcaaacatcacactgctataaccttgtagctcatttttcagtacggtttggtacttctttttaacctagtggtagatttgtgcagcgttgtggaagcgggcagtagatccatgcagagggctggtttggagctgctgaaatacttagcagctttgtgacaggttttgccaaattaaagattacggttttggaagctyctgtgaaggtgggagcggtggggaagcagtggggaagcwgaggtggatgggagctgctcctgcaggggggatggctggagctgtgctgcagtgctttgacacccgcagcagggaacggagtttgaggcgggatgctgtgacattgcccgactgcacacacacatcttttgccagtagcactttcctataaaaaccgccttcgtgggccttacagcagcacagcagcccttctgtttcacagctttgttttggttctcaaaattcttgtttatgaaagtcttggtgtggctctctgcagtgtggggag

SEQ ID NO: 29964 - DNA, 472 bp, Chicken  19866894249366_1
tctgccctagtcacgtgagccttattaaagccctagaaatacggagttgtgttactgttgctttgaacttctcttcctgtggaggcaggtctgggctggtttgtgacaccatctgttgatgaagcagagaaggtctccttgttctgcttatgtgcaactgtggtggcagagacagaagtcccaggcaagacaaagctaactgttctgcaggccttgttttaggtgtcctggccttgaaaaatgagtaatttggtgctgaagccatgatacaagggcagaaataagttactgcagttctcmtaaagttcatcgcagagttcactggttctagaagtaatttgtgatatggccttgagtgagtcatttcagtgctctgagtgtccctatttgtaaagcaggagtatatctgtgaggagatacaaaagcagctgttcttaaaataaataaaacagcttcagaatcatgaagcaag

SEQ ID NO: 29965 - DNA, 599 bp, Chicken  19866894249369_1
  misc_feature (1)..(23): n is any nucleotide
nnnnnnnnnnnnnnnnnnnnnnntgtagagctgattaatgaatgttaaatatgttggttcttttgttattttaatctaacttatttgctgttctgtggcattctgccttctttggtcatttagattttcatacttacaaatggattaattcaagggtataataatacatggatttaattatctattcctgctacttggtgtatcacatgggataaaaaattaaacaaatgaagtcttgtttcagaagatagacagagttggatgctctgcatgtaactactgacctcttgagggtgaaamtgtgtaatctaaaatactgccttatcctttttgacagcagatcttgaaatctcgtccacttgctgggccagtgttgctttctctagcaatctgctggtatctcagttgaaagcctaggggactagggatctagaaggggtgtttcataatattatggaatttgaaaaggaaatgaagtcttaaatatttaattttatttttagggtcttcatgttactttcttgcattggacaaagatcgcttagcaacagtggtgttttagaaagtttacttaatctcctggataaccttctgtcacc

SEQ ID NO: 29966 - DNA, 600 bp, Chicken  19866894249389_1
ggctgagcacccatcctgcccacctcagcgccccacatagtgcacagtgccagccctgctggggccagttgaccaaacctccctgtgggacgcacacagctgtgcttgagcagtgaccctgcggctgctcagcacctccatggctcagcagagcggcacaggagctgaggtttacccttttggagcaataaaaggaggcacgtggagactgggagtggtgtgacagctgatgcgtccctgtgcccacccatcctaaggcacacgggatacccaaagatgccccggactccccatacccaytttctgcttttattaggaaggaggtgaaggamaccyaggcaggaacgaggcgctgtgctccacaagtgtcctctgctgggggaggcagctggacccccatcccaccgcaccccaagctgcggccatgtcggtgcagaggtggcactgcaggggctgtccctgtccccacgccacgtggttgcacgtcccctgtgctccccgcagcacccagggatggcggtggggacagcggggagaggcaggcagcagaggggcccccatctacctacgaagagcggacgaggaggcagagccccatgc

SEQ ID NO: 29967 - DNA, 600 bp, Chicken  19866894249389_2
ccacatagtgcacagtgccagccctgctggggccagttgaccaaacctccctgtgggacgcacacagctgtgcttgagcagtgaccctgcggctgctcagcacctccatggctcagcagagcggcacaggagctgaggtttacccttttggagcaataaaaggaggcacgtggagactgggagtggtgtgacagctgatgcgtccctgtgcccacccatcctaaggcacacgggatacccaaagatgccccggactccccatacccaytttctgcttttattaggaaggaggtgaaggamaccyaggcaggaacgaggcgctgtgctccacaagtgtcctctgctgggggaggcagctggacccccatcccaccgcaccccaagctgcggccatgtcggtgcagaggtggcactgcaggggctgtccctgtccccacgccacgtggttgcacgtcccctgtgctccccgcagcacccagggatggcggtggggacagcggggagaggcaggcagcagaggggcccccatctacctacgaagagcggacgaggaggcagagccccatgcccacagccccactacttcttcaccttgatgag

SEQ ID NO: 29968 - DNA, 600 bp, Chicken  19866894249389_3
atagtgcacagtgccagccctgctggggccagttgaccaaacctccctgtgggacgcacacagctgtgcttgagcagtgaccctgcggctgctcagcacctccatggctcagcagagcggcacaggagctgaggtttacccttttggagcaataaaaggaggcacgtggagactgggagtggtgtgacagctgatgcgtccctgtgcccacccatcctaaggcacacgggatacccaaagatgccccggactccccatacccaytttctgcttttattaggaaggaggtgaaggamaccyaggcaggaacgaggcgctgtgctccacaagtgtcctctgctgggggaggcagctggacccccatcccaccgcaccccaagctgcggccatgtcggtgcagaggtggcactgcaggggctgtccctgtccccacgccacgtggttgcacgtcccctgtgctccccgcagcacccagggatggcggtggggacagcggggagaggcaggcagcagaggggcccccatctacctacgaagagcggacgaggaggcagagccccatgcccacagccccactacttcttcaccttgatgagggag

SEQ ID NO: 29969 - DNA, 600 bp, Chicken  19866894249392_1
tgttgttgttctggtgtccaaagggagcagcagctgaactgtggctgttttttcttcagtgaaagcttgagtacccgctgttctcccaaatacaaaaatgaaggtttgtactgtttcccttgaatggaagcagcatgatgtgagtgtgaaaagagtggcacagtgtggtaagggaaacaaccaaaaggagagaacggccgactccaggctctgaccagatctgctccttctgtttcactgtgtggtttgttttcagctcttcgactcagagcacctcatggggctcacaacaccgctccrcagctctgggctgagaaagagaaacaattcaaaggcagtacactcttcctgaaacaggcttcataagctatgggaaatgaagccgaggctgaattttaaatcaggctgaaagcgctaaggtgcagaaatgcagagtgaagctattcagtaaaataaaatctggaacagagccctgaaaacatctttaattatgaataatccatttttaatatgtgtggttctaggtaatttacttttaaagataatttctctacttaggctggttacaattctttactgtcatttttgataaatggcgtg

SEQ ID NO: 29970 - DNA, 600 bp, Chicken  19866894249401_1
gttagaggtattaatgtggcagtgaaatgatacagattgctcctgggttctgttctctacttgtttgcattcatcagtcttgaaagaggaagagtttacacattgtcttgacacggatgctaataagccgaaaatgagagatacactgcatcaaataaatagatgccagcagccacgaagtgaacaaactcagataatggcacagtgcagtacagtaatgaagaagtagagagcataggctcctgactagggcagaacacacctctgtttctcaaaaatgaatggatctagccagtgagyggataaaagcattttagaagaggggactgatggcaaaaaagagccacagatgatgaaaatggagccgaacataatgtattctattgacatatgatttttaaagtaatagaaattgtttgaaactgagtaaattgaagtaatttcaaaytgaactgaatgagagaagcattcttaaagtaaataatcaacataatgatgatgtacatctgagaaaatgaggaatcagattcaaagtcccatatttatgtgcaaagtawttgggacaattttttttggtttwaaataatctggattaagttg

SEQ ID NO: 29971 - DNA, 600 bp, Chicken  19866894249401_2
catcaaataaatagatgccagcagccacgaagtgaacaaactcagataatggcacagtgcagtacagtaatgaagaagtagagagcataggctcctgactagggcagaacacacctctgtttctcaaaaatgaatggatctagccagtgagyggataaaagcattttagaagaggggactgatggcaaaaaagagccacagatgatgaaaatggagccgaacataatgtattctattgacatatgatttttaaagtaatagaaattgtttgaaactgagtaaattgaagtaatttcaaaytgaactgaatgagagaagcattcttaaagtaaataatcaacataatgatgatgtacatctgagaaaatgaggaatcagattcaaagtcccatatttatgtgcaaagtawttgggacaattttttttggtttwaaataatctggattaagttggacaaagtgtaaaaatgagaactattattaatgccatatgacaggctatatcaacttttatcaaatgtacatggttttgtgcagatcaatccttgcttattgctttcataatctttagtggtgcaaatgtctatggtgtccctggctg

SEQ ID NO: 29972 - DNA, 600 bp, Chicken  19866894249401_3
cacacctctgtttctcaaaaatgaatggatctagccagtgagyggataaaagcattttagaagaggggactgatggcaaaaaagagccacagatgatgaaaatggagccgaacataatgtattctattgacatatgatttttaaagtaatagaaattgtttgaaactgagtaaattgaagtaatttcaaaytgaactgaatgagagaagcattcttaaagtaaataatcaacataatgatgatgtacatctgagaaaatgaggaatcagattcaaagtcccatatttatgtgcaaagtawttgggacaattttttttggtttwaaataatctggattaagttggacaaagtgtaaaaatgagaactattattaatgccatatgacaggctatatcaacttttatcaaatgtacatggttttgtgcagatcaatccttgcttattgctttcataatctttagtggtgcaaatgtctatggtgtccctggctgcataatatacatttggttttcaaggtaaagtaaaacatacgtaaaatccacacacatagattatttctttatgtggctcatagaagtcttagcatgcagtgattttaat

SEQ ID NO: 29973 - DNA, 600 bp, Chicken  19866894249401_4
aatggatctagccagtgagyggataaaagcattttagaagaggggactgatggcaaaaaagagccacagatgatgaaaatggagccgaacataatgtattctattgacatatgatttttaaagtaatagaaattgtttgaaactgagtaaattgaagtaatttcaaaytgaactgaatgagagaagcattcttaaagtaaataatcaacataatgatgatgtacatctgagaaaatgaggaatcagattcaaagtcccatatttatgtgcaaagtawttgggacaattttttttggtttwaaataatctggattaagttggacaaagtgtaaaaatgagaactattattaatgccatatgacaggctatatcaacttttatcaaatgtacatggttttgtgcagatcaatccttgcttattgctttcataatctttagtggtgcaaatgtctatggtgtccctggctgcataatatacatttggttttcaaggtaaagtaaaacatacgtaaaatccacacacatagattatttctttatgtggctcatagaagtcttagcatgcagtgattttaatgagttctgtattcacatatcctt

SEQ ID NO: 29974 - DNA, 571 bp, Chicken  19866894249401_5
ttattaatgccatatgacaggctatatcaacttttatcaaatgtacatggttttgtgcagatcaatccttgcttattgctttcataatctttagtggtgcaaatgtctatggtgtccctggctgcataatatacatttggttttcaaggtaaagtaaaacatacgtaaaatccacacacatagattatttctttatgtggctcatagaagtcttagcatgcagtgattttaatgagttctgtattcacatatccttaaccctgaaagacctttgtggccttgctcagcaaactcattccytcaagcagttttgtacacaaaatagaatcttasgacttctatgatctcagtggatatatctggttggaggaaaaaaaaaagaaaagtataaacagtggatgctgctagccacaccattgataaacttgagataatcctaaaattcagagtagttctcattcattttgacttcagcttatatactctgggcttttttcagattggacggaaagtacactactctttcatcttcattcagtttcttgttctcattttagtacacagtgcttca

SEQ ID NO: 29975 - DNA, 538 bp, Chicken  19866894249401_6
ttatcaaatgtacatggttttgtgcagatcaatccttgcttattgctttcataatctttagtggtgcaaatgtctatggtgtccctggctgcataatatacatttggttttcaaggtaaagtaaaacatacgtaaaatccacacacatagattatttctttatgtggctcatagaagtcttagcatgcagtgattttaatgagttctgtattcacatatccttaaccctgaaagacctttgtggccttgctcagcaaactcattccytcaagcagttttgtacacaaaatagaatcttasgacttctatgatctcagtggatatatctggttggaggaaaaaaaaaagaaaagtataaacagtggatgctgctagccacaccattgataaacttgagataatcctaaaattcagagtagttctcattcattttgacttcagcttatatactctgggcttttttcagattggacggaaagtacactactctttcatcttcattcagtttcttgttctcattttagtacacagtgcttca

SEQ ID NO: 29976 - DNA, 599 bp, Chicken  19866894249405_1
  misc_feature (1)..(80): n is any nucleotide
nnnnnnnnnnnnnnnnnnnnnnnnnnnnnnnnnnnnnnnnnnnnnnnnnnnnnnnnnnnnnnnnnnnnnnnnnnnnnnnnttcccagaacatgcctgagaactgtctgggaaagcactagctgacacaagctgaaaaagggcctagagaatacccccctgtgaggaaaggctgagtgtcctgggtctcttcatcctgtggaaaagaagactgagaggggatctgataaacgtttataaatatctaatgggaggtgggaggcaaaaggatgaggcctggctcttcttggtggtgcgttgcrataggatgaggagcaatatggcctcaaacctgaacacaggaagttccatacaagcacgtggaagaactttatggtaaaggtgatggaacactggaacaggatgcctagagaggttgtggagactactgctatggatgtattcaagacccatctggatgtctagctgtgtgacctcttgtagggtacctgctttagcaggggggttggatgtgatgatcttgaggtcccttccaatccctgcaattctgtgattctgtaaagtcacaccagaggctgtgctaacactgcagaggtagaga

SEQ ID NO: 29977 - DNA, 600 bp, Chicken  19866894249405_2
atgcctagagaggttgtggagactactgctatggatgtattcaagacccatctggatgtctagctgtgtgacctcttgtagggtacctgctttagcaggggggttggatgtgatgatcttgaggtcccttccaatccctgcaattctgtgattctgtaaagtcacaccagaggctgtgctaacactgcagaggtagagattgttgggtcccatctcaataatatcatccaactgtgcttaacattttatttgatccagtgctctacactttacataaggccaacacagttttaaattccrctgacaagctatacatcataattgacctatacaattaattaaaagcaatggcaaaagcaagtggaatttaaccttaatcagtgcccaaagacattaggatatctgacgtcattctgaaacttcaggtcactcagaaacagatttatttcaagaaagcacaagaaagttytaatgtttgagtgtctgaattactaaaatatgacaatattatgaagaaagaataatgaaaacttttgcagcactttctgaggtgttcaatttaggtcaaatgtaycataaaaaaaccctttcttatgtatt

SEQ ID NO: 29978 - DNA, 600 bp, Chicken  19866894249405_3
gaggctgtgctaacactgcagaggtagagattgttgggtcccatctcaataatatcatccaactgtgcttaacattttatttgatccagtgctctacactttacataaggccaacacagttttaaattccrctgacaagctatacatcataattgacctatacaattaattaaaagcaatggcaaaagcaagtggaatttaaccttaatcagtgcccaaagacattaggatatctgacgtcattctgaaacttcaggtcactcagaaacagatttatttcaagaaagcacaagaaagttytaatgtttgagtgtctgaattactaaaatatgacaatattatgaagaaagaataatgaaaacttttgcagcactttctgaggtgttcaatttaggtcaaatgtaycataaaaaaaccctttcttatgtattttatttatccattgactattgtacttctaaattcaaagaaactaagcacatttccttacaatggactttcctgagaaacaaaactaagggaagtgaaaaaaaaagtgtgattctgatattgtaaattaacaccaaaacagaagaattataatttttccctcatgtaagc

SEQ ID NO: 29979 - DNA, 600 bp, Chicken  19866894249405_4
taaggccaacacagttttaaattccrctgacaagctatacatcataattgacctatacaattaattaaaagcaatggcaaaagcaagtggaatttaaccttaatcagtgcccaaagacattaggatatctgacgtcattctgaaacttcaggtcactcagaaacagatttatttcaagaaagcacaagaaagttytaatgtttgagtgtctgaattactaaaatatgacaatattatgaagaaagaataatgaaaacttttgcagcactttctgaggtgttcaatttaggtcaaatgtaycataaaaaaaccctttcttatgtattttatttatccattgactattgtacttctaaattcaaagaaactaagcacatttccttacaatggactttcctgagaaacaaaactaagggaagtgaaaaaaaaagtgtgattctgatattgtaaattaacaccaaaacagaagaattataatttttccctcatgtaagctagtacttattcaaatastagtgatatacatgaaatgtagcagtttctgtccactagcccaataagacatcaattatcaagcttcaataaaaatatgcttaaaaa

SEQ ID NO: 29980 - DNA, 600 bp, Chicken  19866894249405_5
attactaaaatatgacaatattatgaagaaagaataatgaaaacttttgcagcactttctgaggtgttcaatttaggtcaaatgtaycataaaaaaaccctttcttatgtattttatttatccattgactattgtacttctaaattcaaagaaactaagcacatttccttacaatggactttcctgagaaacaaaactaagggaagtgaaaaaaaaagtgtgattctgatattgtaaattaacaccaaaacagaagaattataatttttccctcatgtaagctagtacttattcaaatastagtgatatacatgaaatgtagcagtttctgtccactagcccaataagacatcaattatcaagcttcaataaaaatatgcttaaaaactacagggtaccgtatgtgttaacatagagactgcagtttaacagtgtgctgaacagaaacagagcttctgtgatcatccaggtgtgatcatagaatggggcaaatggaatgtgagacaacaatattattcagctttcattattcactaagctttgtgttaagtacctggatcatgagtctaagcttcataccaactgagattttgaaatagt

SEQ ID NO: 29981 - DNA, 600 bp, Chicken  19866894249406_1
tatttagccctaagcaccttgcatgtgctgtagcgctttgcggaaaagcagacttgcctgtctaaacattataggtttctcctacagacactcagccactgtttggcactgttatgctctgccttgatttggtcatgagtcctctagaacagagatttttgttctgctcaggcatatggcatcatctccctcagctcagaaacacatctccaaggctgaacgtactgcagggccgctctgtggacatcagggagtactcatgaacaacagtagatcttgctgcaactaaacaaatctgaygyacttttttcacacagacccacagttggaaatcagagttttggaactggtctyacagaattcaaattggtaaagtacttgtaaatccctgagttggaaggttgagaaatagcagattctaatctaattcaacagagaaaaaggacagccctggtagaccaatttctgtgaagtgctgttaattcctgttgcatctttaaaatgacagatgactactaatccttgctataatatttatctagaagatattgggatgaaggtttctgattgtaaccaacttccaatggctacaatgcagcc

SEQ ID NO: 29982 - DNA, 600 bp, Chicken  19866894249406_2
tttagccctaagcaccttgcatgtgctgtagcgctttgcggaaaagcagacttgcctgtctaaacattataggtttctcctacagacactcagccactgtttggcactgttatgctctgccttgatttggtcatgagtcctctagaacagagatttttgttctgctcaggcatatggcatcatctccctcagctcagaaacacatctccaaggctgaacgtactgcagggccgctctgtggacatcagggagtactcatgaacaacagtagatcttgctgcaactaaacaaatctgaygyacttttttcacacagacccacagttggaaatcagagttttggaactggtctyacagaattcaaattggtaaagtacttgtaaatccctgagttggaaggttgagaaatagcagattctaatctaattcaacagagaaaaaggacagccctggtagaccaatttctgtgaagtgctgttaattcctgttgcatctttaaaatgacagatgactactaatccttgctataatatttatctagaagatattgggatgaaggtttctgattgtaaccaacttccaatggctacaatgcagccac

SEQ ID NO: 29983 - DNA, 600 bp, Chicken  19866894249406_3
tgcctgtctaaacattataggtttctcctacagacactcagccactgtttggcactgttatgctctgccttgatttggtcatgagtcctctagaacagagatttttgttctgctcaggcatatggcatcatctccctcagctcagaaacacatctccaaggctgaacgtactgcagggccgctctgtggacatcagggagtactcatgaacaacagtagatcttgctgcaactaaacaaatctgaygyacttttttcacacagacccacagttggaaatcagagttttggaactggtctyacagaattcaaattggtaaagtacttgtaaatccctgagttggaaggttgagaaatagcagattctaatctaattcaacagagaaaaaggacagccctggtagaccaatttctgtgaagtgctgttaattcctgttgcatctttaaaatgacagatgactactaatccttgctataatatttatctagaagatattgggatgaaggtttctgattgtaaccaacttccaatggctacaatgcagccacataaaaaaaaaaaaaaggagcatcaacttatgcgaatgcagttatgggccct

SEQ ID NO: 29984 - DNA, 600 bp, Chicken  19866894249412_1
tttgcctcccagtgatgctgttaaagaatgtgaatatgcacaacatatggaacagatcatttcaaatctctttgaatgttaacctaggtatctatgttttataactactctgtgtatctgaaaactctcgatcacaaatgacctactcagcttgaaaaatgatgacacagagatgtctaaactttcatctgccagggatacattattattgggcatatttaaaagtcaaacacattgtagactataaaatatcaaaggtcctttgtaccactaaattgtgcttggacctgtatgttaaastgaaagatgagagttttatcactgatgtctctgtaaaaatacaaatggagccagaagtaggatttatctaacctggaagtagatgtctacagtgttcatctttgagctttttgtctagacttctcttatattgaatggggagagaaaataacattcctagacgtgatttacttaagcttaaagaagatatctaaaataggctggaggaattatctcctatagcgttattatgaatgtaattttaatagagtgaacgtagtatgagtagctcagataaaaaagcttcctttgtacaactag

SEQ ID NO: 29985 - DNA, 599 bp, Chicken  19866894249417_1
  misc_feature (1)..(81): n is any nucleotide
nnnnnnnnnnnnnnnnnnnnnnnnnnnnnnnnnnnnnnnnnnnnnnnnnnnnnnnnnnnnnnnnnnnnnnnnnnnnnnnnntaaaacttgaagcctatttctaacctaaagtaaaggcagtataacagagtcagctcagtccagccttattgaaaatgaccttctgctgtagttgttgcttcaagtctcaacttgaagagagttgttttcccaagctttttgtgttgtgctgaggggaagaaaaggttagaaggggggaaatggctgcaggaactcacaggttgttgtttagattttggrgatcagtctttgtgtaataatttcactgaatgagattaagagatttccttatgtgttgtcttacatcagaccatcttggaggactgtgtgagcctccatcacgctcatctaacggagctgtgtgaaggagcagtgatgctgttccctcgtgctgaggaggaaagagaagcggagagtgattaaaccctgatattcaatggtggctcaccgagcggttcatttttagggtgcycaaaatgtgccaggtttctcttttgggattgcttgtttggatcgagtakgtgttttgtgtggccaga

SEQ ID NO: 29986 - DNA, 600 bp, Chicken  19866894249417_2
aggggaagaaaaggttagaaggggggaaatggctgcaggaactcacaggttgttgtttagattttggrgatcagtctttgtgtaataatttcactgaatgagattaagagatttccttatgtgttgtcttacatcagaccatcttggaggactgtgtgagcctccatcacgctcatctaacggagctgtgtgaaggagcagtgatgctgttccctcgtgctgaggaggaaagagaagcggagagtgattaaaccctgatattcaatggtggctcaccgagcggttcatttttagggtgcycaaaatgtgccaggtttctcttttgggattgcttgtttggatcgagtakgtgttttgtgtggccagaattaagggttagtatcctccaaatcaaatttcagaacatgctttctgcagggatggagcaatgcagcccttcgctggtctgatgcggaggcagatcgacggcctttgtctcaggctttctgcacagactttaaggttaaacaggaaaaaagaagtggaaaaaacttctcaagtctgcagcatgttcctcttgtgggcactgtgcagcagaggagcaagcgacagttttgtaac

SEQ ID NO: 29987 - DNA, 600 bp, Chicken  19866894249417_3
ttgttgtttagattttggrgatcagtctttgtgtaataatttcactgaatgagattaagagatttccttatgtgttgtcttacatcagaccatcttggaggactgtgtgagcctccatcacgctcatctaacggagctgtgtgaaggagcagtgatgctgttccctcgtgctgaggaggaaagagaagcggagagtgattaaaccctgatattcaatggtggctcaccgagcggttcatttttagggtgcycaaaatgtgccaggtttctcttttgggattgcttgtttggatcgagtakgtgttttgtgtggccagaattaagggttagtatcctccaaatcaaatttcagaacatgctttctgcagggatggagcaatgcagcccttcgctggtctgatgcggaggcagatcgacggcctttgtctcaggctttctgcacagactttaaggttaaacaggaaaaaagaagtggaaaaaacttctcaagtctgcagcatgttcctcttgtgggcactgtgcagcagaggagcaagcgacagttttgtaacagattgccagagagcttctgtgtctggaggtaggggaggaaattggttg

SEQ ID NO: 29988 - DNA, 600 bp, Chicken  19866894249429_1
ctccattctcaggattaatgcctttatactctgctcatcgccctcctttacccacagcaagatgagggcagagatgtgattctaaggagcacgatttagtgggcaatactggtggtaggtagatagttgggttagttgatctagaggtcttttccaaccttaacaattctatgattgtaagaatatgatcaaaccagaccttgggatgggctttctgcttcatgtgtccaagacatttgcattgccaacccccgctctgggtcctgcccagggctggctttcttttagcaggtcctgatwtgaagatgttacctctccaggcaacctctgcttcagctccaatccttgggagatgcccttaggggaaggcagcccttggtgttcttcttcccctatggccaatgtggcctcaggcatcgggtacctcagggtttgggatcaagtgttacccattgggattgtttgcatctggtttagtctgcttatgctcctaaaatttgatatccgaccgtgcttgcgcccatggtttgatttgaatttcctttattcacaataaataatacacaacattacaaagaactcacacaaaatcaaaaaaat

SEQ ID NO: 29989 - DNA, 600 bp, Chicken  19866894249429_2
gatatccgaccgtgcttgcgcccatggtttgatttgaatttcctttattcacaataaataatacacaacattacaaagaactcacacaaaatcaaaaaaatatatatatataataattgctttctttctgcagccacaaataaacgggatgcaccagcaccagctaacgcgtgaaagagcatctacgagcagcataggtggggagagagctggggggacttgctgtgcccacctgtccaaagtagttgttcctcttgctggtgtctgcactgtgtttccatcccatgggccaccaaaggyggggtgagatcctgcgcgtgccaaatgcccacacaatgctcaggcatcccagaattgtgcagatctcacatcttgaaggacggggatgcagccgttgggtgtgggaccaccacggagggctgctctgggcaacctcctttgctgggttcagctggcagcagtaaagctgggagagcttctagcrctcacgctcatgtagaggggttatatacacacactgcaatgctccgctccttcttagtcacggatggcctttgagttagaaggcttttgcctaagagtctactgtagctggatgtg

SEQ ID NO: 29990 - DNA, 600 bp, Chicken  19866894249429_3
acgagcagcataggtggggagagagctggggggacttgctgtgcccacctgtccaaagtagttgttcctcttgctggtgtctgcactgtgtttccatcccatgggccaccaaaggyggggtgagatcctgcgcgtgccaaatgcccacacaatgctcaggcatcccagaattgtgcagatctcacatcttgaaggacggggatgcagccgttgggtgtgggaccaccacggagggctgctctgggcaacctcctttgctgggttcagctggcagcagtaaagctgggagagcttctagcrctcacgctcatgtagaggggttatatacacacactgcaatgctccgctccttcttagtcacggatggcctttgagttagaaggcttttgcctaagagtctactgtagctggatgtgttcacgtgcacacatgagcccatgtgtggagtttcttcctccaattctgcttggttttccacttagctcctacggtggggtcaactccatggatttcttcctctcctctctctgttcttcccattcctcctctgactcgtaggtgcccttgacgatggccaccctgtctgacatgttcatgcag

SEQ ID NO: 29991 - DNA, 600 bp, Chicken  19866894249430_1
aaataaacatgggaatcaaaatctacccttgagatcttttaaaattctttttaaaatctttagagagtgtgctttctcaaaactgttttctttgttatcctaggttaaatcctggttcttggtaccagctgtgtttgctactaaaactacaataaagacatagaataaatcctaatagctcacatgcaaagacaaatcccctccttaatttaaatggatacttctttactctgttctgtggaattccagtgggatggtttcaactctttaagaacttttgaaagaaccgcagaaacatgygtccatgtggaatgctctcagatgcaccattttgtggttttccccttagttcaagtcctgcatgtgcattgcactgaaatagttaagttccaagtgtatgaaaatgatttcataactacacacttttttaaaagacggggatgtgggttttctacatctgctaatgggttttgtggccgtaatgctatggcaatgcacaaggatcttgttatgtggcagcttaagttcaaataacacaatcctccttgtattagtgaactgtcttttaaaattcctaaaaataatctaatatatggttag

SEQ ID NO: 29992 - DNA, 600 bp, Chicken  19866894249431_1
ggtggctgaggtgttccctggctgcttagactcaggtaaatgaatagctctaatatagagaggaaatcacacagaatcctgttgtctggatatttccacaaaatttccctccaaggtaaaaatctgcttttcacactgcactcccaaatgtagaaataaacaggaaaaacaagcttctcttttactgattcattttccttggtgtcaaggcagcacagaggtgtgagttgagaatattgatgacgctcagcctgaccaggcagtgctgcacagcccctatcaacacatgcattgagcacygagagggcagaggatatgtttgtacctttcctttctcatggagcatttctgcccgtggcttccttctttcagatgccagacttacctctccctgaatatttctggttgcagatggttgtcagcaaattactttgctgtttaatgagactggcttccacttaaggctgcctatgttttacatctcctaatatggtagccaaagtagtctatcctaattttaggaaatgttttctgtccttcggctgccccagatcagacagagctgtstgctgaaagccttcacccatataggaggcagtt

SEQ ID NO: 29993 - DNA, 600 bp, Chicken  19866894249431_2
gcacagcccctatcaacacatgcattgagcacygagagggcagaggatatgtttgtacctttcctttctcatggagcatttctgcccgtggcttccttctttcagatgccagacttacctctccctgaatatttctggttgcagatggttgtcagcaaattactttgctgtttaatgagactggcttccacttaaggctgcctatgttttacatctcctaatatggtagccaaagtagtctatcctaattttaggaaatgttttctgtccttcggctgccccagatcagacagagctgtstgctgaaagccttcacccatataggaggcagttgttcccaataaacagcctgtttcactcagacacttttaaaaaccaccctccaaatctcattgcaagcctagtattttttttttcctggccacctggcagaccagagcctccagggaagctagaacttggttcctgcatgattactggaagaaacttgaaacaggcttgcaaccaaccttcacagagtgcccaccaaactgcctgctcccagcgggcaaatgcttgtctttttttacatcaaaaagacacagtacaaaggcgctaaat

SEQ ID NO: 29994 - DNA, 600 bp, Chicken  19866894249435_1
ctcttttttaaaatgattgcttgttccagtaaataatcctgtcagtttgttctgcataatctgaatgtgctatgtgaaaaaatgacagacatcatttgtcctagaggtttcagtcaaggaccagtatagtgtgagtgaagtccaaggtacataggaaagatttaggaatttgaccatgcagtgcaggttttagacagctgacactttatgcctgctctttgtagtgcataggctagcaatcccttttaaaggcaggaagtatgcaggagaaacttctggaaaggaccaagacctccatcmagagaacatcagtcatcttaatctagttattaactaccgtttatgttaagtcttgtatttcataaagtgtttgtaaccactcatatcttagttgaagtaagtccatagtggatgaatacctcaaattgacaagattaattccacccaatatgtgagaattgtggatgtgacgtttccttcttttacrggtaccagctagcttgacttgagccactgtaatttccagtggttgtgatggtgacattacagaatgattccaattagtgctgcatattgtctttgcattttgcccatyctcta

SEQ ID NO: 29995 - DNA, 600 bp, Chicken  19866894249435_2
ttttagacagctgacactttatgcctgctctttgtagtgcataggctagcaatcccttttaaaggcaggaagtatgcaggagaaacttctggaaaggaccaagacctccatcmagagaacatcagtcatcttaatctagttattaactaccgtttatgttaagtcttgtatttcataaagtgtttgtaaccactcatatcttagttgaagtaagtccatagtggatgaatacctcaaattgacaagattaattccacccaatatgtgagaattgtggatgtgacgtttccttcttttacrggtaccagctagcttgacttgagccactgtaatttccagtggttgtgatggtgacattacagaatgattccaattagtgctgcatattgtctttgcattttgcccatyctctacatctgcttgaactgtgacacattgctgatggtttgaagaaatgaggaagcacatcagagaggcctgaactgctgttcagttctgatgaagctggcaaaactggcaggtgaaaactaaggagtttccttaatgctgaaaatgacaaagatccgctattctgtttgattttgcacatattgagcacac

SEQ ID NO: 29996 - DNA, 581 bp, Chicken  19866894249435_3
catcmagagaacatcagtcatcttaatctagttattaactaccgtttatgttaagtcttgtatttcataaagtgtttgtaaccactcatatcttagttgaagtaagtccatagtggatgaatacctcaaattgacaagattaattccacccaatatgtgagaattgtggatgtgacgtttccttcttttacrggtaccagctagcttgacttgagccactgtaatttccagtggttgtgatggtgacattacagaatgattccaattagtgctgcatattgtctttgcattttgcccatyctctacatctgcttgaactgtgacacattgctgatggtttgaagaaatgaggaagcacatcagagaggcctgaactgctgttcagttctgatgaagctggcaaaactggcaggtgaaaactaaggagtttccttaatgctgaaaatgacaaagatccgctattctgtttgattttgcacatattgagcacactagtgttctgttagtcagaaatcttttcattatactctactcaatggagtgagtgtataactacacttacagaaaacagaaggaaaaaa

SEQ ID NO: 29997 - DNA, 600 bp, Chicken  19866894249441_1
aggtagagcgatgcacgggcactacgcaggtaagagtagtgatctcacagtgatctcctagtactgtcccagagagccaggaatccctgcaactatgtcctctggcagatacagccttgttactgatgttatcttttgctgtaagagaaaggagctgtatttgtgttacacgagacagcaagatcttaaatatgttcttttgcattttttgcctttttctcctttctgtgggttttatctttactctcctcagacacagagctttgtgttcccaaaagagcatacctgcagacatgcacrgcattttatgaagtccgtaaataccctgtttgtagggtactaagttgtttgcccttggatgatgttcttttaacctgagcatgtttcagtgactcacaggtcccacgtctgtacatctaaaagctgtgtacttgcatctcttgcctgtttttgctgtgtgccttgtgagatgagcttgctgattcccgcgggatgctgatcccagctctctacagctttatgtaaaaacacctttaatttactaagctttaagtaagttagcaatctttatatgtgggtgcatccaatgcagtgttggaa

SEQ ID NO: 29998 - DNA, 600 bp, Chicken  19866894249446_1
gctgcatgagtatccctgtttaactgcagtggtgaagcagggcatgctgggagagttctcctttccatggtcccctccctccagccctttgtgctcttccaaaataatgctttaagccctcatctagctgtggcccctcatctcaaaggtgcatatgaaggtgaggaagatggacctcatctttgctttgaaggcagcatcagcaaggtatacctgttcccagagaaagcaatgttccacttttgcagccatatgggtgcagagcaatctctggctgtgtcagcaagtcctccagtgcaktgcagaatgagagcagtcacactgatgaaagaccaagttaacgggtttcccataaatgcagacatagagcactacatatcttggcaagcacctctgaagctctcctgtttgtggttttaaggttaaaagctgtcatcacattcttagcttagaaacaaggcggcatgctattaaacaaaattgagaactggagatcgcttaatttctgtattttcactttccattcactgtgcacaggaaaggaggccacagtgaactgtcttggactagactggagaaactggatttaagcacaactcc

SEQ ID NO: 29999 - DNA, 600 bp, Chicken  19866894249447_1
ctaaatcaacaaagaaaacaatgggatagtagtaagatcttttcactccgaggatgtatgtcaattccctctgctgtccttgttccagaaaactggtttctctgcattcgtctttgaggttgtttttcagacatgtttgcttccaggattcttgcttccaaaccccgctgactgtgatttgttttcatttctcttcattgtgactcctgctgaaactgactggtgacttgatctattcttaaatattttgggatgctttcactgctgtgttaatttctctgttgcattgtttactctttytgaaagacgttaaatatggtgactccgacgctgcgtgtggaagactgcagtatagcacttttaccacgaaatcatgaaaagaatcgctgtatggatgtcctgcctccagacagatgcctgcctttcctcataacgatagatggggggagagcagcaactacattaacgctgcactgatggatgtgagtctcctccacctcattaataataagaagggagtaaggagccctccaaactgagcggggccagaaagtggagtcagcacaaggctgaaatccttctagcttgttttccaaaaac

SEQ ID NO: 30000 - DNA, 600 bp, Chicken  19866894249451_1
gttgtttagtataacaacagataaactggcaaacatcagaggcttggaaagagggtgggtgggatcggcatgcctctctctcagactggctgctcaccaaccaagtctaagtaacaacgcaaatctgaatgtcccattcctcttaaggaaccagttactcttaaacgggtcgtcattacctcggtgcccttgtcctatgggttgcagtgatgtctgattccttactaggcaccccagaggccaagctctgaacataagatatgctgtgtaacgctatgtactctgcaaaacggggcctcmcactgcctataccatgttagtgttcttattgtccatgagtctctatcacctcatgataaactggggatgacaataccagttccctagctgaggtgtcaggaagtgaaatgaacattcattgctgttagagttgaatattttctaagtgccaaaaaagcttgttttttcagactaggatctgaacgaggtgaaataaatatggtaggctgtcttacaaaaagagatggagaaaatgttaaacagcttttaacaaaagaacaaccatcccccagtgcactgaatgaggcatgggcttccgag

SEQ ID NO: 30001 - DNA, 600 bp, Chicken  19866894249455_1
actctgtgcttagctaacatcatttcctaattgcaacagtctgctttttggctgcagacagctttgttgtttgatttctaataacctttctctgtgaaaatacaactttccttgctgcagcagacgactgggggctctggagggcagctctctgtctccagggctggacgattgcaaacacccacagcaacttgtctgtgctttcatcacgtactttgttcaatgttcttctctattcccacagtgacaaatgtcttcctcggtgaagtacaaaaacccaaatccatgccgttgttttaytgtctggcttcaaatgtgaatatgagaggagtaactgagcactgctgcattagagcctggtatcccagcagcaccagcaccagtgttggatgaggcaggagaacaggaggtttagggctctgtttcaaagctggtctgcagaaagatgaaggctgaccyaaagtacccaaattccccaackttctgcaaatggagtatctcagctgtgtgcccgaggggtatgctgggagctgcttcagagcagcagagcagtggcggttggggcagctgccttgtcccctcacaagtgtaagaagggta

SEQ ID NO: 30002 - DNA, 600 bp, Chicken  19866894249455_2
agggctggacgattgcaaacacccacagcaacttgtctgtgctttcatcacgtactttgttcaatgttcttctctattcccacagtgacaaatgtcttcctcggtgaagtacaaaaacccaaatccatgccgttgttttaytgtctggcttcaaatgtgaatatgagaggagtaactgagcactgctgcattagagcctggtatcccagcagcaccagcaccagtgttggatgaggcaggagaacaggaggtttagggctctgtttcaaagctggtctgcagaaagatgaaggctgaccyaaagtacccaaattccccaackttctgcaaatggagtatctcagctgtgtgcccgaggggtatgctgggagctgcttcagagcagcagagcagtggcggttggggcagctgccttgtcccctcacaagtgtaagaagggtaagaaatgcagggctagatctagatcctgtctctgtctcaggatggcccagccctgtggcagcacttcccagtgaccagtgccagcaaaagctcccaggcacatgcttaactttcagcacgtgagtagccctattgaattaaggatgtaatcaagtgatt

SEQ ID NO: 30003 - DNA, 585 bp, Chicken  19866894249455_3
ccacagcaacttgtctgtgctttcatcacgtactttgttcaatgttcttctctattcccacagtgacaaatgtcttcctcggtgaagtacaaaaacccaaatccatgccgttgttttaytgtctggcttcaaatgtgaatatgagaggagtaactgagcactgctgcattagagcctggtatcccagcagcaccagcaccagtgttggatgaggcaggagaacaggaggtttagggctctgtttcaaagctggtctgcagaaagatgaaggctgaccyaaagtacccaaattccccaackttctgcaaatggagtatctcagctgtgtgcccgaggggtatgctgggagctgcttcagagcagcagagcagtggcggttggggcagctgccttgtcccctcacaagtgtaagaagggtaagaaatgcagggctagatctagatcctgtctctgtctcaggatggcccagccctgtggcagcacttcccagtgaccagtgccagcaaaagctcccaggcacatgcttaactttcagcacgtgagtagccctattgaattaaggatgtaatcaagtgatttgctgga

SEQ ID NO: 30004 - DNA, 600 bp, Chicken  19866894249467_1
atgccaattgtgttaatatacaactgctgccactttcactttatattacagtgggatcggcaaagatgtttgttatagatgaatagagttgattatcgctgattacagatgcactaattaacgcagttttatttgttccaaaaccctattaataatcaattctgaaagatttgggcagtcatgtgcaatttgacatagttttaatcaccagagtaagatgctgcagtccatttagagaataatgaagagacaaaaaagaacaacaaaccaaaacacacacacacacaaaaaaaaaaaaamcaacccaaaaaaccaccaacacagaaactgttggcagagaatcagcatacctaaaataggccacttttcaatctaagcagcttgctaatcaccttcaccatcctgacagttcagacaatgaggatttagagttcagcctataaaacaatgtttaaatagaggtgtaaaactgtgccaaagctttcgcacatgagccaaggaggccacacttggccttgtagaaacatacattaaaaagttgccctgagtgactaaaagttaacattaaaatcaattgtgtgtctggaaacagcgtctctt

SEQ ID NO: 30005 - DNA, 600 bp, Chicken  19866894249478_1
tggcaagattcctcctgggcctcctcttctccaggctgagcagccccagctctctcagcctcttctcataaggggaggtgcttcagtcccttcatcgtcttagtgaccctccactgggctatttccagtatgaccagatccttcttatactggggggtgttacaaagtgatagagggtgcaggggagcatggagatgagctctgacttccaaaccagaacaaaccaagatctacaaaaagggacatctgaagtggatcgttttcttgcatttgtgaaaactgttagaaacatccatcttrtcccctttacagtacattacagacttctgtcctttcaggcacagatcacaaggtgtcattgctggcaaagctctgcagacttgtatctactacctatcactgagatactaagtgatagctaatggaatacaatctttgctgtctctaaggcatcctgcttgagatggataattgcagcagtattttaacctcagcagatacctgctttcctccccaccttgtaacacctycccacctatatagctgttgcaggtcactgtggaagcaatagtccctgacattgtgctgggtgatgtttgg

SEQ ID NO: 30006 - DNA, 600 bp, Chicken  19866894249478_2
ctacaaaaagggacatctgaagtggatcgttttcttgcatttgtgaaaactgttagaaacatccatcttrtcccctttacagtacattacagacttctgtcctttcaggcacagatcacaaggtgtcattgctggcaaagctctgcagacttgtatctactacctatcactgagatactaagtgatagctaatggaatacaatctttgctgtctctaaggcatcctgcttgagatggataattgcagcagtattttaacctcagcagatacctgctttcctccccaccttgtaacacctycccacctatatagctgttgcaggtcactgtggaagcaatagtccctgacattgtgctgggtgatgtttggatacatgtgaagttatctggtggtttgaacaacccttgctgcattaacagtgttccttatttgttgcagcaagcctgttgactgcatccttcaggctaaagctgggctgtgggccaccaacaggaatacactccagttgacatgtaaatgggttcagtgcaagtttgtgatcgtttcaccaatctattgacatcattgcatcaaaattaattatatccattttttacatc

SEQ ID NO: 30007 - DNA, 600 bp, Chicken  19866894249479_1
ctcacatcccactctcccttgacatcctctgaacacgatctcacatttcagcaacaaattcatctgcgttcctacaaacaatctctccttcactgcacagcccaattcactcttcaggccatcttattcttggtacagcacgaggcaggactgctgctgaaaaacagtgcacagtcagataatttaataacactgggaaaggcagaataggtttcctcaagtccatttgatcttgaaaactccagaatccatttttatctcttgatcttccaagccttttctcaaaactgtaagtacacrttaagcttggctcaatatctggactcttttttcagaaaacctgtgaaactgttagtttccgacaaaatccaggatctagagtgctaagtggcattttgactttatgatctttgttggtccctttcaagtgaattattctattgaagtctcatcatcaaacaatttggtctctgctgtttctcaggcacgtcagggatggaatatttaagactccctatatacttcgtgacatatttctcaacaaaagatatgggaactaattaaaaatatacttaaaattaagtgtttcacaaatgtggc

SEQ ID NO: 30008 - DNA, 600 bp, Chicken  19866894249481_1
caattccttttaattttaactgaagcatcatttcatacaaataataaaatagattacataatcccttgtttataattttaagccagccttagaaaagaagacaatttcataaacactaccttgtagaatccaagtattgctttcatcagtaaatttttttttctgatcagaaccagattaattttttctgctatgtgaaatcctgaattcttggcaatagcccaaagtgcgggaagctggcctctgcaggtattgcaagaaaccattaatgaggcataaaagaataaaaaagaacaacastaaagagttctgctaacagagggaaaatgtaaacctggtcagtgtccaaaggagtagagaaaatcacagcctcagctctttgaactcactctgcgttctacagactccagccattgtgctgcacaatagtgtttttatgtgggtatcaatgtcactaccctgacataaatctctgatggaggaatgttttaaactcctcagattaaacatcctgctagcctaatcctggtaaatgcaggacatgggaacaagttctattctatttcatattggagttaaattatactgcctagataattt

SEQ ID NO: 30009 - DNA, 600 bp, Chicken  19866894249482_1
cttggactggtaacccttctcacaaggacgcagcctttcacaagacttggaccaacgttatccgatctgcaccccaagctgaatctgcactgtgctaactactgtgactgatagctctcttgctagagcacctgaggatagaccaaaacactggggccgtgtgacatatctactggttctgttgtgttattgaacgatgagatggtttatgacatacttagaactgttttagctgaaccagtttcttggagaaccaaaattactggattgaagatttccagaaagtattaggcatttggrggactcaacttcagattcctgttttgtttcctcttactttctcatttccatgcttttctctttaacccactctacgaagagttctctacccttgtggtgtcatttcttcaaatctctatttttgactccaaagaaatcattgtatctttaaaagtaaaggtcctgcctcatgctgtatgagggcacgaagctggtagttaagaaggctgaggctggtatcccggctctgctgaagttggggaaatcttactgttccttgtgctctgtttccttcactacattgctttgttttatccctct

SEQ ID NO: 30010 - DNA, 600 bp, Chicken  19866894249484_1
gcaagaccaaatttttgatacaattccttaagtctgctagttccactagtaaaatcaattctaatcaacttctaattttggaatcagtcaagaagtaatagcagaaaaatatgatttcactttgggatcctttttgactgacaaatttaaaagttaagtaccaaattaatttagtataattaaatatagtttccaggaaatttgttacattgtgggctataaacttttcctgcttagccatacaacaatcacagtacatccaatagtgcagtagcctctttctcattgcattgtcaacartcattctctgcagtttarcaaattaccaataactttgtctgcactcaaccttgtgctccttgttggcactatatcaataacagtacatatttagtgcactctttctaattgcacaagccttcagactcagtttttccccagttttggaggaaattatacaaagtgtaaaatttcccattttagtagatactttcagcattcaattcatagtttgtcagaaatagttcagctgtgtgcttgtcaaagacacaatattttgaagcatatttgcacaggtaagagccaatattttcttcctag

SEQ ID NO: 30011 - DNA, 600 bp, Chicken  19866894249484_2
tacaattccttaagtctgctagttccactagtaaaatcaattctaatcaacttctaattttggaatcagtcaagaagtaatagcagaaaaatatgatttcactttgggatcctttttgactgacaaatttaaaagttaagtaccaaattaatttagtataattaaatatagtttccaggaaatttgttacattgtgggctataaacttttcctgcttagccatacaacaatcacagtacatccaatagtgcagtagcctctttctcattgcattgtcaacartcattctctgcagtttarcaaattaccaataactttgtctgcactcaaccttgtgctccttgttggcactatatcaataacagtacatatttagtgcactctttctaattgcacaagccttcagactcagtttttccccagttttggaggaaattatacaaagtgtaaaatttcccattttagtagatactttcagcattcaattcatagtttgtcagaaatagttcagctgtgtgcttgtcaaagacacaatattttgaagcatatttgcacaggtaagagccaatattttcttcctagtggcatctattccatcca

SEQ ID NO: 30012 - DNA, 599 bp, Chicken  19866894249489_1
  misc_feature (1)..(64): n is any nucleotide
nnnnnnnnnnnnnnnnnnnnnnnnnnnnnnnnnnnnnnnnnnnnnnnnnnnnnnnnnnnnnnnngaactgttcatggctcctagaactgtcatttctaacgttcccataggattatatattagatcccactgctctgcttcatgacaagaaattgggtgtattcatttacatgggcttctcaggcactgcatcagcagctcagctgcaaggagttatttccgttagggaagggaatgggggagcactgcagagtgtgcataggtttgctatgcacagtgaggattgtgccaggactttgrtactggtgctaatgtgcaaatgcaggattttcctacttgatcaagacacrgttgatccaagygggcggccttatttttattattcaaatgaaatacaaatatgcacttgcagctttcaaaatatatgggtaaaacttgctctttcaaatagtcagatatgtgtgcttctgaaaacccagttaagctttctgccatagggtgaattttactcatggatgtagacaggtctgtacttagaacctgcatctcagtaactttaaaacaatttattttgaggggatctgtgcatgccagctgtt

SEQ ID NO: 30013 - DNA, 599 bp, Chicken  19866894249489_2
  misc_feature (1)..(14): n is any nucleotide
nnnnnnnnnnnnnngaactgttcatggctcctagaactgtcatttctaacgttcccataggattatatattagatcccactgctctgcttcatgacaagaaattgggtgtattcatttacatgggcttctcaggcactgcatcagcagctcagctgcaaggagttatttccgttagggaagggaatgggggagcactgcagagtgtgcataggtttgctatgcacagtgaggattgtgccaggactttgrtactggtgctaatgtgcaaatgcaggattttcctacttgatcaagacacrgttgatccaagygggcggccttatttttattattcaaatgaaatacaaatatgcacttgcagctttcaaaatatatgggtaaaacttgctctttcaaatagtcagatatgtgtgcttctgaaaacccagttaagctttctgccatagggtgaattttactcatggatgtagacaggtctgtacttagaacctgcatctcagtaactttaaaacaatttattttgaggggatctgtgcatgccagctgttcctgatgctacatttgcctagtctggtgcttcaacatgggtttaaatgtc

SEQ ID NO: 30014 - DNA, 599 bp, Chicken  19866894249489_3
  misc_feature (1)..(2): n is any nucleotide
nngaactgttcatggctcctagaactgtcatttctaacgttcccataggattatatattagatcccactgctctgcttcatgacaagaaattgggtgtattcatttacatgggcttctcaggcactgcatcagcagctcagctgcaaggagttatttccgttagggaagggaatgggggagcactgcagagtgtgcataggtttgctatgcacagtgaggattgtgccaggactttgrtactggtgctaatgtgcaaatgcaggattttcctacttgatcaagacacrgttgatccaagygggcggccttatttttattattcaaatgaaatacaaatatgcacttgcagctttcaaaatatatgggtaaaacttgctctttcaaatagtcagatatgtgtgcttctgaaaacccagttaagctttctgccatagggtgaattttactcatggatgtagacaggtctgtacttagaacctgcatctcagtaactttaaaacaatttattttgaggggatctgtgcatgccagctgttcctgatgctacatttgcctagtctggtgcttcaacatgggtttaaatgtcttattgtagatg

SEQ ID NO: 30015 - DNA, 600 bp, Chicken  19866894249490_1
aacacactaatatgagtgctcctgtataagctcatggccaaacaatttgggcagagggtaagggaggatggtttgaggggttccccatacatacacaccttttttgttccatttgtttccccctctttccctcttctctttataaaggaactcagcagagtgatatctttttttggacaatgcagagatacaaagtttggatgtcactccatggtcaggacaaagactgaggaaatgcagaacgactgctcaaaggtgcattgatttttcactgaaattcagtttatcatctataacaartagagaccttgcttccttaattcagaaaattagaaaacttcggagattgcgatgctctcagctgactgaagaacagtttgctgcctgaggaagttcgtccctgaattatttatctgtccatgaaggagaggtgctgatgcttcagaaccaattatgcagcagcaacagttaaaatgtcagccagacgagatttacatcaaggaccaaaagtattcccagtaatttccttgagttgtttcacaagaagaaagctggtataaaataaagcgtgccccctcaatacctcctgaacaatcagaa

SEQ ID NO: 30016 - DNA, 600 bp, Chicken  19866894249491_1
tcactgttgggatagtggggccagtagcttgtctctagatggtaacgaagcccgccaactaggagacattgccagagacaaatccatcgacaggggaattagtagatgtttggatggagctgcaaccctctgggaccgaatattaatagctgtgagggaaaggtatccgtacaaagaacttctgcagcctgcaatgaaaaagtgggatacaattcagaaaggagagcaaataatccaaattcttctgcaagctggttttgctattaagcgaagcaaagtaaaaggacctgcccaggagcytcagttcctaggtataaagtggcaagatgggcgccgtcacatcccagcagatgtgattgacaaaaatcactgccatgtctctgcccattaataagagawwcaatcttttctgggtgtagtgggcttttggagaatgcacatcccaaagtatagccacatagtaagccccctgtatcaggtgacgcgaaagaagaatgattttacatggggtcctgaacagcagcaggcttttgagcagatcaaacatgagatagcccatgccgtggccccggggccattatggacgggacaggatgtaaa

SEQ ID NO: 30017 - DNA, 600 bp, Chicken  19866894249491_2
tagtagatgtttggatggagctgcaaccctctgggaccgaatattaatagctgtgagggaaaggtatccgtacaaagaacttctgcagcctgcaatgaaaaagtgggatacaattcagaaaggagagcaaataatccaaattcttctgcaagctggttttgctattaagcgaagcaaagtaaaaggacctgcccaggagcytcagttcctaggtataaagtggcaagatgggcgccgtcacatcccagcagatgtgattgacaaaaatcactgccatgtctctgcccattaataagagawwcaatcttttctgggtgtagtgggcttttggagaatgcacatcccaaagtatagccacatagtaagccccctgtatcaggtgacgcgaaagaagaatgattttacatggggtcctgaacagcagcaggcttttgagcagatcaaacatgagatagcccatgccgtggccccggggccattatggacgggacaggatgtaaagagcatcctctacactgatgctggagagaaaggtcccagctggagtctgtggcaaagaagctcaggggagaccgtaggccgacccctgggattctggaa

SEQ ID NO: 30018 - DNA, 600 bp, Chicken  19866894249491_3
agtagatgtttggatggagctgcaaccctctgggaccgaatattaatagctgtgagggaaaggtatccgtacaaagaacttctgcagcctgcaatgaaaaagtgggatacaattcagaaaggagagcaaataatccaaattcttctgcaagctggttttgctattaagcgaagcaaagtaaaaggacctgcccaggagcytcagttcctaggtataaagtggcaagatgggcgccgtcacatcccagcagatgtgattgacaaaaatcactgccatgtctctgcccattaataagagawwcaatcttttctgggtgtagtgggcttttggagaatgcacatcccaaagtatagccacatagtaagccccctgtatcaggtgacgcgaaagaagaatgattttacatggggtcctgaacagcagcaggcttttgagcagatcaaacatgagatagcccatgccgtggccccggggccattatggacgggacaggatgtaaagagcatcctctacactgatgctggagagaaaggtcccagctggagtctgtggcaaagaagctcaggggagaccgtaggccgacccctgggattctggaat

SEQ ID NO: 30019 - DNA, 600 bp, Chicken  19866894249493_1
attttttagtcttaatgaaggacatcaagcaaagtggtgataaggagaaagaaacaactccaaagctggctattgcctatgcgcagccctttgccaaacagatttgctgccagattgtctgggtagttaggaatctcagacgctctgatgcccttgaggtctcagacacagctgcttaggaaaactgctttattgcatctgaactggtgaggcaggcggttgcattctgctgaaagatgaccaggttaccatgttccatgcttagctacagtgctccaggaaaacttccaagtgtatagrtcttaataggatttcattagttcaaaatacatgtgcctgtctccttgccagcttcctgactatattaccctgcactgctcttcatggagtacaagattaatctgatagggttagcccttttcttcaaattaatggtgtttccccagcaactctcctctttttcttctgaaatgataacctttcttgtctgcttcatttctcaggaatgttggagctgatgacaatgagttaggaaacctgtggaattggattgctgactgtgtaaagtttataatagatactaatttgacactcctcaga

SEQ ID NO: 30020 - DNA, 600 bp, Chicken  19866894249493_2
tgcactgctcttcatggagtacaagattaatctgatagggttagcccttttcttcaaattaatggtgtttccccagcaactctcctctttttcttctgaaatgataacctttcttgtctgcttcatttctcaggaatgttggagctgatgacaatgagttaggaaacctgtggaattggattgctgactgtgtaaagtttataatagatactaatttgacactcctcagaagagaataccagcctcatctcttccagctggcattatggcagctgaaaccaaaaatagccatcaaaaggraaaatgaggtttgaggagcaaaagacagtgaaatggaagacagaggactaatgactgcaaaagttgggaaggaaatcataaaaggaggccaatagcactgtcacaatagcagtaaacagttttttgttgttgttgtcgctgttattatttatttatttatttttaattctgtctgggaaagagtaaaacaagattatgagtcctcagagagaaagttaagaaggaagatatccagagctatcttctgaccttcctttagagtactacatttgtcacaaacagttttgatgcattgaatgg

SEQ ID NO: 30021 - DNA, 600 bp, Chicken  19866894249504_1
cactgatcgcaggtgagcaaacatcagtttattaaagtgtttgcatagacataacaaataagagatctgttttgagatgctgctcttactttaaatggttccctgggagggaggggtgcatattgtagttcataaggagcaaagctttaagaaggcgttgtagccagtctgagtcactgaaggcaaaagtgcttgttcattgccttttaattctgctttggcttttgctgctgtttttgtcaataatgttttttcttggtatcatttcataatacatgattcaaagtattggtggggggraaaaagtggaaatgcggcagctttttcatgcatttttttttccactgcatgccatccacaccggtgtctttgctggtttccttggaaactgttgcggggcgcagttggattggctgcattctccaaatgattgctggagtcgtgggcagttccaagtggtagacatctcataggttgcaccaagtaagtggcactgaatgattcacaatttaagattctttttattagcgttgttatttttgaagtaagccacatcaagcggtgtgtctgtaatgcctttgtgaggtgtgactgcaaaga

SEQ ID NO: 30022 - DNA, 600 bp, Chicken  19866894249506_1
ccttgtctcagttcaccgggggtcttttggactcttcactgaacattcagcttagaaagaggaatcaaatcaagctttaatcaagcattcaaatcactgcaggtagatccatttgacagcctcaataaccaagcactcctgtgacaaaaaccaccgacgcatgaaactcacatatgctgtgcggaagctgaagtaccaatgcaacacaatcatcagggactttccacagcagactaccaaccacacagcacagataaactttgtgttaataactctaatgccctgccatatacactaaaytggggaggaggagggggggtagtacagaaaaattcccagatgcccgagatcagtgcttcttttccatacgcataagcaaatctcactcaactgattcctggaatcacaatcatcctcttgagctccataagcagctcttcttggcactgctgccctgcactcaaactgctttcttctaccattgctgctgtccagatcttttactcaccacagtaaaattcactttttggaggtttaaattattctgttgagaacgaagaagcaaagctgttctcacttgataaagacctgaaaacaggt

SEQ ID NO: 30023 - DNA, 600 bp, Chicken  19866894249507_1
tgaatgttcccactgtataagggaatgggggaaaaaaagtaggaaatcttcaacaattctatggccccctttttgacttctattgttaggttagaagggtttttgagtgggatgagttttcagttattgaatgctttgtacagtggaatgttccatctttcagctcttgagtactgtgcttttcgaaacaatcatacacagtaggcagcaagctttgtgttctcaagatgactattttcacgtgctatttcataataaaccgaaagagacatctacagtaaaaatcagtgagagttttgyatgcccaaagcattatctgagtttcaaaattattgctcttttaattccttctyttcattgaagggttaattaatgagtacagcttgtaatgagcatgtctcggtttgtgagccttgcaataagtaagtctgggaacagtgcaagataaggcagcttatgatcaagttcattggtctgcaccatctgctcttatgctttaattttctatatgatgatctgtccatagaaggagaattcaaaacatactttcagggttctttatttattatatttgtgttgtatctgccggaagtatgtgat

SEQ ID NO: 30024 - DNA, 600 bp, Chicken  19866894249507_2
caattctatggccccctttttgacttctattgttaggttagaagggtttttgagtgggatgagttttcagttattgaatgctttgtacagtggaatgttccatctttcagctcttgagtactgtgcttttcgaaacaatcatacacagtaggcagcaagctttgtgttctcaagatgactattttcacgtgctatttcataataaaccgaaagagacatctacagtaaaaatcagtgagagttttgyatgcccaaagcattatctgagtttcaaaattattgctcttttaattccttctyttcattgaagggttaattaatgagtacagcttgtaatgagcatgtctcggtttgtgagccttgcaataagtaagtctgggaacagtgcaagataaggcagcttatgatcaagttcattggtctgcaccatctgctcttatgctttaattttctatatgatgatctgtccatagaaggagaattcaaaacatactttcagggttctttatttattatatttgtgttgtatctgccggaagtatgtgatggagagctgagaaatcttttatagggttaatcagacacaacactgaaaagtgt

SEQ ID NO: 30025 - DNA, 600 bp, Chicken  19866894249508_1
ggaaactgtttggtttccatggcagccactatcgattagcggggtgggaggggatgctgctgggaggatgctgcggccgccctgcatgcctggggctggcacacagggctccatatcgcctgtagagtggatttggagagcccaggcagccccacattggaagggttgacctcagggttctcccacaaggctgggaataatgagaatccaaaatggagttgagtgactgacgcagtcacggtgtccttgttgggtccacaagcattgcttcagggtaatgtggggaggcagtggggaagrgccttctgcctgctgccttttggcctctcctggctggtgacatccaaaaaaggggcagtgctgccgggtggggacagcatgggaaggggaccacgtgctgcatgagctttggtatgacccaggttctccatctgctccaaaagcctccaaaagcctccaaaatgcctsactgcattgcagggcctggatgtgctctgggaaggtgccgggccaggaagttgtgctttgatggaaatctctattctgccatcccctgagggccccaccttgctgcttcaactgcgcagagctgacagattc

SEQ ID NO: 30026 - DNA, 600 bp, Chicken  19866894249508_2
acctcagggttctcccacaaggctgggaataatgagaatccaaaatggagttgagtgactgacgcagtcacggtgtccttgttgggtccacaagcattgcttcagggtaatgtggggaggcagtggggaagrgccttctgcctgctgccttttggcctctcctggctggtgacatccaaaaaaggggcagtgctgccgggtggggacagcatgggaaggggaccacgtgctgcatgagctttggtatgacccaggttctccatctgctccaaaagcctccaaaagcctccaaaatgcctsactgcattgcagggcctggatgtgctctgggaaggtgccgggccaggaagttgtgctttgatggaaatctctattctgccatcccctgagggccccaccttgctgcttcaactgcgcagagctgacagattcatccccaatgctcgcaggatagcacggatgaggtttgggatctttctggctttgcctgagcgcagcagcaccatcttcctaatggagactgcctctcccggggctctctcccagcagggctctgcttagtaaaatcattgtgaagtttaaatcgatgttgtcagtaag

SEQ ID NO: 30027 - DNA, 599 bp, Chicken  19866894249510_1
  misc_feature (1)..(7): n is any nucleotide
nnnnnnnccttcatagaggtatccttctcatctaaaggtctcaggtaaacaggtacaggtaagtttttcatcttattgtcaccttggccaccatttgccacctatgcaaaaaaaaacatgcaaaaatatttacagttgtcagaatcagttgactaattttgtcaaatatgcttaaagagctttgctttgtggttttcttcagaaaggctgccttcaaatgtcaaaggtagagcaaaacagaagtgctggaatcagctcagctgtgaaataacgcagttcccgactctgttagaatttcakagacaacgaaattaccaccattacacttgaaaataggcataatacctgtttgtacttttgaggtagactccagccaaatgcttgcactctaccatcctctttctggacatgagctttcacttggcgatactgttctcttttctgctctctgcgtgaggctaaactggcttcagttctaggaaagaatcattattaaagaacctattacttacaccctttaaaattctgtgcatcactgaagctctcattaaactcatctgtgtaacaccaggtttcctgtgggctatttttaaggaayc

SEQ ID NO: 30028 - DNA, 600 bp, Chicken  19866894249510_2
akagacaacgaaattaccaccattacacttgaaaataggcataatacctgtttgtacttttgaggtagactccagccaaatgcttgcactctaccatcctctttctggacatgagctttcacttggcgatactgttctcttttctgctctctgcgtgaggctaaactggcttcagttctaggaaagaatcattattaaagaacctattacttacaccctttaaaattctgtgcatcactgaagctctcattaaactcatctgtgtaacaccaggtttcctgtgggctatttttaaggaayctgggaaagataggcaaaccagaaagactactgtcagtacccttatgtacaaattaactgcatgggttacacagttactggaagtcatgaagttgtaaggccaaaggatgtactaccaaaaagaagcatgggatgaaaaaaaataaagataccagttagcctgacatgtggtatttttgtaccaaacttaaactgaaagtatctgaatagttattacttagctgtaatactttgggaatgaagtatactgagtgctgcctcctgtgactaaaagtgcttctataaaatgcagtggtacat

SEQ ID NO: 30029 - DNA, 600 bp, Chicken  19866894249512_1
tatgtcatcccagatgatcttcacctgctgcgttaggacataggctgtggtagctagtcgtggaggcagcaggaaacaggacttagaaagtcctgctgtgaatggtggggagcattttctcatgggcaggcatagctcaagtagttcttttgctgagtagctgccccttttagggtgagactacttgaacaaggaaatacgcctggcaggaaggagaggttacctgcagcccatctgatagattgctcacccagaatggctggctactgaagaccctccagtgattatccttcccctttrcaactatgtcaaggcttttcatcttaaaaatgtggkttttcccagctgtttatatgcagaaactttagggagaaatatcagtgttgtggcaaggctgcctggagtccctgtagctttctccagaacagtgtgttcaccttcagcccgctggggcctccaaatgaactcatcctctccagcactgcttgttaaagaagttaagagtccagccctgtaaaatgctgtgcaacaaactttcccaataaggctcycaagatttctacctgctcaattttttttcagtcttgcacaggattgaaa

SEQ ID NO: 30030 - DNA, 600 bp, Chicken  19866894249512_2
gacataggctgtggtagctagtcgtggaggcagcaggaaacaggacttagaaagtcctgctgtgaatggtggggagcattttctcatgggcaggcatagctcaagtagttcttttgctgagtagctgccccttttagggtgagactacttgaacaaggaaatacgcctggcaggaaggagaggttacctgcagcccatctgatagattgctcacccagaatggctggctactgaagaccctccagtgattatccttcccctttrcaactatgtcaaggcttttcatcttaaaaatgtggkttttcccagctgtttatatgcagaaactttagggagaaatatcagtgttgtggcaaggctgcctggagtccctgtagctttctccagaacagtgtgttcaccttcagcccgctggggcctccaaatgaactcatcctctccagcactgcttgttaaagaagttaagagtccagccctgtaaaatgctgtgcaacaaactttcccaataaggctcycaagatttctacctgctcaattttttttcagtcttgcacaggattgaaacctgcatrcaatcatcctgcacataccttgcataat

SEQ ID NO: 30031 - DNA, 600 bp, Chicken  19866894249512_3
cagaatggctggctactgaagaccctccagtgattatccttcccctttrcaactatgtcaaggcttttcatcttaaaaatgtggkttttcccagctgtttatatgcagaaactttagggagaaatatcagtgttgtggcaaggctgcctggagtccctgtagctttctccagaacagtgtgttcaccttcagcccgctggggcctccaaatgaactcatcctctccagcactgcttgttaaagaagttaagagtccagccctgtaaaatgctgtgcaacaaactttcccaataaggctcycaagatttctacctgctcaattttttttcagtcttgcacaggattgaaacctgcatrcaatcatcctgcacataccttgcataattctttggttctgtaccaattcatctgcaagtttcagtgargcacaacattatttgaatttaaaaacacagcagcatgtattacctaaacmattagattttttttctgatgttgccttcctctgttggaaaacttaaagctttcctttctaatgctgaatagaaaattaagagaaatttcagctgccaagcagctcccttcatccagccctgactt

SEQ ID NO: 30032 - DNA, 600 bp, Chicken  19866894249512_4
tcaaggcttttcatcttaaaaatgtggkttttcccagctgtttatatgcagaaactttagggagaaatatcagtgttgtggcaaggctgcctggagtccctgtagctttctccagaacagtgtgttcaccttcagcccgctggggcctccaaatgaactcatcctctccagcactgcttgttaaagaagttaagagtccagccctgtaaaatgctgtgcaacaaactttcccaataaggctcycaagatttctacctgctcaattttttttcagtcttgcacaggattgaaacctgcatrcaatcatcctgcacataccttgcataattctttggttctgtaccaattcatctgcaagtttcagtgargcacaacattatttgaatttaaaaacacagcagcatgtattacctaaacmattagattttttttctgatgttgccttcctctgttggaaaacttaaagctttcctttctaatgctgaatagaaaattaagagaaatttcagctgccaagcagctcccttcatccagccctgacttcttacctcactcacaaaaagaataactttatcatttggtaatatatatggctaattt

SEQ ID NO: 30033 - DNA, 600 bp, Chicken  19866894249512_5
atcagtgttgtggcaaggctgcctggagtccctgtagctttctccagaacagtgtgttcaccttcagcccgctggggcctccaaatgaactcatcctctccagcactgcttgttaaagaagttaagagtccagccctgtaaaatgctgtgcaacaaactttcccaataaggctcycaagatttctacctgctcaattttttttcagtcttgcacaggattgaaacctgcatrcaatcatcctgcacataccttgcataattctttggttctgtaccaattcatctgcaagtttcagtgargcacaacattatttgaatttaaaaacacagcagcatgtattacctaaacmattagattttttttctgatgttgccttcctctgttggaaaacttaaagctttcctttctaatgctgaatagaaaattaagagaaatttcagctgccaagcagctcccttcatccagccctgacttcttacctcactcacaaaaagaataactttatcatttggtaatatatatggctaatttgctctacgtaaactacatttctttgtgcaaactcactaatcttttttttttccctccagacactgaag

SEQ ID NO: 30034 - DNA, 600 bp, Chicken  19866894249512_6
agtgtgttcaccttcagcccgctggggcctccaaatgaactcatcctctccagcactgcttgttaaagaagttaagagtccagccctgtaaaatgctgtgcaacaaactttcccaataaggctcycaagatttctacctgctcaattttttttcagtcttgcacaggattgaaacctgcatrcaatcatcctgcacataccttgcataattctttggttctgtaccaattcatctgcaagtttcagtgargcacaacattatttgaatttaaaaacacagcagcatgtattacctaaacmattagattttttttctgatgttgccttcctctgttggaaaacttaaagctttcctttctaatgctgaatagaaaattaagagaaatttcagctgccaagcagctcccttcatccagccctgacttcttacctcactcacaaaaagaataactttatcatttggtaatatatatggctaatttgctctacgtaaactacatttctttgtgcaaactcactaatcttttttttttccctccagacactgaagcaaaagtgcaaaaactgagctaaatcctagccagacatttttaaagcaga

SEQ ID NO: 30035 - DNA, 600 bp, Chicken  19866894249512_7
aactttatcatttggtaatatatatggctaatttgctctacgtaaactacatttctttgtgcaaactcactaatcttttttttttccctccagacactgaagcaaaagtgcaaaaactgagctaaatcctagccagacatttttaaagcagagcatactttgggtttccttacaattttctctgtcctcaacatcataagcaacttttcaacaatttgtcagggtctgaagacaagtgaaatgcctggatttatatatactggattaacattatatctcaactcactgtaaaataacctstaacgtgtttgtggctaacaagacttaatatgtttttatactgcagaaatgactgggttttaatgtagcaacttacagtaataaggttataacagctctttccaacaccttaacaatttgcactgccttctgcacacaggcaccaagtagcacgtgtcattctaagcatctcagccacaaaaaaaaggccagatttgctgttgagttttccaggcccacattcattagtgggcctgttcaaaggcggctacatgtaaccctctcaccagctgttaaaamacctgtatgctgtggacttct

SEQ ID NO: 30036 - DNA, 600 bp, Chicken  19866894249512_8
ctctgtcctcaacatcataagcaacttttcaacaatttgtcagggtctgaagacaagtgaaatgcctggatttatatatactggattaacattatatctcaactcactgtaaaataacctstaacgtgtttgtggctaacaagacttaatatgtttttatactgcagaaatgactgggttttaatgtagcaacttacagtaataaggttataacagctctttccaacaccttaacaatttgcactgccttctgcacacaggcaccaagtagcacgtgtcattctaagcatctcagccacsaaaaaaaggccagatttgctgttgagttttccaggcccacattcattagtgggcctgttcaaaggcggctacatgtaaccctctcaccagctgttaaaamacctgtatgctgtggacttctcccattaactcccatcacagactttggaacaagtgcattgcatagtagctgtgcatatcaaaccatagtgttacatacagggaagggcatgcagaacatatgtagattaattgtagagcatctgtagtgttgtgtctgacagccaaacttctggtgtacttcctttgctcagtaactga

SEQ ID NO: 30037 - DNA, 541 bp, Chicken  19866894249512_9
aactcactgtaaaataacctstaacgtgtttgtggctaacaagacttaatatgtttttatactgcagaaatgactgggttttaatgtagcaacttacagtaataaggttataacagctctttccaacaccttaacaatttgcactgccttctgcacacaggcaccaagtagcacgtgtcattctaagcatctcagccacaaaaaaaaggccagatttgctgttgagttttccaggcccacattcattagtgggcctgttcaaaggcggctacatgtaaccctctcaccagctgttaaaamacctgtatgctgtggacttctcccattaactcccatcacagactttggaacaagtgcattgcatagtagctgtgcatatcaaaccatagtgttacatacagggaagggcatgcagaacatatgtagattaattgtagagcatctgtagtgttgtgtctgacagccaaacttctggtgtacttcctttgctcagtaactgatcctctcctgcctgggaaaggcaggtatgtatgctgtaggg

SEQ ID NO: 30038 - DNA, 600 bp, Chicken  19866894249515_1
tgttcttgggatggatacacaatctacaccagccacttaacaaactgaaagcaccattcagctcactgttacactgcagcaaaattgggcgaggcttcatggatccttgccaatttacagccactgcgttctggccccactgaggtcactggagtaaaagattttgtattatatgcttcaaatcagcttaggatcttgactgtgttctcattagaaagattcattagattgaacacctggacctgaaaccagaaagtcttaaacatgtaagtaaaacagaatatgtcagtgtcgcatcarcatgatgggcaatcataaccacaataacacatattcccctccttatgctgttttttttcttagactatcaagtcaaaaaacaatagtaaggatggagactagagaacacagtcctgccctacaagatcacaatacttcctgcaaaattcttttgactgaaaaggatgaaaaagtctaacagattttaacaatgcagcttaatccatcttcaggtattcaagacaaaggagcagaaaggctgatttaggagtgtcactaagaagacaggaaagctatctcccagggtttttgctttacagg

SEQ ID NO: 30039 - DNA, 600 bp, Chicken  19866894249515_2
agagaacacagtcctgccctacaagatcacaatacttcctgcaaaattcttttgactgaaaaggatgaaaaagtctaacagattttaacaatgcagcttaatccatcttcaggtattcaagacaaaggagcagaaaggctgatttaggagtgtcactaagaagacaggaaagctatctcccagggtttttgctttacaggtcatcccctgtaaatgcctagaagaggtttcacactctgtaagacagagacaggatgataagcaatgccaagaggagtttgcccccatcatcagttgackatgagcttcatctgaacttcagatgttcttaaaccctagcccatggaaccactcacagaataaggtagttgaaactggccatgagtctcctagattagttttttcatagacagagtgaggttgttcagaattttttttgttggagttttcttctcctgtttttattttgtgtatttcctttggaacatcaccaagaaggctgcaaaatactgcttgtactatgtacaaggaatgatgactgttctccctgcatatttattcccattcttaaaccattatcaatgttaaactgtctaccgt

SEQ ID NO: 30040 - DNA, 600 bp, Chicken  19866894249520_1
cacagcctttttccccaccatctggctctagctggcctcacaaagcgattatgggagagacctgcccctcagtagcttctggaaaaggccagagcagctcagagactgcaattacagctcattgaatatactcctgtatttagcgactgcaaaagaaatttgcttaaagactacatgcgatcccttattgatttccattttgtgtaaactaagaaaatatgcattcaactttttgctatttcaaagcccactagagatacttttttgaaaatgtacttctctttttattttagatactgscattaaaaatagacagaagaatgtaaaatgtatatacagggctgcgattgctgaacagtttgtttaagttagcgaaactctatattttattgttgtacaaataattcagaattgtttggattaggaaactaaatataaaatggaaactgtaaaaagacatgatgaaacaaagtgggattaaaaaataactctcagtagtcttctgtacgccttaaagacagaacgtgccaccagtagtgtaaaactgtttcatgtgtcattcctagagagattttggaatctttctgtttgctcatcttc

SEQ ID NO: 30041 - DNA, 600 bp, Chicken  19866894249531_1
ctgatcccatctatgtcctgcctagtgcaagctgacaacattcctggcaatgtgacctgggagccggccagcaagaacagcgtgctgttgcgctggcaggagccccgcaaccccaatgggctcatcctcaagtacgagatcaaatacagccgtgagagcgaggtgaggacccggctcggcatccccctccccaagactgggatgtccccactgccaccaccccttcgtccccaggaggtcaccactgtggtctgcgtctcccgacaccgctatgctaaatatggaggtgtgcacctggcsctgctgcagccagggaattactcrgccaaggtccgtgccacatcactggccggcaacggctcctggacaggactygtcaagttctacatcctgggaccaggtaccygatgggggcaaggaggatgccagtggggttgtggggctgctgggctgggagctgggaggcagggtgctgytgratggggcaccgggaaattgggggacactggtgggatttggggatcgggggagtgctcctggacctggacaccggaagaagaaagaatgctgctgaatcaggaatttgggagatttggggat

SEQ ID NO: 30042 - DNA, 600 bp, Chicken  19866894249531_2
gtgcaagctgacaacattcctggcaatgtgacctgggagccggccagcaagaacagcgtgctgttgcgctggcaggagccccgcaaccccaatgggctcatcctcaagtacgagatcaaatacagccgtgagagcgaggtgaggacccggctcggcatccccctccccaagactgggatgtccccactgccaccaccccttcgtccccaggaggtcaccactgtggtctgcgtctcccgacaccgctatgctaaatatggaggtgtgcacctggcsctgctgcagccagggaattactcrgccaaggtccgtgccacatcactggccggcaacggctcctggacaggactygtcaagttctacatcctgggaccaggtaccygatgggggcaaggaggatgccagtggggttgtggggctgctgggctgggagctgggaggcagggtgctgytgratggggcaccgggaaattgggggacactggtgggatttggggatcgggggagtgctcctggacctggacaccggaagaagaaagaatgctgctgaatcaggaatttgggagatttggggatgctccagggtgggagcagcatagg

SEQ ID NO: 30043 - DNA, 600 bp, Chicken  19866894249531_3
aacagcgtgctgttgcgctggcaggagccccgcaaccccaatgggctcatcctcaagtacgagatcaaatacagccgtgagagcgaggtgaggacccggctcggcatccccctccccaagactgggatgtccccactgccaccaccccttcgtccccaggaggtcaccactgtggtctgcgtctcccgacaccgctatgctaaatatggaggtgtgcacctggcsctgctgcagccagggaattactcrgccaaggtccgtgccacatcactggccggcaacggctcctggacaggactygtcaagttctacatcctgggaccaggtaccygatgggggcaaggaggatgccagtggggttgtggggctgctgggctgggagctgggaggcagggtgctgytgratggggcaccgggaaattgggggacactggtgggatttggggatcgggggagtgctcctggacctggacaccggaagaagaaagaatgctgctgaatcaggaatttgggagatttggggatgctccagggtgggagcagcatagggcatggagtgctgctgccctgggagcagtgggctctccatctctgctacaa

SEQ ID NO: 30044 - DNA, 600 bp, Chicken  19866894249531_4
gcaaccccaatgggctcatcctcaagtacgagatcaaatacagccgtgagagcgaggtgaggacccggctcggcatccccctccccaagactgggatgtccccactgccaccaccccttcgtccccaggaggtcaccactgtggtctgcgtctcccgacaccgctatgctaaatatggaggtgtgcacctggcsctgctgcagccagggaattactcrgccaaggtccgtgccacatcactggccggcaacggctcctggacaggactygtcaagttctacatcctgggaccaggtaccygatgggggcaaggaggatgccagtggggttgtggggctgctgggctgggagctgggaggcagggtgctgytgratggggcaccgggaaattgggggacactggtgggatttggggatcgggggagtgctcctggacctggacaccggaagaagaaagaatgctgctgaatcaggaatttgggagatttggggatgctccagggtgggagcagcatagggcatggagtgctgctgccctgggagcagtgggctctccatctctgctacaaatggtcctacaacaccctgccctacggacac

SEQ ID NO: 30045 - DNA, 600 bp, Chicken  19866894249531_5
cggcatccccctccccaagactgggatgtccccactgccaccaccccttcgtccccaggaggtcaccactgtggtctgcgtctcccgacaccgctatgctaaatatggaggtgtgcacctggcsctgctgcagccagggaattactcrgccaaggtccgtgccacatcactggccggcaacggctcctggacaggactygtcaagttctacatcctgggaccaggtaccygatgggggcaaggaggatgccagtggggttgtggggctgctgggctgggagctgggaggcagggtgctgytgratggggcaccgggaaattgggggacactggtgggatttggggatcgggggagtgctcctggacctggacaccggaagaagaaagaatgctgctgaatcaggaatttgggagatttggggatgctccagggtgggagcagcatagggcatggagtgctgctgccctgggagcagtgggctctccatctctgctacaaatggtcctacaacaccctgccctacggacacactcctggcagctgaagaaggagtctggcagcttctacatcctgctcactggtacgcctgtggtcctcat

SEQ ID NO: 30046 - DNA, 600 bp, Chicken  19866894249531_6
catccccctccccaagactgggatgtccccactgccaccaccccttcgtccccaggaggtcaccactgtggtctgcgtctcccgacaccgctatgctaaatatggaggtgtgcacctggcsctgctgcagccagggaattactcrgccaaggtccgtgccacatcactggccggcaacggctcctggacaggactygtcaagttctacatcctgggaccaggtaccygatgggggcaaggaggatgccagtggggttgtggggctgctgggctgggagctgggaggcagggtgctgytgratggggcaccgggaaattgggggacactggtgggatttggggatcgggggagtgctcctggacctggacaccggaagaagaaagaatgctgctgaatcaggaatttgggagatttggggatgctccagggtgggagcagcatagggcatggagtgctgctgccctgggagcagtgggctctccatctctgctacaaatggtcctacaacaccctgccctacggacacactcctggcagctgaagaaggagtctggcagcttctacatcctgctcactggtacgcctgtggtcctcatggg

SEQ ID NO: 30047 - DNA, 600 bp, Chicken  19866894249532_1
agcaacgaggaagagctgctggctgctgtcttacagcacaacagagctgcacgcaggttggcttctccgtgttacaactgagttaaaattgatgaataatagggctaagaaaataacagagggttcttcctcgcgctgcccggggaacaggaaattctgcacgggcgagcgcgcggaggtgaacaaagtgttaaaccctggcagagcagctgctgctgaccttctggtcccaacaccgctaaacaaagctcctgttacagctgaactttagtaccaacttctgctgcccagggatcctcrcaaaagtgcacaccgagatgcagccggtgctgtggggctcatgggtgggggtgaagccatgggagctgctgtgtgctctccccaggctgctccaaaagctgtcctttgctgttggagcagcttaggacttgtggagctgaagggtgctttcaggagcaaggtgttcagtagctgctgattgatataatcccattaattttgctgaatttctgcttagatttctgctcacagcatcctgcagcaatgggtgccgtgggttaataatgtgcgcataggaaaatgtgcttctttttgcatcta

SEQ ID NO: 30048 - DNA, 600 bp, Chicken  19866894249535_1
cctaggtgagagcaagagctggccaagaatacactgcacttccctcctcagtcagcccacaattattttcagctgaagatagttttttcagctttagatgagcttagcccaaacttcactagttggcgggaaaggctctctgttctctgaattagccccacttctctatgatgaatctgacttgtactttctcaagtgttttgcagcaagttgataaaatcagagaaaaatgcctcttttacaactacttttcctccccttgaaatcaaagggaacactcataaagcaaaactaacactmttctaaaagcacagatttctccccctcagaagagaaaaataaagatcatgactcagatatggggctgtaacttcctcgtcctagtactcaaaacctttgacctctaacatttctccatagggtgccataggtctagytgatttcatcatatgttgtattaataccagagattctctgcaattttcaaatacagttttggtcaagtcaatggcttgcatagcagcacttagaatatacggtttcttcagaggctttaagtgacaggaaaaaaaaaacccagtgtatcccttggtaattggt

SEQ ID NO: 30049 - DNA, 600 bp, Chicken  19866894249535_2
ctctgttctctgaattagccccacttctctatgatgaatctgacttgtactttctcaagtgttttgcagcaagttgataaaatcagagaaaaatgcctcttttacaactacttttcctccccttgaaatcaaagggaacactcataaagcaaaactaacactmttctaaaagcacagatttctccccctcagaagagaaaaataaagatcatgactcagatatggggctgtaacttcctcgtcctagtactcaaaacctttgacctctaacatttctccatagggtgccataggtctagytgatttcatcatatgttgtattaataccagagattctctgcaattttcaaatacagttttggtcaagtcaatggcttgcatagcagcacttagaatatacggtttcttcagaggctttaagtgacaggaaaaaaaaaacccagtgtatcccttggtaattggtgccaactgttaaacaatcaccattaaaaaacatgcttaaatttatctaaccatatgttgagcaggtcacctacactatgctttcatctgtttttcatccatgctcagacatctcttcacccaatgaaatttatccct

SEQ ID NO: 30050 - DNA, 599 bp, Chicken  19866894249536_1
  misc_feature (1)..(58): n is any nucleotide
nnnnnnnnnnnnnnnnnnnnnnnnnnnnnnnnnnnnnnnnnnnnnnnnnnnnnnnnnnaagctttcacagatgatgctccccaccgccacactttgtgtactgcaggctccatgacagactgcgtttatctcttgcaggtttgtgacttggctctgcctgctgcactaagttgaacaaccggagctgttcagccaagtcctggaaggctttgaggtcgtgcagctgcccctccaaggcaggacaaggctctcgagctgcctatatgctccacagggccatggcttcagcttccgctggcrcagtcctagaaactacagtgcatgtgagtcctgctcttaaaagattttctgactttcagtccatcagcagaaatgagygtgttatcaccaagtgcccactgtattcaacaaaaggagcagacttttccaatgttattttaaaaagtctgccactgaaaacatactcagtaggaagttcagctctgcagcacgcagctccggttctccccagcacccttacgcacccgacagcaggatttaatccctacagtttaggaagagacctatataaaatacaatttttgaacataaggcatact

SEQ ID NO: 30051 - DNA, 600 bp, Chicken  19866894249536_2
ccccaccgccacactttgtgtactgcaggctccatgacagactgcgtttatctcttgcaggtttgtgacttggctctgcctgctgcactaagttgaacaaccggagctgttcagccaagtcctggaaggctttgaggtcgtgcagctgcccctccaaggcaggacaaggctctcgagctgcctatatgctccacagggccatggcttcagcttccgctggcrcagtcctagaaactacagtgcatgtgagtcctgctcttaaaagattttctgactttcagtccatcagcagaaatgagygtgttatcaccaagtgcccactgtattcaacaaaaggagcagacttttccaatgttattttaaaaagtctgccactgaaaacatactcagtaggaagttcagctctgcagcacgcagctccggttctccccagcacccttacgcacccgacagcaggatttaatccctacagtttaggaagagacctatataaaatacaatttttgaacataaggcatactcttaaagccacatctyttagacggtaattctaacatcagaaaattaaactcaaccatctagatttaaaataatttcatt

SEQ ID NO: 30052 - DNA, 600 bp, Chicken  19866894249536_3
cagtgcatgtgagtcctgctcttaaaagattttctgactttcagtccatcagcagaaatgagygtgttatcaccaagtgcccactgtattcaacaaaaggagcagacttttccaatgttattttaaaaagtctgccactgaaaacatactcagtaggaagttcagctctgcagcacgcagctccggttctccccagcacccttacgcacccgacagcaggatttaatccctacagtttaggaagagacctatataaaatacaatttttgaacataaggcatactcttaaagccacatctyttagacggtaattctaacatcagaaaattaaactcaaccatctagatttaaaataatttcattgtagagatttatgcctggttttacttagaaaacatgtacactttatgggctccccatatatattcactcagcacaccagaaatctgcttaaaatgaaacttcttttcattctccttatcttttccaagttacattcatctataccactgcggtatttttacaggtttctcatctacataatatctaagcaccttataatttatagcctcaatcagggaggcactatttatcccaatt

SEQ ID NO: 30053 - DNA, 600 bp, Chicken  19866894249537_1
tcaacagcttagaatgacatttctgtgacagtaaagttacagacacagtttcttctggaagccagtcctaaactaccttgtcagtagcattgagctgctgcttaatgacagataatgtcttcctatcctttttctttcagtctgcaaaggcatttttattcagtatctctactgcctcagaatctttagttaaaaagacttgtatactaagcttttaagaagtctaatgtaccctttaaatgcttccatttgcattgtacagatgtctgaatgtcttttaacatttgaatgtaacagaaygcactttgtgcttcactggacttataagcactgcatatagcaaatcaactggagcgtcagtgacagctattagccgaagactttaattgcagtagctattactcactaaactgaacattcagatatactctttaaattgtgaaacttgttaaccctgtaaatctagagacaaaaatcaaggttgataatttatattttggcctcatactgtgtctgagtgcttgcatgttgtatgatcaaggcactacttgaccatacatcttatttatttctccctcaatttctgaacagtgattccat

SEQ ID NO: 30054 - DNA, 599 bp, Chicken  19866894249539_1
  misc_feature (1)..(240): n is any nucleotide
nnnnnnnnnnnnnnnnnnnnnnnnnnnnnnnnnnnnnnnnnnnnnnnnnnnnnnnnnnnnnnnnnnnnnnnnnnnnnnnnnnnnnnnnnnnnnnnnnnnnnnnnnnnnnnnnnnnnnnnnnnnnnnnnnnnnnnnnnnnnnnnnnnnnnnnnnnnnnnnnnnnnnnnnnnnnnnnnnnnnnnnnnnnnnnnnnnnnnnnnnnnnnnnnnnnnnnnnnnnnnnnnnnnnnnnnnnnnnnnntgggggagccatgcctgcatcagggggacagaggaggctcagggctgtgggagttatcckgccttctttgcaggaattggggaggctgggctggctggtgctgggccggaggtgctgctcttaccttgttccaaaggcaaccrrattcctaagcaactgaactggcaggagagtgagaagtgcttttaaagtcaggaaatccaactgaaaggactgcaggaggaagaagaaaaaaaaaaaaaagtcatattacattatttcacaccttttggcacagtgtctccascaaaccgaactgccatgcaggacagcaggagtttgcctgtaccgatcctctggcattttactttaaggcccag

SEQ ID NO: 30055 - DNA, 599 bp, Chicken  19866894249539_2
  misc_feature (1)..(157): n is any nucleotide
nnnnnnnnnnnnnnnnnnnnnnnnnnnnnnnnnnnnnnnnnnnnnnnnnnnnnnnnnnnnnnnnnnnnnnnnnnnnnnnnnnnnnnnnnnnnnnnnnnnnnnnnnnnnnnnnnnnnnnnnnnnnnnnnnnnnnnnnnnnnnnnnnnnnnnnnnnnnntgggggagccatgcctgcatcagggggacagaggaggctcagggctgtgggagttatcckgccttctttgcaggaattggggaggctgggctggctggtgctgggccggaggtgctgctcttaccttgttccaaaggcaaccrrattcctaagcaactgaactggcaggagagtgagaagtgcttttaaagtcaggaaatccaactgaaaggactgcaggaggaagaagaaaaaaaaaaaaaagtcatattacattatttcacaccttttggcacagtgtctccascaaaccgaactgccatgcaggacagcaggagtttgcctgtaccgatcctctggcattttactttaaggcccagtgctgtgaccaacgcggtgccctcagcccagctgctgtcacaccagcacatcacacactgtgagcacatctttcctcctgctg

SEQ ID NO: 30056 - DNA, 599 bp, Chicken  19866894249539_3
  misc_feature (1)..(156): n is any nucleotide
nnnnnnnnnnnnnnnnnnnnnnnnnnnnnnnnnnnnnnnnnnnnnnnnnnnnnnnnnnnnnnnnnnnnnnnnnnnnnnnnnnnnnnnnnnnnnnnnnnnnnnnnnnnnnnnnnnnnnnnnnnnnnnnnnnnnnnnnnnnnnnnnnnnnnnnnnnnntgggggagccatgcctgcatcagggggacagaggaggctcagggctgtgggagttatcckgccttctttgcaggaattggggaggctgggctggctggtgctgggccggaggtgctgctcttaccttgttccaaaggcaaccrrattcctaagcaactgaactggcaggagagtgagaagtgcttttaaagtcaggaaatccaactgaaaggactgcaggaggaagaagaaaaaaaaaaaaaagtcatattacattatttcacaccttttggcacagtgtctccascaaaccgaactgccatgcaggacagcaggagtttgcctgtaccgatcctctggcattttactttaaggcccagtgctgtgaccaacgcggtgccctcagcccagctgctgtcacaccagcacatcacacactgtgagcacatctttcctcctgctgg

SEQ ID NO: 30057 - DNA, 599 bp, Chicken  19866894249539_4
  misc_feature (1)..(14): n is any nucleotide
nnnnnnnnnnnnnntgggggagccatgcctgcatcagggggacagaggaggctcagggctgtgggagttatcckgccttctttgcaggaattggggaggctgggctggctggtgctgggccggaggtgctgctcttaccttgttccaaaggcaaccrrattcctaagcaactgaactggcaggagagtgagaagtgcttttaaagtcaggaaatccaactgaaaggactgcaggaggaagaagaaaaaaaaaaaaaagtcatattacattatttcacaccttttggcacagtgtctccascaaaccgaactgccatgcaggacagcaggagtttgcctgtaccgatcctctggcattttactttaaggcccagtgctgtgaccaacgcggtgccctcagcccagctgctgtcacaccagcacatcacacactgtgagcacatctttcctcctgctggcccacatttcagagccggggctccttgttgttcgggcagaggattgtagcttccctacgtgctttctgcaggaccctacatcacgtttgcctgtgttctccatttcttttctgaaagcaatctccgttttctctgtctattt

SEQ ID NO: 30058 - DNA, 599 bp, Chicken  19866894249541_1
  misc_feature (1)..(3): n is any nucleotide
nnnccccggggctgcaaaaggctgtgagcagcagcagctcgtgggctctaccaggaccagctgacctgtggtattgcttggggggtttgttttcatttggacacggctcggccgggctgtggcagccggggctgtgggtttcttgctaggcctgcacttgatttgcatacacagcagccacaggaaggaagacaaagcaaggcccacagcaggaaggggtgaggagagagctgagaaggacgagagcagcagggctggcacggcgctgtgcggggtgcccacctccccaggcactgctcscagagggccaggagcacagcttccatcctgtgccttctgctccaacatccagacaacgagagcacgaagctccggggccatggagrggcctgggggatgctcccacctgcagtaggatgtcctcccrtccgtcctgcctgcatggcgacctggggaaagtgtcacagtgccgaggtaaggccttgctggggccgtctcctggggtgcacggggacagacgcatggcactcggctgcccggtgcggggttaagatgctgcagccctctctgcggcagccatttgctgtggtgctggtttt

SEQ ID NO: 30059 - DNA, 600 bp, Chicken  19866894249541_2
ttgttttcatttggacacggctcggccgggctgtggcagccggggctgtgggtttcttgctaggcctgcacttgatttgcatacacagcagccacaggaaggaagacaaagcaaggcccacagcaggaaggggtgaggagagagctgagaaggacgagagcagcagggctggcacggcgctgtgcggggtgcccacctccccaggcactgctcscagagggccaggagcacagcttccatcctgtgccttctgctccaacatccagacaacgagagcacgaagctccggggccatggagrggcctgggggatgctcccacctgcagtaggatgtcctcccrtccgtcctgcctgcatggcgacctggggaaagtgtcacagtgccgaggtaaggccttgctggggccgtctcctggggtgcacggggacagacgcatggcactcggctgcccggtgcggggttaagatgctgcagccctctctgcggcagccatttgctgtggtgctggttttgctgcttgggatgtctcagctctcttctcccacgcagagatggggaggtttgggagcagtcctacatagtgaggcaccgatggggay

SEQ ID NO: 30060 - DNA, 600 bp, Chicken  19866894249541_3
ggggctgtgggtttcttgctaggcctgcacttgatttgcatacacagcagccacaggaaggaagacaaagcaaggcccacagcaggaaggggtgaggagagagctgagaaggacgagagcagcagggctggcacggcgctgtgcggggtgcccacctccccaggcactgctcscagagggccaggagcacagcttccatcctgtgccttctgctccaacatccagacaacgagagcacgaagctccggggccatggagrggcctgggggatgctcccacctgcagtaggatgtcctcccrtccgtcctgcctgcatggcgacctggggaaagtgtcacagtgccgaggtaaggccttgctggggccgtctcctggggtgcacggggacagacgcatggcactcggctgcccggtgcggggttaagatgctgcagccctctctgcggcagccatttgctgtggtgctggttttgctgcttgggatgtctcagctctcttctcccacgcagagatggggaggtttgggagcagtcctacatagtgaggcaccgatggggayctgtcccwcatcaccaatcccgttcccttgtctgttgggtg

SEQ ID NO: 30061 - DNA, 438 bp, Chicken  19866894249541_4
ggcctgggggatgctcccacctgcagtaggatgtcctcccrtccgtcctgcctgcatggcgacctggggaaagtgtcacagtgccgaggtaaggccttgctggggccgtctcctggggtgcacggggacagacgcatggcactcggctgcccggtgcggggttaagatgctgcagccctctctgcggcagccatttgctgtggtgctggttttgctgcttgggatgtctcagctctcttctcccacgcagagatggggaggtttgggagcagtcctacatagtgaggcaccgatggggayctgtcccwcatcaccaatcccgttcccttgtctgttgggtgcgtgcgtggagccaatgcatcttcttgtgcagcaccggggtctgcccccacgttagagctctttagatcaattcatccctcttcaaagccaaagaaa

SEQ ID NO: 30062 - DNA, 430 bp, Chicken  19866894249541_5
ggatgctcccacctgcagtaggatgtcctcccrtccgtcctgcctgcatggcgacctggggaaagtgtcacagtgccgaggtaaggccttgctggggccgtctcctggggtgcacggggacagacgcatggcactcggctgcccggtgcggggttaagatgctgcagccctctctgcggcagccatttgctgtggtgctggttttgctgcttgggatgtctcagctctcttctcccacgcagagatggggaggtttgggagcagtcctacatagtgaggcaccgatggggayctgtcccwcatcaccaatcccgttcccttgtctgttgggtgcgtgcgtggagccaatgcatcttcttgtgcagcaccggggtctgcccccacgttagagctctttagatcaattcatccctcttcaaagccaaagaaa

SEQ ID NO: 30063 - DNA, 600 bp, Chicken  19866894249548_1
ttaggtgttcttcatactattccttataattacttcagaaatcataaatctcctgtaaacttgacatttgttttcatttttctgcctgtttcacagccagtcacactgaaatgatctcatcagtctgttgccttctgcaactgtgatgttagcctcctgtgttagccctcttgtgcatactgaccaattacctgatcaggggcaaatgactgcagacgcacaccaatatgatgagcagtaaaatggtgtctattcactactaagcacagcttatatacctttacttaagctatcgtgccytgtcctgattcgtccgtactggatcttagccccttaccacaattccttatttggctcctactgtctcctcattcctttgccttcttatcttgtttacttcgttagcaaggacagtctgtctgagcacaacagcaccctttcactatgcttatagggagaggcctatcccatacagcacgtagccctgtcaagcgcctactacaacatcagtctttgcaaactgagaaggaaaatacaattaaatatatatttcatcatcttgacccaaaccatgtatttctaaattaatctaaccccctt

SEQ ID NO: 30064 - DNA, 600 bp, Chicken  19866894249553_1
ttcacctctgttcagcactggtgagggtgcacatggagctacgggtccagttctggactcctcagcacagcagagacatggacatgctgggaaaagtccagtggagggctacaaagatgatgaaggaacgggagcatacctcttgtgaggagcagttgggagagctgggactgcccagcttggagaagagaaggctcaggggcatcttatcaacatgaataaatacctaaaaagagggtggaaagagatccaggctcttttctgtggtgtccaggaacaggacaagaggcaatgggcaakactagaacataaagaagtctaaatatcaggaagcaattctttactgtttgggtgatggagcactggcacaatttgcccagggagattgtggattcttctccttggacgagcaatctggacatggtcctgggcattgtctctgcttgagtaagggactggacgagatggactcagcggtcttttccaatctcaactactctgtcattctgtgattctgttgttctatgctaagacagtgaagggagttgtttgtgtgcagccttgtattttaattagtgttttgcatgatgttgtatggag

SEQ ID NO: 30065 - DNA, 599 bp, Chicken  19866894249556_1
  misc_feature (1)..(2): n is any nucleotide
nncaatatgcacattagacacgtggataatctagttcttgtctgaccttgatttagtaaaaccacaatattgccaaaaaaattaggtcttctggaggtgttttatcagacttacaaatctttactgctgcctactttttccaccttgaagaaggatggaaaggttattagatacttcgttgatattctgcttttcacacttgatcacattttcttgtctctgagttctttttcaataggaatttcttgagggctttttccttctctaaggcttcaaaacaatcttcagaggaaaaaaaamcagttattttcattgaagtactcattaagaaattcagttacaggtaaacatgaggtaataaagatcaaaggtataagctcaaagtctactcctataccaatactcctttaccaaatttactatcaatacagtttctctatctttaagtaaaaattcaaggaaaagaatctgcctcttaactgtaataagaaccaatattcaactataccctaatyttgcttccatgcatatatacaactaaaaactaaacaaaaacacttctgttcaaagggaagggagcaatgcaacaagttcatgga

SEQ ID NO: 30066 - DNA, 600 bp, Chicken  19866894249556_2
gtctctgagttctttttcaataggaatttcttgagggctttttccttctctaaggcttcaaaacaatcttcagaggaaaaaaaamcagttattttcattgaagtactcattaagaaattcagttacaggtaaacatgaggtaataaagatcaaaggtataagctcaaagtctactcctataccaatactcctttaccaaatttactatcaatacagtttctctatctttaagtaaaaattcaaggaaaagaatctgcctcttaactgtaataagaaccaatattcaactataccctaatyttgcttccatgcatatatacaactaaaaactaaacaaaaacacttctgttcaaagggaagggagcaatgcaacaagttcatggactgcaaaacaagatctaataagccttctgtaaaaaagaaaaaagagaaatcagtacatatttttacttagttttgggtgtttaaggtaattgtaatgccttctcccctaacagcagaagatgctacaggaactagaaccactgataagttgcagccttttagctaaggatttatgtaacagaagggaaaagagctattataatgctttaaatcaag

SEQ ID NO: 30067 - DNA, 567 bp, Chicken  19866894249559_1
gccttcttttcctgcacgtccatacactacactaaccatacttacgctcctgctctgtaataagcttaacagttaaagacaatttatctcaaaatttggaagcagtggttacctcaatacttataaggcaggtcaatgttgaacaagacccactagaggtcccttccgacccaaacgatttgagtctcctgtactgaataagcaaggattatttggacagagcaccgcaaattttgtgcagcttctcactgcagagttccttatcagtgtccttaaacactccagataactgagcagtastttgtttattccgtttgttttccttatttttcaacttagtttataaaatcccattctgatggctgggaaaatttgctttattttcagtgtgaatgatctacaactgtggcattatttttgtattgatttttctttgttaagcaacaggccaatacaatatattctgtcatccctgttttacatgtattgaggctgggagctctgagctaccagaaacaactgcaatgagtgaattagctaagaagtacaggaggttctacgaaaaag

SEQ ID NO: 30068 - DNA, 600 bp, Chicken  19866894249560_1
gtaggcattcaaggccaggctggatgtggctctgggcagcctggtctgctggttggcaaccctgcacatagcagggggttggaactggatgagcgttgtggtccttttcaacccaggccattctaggatgctgaacacacactgacttacagaaccccaaactctcttttgcataaggcagtatctggcagtagataccacctcctaggaggacaatggaaacctcaagacttctgacctcaaagctggcaaaggaacccaatgctttgcagacaatgaaagacagaccacagcacaccwtctcttggtatacatttttttcattgtactctctcttgtggacattttatgattgctatttcagacaattctgcccttgatctacaatcaatacagctctagctgaacacatctgtttgctctttgtgtaacaaaaagtcatgaagagaccctaagccatttttacaacgatccgtgaaaagctggctgctaattaagagcctgaaaatacaacgaatatgatgcaatgaattacagtagcatttccaggattgctggtttgaggaatatgaaaagaaaaaaaagacaaataacctatga

SEQ ID NO: 30069 - DNA, 600 bp, Chicken  19866894249564_1
agcaggttcctataataggctgcacaggaagatgtccatatgggtctcaagtatctccatagagggaaactctacaacctctgtgggcaacctgttccagtgctccatcacccttacctcctgcatgtttgtatggaacttcaaattttcaatttttaggccactgctctttgtcttctcactatacaacgctgagaagagcctgacctcaaccctttgcctcccacctccctttagctatttacaaacattagccagacccccccctcactcttctttttcccaggctgaacagacccrggctactcagcctttcctcataagagatgctccacacyctttatcatctttgtggccctcagttggactctttctagttctccatcttttttgaactgtggagtccagaactggacacagtacccaaaatgtggcctcaccaggacagagtagagggggaggataatttccctcaacctgctggctatgctgtttttaatgcacctagatgaataatcaaacatttggaaaccaacattcatatcttccatttagcaatgaaaatgttctgctttcttgcaaaagaaagacagagagaga

SEQ ID NO: 30070 - DNA, 600 bp, Chicken  19866894249564_2
tatgggtctcaagtatctccatagagggaaactctacaacctctgtgggcaacctgttccagtgctccatcacccttacctcctgcatgtttgtatggaacttcaaattttcaatttttaggccactgctctttgtcttctcactatacaacgctgagaagagcctgacctcaaccctttgcctcccacctccctttagctatttacaaacattagccagacccccccctcactcttctttttcccaggctgaacagacccrggctactcagcctttcctcataagagatgctccacacyctttatcatctttgtggccctcagttggactctttctagttctccatcttttttgaactgtggagtccagaactggacacagtacccaaaatgtggcctcaccaggacagagtagagggggaggataatttccctcaacctgctggctatgctgtttttaatgcacctagatgaataatcaaacatttggaaaccaacattcatatcttccatttagcaatgaaaatgttctgctttcttgcaaaagaaagacagagagagaggctgtgaagtttagtgaatggtgaaaatgatgaatgg

SEQ ID NO: 30071 - DNA, 600 bp, Chicken  19866894249571_1
atagatgaagacatttggatttgtgttgctgtaacaaaagcgcggtgttgtcctctgggtatagtttacatgcactgaacagatcgaggctcacacatcttaaatattgaaattttatgatttttccaggcgctcatttagcaaaagctaagcagggtagggaggggagctgctgctgtgccatgcctctccaagggagagaatccatcgccatgcaaggagagcactcggcagctcacctggagatgtcagtgctctgatgcagtctgtcctttcccaaagactccatcacacagaggraagcactctccagtctgtctgtatttttgttcctttcctgagcccaaagccttgggaccagagccatcctaattgcagtgtcccaaaaccttcatcacattttgtttgcatctgatgctcttagttctctcatgtattgccttatcaacaaataaatagggcagagtttgcataagcgttctttgttctgctgcagttgggtttattggaatttgtaatcataagctgcgtattaagaataatactaaatattgacacwgcatctcccttttaatttcctgccttttccgggcagccttg

SEQ ID NO: 30072 - DNA, 600 bp, Chicken  19866894249571_2
atgcagtctgtcctttcccaaagactccatcacacagaggraagcactctccagtctgtctgtatttttgttcctttcctgagcccaaagccttgggaccagagccatcctaattgcagtgtcccaaaaccttcatcacattttgtttgcatctgatgctcttagttctctcatgtattgccttatcaacaaataaatagggcagagtttgcataagcgttctttgttctgctgcagttgggtttattggaatttgtaatcataagctgcgtattaagaataatactaaatattgacacwgcatctcccttttaatttcctgccttttccgggcagccttggcagcagacagttgcttttcaagtgctgccacaccagacttgacctgaagactgttggagatgatgttctctctgtcctgccaagctggggctttctgcatgctgttctgtccagaactcactgtttgagacccctttcctttgttggacmcctgtgtgctgcaactcctgggacagggagagcatctgcctcctggggcaggattgggaggcactacctaagtgacctttcgttgtgcattattaaagtgggcattga

SEQ ID NO: 30073 - DNA, 600 bp, Chicken  19866894249571_3
ataaatagggcagagtttgcataagcgttctttgttctgctgcagttgggtttattggaatttgtaatcataagctgcgtattaagaataatactaaatattgacacwgcatctcccttttaatttcctgccttttccgggcagccttggcagcagacagttgcttttcaagtgctgccacaccagacttgacctgaagactgttggagatgatgttctctctgtcctgccaagctggggctttctgcatgctgttctgtccagaactcactgtttgagacccctttcctttgttggacmcctgtgtgctgcaactcctgggacagggagagcatctgcctcctggggcaggattgggaggcactacctaagtgacctttcgttgtgcattattaaagtgggcattgatacgtgtgttgttaggttttgtattgttctgcactacattaagcctccctctgcttaactgcttggctgtgccgtggtagaggtgtcctgtttgtcagtgcggctctgctcagtgatatacatctctggctgtacattggagatatggcagctgctgtcagctttccagccctgctgtggtgttggcattcc

SEQ ID NO: 30074 - DNA, 600 bp, Chicken  19866894249572_1
gggtctgaagtcctctgcatgctgcaggactgttgatgagcagagctgaacacacatgctctctggtttctatagacctaggcttacaaagatgatttttttttctttttcacaccccacgtactccatgcttactgttgttacgtgcccattacaccaagcaaagtacacaggtcagagtgatggcagtgagattaacatcaagcagcagttgtctccactttgggaatcacaaggaattattgattctctgcagctgaagtaagaattgagaacagaactaggccctctccaccaccraacagagcaatgtgaaaacagcactgctgctggtgtgttatccaattaaacatttctagaacaatgttagagctcccggggacaaaaaaaaatccacacacacacaaaaaaamccagcaatgtcagcagtgtagcactggggaactgcaggtcgtaagataagcttacaaaccccgaagggagggaaacatgactcagaagcattaaaatatatgaaaaatagcttaaaaaaattaatttccggaggcaacraattacatttcagaagttcccttaacaactctgtaacttcattttcag

SEQ ID NO: 30075 - DNA, 600 bp, Chicken  19866894249572_2
accccacgtactccatgcttactgttgttacgtgcccattacaccaagcaaagtacacaggtcagagtgatggcagtgagattaacatcaagcagcagttgtctccactttgggaatcacaaggaattattgattctctgcagctgaagtaagaattgagaacagaactaggccctctccaccaccraacagagcaatgtgaaaacagcactgctgctggtgtgttatccaattaaacatttctagaacaatgttagagctcccggggacaaaaaaaaatccacacacacacaaaaaaamccagcaatgtcagcagtgtagcactggggaactgcaggtcgtaagataagcttacaaaccccgaagggagggaaacatgactcagaagcattaaaatatatgaaaaatagcttaaaaaaattaatttccggaggcaacraattacatttcagaagttcccttaacaactctgtaacttcattttcagcagaagtgaaagctctcaaaagttggctggttagtcctgctccacctccgaagcctgccaaagccagcttctgtgtcaggttcacatactaacatgggtgataactttcacca

SEQ ID NO: 30076 - DNA, 600 bp, Chicken  19866894249572_3
gcagctgaagtaagaattgagaacagaactaggccctctccaccaccraacagagcaatgtgaaaacagcactgctgctggtgtgttatccaattaaacatttctagaacaatgttagagctcccggggacaaaaaaaaatccacacacacacaaaaaaamccagcaatgtcagcagtgtagcactggggaactgcaggtcgtaagataagcttacaaaccccgaagggagggaaacatgactcagaagcattaaaatatatgaaaaatagcttaaaaaaattaatttccggaggcaacraattacatttcagaagttcccttaacaactctgtaacttcattttcagcagaagtgaaagctctcaaaagttggctggttagtcctgctccacctccgaagcctgccaaagccagcttctgtgtcaggttcacatactaacatgggtgataactttcaccaaataacgcggtgacatttgaatgtgcagtgtttataaacagcagtgctgcagttctaaatggctgttagttaaacaagwctgktttctgtctgaaaaaccgaaataaagctttattcagcagtgttccataatgatgtg

SEQ ID NO: 30077 - DNA, 600 bp, Chicken  19866894249572_4
actcagaagcattaaaatatatgaaaaatagcttaaaaaaattaatttccggaggcaacraattacatttcagaagttcccttaacaactctgtaacttcattttcagcagaagtgaaagctctcaaaagttggctggttagtcctgctccacctccgaagcctgccaaagccagcttctgtgtcaggttcacatactaacatgggtgataactttcaccaaataacgcggtgacatttgaatgtgcagtgtttataaacagcagtgctgcagttctaaatggctgttagttaaacaagwctgktttctgtctgaaaaaccgaaataaagctttattcagcagtgttccataatgatgtgagcaagtttatttttttggatagctagaaatagagctttttcttctgtatccttaacagttttctttaagctgatgtatttgttagatacgtgttcatataataaaccactttacaagccatgatgcagatttggtcaatgaaagcctaaaatctgtgtcagaagcctacttgagcctagacggtctatctggctgctctggtaaatgcacatcagctctgaaaacagcattacaaaatg

SEQ ID NO: 30078 - DNA, 600 bp, Chicken  19866894249572_5
agaagcattaaaatatatgaaaaatagcttaaaaaaattaatttccggaggcaacraattacatttcagaagttcccttaacaactctgtaacttcattttcagcagaagtgaaagctctcaaaagttggctggttagtcctgctccacctccgaagcctgccaaagccagcttctgtgtcaggttcacatactaacatgggtgataactttcaccaaataacgcggtgacatttgaatgtgcagtgtttataaacagcagtgctgcagttctaaatggctgttagttaaacaagwctgktttctgtctgaaaaaccgaaataaagctttattcagcagtgttccataatgatgtgagcaagtttatttttttggatagctagaaatagagctttttcttctgtatccttaacagttttctttaagctgatgtatttgttagatacgtgttcatataataaaccactttacaagccatgatgcagatttggtcaatgaaagcctaaaatctgtgtcagaagcctacttgagcctagacggtctatctggctgctctggtaaatgcacatcagctctgaaaacagcattacaaaatggttg

SEQ ID NO: 30079 - DNA, 600 bp, Chicken  19866894249572_6
ctgatgtatttgttagatacgtgttcatataataaaccactttacaagccatgatgcagatttggtcaatgaaagcctaaaatctgtgtcagaagcctacttgagcctagacggtctatctggctgctctggtaaatgcacatcagctctgaaaacagcattacaaaatggttgcttctgactcacccagaaagccttaagctttgtgaacatagcaaggcttctctcctaagcgtcttggaacgcttgtgtaactatgaataaatgaaattaaatcaaagcattgaggagcttacaaawatgtaaggaagccttacgcacctgttcatcttctgcacgattcagtgatcgctggaaacttcaagaagctcaaggacaaaatgcagggaggggatggaagctgaaggcttactaccttccaagaaacagacagcattctcagatcaagaacagtgtttctggcttttagaagtcctacacagaaatcctttttattcttttcattttgacagtcctctcagattggctttagttactattcttaaaataacatagctgtcttgcgtaagccacaggccataaaaactagttacctatgtt

SEQ ID NO: 30080 - DNA, 600 bp, Chicken  19866894249573_1
tgcctttcaaatgtttgctagatatgaatatgatgaattttcatttgcattgttttaatttcacattttttcttagaaggaacatttccaacatatatccataaatgcgtcttcaaaaaagtccctacaaagaagagttttcttatctattagcattcacagggtaggtataccttatatcatagagtcatagaatggcctgggttgaaaacgatctctaagatcatttagtttcaacccccctgccgtagtcagggtcaccaaccttatatgcccactatgtatttttttcttaatcaygtgtcatttaaattctatatccattttgaaataatccaaattacatatagatttcaaaagttcttgtagggatttttttctcatgttagcttgtttttagctaagaaatcttgaacgtagagtggctgcatgttagtttactgatgcttagtttttaaaaattaagtagttgtaaatatttgtggtacagcttggtgaagyggataagtatctttcaaatgcttaaaaaaaataccaggccagaacagcatcaataacttaagacaaggttcatttaagttcagtagaatttactactga

SEQ ID NO: 30081 - DNA, 600 bp, Chicken  19866894249573_2
gggttgaaaacgatctctaagatcatttagtttcaacccccctgccgtagtcagggtcaccaaccttatatgcccactatgtatttttttcttaatcaygtgtcatttaaattctatatccattttgaaataatccaaattacatatagatttcaaaagttcttgtagggatttttttctcatgttagcttgtttttagctaagaaatcttgaacgtagagtggctgcatgttagtttactgatgcttagtttttaaaaattaagtagttgtaaatatttgtggtacagcttggtgaagyggataagtatctttcaaatgcttaaaaaaaataccaggccagaacagcatcaataacttaagacaaggttcatttaagttcagtagaatttactactgagtctagatctctgcacttttgacaaatatctaaactgtcatcttcagctggcttttaaataagcaagtagccctcctcagcagaaaaattctattgcagatcaaccactgacactaacctactcaatcttgcttcaagataatttgaagtgactgatagttgcaaattacatcaagagtgataaaattctggcactacatc

SEQ ID NO: 30082 - DNA, 600 bp, Chicken  19866894249573_3
aaaaataccaggccagaacagcatcaataacttaagacaaggttcatttaagttcagtagaatttactactgagtctagatctctgcacttttgacaaatatctaaactgtcatcttcagctggcttttaaataagcaagtagccctcctcagcagaaaaattctattgcagatcaaccactgacactaacctactcaatcttgcttcaagataatttgaagtgactgatagttgcaaattacatcaagagtgataaaattctggcactacatctctttttactgagctcaagcataccrtaattttaccaggaatctcaattcagttcccagcagaactagaaaaatgttcattaggacttgtcatgagagattggttgtgacaatctagttggcaaacttagaaggaaggctagaggtgtaatggacagcctaaatggattttcctttcccaagcttcccatgttagaatgggaacagtagatgaaatagtatcgagatcactgccattaagatgctatcacgtgtttctgcaaacaataatgcagaaccaaacacagacctctgaatagtaattgtaaaaaacaaaacaaaaacata

SEQ ID NO: 30083 - DNA, 600 bp, Chicken  19866894249574_1
tgtttccggtgatccctctgcttcccacctgcatggcctctgcagaacaggtacatatttttccttcgttggtcttttgcaaaggatgtttctgttacctctgaaaacatagtagtccttgtttccatccaccatgatttctcagggactgtagtaaacgctgccttgcaaagaatgttctttgagcaccactgactatttaaattgtacgtaacattttttatttaggatatcattaaaacctggttggtgaatagtgtgactcaaagaggtagcttctttgaacaccatggatctacratattatgacaagactttacacttccagcctagccctcccaactaagtattaaggtttgctggggagaatccatgccagtacttaaggaatcttaaggggtcrtgattcagagtgcagaaacttctgcctgcagtttattgtccttggaagtataaagtgtcatattatttcagctgggagcctggatttcaccagtcatcagctctgcaggagttcattattttgtttagaaaggcagaattcaggccattttcttccttcagtgttatcctgcarctaatgctgcagatttgttctgt

SEQ ID NO: 30084 - DNA, 600 bp, Chicken  19866894249574_2
aaaacatagtagtccttgtttccatccaccatgatttctcagggactgtagtaaacgctgccttgcaaagaatgttctttgagcaccactgactatttaaattgtacgtaacattttttatttaggatatcattaaaacctggttggtgaatagtgtgactcaaagaggtagcttctttgaacaccatggatctacratattatgacaagactttacacttccagcctagccctcccaactaagtattaaggtttgctggggagaatccatgccagtacttaaggaatcttaaggggtcrtgattcagagtgcagaaacttctgcctgcagtttattgtccttggaagtataaagtgtcatattatttcagctgggagcctggatttcaccagtcatcagctctgcaggagttcattattttgtttagaaaggcagaattcaggccattttcttccttcagtgttatcctgcarctaatgctgcagatttgttctgtcccttgtaggtaaccaggtgttctagattaaaggataaattagcctccctagcagctgatctcaagctgttatgtggcttattgatttaagtcttttccctct

SEQ ID NO: 30085 - DNA, 600 bp, Chicken  19866894249574_3
tctttgaacaccatggatctacratattatgacaagactttacacttccagcctagccctcccaactaagtattaaggtttgctggggagaatccatgccagtacttaaggaatcttaaggggtcrtgattcagagtgcagaaacttctgcctgcagtttattgtccttggaagtataaagtgtcatattatttcagctgggagcctggatttcaccagtcatcagctctgcaggagttcattattttgtttagaaaggcagaattcaggccattttcttccttcagtgttatcctgcarctaatgctgcagatttgttctgtcccttgtaggtaaccaggtgttctagattaaaggataaattagcctccctagcagctgatctcaagctgttatgtggcttattgatttaagtcttttccctctgctgatccccttatcagaagcaacaagaacttccccttaggttttccatgtttcttctatttatctgcttcctagacttgttatagttttgaaattaaattaccattataagggtaggggtaaggataaagcttttgtaagggtaatgctatatttataacagcacagactcag

SEQ ID NO: 30086 - DNA, 513 bp, Chicken  19866894249578_1
aagaagagatgaaagtcatgaatatgtcagaaattaaagactaaagcaactttttgtcacacggaactccggttggtgcagctttttcagcctaccaaggactcagttcttccctgcaagcatacaaaatgaacacctctgaagttaactgaatgcaccaatgcaagctcacagcatgtaaccctctgttttgacacgaagttcagtgctgctctccaagtttctcttgccagaagagtgattctgcatccaccacaaaagcaaaacttaaaccctcctaggctgatagctagctttgcwtatttttagcatttcatacttcaatttcagtcctttttaaattaatgctgacttcccatatctagaaagaaactaatattaaaatatccatcatattctttgtgcatttttaaatttagctattaaagtttcataagaacatggtctctcactatttctacgtctccttcctatgattactcctaatgtgcttgacagctatgcttttgctat

SEQ ID NO: 30087 - DNA, 600 bp, Chicken  19866894249583_1
acaacaattggtagtttcctgatccagttagatgtcacagtaagaacaacctcagtcttctaaatattgtctatagcagaattgtgtctgtcttcagtccttctcctcttctgcaaataatattgcgtattcaaggacagaaacaggagttacttggaaaagaagatgaagtgccagtgctcatcctcttgaactcctaaaatcccaactggtcctggtgttcagctactaccaaatgtgaatagagcaagcaatgactattctaagtgagaacaagaggaaaagcacatgtggctgcaygtggtcagtaaggcaagagttttctttgaggaaggccctttctgactcatcttaaaggtgtcctattttcagggaaaacagagcatttaagggtctggcagttttagatgttaaattctgtttctgaggaagatatcttcaaaagagagattgaaactctagtggtcttatcacttccatccttctttggtaagagaaacattttgcaattttttgtggctttttctccttaatctaaatcagcaatctctgttctttcccagcttatgggtagttggatgttcaacaagtaacgctgtg

SEQ ID NO: 30088 - DNA, 600 bp, Chicken  19866894249584_1
aaaaaaaagtctcagtaattatgctaatgggtcataaatatgctctatgtatcagcaaaaccaaactcaatcttttagttgtgctgctgtttctatgataattacaatgccaaaactttggagattttgctgactttttagacatttttgggaacaaaactcagtgtttagtgaaagaagttttttctttaactaaatttttcatctatcctgttcttcatctagtatgtttttatactgtcttttctgaaacactgttttgcagtggctgaattctggcttactttaacatttcatcayatctatagagatgtttaagactacagatcagtctggatatcaaaagttttatgtttatattgcttgcctaaccgaagtgaaagccaaaaatagtccaaatttatgctatcaattagtcatggatggaaaaaaaaaacactcgtttttttctaggatggtcaacctactatcaaatatgaaatcagggagttgatgttttgttgttggtcttgtagtttgtttgtttgtttattggttaataaattcccttaatatttcctattgatgagttgagattaccagtaaactattactgtttta

SEQ ID NO: 30089 - DNA, 600 bp, Chicken  19866894249585_1
aagagtaacacatccaagatgcaataactagcagtttttaaagacaaggatgataccaaaatatggatgttaaaacctcacctcagctttttcatctcatttgctgccagtatcttattatgcactatttacgatgccatgcattagtctcaactatgaaatgcaaagagtaaaaccttgtcatctttgtaaaacaccttgcaaattatacttgaattattttgcatatttgcaaaacattttttgttttgaagcctatttatttaacttatttgtatggatttttaatatactcaagtraatatgctttgaaaagaagtatgatkgtatttctgtaacagcagaatacctttggatccccgaggtcctactcagaatattcagaagactmtgtatttttcactctgtgtacaatttaactctcagacagcagcatttactaaaaacgttgagtggaatttgacaaataattcaactgaagtcaaaactgaattatttcacttaaagctatccaaatactcgggggtctattaaggaactattttatggaacaaaaaataaagcctcactcttgcatttttcctaaagccttataagaca

SEQ ID NO: 30090 - DNA, 600 bp, Chicken  19866894249585_2
actagcagtttttaaagacaaggatgataccaaaatatggatgttaaaacctcacctcagctttttcatctcatttgctgccagtatcttattatgcactatttacgatgccatgcattagtctcaactatgaaatgcaaagagtaaaaccttgtcatctttgtaaaacaccttgcaaattatacttgaattattttgcatatttgcaaaacattttttgttttgaagcctatttatttaacttatttgtatggatttttaatatactcaagtraatatgctttgaaaagaagtatgatkgtatttctgtaacagcagaatacctttggatccccgaggtcctactcagaatattcagaagactmtgtatttttcactctgtgtacaatttaactctcagacagcagcatttactaaaaacgttgagtggaatttgacaaataattcaactgaagtcaaaactgaattatttcacttaaagctatccaaatactcgggggtctattaaggaactattttatggaacaaaaaataaagcctcactcttgcatttttcctaaagccttataagacacatcatattcttcatatccattgtat

SEQ ID NO: 30091 - DNA, 600 bp, Chicken  19866894249585_3
tcatctcatttgctgccagtatcttattatgcactatttacgatgccatgcattagtctcaactatgaaatgcaaagagtaaaaccttgtcatctttgtaaaacaccttgcaaattatacttgaattattttgcatatttgcaaaacattttttgttttgaagcctatttatttaacttatttgtatggatttttaatatactcaagtraatatgctttgaaaagaagtatgatkgtatttctgtaacagcagaatacctttggatccccgaggtcctactcagaatattcagaagactmtgtatttttcactctgtgtacaatttaactctcagacagcagcatttactaaaaacgttgagtggaatttgacaaataattcaactgaagtcaaaactgaattatttcacttaaagctatccaaatactcgggggtctattaaggaactattttatggaacaaaaaataaagcctcactcttgcatttttcctaaagccttataagacacatcatattcttcatatccattgtattttatgcatatacttttcaactcattcttttttcctagaacatgtgaaatagaattctattccaa

SEQ ID NO: 30092 - DNA, 600 bp, Chicken  19866894249587_1
catttcaataatttctgtacaaagaattggcagatcttgaagctctgtatgtagcagtgtggtgcttttctagtaatcaaaaaggaagaacagctttacggagcaaaaagttaggaaatcctaaatcacaaagctttttcttttgtttatcactactgacacatgtatagctttactagtttcagagaactcactcgctctttacattacacagtgaagtacttgattaggtgcttaacctgttgaatgtactggcacttgctgagagaaggagggctgatttgtgcacatgctaaactrggtatcattatcttttatttccttcctctaccagctgrgtagttcatcatccccaaaatgccccactgtctcataggtgatcaaaactcattccatgttctctgtcaaaagtgttctgggagaccccagttcccatcacctctctcttctagaatgacccttaagtttctcatcatcaggagcatcccttcaatatgcatatgcctcctcaatggacaaatgaaaaaagtggtttaagtgaaactcactgaggtaacaattcacaatttcatggcatcttttcaattttaagaatgcaaa

SEQ ID NO: 30093 - DNA, 600 bp, Chicken  19866894249587_2
gaagctctgtatgtagcagtgtggtgcttttctagtaatcaaaaaggaagaacagctttacggagcaaaaagttaggaaatcctaaatcacaaagctttttcttttgtttatcactactgacacatgtatagctttactagtttcagagaactcactcgctctttacattacacagtgaagtacttgattaggtgcttaacctgttgaatgtactggcacttgctgagagaaggagggctgatttgtgcacatgctaaactrggtatcattatcttttatttccttcctctaccagctgrgtagttcatcatccccaaaatgccccactgtctcataggtgatcaaaactcattccatgttctctgtcaaaagtgttctgggagaccccagttcccatcacctctctcttctagaatgacccttaagtttctcatcatcaggagcatcccttcaatatgcatatgcctcctcaatggacaaatgaaaaaagtggtttaagtgaaactcactgaggtaacaattcacaatttcatggcatcttttcaattttaagaatgcaaatattttatttttgcatacagaaacattcaaagcacaga

SEQ ID NO: 30094 - DNA, 600 bp, Chicken  19866894249595_1
atcctgatacttaatcccttagcaatgaaaaggaaaaagaagaaggaaggaaaacccgattccctctgctgtgccactttggtaattccttttttataagggttgttaagcatagctggaccgtgacctccaccattgccggtgctgacacctcttgagctgatgatggcgagaggctcttgagatggtcctgagtctagacaagctcaaaaaaatgaatgcctgcctcagcgagttgctttgaagttgaagcattaatgatccaacaacaggcaacatgaaagcagcatgtggtacttraaatctacatctgtttatcttgcagtgtgttacagaacctaactcttaaatatggttcactttttccatcaggttcccaggaaccagaccaagctgatgatcatgcttgaaaagctgggcatgagctacgatgggagacctcacagtggactcgatgactctaaaaacattgcaaggatcgctataaggatgctgcaggatggctgtcagctgcgggtgaatgagaagatgcatgcaggacagcttatgacagtctcctcctccactcctttagagggagccccagctccacagatgccc

SEQ ID NO: 30095 - DNA, 600 bp, Chicken  19866894249599_1
cacggatcccctcgtggacagagtagaggaggaaggagccgacgcctgcagcgcatgggggcagtgagggcagcgctgggcacggccccccggcagacccccaccgacgggtgtgtgtccttcgtgcctctgctctgctcacagccccgcctgctcagaagcgggtgagcagaagggggaaaggctgccctcccacaagcaggatgggacggctgtgggtacaggaagggaagaacacgctctaaaccgagaaccgacgcagccggggatgggatggggcctcagaccacagcagagaayggcagcagagcccctcctggcttcactccgtgaccacggctgcacccagagagctctgcactgcacccccagctcagggcctcacrcagcagcgctgacccccagagctccttatggggcgccgaccccattgtgggcccgggacagacagacacagcccccccctcccccccacctccagctgagcgctggcacagagcgctgcgccgcggccagggctgtgttgttattccatccctgccctgacccagatggtgccgtaactccggccaaaaggacagaacaccgtgcacacaaaca

SEQ ID NO: 30096 - DNA, 590 bp, Chicken  19866894249599_2
cccccggcagacccccaccgacgggtgtgtgtccttcgtgcctctgctctgctcacagccccgcctgctcagaagcgggtgagcagaagggggaaaggctgccctcccacaagcaggatgggacggctgtgggtacaggaagggaagaacacgctctaaaccgagaaccgacgcagccggggatgggatggggcctcagaccacagcagagaayggcagcagagcccctcctggcttcactccgtgaccacggctgcacccagagagctctgcactgcacccccagctcagggcctcacrcagcagcgctgacccccagagctccttatggggcgccgaccccattgtgggcccgggacagacagacacagcccccccctcccccccacctccagctgagcgctggcacagagcgctgcgccgcggccagggctgtgttgttattccatccctgccctgacccagatggtgccgtaactccggccaaaaggacagaacaccgtgcacacaaacagcctttgagaggcgctggcactgagcaccacgggggagggctgtcctttctccaggatgacggtggcaaacggggg

SEQ ID NO: 30097 - DNA, 600 bp, Chicken  19866894249600_1
gttgtgactagtaggtttcagctgttttcagtcaggttcttgtgtacttaagacagataagacttgttttttgtaacaagtacagactttgcattactgccatgcaagtatccttaccgttgtttctgaggggatctgggaatagagcctgtaccaggtgagctcaggtggttctctgtaggaacttttctgtccagctgcaccacttacaagtcctgtttattctctttgtccaatcttagaaaaagcagagtagaagagtgtgaaatgtcatcctgtgcttacagaacaaacagtaaratggtacaatctgaatttctgctgttgagcaaagcttttccatttccctggttactgggtattcatttctttgagtcagacctattaaaaatagctcactggtactgataaacaatttctcagccaattaactgtaatggtctatactaatgaagtcragtccttctgtttgggtagccaagtagtggaacttaattattaaacagttgtctggctccttagtaaaaactctatagcttaaattatacagacttggctttttcttccaaactgatcgtataccatttcccagaaggttaa

SEQ ID NO: 30098 - DNA, 600 bp, Chicken  19866894249600_2
tgagctcaggtggttctctgtaggaacttttctgtccagctgcaccacttacaagtcctgtttattctctttgtccaatcttagaaaaagcagagtagaagagtgtgaaatgtcatcctgtgcttacagaacaaacagtaaratggtacaatctgaatttctgctgttgagcaaagcttttccatttccctggttactgggtattcatttctttgagtcagacctattaaaaatagctcactggtactgataaacaatttctcagccaattaactgtaatggtctatactaatgaagtcragtccttctgtttgggtagccaagtagtggaacttaattattaaacagttgtctggctccttagtaaaaactctatagcttaaattatacagacttggctttttcttccaaactgatcgtataccatttcccagaaggttaactttcaacacaagcagaacaaataatttatctaatccagatgctgtttgtagaaggaatgaataaccacttagaacagttgcacaatccaaaatgaactacgtattttaagaagtcaagatggtttcacatctgatccggggtgataaccctgaaagc

SEQ ID NO: 30099 - DNA, 600 bp, Chicken  19866894249600_3
ttatttacatgacattgacaacataggaggaaaacacactcatgttgttatagcaaatccagcaccattaatgctatgtgctttgatgagcagtgagtaaggcagtgcatgttgcacttgtaaaaataggcatggccatccagaacacggcttgtcagcttgtctttcagattgctgtagccactgctgaagcacaccatcaacccacgccattgtgctcacaatccacacttgggtctcagtaaaggttcagcaagtgtcagtgagtttttttctgcatggaggaattcagtgacacamcttgccttcatatgcacttccctgtcaggtgttctgtctgactgcccctctgctgtcatctgtcacacagcaacaaaatgtaatgggatattggtgagaaggttcaacctctgctgttgtaccaccaacatctgcctctgacatcatgggccaacagaatacaaggcattactttcagatcagccctcgtatgttggacatgcaagtcacatggacattttgtgtcctcaagtgctttttctgcctttctgtctttatttcaaactcaatgtggcaggggacattactgtacataaagac

SEQ ID NO: 30100 - DNA, 600 bp, Chicken  19866894249601_1
agccagagtcctgaacagacacattcttgggcagggcctctgcctgggttgccacagtctttgtggggcaagttcatttcctagtggagactatagtaaatctgtggtcttggaggctgccaataggtaagctggtctcttgggagaggagggacaatagttctgctgcctgctgcacaaattaccacacctgcggctgcagtacactgtgggtgctgcacacacactgccttctcctcacttcactgctgcgtcgcagcccccgcagaagatttttccaaggcaggggcatggatgcgratctgttgccctggcaatgcccacaccacgtcagccactctcacgagagctgccaaacaactctgttatctcagggttctcctggtaaaggaactgaccaaaaagtccctcrcgatcagttgctgcagttctggatgggatggctgcaaagcagataaacttggcaatcaaggtaaacttgtatccacaggtaaacttgtaaatcagttggactttgttctctttgtcttcatatgtcaccttttcagtgttagtgagctaaaataacagtaaactagaactagacagatttaaaagcag

SEQ ID NO: 30101 - DNA, 600 bp, Chicken  19866894249601_2
gaggctgccaataggtaagctggtctcttgggagaggagggacaatagttctgctgcctgctgcacaaattaccacacctgcggctgcagtacactgtgggtgctgcacacacactgccttctcctcacttcactgctgcgtcgcagcccccgcagaagatttttccaaggcaggggcatggatgcgratctgttgccctggcaatgcccacaccacgtcagccactctcacgagagctgccaaacaactctgttatctcagggttctcctggtaaaggaactgaccaaaaagtccctcrcgatcagttgctgcagttctggatgggatggctgcaaagcagataaacttggcaatcaaggtaaacttgtatccacaggtaaacttgtaaatcagttggactttgttctctttgtcttcatatgtcaccttttcagtgttagtgagctaaaataacagtaaactagaactagacagatttaaaagcaggcatcatatctgatcctgtcagttggaccactacaccaaacttcataccattttgtgttcactgaagagacctttcacacctttttaactgtccaaaactctaaagcatttg

SEQ ID NO: 30102 - DNA, 600 bp, Chicken  19866894249606_1
tatatagaataggtctttaacttgcagatgctgtctattatgtgagtgattagctcaattgtatcatgtaatttatacgatcctctttttgaagaatgttaatccaacaacagatagtatatttaagcctactaataatagaactaactgttttttctccctattgttttcccagatgttgacttattttgctgcatttgaggtattctttgaagaaaatctgccaaagctatttgctcacttcaaaaaaaataacttaactccagatatctatcttattgattggtaagacattgaaarcataattactaatttgcatactagctttagctgcatgtctgtattcttaatgtaagctggagctctcttagttgttttaatattttctaaggtaaaagttttatcttgtgttcagtaattgaatttatcaatccaaatatttcttacagacttctgtgataagcttaatacttgcttagcctttattactctagttctgttgatttgaagcttcttttgcataaagctgrataacagtgtttatcaatattaggacatacctgaattctgagaaaagaagggaggatgcagtgaaggtat

SEQ ID NO: 30103 - DNA, 600 bp, Chicken  19866894249606_2
tatttgctcacttcaaaaaaaataacttaactccagatatctatcttattgattggtaagacattgaaarcataattactaatttgcatactagctttagctgcatgtctgtattcttaatgtaagctggagctctcttagttgttttaatattttctaaggtaaaagttttatcttgtgttcagtaattgaatttatcaatccaaatatttcttacagacttctgtgataagcttaatacttgcttagcctttattactctagttctgttgatttgaagcttcttttgcataaagctgrataacagtgtttatcaatattaggacatacctgaattctgagaaaagaagggaggatgcagtgaaggtatagatgtgagcagtgcattattcctatgttatgtggtctcagatcctacgtagaggatcctggcacaagttgtttaaaaactgcacttcagtaacataaaggctttaacatgtttttaattactccagctattgcacttagcagacaggtagttacaatccttttattttgtgagattgcctttctttttagctctgtgtagttttagtctttttccttagaggtagaaga

SEQ ID NO: 30104 - DNA, 600 bp, Chicken  19866894249610_1
gtccctcaacacaacatccaaacgctctttgaacaccaccaggctcggtgactccaccacctctctgggcagcccattccagtgcctgaccaccctttcagagaagtagtatttcctaatgtctatttacatagatgggaaggcgtgaatgtaaaaccataggcacttgcagtggacacaggaggaggtgtagtgctgcaaacgtattctttttaagtgattagatttaaaactgctgctggctctcccaaagagattccttttgatgtcctacagcactctagctcagataaaaataawaaaaaawaataattccaaagatgcgtgtaaagtcttatggaagggctattcagatccctcagtatactggcttaagtagaagcattttagaaacaatttttgaggcttgaattctctcagccctctgtggagccatttggagttctcaccccgcatgggactgcctgtgactgtgcttcttgccctggctatgatacctctgtcctgggctgacctttttcatccacataagctttaagaaggcaataggtactcactttggccacactgttccatgtgccagcacccagcatcccactc

SEQ ID NO: 30105 - DNA, 600 bp, Chicken  19866894249610_2
aacacaacatccaaacgctctttgaacaccaccaggctcggtgactccaccacctctctgggcagcccattccagtgcctgaccaccctttcagagaagtagtatttcctaatgtctatttacatagatgggaaggcgtgaatgtaaaaccataggcacttgcagtggacacaggaggaggtgtagtgctgcaaacgtattctttttaagtgattagatttaaaactgctgctggctctcccaaagagattccttttgatgtcctacagcactctagctcagataaaaataawaaaaaawaataattccaaagatgcgtgtaaagtcttatggaagggctattcagatccctcagtatactggcttaagtagaagcattttagaaacaatttttgaggcttgaattctctcagccctctgtggagccatttggagttctcaccccgcatgggactgcctgtgactgtgcttcttgccctggctatgatacctctgtcctgggctgacctttttcatccacataagctttaagaaggcaataggtactcactttggccacactgttccatgtgccagcacccagcatcccactctatacca

SEQ ID NO: 30106 - DNA, 599 bp, Chicken  19866894249611_1
  misc_feature (1)..(148): n is any nucleotide
nnnnnnnnnnnnnnnnnnnnnnnnnnnnnnnnnnnnnnnnnnnnnnnnnnnnnnnnnnnnnnnnnnnnnnnnnnnnnnnnnnnnnnnnnnnnnnnnnnnnnnnnnnnnnnnnnnnnnnnnnnnnnnnnnnnnnnnnnnnnnnnnnnnncagttttaaatctaatcacttaaaaagaatacgtttgcagcactacacctcctcctgtgtccactgcaagtgcctatggttttacattcacgccttcccatctatgtaaatagacattaggaaatactacttctttgaaagggtggtcaggyactggaatgggctgcccagagaggtggtggagtcaccgagcctggtggtgttcaaagagcgtttggatgttgtgttgagggacatggtttagcgagaaccattggtgatgggcaaatggtcggactggatgatcctgtgggtcttttccaaccttagtagttctatgattctatgattctaaatagtcatacagacaggccaagatgaagaarytcaaagctgcttttgcaatgaaagaaaacacttagcataaaccagttgagtacccatgctttttgatcgatttctttgactggga

SEQ ID NO: 30107 - DNA, 600 bp, Chicken  19866894249611_2
gcaagtgcctatggttttacattcacgccttcccatctatgtaaatagacattaggaaatactacttctttgaaagggtggtcaggyactggaatgggctgcccagagaggtggtggagtcaccgagcctggtggtgttcaaagagcgtttggatgttgtgttgagggacatggtttagcgagaaccattggtgatgggcaaatggtcggactggatgatcctgtgggtcttttccaaccttagtagttctatgattctatgattctaaatagtcatacagacaggccaagatgaagaarytcaaagctgcttttgcaatgaaagaaaacacttagcataaaccagttgagtacccatgctttttgatcgatttctttgactgggagcccttgcagacatcacaacattgatgatgaccataggtaaaaagccacacatggcctaaagtgtgactcttctactgaaggtgttcccccattggctatgagatacaatgacgtactgcagtctgctcagtgcccacagtgaaggcctgctttgcagtgtctcctgcacactgcagtagacaggtgggtttatatgtgcctgaaatactttgt

SEQ ID NO: 30108 - DNA, 600 bp, Chicken  19866894249611_3
caagtgcctatggttttacattcacgccttcccatctatgtaaatagacattaggaaatactacttctttgaaagggtggtcaggyactggaatgggctgcccagagaggtggtggagtcaccgagcctggtggtgttcaaagagcgtttggatgttgtgttgagggacatggtttagcgagaaccattggtgatgggcaaatggtcggactggatgatcctgtgggtcttttccaaccttagtagttctatgattctatgattctaaatagtcatacagacaggccaagatgaagaarytcaaagctgcttttgcaatgaaagaaaacacttagcataaaccagttgagtacccatgctttttgatcgatttctttgactgggagcccttgcagacatcacaacattgatgatgaccataggtaaaaagccacacatggcctaaagtgtgactcttctactgaaggtgttcccccattggctatgagatacaatgacgtactgcagtctgctcagtgcccacagtgaaggcctgctttgcagtgtctcctgcacactgcagtagacaggtgggtttatatgtgcctgaaatactttgtc

SEQ ID NO: 30109 - DNA, 600 bp, Chicken  19866894249616_1
gaagaggatgactgcacaggaagggatcagtaaaagaccataagcagaaataacccatgagggcagaactgagaataagaactgagattagatccagggggtcagaccaatgggccatcaaacccatgatggtttgatgcagagtccactctttcagcattcataagaattgagtaggggggagtaagggtggggtgagtacgtacggatcttcccaaacacccttccaacctacagctatgcacctcagccaggtgtgatttctgtgtagttcacaagcctcagtggatttctctcccrtgggattctccagcctytttctggacctgtatacacggtagttgggttggttttttttttctgtctctctttttttccccccactacaatgtccctcagcaaacatagtcctcatctctcaaacaaacaaatcccattctctaagtacccagataagagctgatttttgctttaagcctgtgggggagatgctggactattataaaggtatcagtgctgcctcttctccagacaccartgttttttccatttaatttcctgaacaggtcaggaacacggtgcaacatgattgtaagcaca

SEQ ID NO: 30110 - DNA, 600 bp, Chicken  19866894249616_2
aggaagggatcagtaaaagaccataagcagaaataacccatgagggcagaactgagaataagaactgagattagatccagggggtcagaccaatgggccatcaaacccatgatggtttgatgcagagtccactctttcagcattcataagaattgagtaggggggagtaagggtggggtgagtacgtacggatcttcccaaacacccttccaacctacagctatgcacctcagccaggtgtgatttctgtgtagttcacaagcctcagtggatttctctcccrtgggattctccagcctytttctggacctgtatacacggtagttgggttggttttttttttctgtctctctttttttccccccactacaatgtccctcagcaaacatagtcctcatctctcaaacaaacaaatcccattctctaagtacccagataagagctgatttttgctttaagcctgtgggggagatgctggactattataaaggtatcagtgctgcctcttctccagacaccartgttttttccatttaatttcctgaacaggtcaggaacacggtgcaacatgattgtaagcacagcacgttcatggagcga

SEQ ID NO: 30111 - DNA, 600 bp, Chicken  19866894249616_3
ataacccatgagggcagaactgagaataagaactgagattagatccagggggtcagaccaatgggccatcaaacccatgatggtttgatgcagagtccactctttcagcattcataagaattgagtaggggggagtaagggtggggtgagtacgtacggatcttcccaaacacccttccaacctacagctatgcacctcagccaggtgtgatttctgtgtagttcacaagcctcagtggatttctctcccrtgggattctccagcctytttctggacctgtatacacggtagttgggttygttttttttttctgtctctctttttttccccccactacaatgtccctcagcaaacatagtcctcatctctcaaacaaacaaatcccattctctaagtacccagataagagctgatttttgctttaagcctgtgggggagatgctggactattataaaggtatcagtgctgcctcttctccagacaccartgttttttccatttaatttcctgaacaggtcaggaacacggtgcaacatgattgtaagcacagcacgttcatggagcgagctgctgctgcagctcagaaatgcagcagtca

SEQ ID NO: 30112 - DNA, 600 bp, Chicken  19866894249616_4
tatgcacctcagccaggtgtgatttctgtgtagttcacaagcctcagtggatttctctcccrtgggattctccagcctytttctggacctgtatacacggtagttgggttggttttttttttctgtctctctttttttccccccactacaatgtccctcagcaaacatagtcctcatctctcaaacaaacaaatcccattctctaagtacccagataagagctgatttttgctttaagcctgtgggggagatgctggactattataaaggtatcagtgctgcctcttctccagacaccartgttttttccatttaatttcctgaacaggtcaggaacacggtgcaacatgattgtaagcacagcacgttcatggagcgagctgctgctgcagctcagaaatgcagcagtcagattgtgatatgcatctcttacacaggaaattatgctctatttttatattattaaatctagcatacgagaaaggacatccagtttatatcagatcgtgcaaggaagttaattatttttagtttgatcattatcatcggcactgcagctgtagctagggaggggttgaagctcttcagctatcgactcct

SEQ ID NO: 30113 - DNA, 550 bp, Chicken  19866894249621_1
taccaatttttggtctgaatcagctttaagtcaggaaatggagaagtgtgtttgcatgctcaccttgcgtaagaatgagagcaaaataacatgttactcatttcaataaagtgctgttctgtcattaaacattcaaatgggcaataaaatcgctccgcaaacctgagggaacctgctagaccaaacacaaaagggttttgttaaaaagacaaggaaaagaaagaaaaggaaggggagaaaaggaaaaagaggctgttagtgttgatgttatgaggtcctgtgatctagtggttgacaacygtgcccatggcagggggtaggaactaggtgatctttaaggttaccttcaacctaagccattctatgattctatcatcctaattttttgtgtgtggctgtactgtggctgacgtagagcacatatgtgaatatactgataaattgtaaagacttctcagagaccttgtgggttgctcttaaatttgtgtgtccttttggtgaaatgtttcacctggcacattcccttttcattacagtgcaatttctaagt

SEQ ID NO: 30114 - DNA, 599 bp, Chicken  19866894249625_1
  misc_feature (1)..(5): n is any nucleotide
nnnnncagcagcaggatttgcaactgctgctctccaggaatctgccaggcttgtgtgggatgacgttgcatttaagagcacctccaaggactgtagttcttatctgggaaaagcttctggttaaaatcagagacaattttcctggtgagactccacctcctgggctgtgacattgtcctctgcagtggggacatgggaagtggccagggctggcaaacaaggagagcctgcctgtgcaagggcattttccaagctcccagtgacaagataaaggccaaagaactgacatgggttacacaytgagacggtttcagtcttagagaacctggaaaattgttgtctctgagcgcatgcttgggtgcctgagcaccttggaaaacctcttgagatgatgtagtaaagctgttttgagacatataatgtatgtgtgtttgagtgttacatatgatccatccttaaaaaatgagaaaaatkttttggtacstactaggggctgcatgttctctgaactatcttaccaatttttggtctgaatcagctttaagtcaggaaatggagaagtgtgtttgcatgctcaccttgcgtaagaatgagagcaa

SEQ ID NO: 30115 - DNA, 583 bp, Chicken  19866894249625_2
gtcctctgcagtggggacatgggaagtggccagggctggcaaacaaggagagcctgcctgtgcaagggcattttccaagctcccagtgacaagataaaggccaaagaactgacatgggttacacaytgagacggtttcagtcttagagaacctggaaaattgttgtctctgagcgcatgcttgggtgcctgagcaccttggaaaacctcttgagatgatgtagtaaagctgttttgagacatataatgtatgtgtgtttgagtgttacatatgatccatccttaaaaaatgagaaaaatkttttggtacstactaggggctgcatgttctctgaactatcttaccaatttttggtctgaatcagctttaagtcaggaaatggagaagtgtgtttgcatgctcaccttgcgtaagaatgagagcaaaataacatgttactcatttcaataaagtgctgttctgtcattaaacattcaaatgggcaataaaatggctccgcaaacctgagggatcctgctagaccaaacacaaaagggttttgttaaaaagacaaggaaaagaaagaaaaggaaggggagaaaag

SEQ ID NO: 30116 - DNA, 573 bp, Chicken  19866894249625_3
gtggggacatgggaagtggccagggctggcaaacaaggagagcctgcctgtgcaagggcattttccaagctcccagtgacaagataaaggccaaagaactgacatgggttacacaytgagacggtttcagtcttagagaacctggaaaattgttgtctctgagcgcatgcttgggtgcctgagcaccttggaaaacctcttgagatgatgtagtaaagctgttttgagacatataatgtatgtgtgtttgagtgttacatatgatccatccttaaaaaatgagaaaaatkttttggtacstactaggggctgcatgttctctgaactatcttaccaatttttggtctgaatcagctttaagtcaggaaatggagaagtgtgtttgcatgctcaccttgcgtaagaatgagagcaaaataacatgttactcatttcaataaagtgctgttctgtcattaaacattcaaatgggcaataaaatggctccgcaaacctgagggatcctgctagaccaaacacaaaagggttttgttaaaaagacaaggaaaagaaagaaaaggaaggggagaaaag

SEQ ID NO: 30117 - DNA, 529 bp, Chicken  19866894249631_1
aacgcggacacatgcttttttctccaaattctcaaaatttatcatcggaaagtctctctcttttctggccagctctggctcgtatgagaggatggaaaatatctggaggcaatgtcaaggcacgctgagctgccatttccatgttgtctttccctggtgtgagcgtgtttcctccctgggaaatttcccttttggccccatactgtgtcatcctgagggtctgggacagccgcaggtgaatcctacctctccagggccatgcgatggggggtgacatcacagtgtgcccgcgggtccccrggctgcatgcttcatcacaacctcaatagcgtatgcttggcacaggcacagtgggctggcatggtgcagaggggctcgcattcctctgcaaaagggttattcatactcaggtctcttggggcactgggaatagggacagggagcaggactgggtctgcaggaggaggagatggaggcgggactgaaatggttctaggggaaatggttagggaaaaggaaaggatggggg

SEQ ID NO: 30118 - DNA, 600 bp, Chicken  19866894249632_1
caagccccatggcatacctgttttctattaaatctgtggtagacagttgttgggaaagaaacaaggaatcctcagacttgttcctttcaaactctagaaatttggcaatttgtttcataccctaacatgacacaagaaagaccccttaactgggagaaacactggaagaagagcaaataaagtccatccaccctgctgttaatcaagagcagataacatttccagggctggcactgacaggtcttgggatacctccatgactgagatagacagcttcagttcttaggttctcatggaaarccctaaatctattgaggatgtggcattggrtgacggaacaccacacatccatcaaaccacgctcaccagtcaatgttatggactcatcttctgtggtctcagctagcattggctttcatagtagttcagtagcatactgtaatagkgaatcttctctgtggcctcttttcaacccagacctttatttttttgaaatattcagcaaagggcacacagatgctttgcagcttggcaaactgaagtaattcatttcacagtgtgccttgcacagtcctctgggcacatgggcagcctgtgttt

SEQ ID NO: 30119 - DNA, 600 bp, Chicken  19866894249632_2
aatctgtggtagacagttgttgggaaagaaacaaggaatcctcagacttgttcctttcaaactctagaaatttggcaatttgtttcataccctaacatgacacaagaaagaccccttaactgggagaaacactggaagaagagcaaataaagtccatccaccctgctgttaatcaagagcagataacatttccagggctggcactgacaggtcttgggatacctccatgactgagatagacagcttcagttcttaggttctcatggaaarccctaaatctattgaggatgtggcattggrtgacggaacaccacacatccatcaaaccacgctcaccagtcaatgttatggactcatcttctgtggtctcagctagcattggctttcatagtagttcagtagcatactgtaatagkgaatcttctctgtggcctcttttcaacccagacctttatttttttgaaatattcagcaaagggcacacagatgctttgcagcttggcaaactgaagtaattcatttcacagtgtgccttgcacagtcctctgggcacatgggcagcctgtgtttccatactcaatgagtgtaaagcctgattct

SEQ ID NO: 30120 - DNA, 600 bp, Chicken  19866894249632_3
taactgggagaaacactggaagaagagcaaataaagtccatccaccctgctgttaatcaagagcagataacatttccagggctggcactgacaggtcttgggatacctccatgactgagatagacagcttcagttcttaggttctcatggaaarccctaaatctattgaggatgtggcattggrtgacggaacaccacacatccatcaaaccacgctcaccagtcaatgttatggactcatcttctgtggtctcagctagcattggctttcatagtagttcagtagcatactgtaatagkgaatcttctctgtggcctcttttcaacccagacctttatttttttgaaatattcagcaaagggcacacagatgctttgcagcttggcaaactgaagtaattcatttcacagtgtgccttgcacagtcctctgggcacatgggcagcctgtgtttccatactcaatgagtgtaaagcctgattctactttctcttggctgaactcaccaagtgcgatgcacagcacctcagcattttagtagctgctgcctcactgcatacagatttctgtccctgccagatgtttgttatactgtcttga

SEQ ID NO: 30121 - DNA, 600 bp, Chicken  19866894249637_1
ttttcttttttctttttttccccctttttgctaatagctacatgctcttggacaaggcatgcctgaagttcttcccaagcccctaccagccatgttttcacctcagcactcacagcttaaccatgtttctttgcaaagagacgtctttcccaatctgaattgcctttctctgatttcattactgcaaagcaccaacgacacggtgctttgcaatccttttgagctgagattagtgcacagcttaataactgctccatcctctccgaaagcatcagggatttgatttgatcactggaaaayaaatgtatattgctgaagccgaacagcacaaggacaaggcatgggttcaaacttcagcatggagatgtgtcatggaaggtcatgtgggggattaggaaaaggttcttcaccagagggtggtcgacatggaacaggctccccagggcagtgggcacagtcccgagctgccagaattcaaggagcatttggataccgctctcaggcatagggtttgaattttgggtggtcctgtgtagggccaggagttggactcaatgatccctgtgggtcccttccaactcgggatattctatcattgta

SEQ ID NO: 30122 - DNA, 600 bp, Chicken  19866894249640_1
aatgcgtacaagggaacaatcccttccttgcgttgttggttgcgctacttctgacgcaaatgtgaaagtgtgctcccctctcctcctcctcctcactccccctgcttactccttcggagtggccttatacacaggaagacaatgagcaagagtactcttgttaaaacagatcaatgaccaaaaatctgcctcaaactggggacctgatgaaacagaagcttggttcaacagctgaaggccaatcgagcacgcacctcagaagtatgactgccaatcaatcctcacaccccataaatggcragcagcctataggatggcctgggttgaaaaggaccataatgatcatctcatttcaatccccctgctatgtgcagggccaccaaccaccagaccaggctgtccagagccacatccagcctggcctggaatgcctccagggatggggcaaacacaacctccttgggcaacctgttccagtgcttcaccaccctctgggtgaagaacttcctcctaatrtctaacctaaatctccccggtctcagctgaaaaccattccmccttgccccacgaggccctggcgctctccagcagggcagcagg

SEQ ID NO: 30123 - DNA, 493 bp, Chicken  19866894249640_2
agcttggttcaacagctgaaggccaatcgagcacgcacctcagaagtatgactgccaatcaatcctcacaccccataaatggcragcagcctataggatggcctgggttgaaaaggaccataatgatcatctcatttcaatccccctgctatgtgcagggccaccaaccaccagaccaggctgtccagagccacatccagcctggcctggaatgcctccagggatggggcaaacacaacctccttgggcaacctgttccagtgcttcaccaccctctgggtgaagaacttcctcctaatrtctaacctaaatctccccggtctcagctgaaaaccattccmccttgccccacgaggccctggcgctctccagcagggcagcaggtcgcatggcaggactcccctcaagtaagggcatctcttgaggttcgtcctgtgcagagatcccttgcactgcagtgccaagatgccttagcaatactgatcctcgctag

SEQ ID NO: 30124 - DNA, 452 bp, Chicken  19866894249640_3
agaagtatgactgccaatcaatcctcacaccccataaatggcragcagcctataggatggcctgggttgaaaaggaccataatgatcatctcatttcaatccccctgctatgtgcagggccaccaaccaccagaccaggctgtccagagccacatccagcctggcctggaatgcctccagggatggggcaaacacaacctccttgggcaacctgttccagtgcttcaccaccctctgggtgaagaacttcctcctaatrtctaacctaaatctccccggtctcagctgaaaaccattccmccttgccccacgaggccctggcgctctccagcagggcagcaggtcgcatggcaggactcccctcaagtaagggcatctcttgaggttcgtcctgtgcagagatcccttgcactgcagtgccaagatgccttagcaatactgatcctcgctag

SEQ ID NO: 30125 - DNA, 600 bp, Chicken  19866894249641_1
tccagccctgagacctgaactgggcactgacctcatgagatgaagtcattcccatactaggaaacaggggagggacacgggagccctcagtgtggagatacttagtggtattactaatttaattttattttttaataattttgtactgttcttttaaattgtttattgtccaatcttgaaataagtcatgaagaggtccagtatggaaacaggatttggactcgatgatctaaaccacacatcaaaatacatgaaaattgctgctcatttctatagaacaaccacacagacttctgaacrcatttggtaaaaactccatcccatgcaattcagttgttttactgcaaaagcagtggagtatcattaagattcagaacacaggttggctctgagataacattaacatgtacatgaactggaatttaccagagaaaaacaaactagagactcagacaacaaactctggtacaccacagaagttaatgagaaagatgaaaccaaggttatgcagtgcactacagaaactattttattcactctcatgcatgacaatttttttcttgggcaagtatctaagtaacactcaaataaacactctac

SEQ ID NO: 30126 - DNA, 600 bp, Chicken  19866894249642_1
ctgaaattgcatcctctcagtctatggacaagaggcatttagtcctgccactgtagatgtggatggctgcaaaggagctagaagtttcttagcttcccttagtcatgatgaaccatgcatactttaaatacaccaaaatgatgacattttatcatatcctcagtagaagtcagcataacgtgctctctcagggagagaacaacattggtaaggaacacaagacactgagaatactgtcatttaactatttaatgagtcctcagcaagcttatattagccaccagtagtgtccctgggccratacctcagagtgaatcctacccarcttagctatttaaatctgaatcttttgactgtgagaaaaaagttatggatcatccttcccccacctgatgcttcttctcccacatgtactgtaacgtcacatattctacacattcaacgcaacaaagtttggatccaaatgccgagcgaatcctgttgatcaagaagaaatgatggctgtcatccatggcatagaagtgattgaaatccaagaagatgacttctttggggtgttgctcaagaaaggtgttaatctccattagtccatcccatact

SEQ ID NO: 30127 - DNA, 600 bp, Chicken  19866894249642_2
ggacaagaggcatttagtcctgccactgtagatgtggatggctgcaaaggagctagaagtttcttagcttcccttagtcatgatgaaccatgcatactttaaatacaccaaaatgatgacattttatcatatcctcagtagaagtcagcataacgtgctctctcagggagagaacaacattggtaaggaacacaagacactgagaatactgtcatttaactatttaatgagtcctcagcaagcttatattagccaccagtagtgtccctgggccratacctcagagtgaatcctacccarcttagctatttaaatctgaatcttttgactgtgagaaaaaagttatggatcatccttcccccacctgatgcttcttctcccacatgtactgtaacgtcacatattctacacattcaacgcaacaaagtttggatccaaatgccgagcgaatcctgttgatcaagaagaaatgatggctgtcatccatggcatagaagtgattgaaatccaagaagatgacttctttggggtgttgctcaagaaaggtgttaatctccattagtccatcccatactttaatgccaaacaatccatgtatga

SEQ ID NO: 30128 - DNA, 600 bp, Chicken  19866894249655_1
tacctagctcactcaacttctcatctgtcttttctgctatcattccatgccgtctttgctgctccaaaagggaattaagcatactccacttgaaatgagaagaaaaaggaagaaatgagtcccagatgagcttgatggctgaattcctgctacactctgagagaaagatttcactggcaatagtttggcaagctctcccagagacgtcaagcataactcatctgtaaatgcatttgctggtctctctgcaaaactgaaaccacaatgcagccctgtgctgagatgccttagctggctgascagccatgggagagtacagctgccatagggtgctacctgtttcaaaatattagtggtgctgagaagctcagcaaacaagtatttcacatcagctgatagaactaacactacattttgctacctagacgagcatatggattcaaaagaaaagcatcatggcaaatcaaaggaaacccttaaaactgcacaagtccttccartaaaatggattctgattttttttccatttaatcaaacataaaacattgagcaagaattaataaaattgacactttcctggttttgtttagaggccgataa

SEQ ID NO: 30129 - DNA, 600 bp, Chicken  19866894249655_2
gagacgtcaagcataactcatctgtaaatgcatttgctggtctctctgcaaaactgaaaccacaatgcagccctgtgctgagatgccttagctggctgascagccatgggagagtacagctgccatagggtgctacctgtttcaaaatattagtggtgctgagaagctcagcaaacaagtatttcacatcagctgatagaactaacactacattttgctacctagacgagcatatggattcaaaagaaaagcatcatggcaaatcaaaggaaacccttaaaactgcacaagtccttccartaaaatggattctgattttttttccatttaatcaaacataaaacattgagcaagaattaataaaattgacactttcctggttttgtttagaggccgataaaactgaagtgctgctttgtcataagattgagcacaaataaaacagttagcataaaacagcctataccaccattcaaaaaactgttggcaatagaagcactctttcttgtggaaggatagggctatttttttgttttaaatcaacactattaccccaaacatgccaccagttatttcaagtactctatactcacagtagaa

SEQ ID NO: 30130 - DNA, 600 bp, Chicken  19866894249658_1
tgttgcagctctgggggctttaatgtttttcaaaagcatcaatcaagtgccaaaaactgtctggctaattacctctgagactttctaaaactctccattctttcctcatagaaatgtagtatttataaattgctttgttgaagcacaaacgaggttatggcctattcccctctccccacctttctttgcttctgctttacgcttgtggaagtgctgatattgtgaatctaaacgtttgtcagtatttctgtctaaccgagatagccatcccttctttcctcctgtacatttctgaggggraaaaaaaaaaagttttggcaatctcataccgtaactgtttcaagactatttaatttctgagaatctcaggaaaggaaccaaaggaagactaactaatggactctcaatcatcatccaaaggtcttgtttcagtggaggttttgggagttgaatagcagcaatgatttgaataaatttgcggcttccttgaattaactactaatctggaagccagcagtatttcaaagacaacatagactcaaaataataattwaaaaataatttaaaaaattggcttgaagggacttctggagggtgtac

SEQ ID NO: 30131 - DNA, 600 bp, Chicken  19866894249658_2
aaccgagatagccatcccttctttcctcctgtacatttctgaggggraaaaaaaaaaagttttggcaatctcataccgtaactgtttcaagactatttaatttctgagaatctcaggaaaggaaccaaaggaagactaactaatggactctcaatcatcatccaaaggtcttgtttcagtggaggttttgggagttgaatagcagcaatgatttgaataaatttgcggcttccttgaattaactactaatctggaagccagcagtatttcaaagacaacatagactcaaaataataattwaaaaataatttaaaaaattggcttgaagggacttctggagggtgtacctctcaacttgctgctccaaggaaggggaacttcagtgctgcatgaaggaactcagattttttcagctgagatttgaaaatctccagaaaaagatctaccagttctttgggcagcctgctatggcactcaatcactgtcacattgaagagtttttcccttctgtacctttctacttgcttgatagccatctgtaattcagctggtgttggacttccttcctaggctaagatcttagatgtccatctgtttgtt

SEQ ID NO: 30132 - DNA, 600 bp, Chicken  19866894249661_1
aggtttgagttgttgctcattatgagcctaatgggcaaaaagtggacttggagggaattgcttgccagagtctgagtccctgataaacaacttgctacagctgcatacaaaataaacaaatgagaggctaagataatgcagatcttgaataattaggcatgggaagagttttgtgtgaatgcctttatccatttaatgaacctcttgtacaaagtgcgtaccctggagccctgcaggcagcataggtaatcaccaaccacaaggctgacaggccagcagcgtgaaatcgctgattttttkggggagcattagaaattgtagcacttatttacagacacgtcagaaacacatttctggatgactgtgaataacttacttctagatgatagtaattaacttaatcctcacaagtcaagattgcagcttagtgtttaaatcattttccattatgcaaactccactgttagatgcagcagttcaaaagtctgtttgagacatgactcctaattgcaaagagcattttcatttttatagctgtgcacagacgtatctccatgaccaatgaaataagttccacagacattacgtagtcgtctggaa

SEQ ID NO: 30133 - DNA, 600 bp, Chicken  19866894249665_1
gccaatgttccttctttgcacctttcttagtagttcagctcttctactaaatgcttttaacacaatgaatgcactcctaaggctacttgtaaaattaccaggtgcagccttattaaacatttatttagactaaagacaacaaattaaaatcacaaagcgagtgagcaccaagtgacatactgtgaccaaaactaaacaaatatgagtggtccaccaatgaattattttccagccttgagttcacatcatccatccccactctccatgttcacaaaatctcccacaaatcgatagtaaatytcatcgattgcaattggaacaggattacaaccttctctccctccaggtcaaaaggtgcaatgaatacaaactaagtactttcagagaccacttcatgattgtatttataccatatgggcagttatgattattccatggaataatgttcatttatttcaacaacaatctgacaaactaaatttatgctgcacctttggcctccttgcttgaactctgctcagcaatgtctctcagctgggactacttcatattacacaaaacctccaaacaactttcagaccatcagtattgcttggatat

SEQ ID NO: 30134 - DNA, 600 bp, Chicken  19866894249668_1
agctgttggagagggtccagagaagggccacaaaaatgatcagagggctggagcacctcccctacgaggataggctgagggagctgggcttattcagcctggagaagagaaggctgtggggtgacctcattgcagcttttcagtatctgaaaggagcctataaacaggaagggagtaaactctttgaaagggtagataacagcaggataaggaggaacagttttaagttgaaagagggaagatttaggttggatgttagggggaagttctttaccaggagagtggtgaggtgctggaacrggctgcccagagaggttgtagatgccccatccctggaggtgttcaaggacaggttggatgaggccctgggcaacctggtctagtaaatgtggagtttggtggccctgcatggcaggagggttggagattcatgatccttgaggtcccttccaacccaagccattctgtgtttctgtgattctgtgattcacggtaatctagtaattccctaccatgcacttacatagatataaggtaaggttatactttaaatcagttttgcttaaatgatggaggatggatcctactcatagagctgca

SEQ ID NO: 30135 - DNA, 600 bp, Chicken  19866894249668_2
ccctttttgtaaaagatttcttccttatatccagactaaatctcccctccattagtttgaaacccttccccctaatcctgtcaccacagactctgctaaagtgtctgtccccttctttcttacagaccctctataagaagtggttgtacctcttgtctaggtcagaatacagtcaaatgccttgtatgagtctaagttggattcagggtaggaattaggagcttggactagcaatcaggattacatcattgtcacccaaaatatcccagatggaaaggattttattgtgaactgcagcaygcttcttttttcagcaacttgttcttttcgtccactttattcatgacaattcagactgtcttgctttctaatttaagatgtcttcagatggtttttagcctctaaagaaagatcaaacatcagccatatattggtgtttcctcagctgattcttatctctgccctttcctcgtgctgctactcccgcactttcctggccagctttttaattgttcacatagcaagcagtaacccaaagagtttctctaagggaatgtcatctactgtagctcagctgctttgctatggaagcttttccta

SEQ ID NO: 30136 - DNA, 600 bp, Chicken  19866894249670_1
agtgtgttttttcggaagtgatgacaaatatgtccctagtgttaaattcacaattggagcaatttgctggcagcattacacaaaaggctatctctttgttgttcctcatcagcatgagtagcagggattcttgaaatgtcttatcttgtctagacatcaagtctgcagcaatatattaactaggccattattatatgtccagtttcttaaatgttgcatatgcaagttgaaatgacatgggttacctctgaaaaaatctatatatttttttttctgaagacaaattttaccaaatgagcygagtrccttccttgtttttggcaaacagtcaaacctctctgtttctgaatgagatttgacactcagatttcagtacttttattactacagaactctggcatctaagaaggaagcaggggagtcagtgcttttgtgactttcagaatggaattgctgcttactactaggcctagatgacttggcgctttcaaacagtattttaaattgttcagtagaatgatattcttttatgttcaaatgtagattaattgcttgtttacttgtcttctaagttaattttgcttattagtagccctcagt

SEQ ID NO: 30137 - DNA, 600 bp, Chicken  19866894249670_2
gttttttcggaagtgatgacaaatatgtccctagtgttaaattcacaattggagcaatttgctggcagcattacacaaaaggctatctctttgttgttcctcatcagcatgagtagcagggattcttgaaatgtcttatcttgtctagacatcaagtctgcagcaatatattaactaggccattattatatgtccagtttcttaaatgttgcatatgcaagttgaaatgacatgggttacctctgaaaaaatctatatatttttttttctgaagacaaattttaccaaatgagcygagtrccttccttgtttttggcaaacagtcaaacctctctgtttctgaatgagatttgacactcagatttcagtacttttattactacagaactctggcatctaagaaggaagcaggggagtcagtgcttttgtgactttcagaatggaattgctgcttactactaggcctagatgacttggcgctttcaaacagtattttaaattgttcagtagaatgatattcttttatgttcaaatgtagattaattgcttgtttacttgtcttctaagttaattttgcttattagtagccctcagtaatat

SEQ ID NO: 30138 - DNA, 600 bp, Chicken  19866894249670_3
tgtgtttgtatagcacgtggagcaagagcttgttacttctcttacttggaagaagtggagctgtaaaaacagaaaaaagatgactgaagatgtaggtcattacatgcagaatacgttttcctttttcaggaatgctaagtgctctcttgttcaggacttaacattttactttaaatgctgtacttattgataggaaaaaaagaaatatcttcatcttgtgctgttggtgaggcagtgctgaactcatgaaaccgcatggaacaggagaatgaataaggcagagctggatttgatactccrtaagccatcagaaactggaggaggctgacccttgaatgggtaacaaatgcgtgagaggcagagagttcaasgaatgtatgggtgacgttaacaaggtgtgaaggtgaaactgtaaatttgaagtagcttccagatcctcgccagaaataagctgatgagaaacccatgttaagtatataccggatttatcagttctaggtatactaggtttaatattgaattttagcagttgcagtgaaataaatgaataaattgggggaatggggttccaagaaggaatgaaggaacaggcgctcaaag

SEQ ID NO: 30139 - DNA, 600 bp, Chicken  19866894249670_4
gaaaaaagatgactgaagatgtaggtcattacatgcagaatacgttttcctttttcaggaatgctaagtgctctcttgttcaggacttaacattttactttaaatgctgtacttattgataggaaaaaaagaaatatcttcatcttgtgctgttggtgaggcagtgctgaactcatgaaaccgcatggaacaggagaatgaataaggcagagctggatttgatactccrtaagccatcagaaactggaggaggctgacccttgaatgggtaacaaatgcgtgagaggcagagagttcaasgaatgtatgggtgacgttaacaaggtgtgaaggtgaaactgtaaatttgaagtagcttccagatcctcgccagaaataagctgatgagaaacccatgttaagtatataccggatttatcagttctaggtatactaggtttaatattgaattttagcagttgcagtgaaataaatgaataaattgggggaatggggttccaagaaggaatgaaggaacaggcgctcaaagctgacctgggatgtatcttttcttctgtcttcagctgagccaagaaaacggactacagtttccagagatta

SEQ ID NO: 30140 - DNA, 600 bp, Chicken  19866894249684_1
aatgatcagttgctggaagacccattgctattcctgaggtaggaaagtaatggcacagttgtctagcagtgtatttagaacaaaaaccagttgaatggtgttaacagaaacgactgaggatataaaaagctgtgaggagggaggtacagctcctgattttacataccaaataccaattgcaagataagtaaatgaaatttcaactaacactcttattaatgctccatgaaaataaatgttaccttaatattggaaaaccacaggtcgttttcatgcagtgtagcaacataaacagaagtragaagtccaagaaagatggcgacaattccaccaacagttagtgaaagtatgttccacagctttccacctgtatgatcttggaagagaaatatttgactgtgtaactgcaaagcacataattcaacttcagtgaattttggaaactcatctgtatactgtctgtgctggtacagtttacatttcttaggcagcagaacattggatttttagagctctttatggagatgtgtctttactatttcatgcaagaactaagaatacatgcaaagaaaaataaggtgtgccttaactggaaataca

SEQ ID NO: 30141 - DNA, 600 bp, Chicken  19866894249684_2
acagctttccacctgtatgatcttggaagagaaatatttgactgtgtaactgcaaagcacataattcaacttcagtgaattttggaaactcatctgtatactgtctgtgctggtacagtttacatttcttaggcagcagaacattggatttttagagctctttatggagatgtgtctttactatttcatgcaagaactaagaatacatgcaaagaaaaataaggtgtgccttaactggaaatacatagttagaacttaagaacacaacaactctatacaaatagagaaataacatatctwatttataaatcaaaattgaaatatcctccagggcagcatttctaattaaggctatacaagatgactgktacatcacaaagacattgagatcttcaaacttcttagcatagctgccaggttgcttttttttttgggggggggtattaaaaaaactttgaaggctcagaagtctcagtaagcactcacaaggagactgaacagtggccaaagcagcctttgatgatagtgtcaagctttgaaatgcagataatctccttttcacatcagaatgagattacggacagaacaaaggaaaggaaa

SEQ ID NO: 30142 - DNA, 600 bp, Chicken  19866894249684_3
acttcagtgaattttggaaactcatctgtatactgtctgtgctggtacagtttacatttcttaggcagcagaacattggatttttagagctctttatggagatgtgtctttactatttcatgcaagaactaagaatacatgcaaagaaaaataaggtgtgccttaactggaaatacatagttagaacttaagaacacaacaactctatacaaatagagaaataacatatctwatttataaatcaaaattgaaatatcctccagggcagcatttctaattaaggctatacaagatgactgktacatcacaaagacattgagatcttcaaacttcttagcatagctgccaggttgcttttttttttgggggggggtattaaaaaaactttgaaggctcagaagtctcagtaagcactcacaaggagactgaacagtggccaaagcagcctttgatgatagtgtcaagctttgaaatgcagataatctccttttcacatcagaatgagattacggacagaacaaaggaaaggaaaggttgcgtctccaagcagctcaactattgtattagtattgcactgtaagcattgtatacttacattca

SEQ ID NO: 30143 - DNA, 600 bp, Chicken  19866894249693_1
aattaaaagattatatcatctgtctctggcaatctggtggttgtttcagtatcttagcatagcactgagttacctaatattgttttaattcttcacagtgaaccacatgcacggttttatgcagctcagatagtgctaacatttgagtacctccattcattagacctcatctacagagatctaaagcctgaaaatcttttaattgatcagcaaggatacatccaggtatggcagtcttcatatgtttggggggtggactcacatttcgcagtgcagttaaataattgtagcaaatatgtytagagtaaatgagctggttggcatgttagcatatactctggggcatcactgggctgaacttcctgtgacttaaacaaagtatatacatatttattgcctatgcttgaccaagttgtcaggatttcccttggaatctgtggtgaggaggaggtgattatatggctctgttaatctgagctatattatacgtctgccctaaaatgagaaggtaccstacagtgtctgattctctgcactgtctatataagcagttgaggatgattagatgtcaacatctgcagtatagtacttaatttcagg

SEQ ID NO: 30144 - DNA, 600 bp, Chicken  19866894249693_2
gatacatccaggtatggcagtcttcatatgtttggggggtggactcacatttcgcagtgcagttaaataattgtagcaaatatgtytagagtaaatgagctggttggcatgttagcatatactctggggcatcactgggctgaacttcctgtgacttaaacaaagtatatacatatttattgcctatgcttgaccaagttgtcaggatttcccttggaatctgtggtgaggaggaggtgattatatggctctgttaatctgagctatattatacgtctgccctaaaatgagaaggtaccstacagtgtctgattctctgcactgtctatataagcagttgaggatgattagatgtcaacatctgcagtatagtacttaatttcaggcagtacttaatcccccagccttggagagcccataaccttctcagcaactcagatcagaattgcagtgctgcaaatgacttcttctgttttacaacagcttctcagcacctcttcaacttctttttagtttctctgcttgtgatcaaaaggacgaatgggaaggtgatatacagcaacaggcattctgcagtaccttgcagttcttatactgtgg

SEQ ID NO: 30145 - DNA, 600 bp, Chicken  19866894249693_3
gtatatacatatttattgcctatgcttgaccaagttgtcaggatttcccttggaatctgtggtgaggaggaggtgattatatggctctgttaatctgagctatattatacgtctgccctaaaatgagaaggtaccstacagtgtctgattctctgcactgtctatataagcagttgaggatgattagatgtcaacatctgcagtatagtacttaatttcaggcagtacttaatcccccagccttggagagcccataaccttctcagcaactcagatcagaattgcagtgctgcaaatgasttcttctgttttacaacagcttctcagcacctcttcaacttctttttagtttctctgcttgtgatcaaaaggacgaatgggaaggtgatatacagcaacaggcattctgcagtaccttgcagttcttatactgtggaagcttctctttcctcatagtgtcacctttagccatgtctaagtctaacaggaaaataaataacgaaaacattgagagaattggaaaggactcttaacttgagcttttttaactgtacggtaatactgcatggagaagaaaatagcactgtaggaagaagagaa

SEQ ID NO: 30146 - DNA, 600 bp, Chicken  19866894249693_4
tatatacatatttattgcctatgcttgaccaagttgtcaggatttcccttggaatctgtggtgaggaggaggtgattatatggctctgttaatctgagctatattatacgtctgccctaaaatgagaaggtaccstacagtgtctgattctctgcactgtctatataagcagttgaggatgattagatgtcaacatctgcagtatagtacttaatttcaggcagtacttaatcccccagccttggagagcccataaccttctcagcaactcagatcagaattgcagtgctgcaaatgacstcttctgttttacaacagcttctcagcacctcttcaacttctttttagtttctctgcttgtgatcaaaaggacgaatgggaaggtgatatacagcaacaggcattctgcagtaccttgcagttcttatactgtggaagcttctctttcctcatagtgtcacctttagccatgtctaagtctaacaggaaaataaataacgaaaacattgagagaattggaaaggactcttaacttgagcttttttaactgtacggtaatactgcatggagaagaaaatagcactgtaggaagaagagaaa

SEQ ID NO: 30147 - DNA, 600 bp, Chicken  19866894249693_5
atatacatatttattgcctatgcttgaccaagttgtcaggatttcccttggaatctgtggtgaggaggaggtgattatatggctctgttaatctgagctatattatacgtctgccctaaaatgagaaggtaccstacagtgtctgattctctgcactgtctatataagcagttgaggatgattagatgtcaacatctgcagtatagtacttaatttcaggcagtacttaatcccccagccttggagagcccataaccttctcagcaactcagatcagaattgcagtgctgcaaatgactscttctgttttacaacagcttctcagcacctcttcaacttctttttagtttctctgcttgtgatcaaaaggacgaatgggaaggtgatatacagcaacaggcattctgcagtaccttgcagttcttatactgtggaagcttctctttcctcatagtgtcacctttagccatgtctaagtctaacaggaaaataaataacgaaaacattgagagaattggaaaggactcttaacttgagcttttttaactgtacggtaatactgcatggagaagaaaatagcactgtaggaagaagagaaat

SEQ ID NO: 30148 - DNA, 600 bp, Chicken  19866894249693_6
agaggtacttaacttttaattctgatatcaggtcacggactttggctttgcaaaaagagtaaaaggaagaacttggacgttatgtgggactccagaatacctggcacctgaaataattctcagcaaggtacttcagttctataaatgattattggcagtcatgtatttgatgcgattaagagggtatcacttaattattgatctctgagggatgagcagttgctggtacttgagaaatcaaattattgacaagttttagtgaagtatacaaaatgtgagttttgcatcttaagtgttaayagactagaagaggagctccagaactgcataatggttggatcagtagtcaccgtaaaactgcttgcagtattttaagtttaaagcactacacatgaatcaaacatggaaaaacactggtcttgcacgtaaagtatatgcagtctaatacttgtactctatttgaacatagaagaaatcttatttagaatatagctattgtatcttttcatgttttgtaaaagaaaaatccttacagtttatggaactgttcataatattcataatcatgttaaattatgcattgtacagtttaattaaata

SEQ ID NO: 30149 - DNA, 600 bp, Chicken  19866894249695_1
cagtctcctcccagcctgacttttcagacatgatatgccgacaaggattttatcacccaccctcaccacatatactcccatctcactgcatgttattagacagccatgggctttcagagcttcccttattcttggaaagatactgcattgtacaaattagtggaaacacttggaactggcacagtgtgcaaatcctgcagctcatgccagtgcacatttctcagcttgatttaaggagaggggtattctaaatagtgcccgcttctcctctgctttgaacagctaaaaagcactgatgcwaagttgcataatccagtgctgcttgtgtacatgcttgagaagaaacagccatggaaaaatcctgtaacattcctcggctggtccgtctcctggtatcaaagtgtttcctgctttgctttcacctttgaattttaatccgttggctttgtaggagtcctgagaggggtaggcgagggccctggggagtacaagaccattctggggagaactaagagccaagtcatgctgtatctgggagctgggggggaccgctggcttagtgcccctacctggtggcctcctgggaggtgcccagctgtg

SEQ ID NO: 30150 - DNA, 600 bp, Chicken  19866894249699_1
acagaacttgtgtttgtgcctgctttatttatctgggcatgtgtttttaggtgaatctctctactctaaaccaactaagtgcagaggcattgcaaagcttctgttagataaaaaaaaaatgcaggtgcctttgattgctggaaaacttctagcttaagaggcatgtttcaactgattttagtcagggagatgaaccttgcactttcacaaggtactgacaagaagagggagaaaatatgagctgccttaaatgacagcctatgtacttcttgctgtctttatgttacaagctaacaaacrttatcttaaaactttccactgaggtgcttgtgataagcaacatcttttattaatcatgtttgcaaaygtgaaaacccttatgttccttccaccrtctgactaggaagtctcctttgttctgctttttttctgagactgcaaaatttcaccaggctgaagggatttcaagccaaaatctcacaccaatactccagtaggtactgtatgcagttttggcatgacctattggaagtaaccatcactattcaaatacagtcaraacactttactagaaggatgaagtatgttgaacgtgttcag

SEQ ID NO: 30151 - DNA, 600 bp, Chicken  19866894249699_2
aaaccaactaagtgcagaggcattgcaaagcttctgttagataaaaaaaaaatgcaggtgcctttgattgctggaaaacttctagcttaagaggcatgtttcaactgattttagtcagggagatgaaccttgcactttcacaaggtactgacaagaagagggagaaaatatgagctgccttaaatgacagcctatgtacttcttgctgtctttatgttacaagctaacaaacrttatcttaaaactttccactgaggtgcttgtgataagcaacatcttttattaatcatgtttgcaaaygtgaaaacccttatgttccttccaccrtctgactaggaagtctcctttgttctgctttttttctgagactgcaaaatttcaccaggctgaagggatttcaagccaaaatctcacaccaatactccagtaggtactgtatgcagttttggcatgacctattggaagtaaccatcactattcaaatacagtcaraacactttactagaaggatgaagtatgttgaacgtgttcagcactgaattaagaatttgcgggagttaggcaatcatttcttaagatacttcggacaatttgattccc

SEQ ID NO: 30152 - DNA, 600 bp, Chicken  19866894249699_3
aagcttctgttagataaaaaaaaaatgcaggtgcctttgattgctggaaaacttctagcttaagaggcatgtttcaactgattttagtcagggagatgaaccttgcactttcacaaggtactgacaagaagagggagaaaatatgagctgccttaaatgacagcctatgtacttcttgctgtctttatgttacaagctaacaaacrttatcttaaaactttccactgaggtgcttgtgataagcaacatcttttattaatcatgtttgcaaaygtgaaaacccttatgttccttccaccrtctgactaggaagtctcctttgttctgctttttttctgagactgcaaaatttcaccaggctgaagggatttcaagccaaaatctcacaccaatactccagtaggtactgtatgcagttttggcatgacctattggaagtaaccatcactattcaaatacagtcaraacactttactagaaggatgaagtatgttgaacgtgttcagcactgaattaagaatttgcgggagttaggcaatcatttcttaagatacttcggacaatttgattcccttatttctttacacaatcccgactgta

SEQ ID NO: 30153 - DNA, 600 bp, Chicken  19866894249699_4
tatgtacttcttgctgtctttatgttacaagctaacaaacrttatcttaaaactttccactgaggtgcttgtgataagcaacatcttttattaatcatgtttgcaaaygtgaaaacccttatgttccttccaccrtctgactaggaagtctcctttgttctgctttttttctgagactgcaaaatttcaccaggctgaagggatttcaagccaaaatctcacaccaatactccagtaggtactgtatgcagttttggcatgacctattggaagtaaccatcactattcaaatacagtcaraacactttactagaaggatgaagtatgttgaacgtgttcagcactgaattaagaatttgcgggagttaggcaatcatttcttaagatacttcggacaatttgattcccttatttctttacacaatcccgactgtacaacagaaaccattttgccaaaagscaccatgcactttgcaagtaagtcataccaagattttattgtgtaagagccttcaactcaaaaatgctcatactgccagtcacttctaagtctcctctcttcatcacttgtatttgaagctgtattgaaaactccagaac

SEQ ID NO: 30154 - DNA, 600 bp, Chicken  19866894249699_5
tgctttttttctgagactgcaaaatttcaccaggctgaagggatttcaagccaaaatctcacaccaatactccagtaggtactgtatgcagttttggcatgacctattggaagtaaccatcactattcaaatacagtcaraacactttactagaaggatgaagtatgttgaacgtgttcagcactgaattaagaatttgcgggagttaggcaatcatttcttaagatacttcggacaatttgattcccttatttctttacacaatcccgactgtacaacagaaaccattttgccaaaagscaccatgcactttgcaagtaagtcataccaagattttattgtgtaagagccttcaactcaaaaatgctcatactgccagtcacttctaagtctcctctcttcatcacttgtatttgaagctgtattgaaaactccagaacttgaacccaaagcatggattccctcatgccttgtaaacacatgccattcctttagcaatagatgttctttcatgaactgcctaagaaacacatcagtcaataaacacaatagaagctctaaatcttggcaaatgggctgagttcacaaaataaattgttg

SEQ ID NO: 30155 - DNA, 600 bp, Chicken  19866894249701_1
acaggcacacagaattggctggcttttgcttacccaggcttccttgggcacaaagacatctcccaaggtcttgaactggagcaagctggagcccggtgtcccacgttaacatatagctctgaagaaggcacagatttgttgcttttgacacccaggcccacttgagtcattcaggcaattagagaaagtctgtttgtttttgtttttgtaactaggtcaaagcaaattgcctttcatgctcccactgtttatgatgaatgatctgcttcagggcggtggctttgtttttcttttgtctgstttttttttccccctcatttaaaaagtccacaaaagaattctcatagtactgagagaacttggttcttccagcaggagatgctgagcctgccaaggtaaaaacactggcacaagactcagtggtttgtcatatgttgttccaaccaggcacaggttttcattgcgtcttccatttcctagtagcactttcactcctgcaaagtctgttttgctcagagggccagaagaggctgatggataacctggtcatggagttatgaatgtaacagcacacggacctgagcctgacacatagcagaa

SEQ ID NO: 30156 - DNA, 600 bp, Chicken  19866894249707_1
tttttacactagtctcactgtcttgactttcttccactcattaaaaatgtaacataaccttgtcttcagtttgtcccctcacagtaatttttgataaccatgttcctaatcctgttgtcagcacactatcctgaagaaagtaagagcaaaaaaaggaactgcacaagctctggtagctggaatcagcactccaaactggattaacaactgtgatgaggattaggacaacaaggttctagggtgtgtctgtgctagtccagaactaccagggaatttgctgagttgggaagcaataggaarttgctgggatgctctaggttgtttctgtcacctggagcaaagcaaatgcaatatggacaaaaggaaatggcactgtmtatatgaaacttgtacstcccaaaagcttcttccttcctgggatacagcaaggagatggcccatgtttcytgctcaagagtgccacagtggccccaagtggtaaataaggaaaacttcaagcagaaaccttcaagtcttcctgtggcagagccaaatcctaaattaaaggaatgtgtgacaaagctgccaaaagtgtgacacttggcagctctcccagctgcc

SEQ ID NO: 30157 - DNA, 600 bp, Chicken  19866894249707_2
ctcacagtaatttttgataaccatgttcctaatcctgttgtcagcacactatcctgaagaaagtaagagcaaaaaaaggaactgcacaagctctggtagctggaatcagcactccaaactggattaacaactgtgatgaggattaggacaacaaggttctagggtgtgtctgtgctagtccagaactaccagggaatttgctgagttgggaagcaataggaarttgctgggatgctctaggttgtttctgtcacctggagcaaagcaaatgcaatatggacaaaaggaaatggcactgtmtatatgaaacttgtacstcccaaaagcttcttccttcctgggatacagcaaggagatggcccatgtttcytgctcaagagtgccacagtggccccaagtggtaaataaggaaaacttcaagcagaaaccttcaagtcttcctgtggcagagccaaatcctaaattaaaggaatgtgtgacaaagctgccaaaagtgtgacacttggcagctctcccagctgccttctactacttcccttctagcccccaaagtatctgtgatgtgagtaaggggcactcttaagtagctgctggcccttt

SEQ ID NO: 30158 - DNA, 600 bp, Chicken  19866894249707_3
taaccatgttcctaatcctgttgtcagcacactatcctgaagaaagtaagagcaaaaaaaggaactgcacaagctctggtagctggaatcagcactccaaactggattaacaactgtgatgaggattaggacaacaaggttctagggtgtgtctgtgctagtccagaactaccagggaatttgctgagttgggaagcaataggaarttgctgggatgctctaggttgtttctgtcacctggagcaaagcaaatgcaatatggacaaaaggaaatggcactgtmtatatgaaacttgtacstcccaaaagcttcttccttcctgggatacagcaaggagatggcccatgtttcytgctcaagagtgccacagtggccccaagtggtaaataaggaaaacttcaagcagaaaccttcaagtcttcctgtggcagagccaaatcctaaattaaaggaatgtgtgacaaagctgccaaaagtgtgacacttggcagctctcccagctgccttctactacttcccttctagcccccaaagtatctgtgatgtgagtaaggggcactcttaagtagctgctggccctttcccactgcaactgcttg

SEQ ID NO: 30159 - DNA, 600 bp, Chicken  19866894249707_4
aaaaaaaggaactgcacaagctctggtagctggaatcagcactccaaactggattaacaactgtgatgaggattaggacaacaaggttctagggtgtgtctgtgctagtccagaactaccagggaatttgctgagttgggaagcaataggaarttgctgggatgctctaggttgtttctgtcacctggagcaaagcaaatgcaatatggacaaaaggaaatggcactgtmtatatgaaacttgtacstcccaaaagcttcttccttcctgggatacagcaaggagatggcccatgtttcytgctcaagagtgccacagtggccccaagtggtaaataaggaaaacttcaagcagaaaccttcaagtcttcctgtggcagagccaaatcctaaattaaaggaatgtgtgacaaagctgccaaaagtgtgacacttggcagctctcccagctgccttctactacttcccttctagcccccaaagtatctgtgatgtgagtaaggggcactcttaagtagctgctggccctttcccactgcaactgcttggaagaggactcttggcttccttaggcatcactggggtaaggtagagaaagaat

SEQ ID NO: 30160 - DNA, 600 bp, Chicken  19866894249709_1
ccctgctttctgaatcatggaatcagtatagcgtccttcagaaaccgagttttatttagttatttttagaaaaacagatttgagatctaggaggacagtggctccccacagagttctacagtatagttcattgagactgttttacagaatactattcagaatgtatttgacgtgtcaagatattttggtttctgtaaggaagcattatacagttctattttagttcctgtgtttttattatgcaacataaaaaagaaaatacctttaaaggaaaactgtgagcctgtattgtatggagtrtgtgtattatgtctctgtatacgcataataatgagtatgcgtgccttttcatatgactagttctagccagaaagcaaagttcttaaaaatatttaaggtttgtggcctgcagttccagcgtagagataaacaccaggaaatccttgggtaagtgttcccctagcagctgtgaagtacaattactatttcattttctccagacttccttaccatatatgctgctgttctctccacttttagggaacatacaatcttcagccagtgcttgttctctgtcaagagaagaaggtgctctcaaac

SEQ ID NO: 30161 - DNA, 600 bp, Chicken  19866894249728_1
gcagggctgccacccactagatcaggctgcccagagccacatccaccctggccttgaatgcctccagggatggcacattcacagctttctctgagcaacttgtgccagtacctcaaaaactctgagtaaaacaattcctcccagtacttaatctaaatctctcctcttttagtttaaaagcattaccccctgtcccgggctcctcagtataagaaagacattgagagcctggagtgcatccaaagaagggcaacaaagctggtgaggggtctggagaacaagtcttatgaagagcagctsagagaacaggaattgcttagtctggagaagaggaggctcaggrgagcattaaagatttctaccatgtgtttgygctmtctttaactttcccctagacatctagtactgaccactgctagagacaagatattggatgattcagtcttatgatctaatccagtacaacatttgtgtgttcctactgtaatttttatctctgtaaatctgcttgttccatccctgaagcaccgtcatctttagtatttctgaagcttgctctagttcttataatttgccatcgctctctcactgcaagtaata

SEQ ID NO: 30162 - DNA, 600 bp, Chicken  19866894249728_2
caccctggccttgaatgcctccagggatggcacattcacagctttctctgagcaacttgtgccagtacctcaaaaactctgagtaaaacaattcctcccagtacttaatctaaatctctcctcttttagtttaaaagcattaccccctgtcccgggctcctcagtataagaaagacattgagagcctggagtgcatccaaagaagggcaacaaagctggtgaggggtctggagaacaagtcttatgaagagcagctsagagaacaggaattgcttagtctggagaagaggaggctcaggrgagcattaaagatttctaccatgtgtttgygctmtctttaactttcccctagacatctagtactgaccactgctagagacaagatattggatgattcagtcttatgatctaatccagtacaacatttgtgtgttcctactgtaatttttatctctgtaaatctgcttgttccatccctgaagcaccgtcatctttagtatttctgaagcttgctctagttcttataatttgccatcgctctctcactgcaagtaatagttgtttacagcaccaaaaaaaaaaaaaaatcttttcatgaaa

SEQ ID NO: 30163 - DNA, 600 bp, Chicken  19866894249728_3
cacattcacagctttctctgagcaacttgtgccagtacctcaaaaactctgagtaaaacaattcctcccagtacttaatctaaatctctcctcttttagtttaaaagcattaccccctgtcccgggctcctcagtataagaaagacattgagagcctggagtgcatccaaagaagggcaacaaagctggtgaggggtctggagaacaagtcttatgaagagcagctsagagaacaggaattgcttagtctggagaagaggaggctcaggrgagcattaaagatttctaccatgtgtttgygctmtctttaactttcccctagacatctagtactgaccactgctagagacaagatattggatgattcagtcttatgatctaatccagtacaacatttgtgtgttcctactgtaatttttatctctgtaaatctgcttgttccatccctgaagcaccgtcatctttagtatttctgaagcttgctctagttcttataatttgccatcgctctctcactgcaagtaatagttgtttacagcaccaaaaaaaaaaaaaaatcttttcatgaaagagtcagcataaatggttataaagagtaag

SEQ ID NO: 30164 - DNA, 600 bp, Chicken  19866894249728_4
ttcacagctttctctgagcaacttgtgccagtacctcaaaaactctgagtaaaacaattcctcccagtacttaatctaaatctctcctcttttagtttaaaagcattaccccctgtcccgggctcctcagtataagaaagacattgagagcctggagtgcatccaaagaagggcaacaaagctggtgaggggtctggagaacaagtcttatgaagagcagctsagagaacaggaattgcttagtctggagaagaggaggctcaggrgagcattaaagatttctaccatgtgtttgygctmtctttaactttcccctagacatctagtactgaccactgctagagacaagatattggatgattcagtcttatgatctaatccagtacaacatttgtgtgttcctactgtaatttttatctctgtaaatctgcttgttccatccctgaagcaccgtcatctttagtatttctgaagcttgctctagttcttataatttgccatcgctctctcactgcaagtaatagttgtttacagcaccaaaaaaaaaaaaaaatcttttcatgaaagagtcagcataaatggttataaagagtaagtaca

SEQ ID NO: 30165 - DNA, 599 bp, Chicken  19866894249735_1
  misc_feature (1)..(123): n is any nucleotide
nnnnnnnnnnnnnnnnnnnnnnnnnnnnnnnnnnnnnnnnnnnnnnnnnnnnnnnnnnnnnnnnnnnnnnnnnnnnnnnnnnnnnnnnnnnnnnnnnnnnnnnnnnnnnnnnnnnnnnnnnnnacccctctttctaacataaattctcatcatcgtgtatttattcattttttatgaaacgtaaaaaaaaaaataaatatacagaataaatgcagatggcagcagatggcacagatgcttccaggtaagcatcactaaagcgttcctcaaaatgactacaaacagcccaactaagcagakcaaagcagccattcactgccagggtcatctgctccccccatccctgccctcacttctcattgcttcgaggctgacagcaggaccttcccaaacatgcacgctcactgcagagcatcgataacccataaaccataactctgttacgacctcatttcttgaatcttttcacctgaatttttaagagaacagtaaatattaaaaataagaccacaaaactttcttccaccttctccagaggccaccacagaagaccagtccagccttggcagtactgaaaagttgacttttccaatctattc

SEQ ID NO: 30166 - DNA, 445 bp, Chicken  19866894249736_1
gactttcaaacaaactgtaaaaacttgtattcatgtgaacctttccattttatacctatttgtctaatacttgagtaactactgctctgaacttttacagtaatagcaatgttgagttgctggttgtttgctttttatatagatttggttgcatcttttgtgcatgcaattatgtgcattaatgcctgcagtctctaggagtgtaatgacagttctctctagttttgtttcttgggcagtattacaataaatactgtaaactgagaggttctgcgaggaaccacacaaaaacaaagtaaygttggaattygagatgctgattaatcgatgtagaatatctacatagtgtgtgtgtgtgaaaaatcaggattattttgtgtgcattttgagggagaggtgggaagcttcatttagccttataggcattatcatttcaagcatccca

SEQ ID NO: 30167 - DNA, 435 bp, Chicken  19866894249736_2
caaactgtaaaaacttgtattcatgtgaacctttccattttatacctatttgtctaatacttgagtaactactgctctgaacttttacagtaatagcaatgttgagttgctggttgtttgctttttatatagatttggttgcatcttttgtgcatgcaattatgtgcattaatgcctgcagtctctaggagtgtaatgacagttctctctagttttgtttcttgggcagtattacaataaatactgtaaactgagaggttctgcgaggaaccacacaaaaacaaagtaaygttggaattygagatgctgattaatcgatgtagaatatctacatagtgtgtgtgtgtgaaaaatcaggattattttgtgtgcattttgagggagaggtgggaagcttcatttagccttataggcattatcatttcaagcatccca

SEQ ID NO: 30168 - DNA, 600 bp, Chicken  19866894249740_1
acggactggagatgacaccaggcttctgattgctgtgtcaaagaggagtctcagagaagtcaacacttctaggagaaatgtagggcatcatccccttcccacgattccaatacttgttccacaagctcagaaataataactttcagagctgtacactctatagacttgtataccatacgctaaacagcatatacacaccagaagggtcacatacagttctcaagttcatgctgtgtatgcatttagtctatcaagctgaatcagaaatgcaaattagacaggaattactgaaaagcactmagcacaagatatcaattctacaaatggyggcatcttttttgacagcaaacaagtcgtaattttgacctgtaacttgacaaaaccgccagatccaagcagatggtagactgtaaattaacatctggaatgcagccccaggaaaacagatgcactgaaggcctttttgcagtattacagcaaaagcagcattagttygaatgatgtgaaacaccaggtatccatttgctaggtatccatcgcttacattctgaagattcttcaagaaagtagcrgggaaaaaacaaaatccaacccattata

SEQ ID NO: 30169 - DNA, 600 bp, Chicken  19866894249740_2
attgctgtgtcaaagaggagtctcagagaagtcaacacttctaggagaaatgtagggcatcatccccttcccacgattccaatacttgttccacaagctcagaaataataactttcagagctgtacactctatagacttgtataccatacgctaaacagcatatacacaccagaagggtcacatacagttctcaagttcatgctgtgtatgcatttagtctatcaagctgaatcagaaatgcaaattagacaggaattactgaaaagcactmagcacaagatatcaattctacaaatggyggcatcttttttgacagcaaacaagtcgtaattttgacctgtaacttgacaaaaccgccagatccaagcagatggtagactgtaaattaacatctggaatgcagccccaggaaaacagatgcactgaaggcctttttgcagtattacagcaaaagcagcattagttygaatgatgtgaaacaccaggtatccatttgctaggtatccatcgcttacattctgaagattcttcaagaaagtagcrgggaaaaaacaaaatccaacccattatactgctgggaaaacraaatacttctttak

SEQ ID NO: 30170 - DNA, 600 bp, Chicken  19866894249740_3
caccagaagggtcacatacagttctcaagttcatgctgtgtatgcatttagtctatcaagctgaatcagaaatgcaaattagacaggaattactgaaaagcactmagcacaagatatcaattctacaaatggyggcatcttttttgacagcaaacaagtcgtaattttgacctgtaacttgacaaaaccgccagatccaagcagatggtagactgtaaattaacatctggaatgcagccccaggaaaacagatgcactgaaggcctttttgcagtattacagcaaaagcagcattagttygaatgatgtgaaacaccaggtatccatttgctaggtatccatcgcttacattctgaagattcttcaagaaagtagcrgggaaaaaacaaaatccaacccattatactgctgggaaaacraaatacttctttakctgatttaaaagacaagtatcacagccaacttacgcttcacctcaacagttccatctcatttgaggagcatagttcatgaacaaattcaaacccaaaacacataacacaaaacatggaaaataaactactttgctgctttgttttatatttcaaagtgaaattaata

SEQ ID NO: 30171 - DNA, 600 bp, Chicken  19866894249740_4
attagacaggaattactgaaaagcactmagcacaagatatcaattctacaaatggyggcatcttttttgacagcaaacaagtcgtaattttgacctgtaacttgacaaaaccgccagatccaagcagatggtagactgtaaattaacatctggaatgcagccccaggaaaacagatgcactgaaggcctttttgcagtattacagcaaaagcagcattagttygaatgatgtgaaacaccaggtatccatttgctaggtatccatcgcttacattctgaagattcttcaagaaagtagcrgggaaaaaacaaaatccaacccattatactgctgggaaaacraaatacttctttakctgatttaaaagacaagtatcacagccaacttacgcttcacctcaacagttccatctcatttgaggagcatagttcatgaacaaattcaaacccaaaacacataacacaaaacatggaaaataaactactttgctgctttgttttatatttcaaagtgaaattaataggtcatcattccaaaggaaccagctgttggtcaaattatgtttccaaatccacttaattgttgacttttctacctgt

SEQ ID NO: 30172 - DNA, 600 bp, Chicken  19866894249740_5
attctacaaatggyggcatcttttttgacagcaaacaagtcgtaattttgacctgtaacttgacaaaaccgccagatccaagcagatggtagactgtaaattaacatctggaatgcagccccaggaaaacagatgcactgaaggcctttttgcagtattacagcaaaagcagcattagttygaatgatgtgaaacaccaggtatccatttgctaggtatccatcgcttacattctgaagattcttcaagaaagtagcrgggaaaaaacaaaatccaacccattatactgctgggaaaacraaatacttctttakctgatttaaaagacaagtatcacagccaacttacgcttcacctcaacagttccatctcatttgaggagcatagttcatgaacaaattcaaacccaaaacacataacacaaaacatggaaaataaactactttgctgctttgttttatatttcaaagtgaaattaataggtcatcattccaaaggaaccagctgttggtcaaattatgtttccaaatccacttaattgttgacttttctacctgtaagacatattctatgatgtttatttacaaggaaataaagaaa

SEQ ID NO: 30173 - DNA, 600 bp, Chicken  19866894249740_6
ggcatcttttttgacagcaaacaagtcgtaattttgacctgtaacttgacaaaaccgccagatccaagcagatggtagactgtaaattaacatctggaatgcagccccaggaaaacagatgcactgaaggcctttttgcagtattacagcaaaagcagcattagttygaatgatgtgaaacaccaggtatccatttgctaggtatccatcgcttacattctgaagattcttcaagaaagtagcrgggaaaaaacaaaatccaacccattatactgctgggaaaacraaatacttctttakctgatttaaaagacaagtatcacagccaacttacgcttcacctcaacagttccatctcatttgaggagcatagttcatgaacaaattcaaacccaaaacacataacacaaaacatggaaaataaactactttgctgctttgttttatatttcaaagtgaaattaataggtcatcattccaaaggaaccagctgttggtcaaattatgtttccaaatccacttaattgttgacttttctacctgtaagacatattctatgatgtttatttacaaggaaataaagaaaactgttttgttttt

SEQ ID NO: 30174 - DNA, 600 bp, Chicken  19866894249741_1
cttttccttgcctggccttgccttgccttgcctggcctctcctggccttgccttgccttacctagcctttccaggcctggccttgccttgccttgccttgcctggcgttgcctggccttgcctttccttacctggcctcttctggccttgccttgccttgccttccttccatggcttggactttccttgcctggcctggcctggccttgcgtggcctgggctggcctggccttcccttgttttgcctggtcttgctttgcctgggctggcctgcgctggcctaacctggcctggcctggkctggcctgggctggcctaacctggcctggcctggcctggccttgcctggcctgggatttccctgccttgcctagccttgccttgctttgccatgcctggcctgcactggcttggccttgtcttgccttgccttgttggcctgtcttggccttgccttgccttgccaggtgtggccttgcctggccttgccgggcgttgcattgtttggccttgcctggcctggccttgccttcccttgcctggcctggccttgccttgcctagccgtgcctcgatttgcctggcccggcctttccttgcc

SEQ ID NO: 30175 - DNA, 600 bp, Chicken  19866894249744_1
aacgtgtgctaattgttttgtttaaagttttatgtcagtcccgaagctgaaacatacgcaatcaaatatttgaaagacctttaagattactttactccaagtaacagatctaaattgttctcctctatttctgtttttcaagtagatacttcagaaacctgaaggtcagaatgagcctttgtaatttcagcctacagaacgtggcttggggaggtaacctgttaaccaacagaggtggagagaaacctgctgccatggggtgtgtttgaagaggttagcagatgagttgttggccccgtygatattgatggcaaagcttctgtttcagctaggattttattctgatttgaaaattaagagaaggatagatcctcattagtgtaatcagcttaaatgggttgactactctaaagcaatttgtttaatttgtttgaaacatgttcaattttagctataaatgttcagctctctcacagttgctatttgtgctgtttatcatgtaattttgtgttcagtgatttgtaaaaataaaccttttcgctctggaagagaatcttgtgacagcctatatcctattcatcagtgctgctttaatatctc

SEQ ID NO: 30176 - DNA, 599 bp, Chicken  19866894249746_1
  misc_feature (1)..(21): n is any nucleotide
nnnnnnnnnnnnnnnnnnnnntacagaacgtggcttggggaggtaacctgttaacctacagaggtggagagaaacctgctgccatggggtgtgtttgaagaggttagcagatgagttgttggccccgtcgatattgatggcaaagcttctgtttcagctaggattttattctgatttgaaaattaagagaaggatagatcctcattagtgtaatcagcttaaatgggttgactactctaaagcaatttgtttaatttgtttgaaacatgttcaattttagctataaatgttcagctctckcacagttgctatttgtgctgtttatcatgtaattttgtgttcagtgatttgtaaaaataaaccttttcgctctggaagagaatcttgtgacagcctatatcctattcatcagtgctgctttaatatctcacagacctttttgtgcattaatgctccagggggactgctgtggctctggatgagtttttaagaggacttgtttgtgctgctcgtgtagcgtgcatgcctgcatccagcatcagccatttcctcaatgtcagattgctccccttccctctgtctttgggcatctcatttgg

SEQ ID NO: 30177 - DNA, 600 bp, Chicken  19866894249746_2
ggaagagaatcttgtgacagcctatatcctattcatcagtgctgctttaatatctcacagacctttttgtgcattaatgctccagggggactgctgtggctctggatgagtttttaagaggacttgtttgtgctgctcgtgtagcgtgcatgcctgcatccagcatcagccatttcctcaatgtcagattgctccccttccctctgtctttgggcatctcatttgggctttcttagacgtgtctccctctgcaatagttcccagctttgaaacctgcatgagtcttaacaaaacaaactktaactgtccttggaattgaaggcctcagctcctccttatttgcccacatgacctctaagggctgcataaaccagyttccaatgggagcaaagaaatggctatttggaagctaacggttctccttttacaacgtgtggttgtttcttgttgaactgatgtacaaggactctgctcctgcacctgacatagatgtcacacctagctttctgtacttgctccctcacctcttctttgggtgtattttgggttgtgctgttgtactaggttcattcttaggctctgagagcatcagtgcatatt

SEQ ID NO: 30178 - DNA, 600 bp, Chicken  19866894249746_3
aatgctccagggggactgctgtggctctggatgagtttttaagaggacttgtttgtgctgctcgtgtagcgtgcatgcctgcatccagcatcagccatttcctcaatgtcagattgctccccttccctctgtctttgggcatctcatttgggctttcttagacgtgtctccctctgcaatagttcccagctttgaaacctgcatgagtcttaacaaaacaaactktaactgtccttggaattgaaggcctcagctcctccttatttgcccacatgacctctaagggctgcataaaccagyttccaatgggagcaaagaaatggctatttggaagctaacggttctccttttacaacgtgtggttgtttcttgttgaactgatgtacaaggactctgctcctgcacctgacatagatgtcacacctagctttctgtacttgctccctcacctcttctttgggtgtattttgggttgtgctgttgtactaggttcattcttaggctctgagagcatcagtgcatatttgcccctgcagacggtttccaatttgttcctgccacatcgggcagttgctacagaatgtttcccttgggcatacc

SEQ ID NO: 30179 - DNA, 600 bp, Chicken  19866894249746_4
gggagcaaagaaatggctatttggaagctaacggttctccttttacaacgtgtggttgtttcttgttgaactgatgtacaaggactctgctcctgcacctgacatagatgtcacacctagctttctgtacttgctccctcacctcttctttgggtgtattttgggttgtgctgttgtactaggttcattcttaggctctgagagcatcagtgcatatttgcccctgcagacggtttccaatttgttcctgccacatcgggcagttgctacagaatgtttcccttgggcataccctttgaytggtatctctctgccgcttgctgtttggtaattggtcctggaagtggttttggatgagctgtrcagstcgcacagctgatgcctggactgcatggctggttagagcacrcagaacatccaatgggttattagagctgttagtcatgccacaaagcatgtggcagcaagacagcacaacctgaattgaccaagatgcacactcttggactgaaacttgctaggaggtgtagttttgtggtgttcatccagttcagctgaagctctctccaagagggttgctgtttgttgctgttcccctcc

SEQ ID NO: 30180 - DNA, 600 bp, Chicken  19866894249746_5
tgttgaactgatgtacaaggactctgctcctgcacctgacatagatgtcacacctagctttctgtacttgctccctcacctcttctttgggtgtattttgggttgtgctgttgtactaggttcattcttaggctctgagagcatcagtgcatatttgcccctgcagacggtttccaatttgttcctgccacatcgggcagttgctacagaatgtttcccttgggcataccctttgaytggtatctctctgccgcttgctgtttggtaattggtcctggaagtggttttggatgagctgtrcagstcgcacagctgatgcctggactgcatggctggttagagcacrcagaacatccaatgggttattagagctgttagtcatgccacaaagcatgtggcagcaagacagcacaacctgaattgaccaagatgcacactcttggactgaaacttgctaggaggtgtagttttgtggtgttcatccagttcagctgaagctctctccaagagggttgctgtttgttgctgttcccctccacgtattcaagctcaagcaaacaccaagcttctttgggtcacccacctgatcagatatcctgc

SEQ ID NO: 30181 - DNA, 600 bp, Chicken  19866894249746_6
gaactgatgtacaaggactctgctcctgcacctgacatagatgtcacacctagctttctgtacttgctccctcacctcttctttgggtgtattttgggttgtgctgttgtactaggttcattcttaggctctgagagcatcagtgcatatttgcccctgcagacggtttccaatttgttcctgccacatcgggcagttgctacagaatgtttcccttgggcataccctttgaytggtatctctctgccgcttgctgtttggtaattggtcctggaagtggttttggatgagctgtrcagstcgcacagctgatgcctggactgcatggctggttagagcacrcagaacatccaatgggttattagagctgttagtcatgccacaaagcatgtggcagcaagacagcacaacctgaattgaccaagatgcacactcttggactgaaacttgctaggaggtgtagttttgtggtgttcatccagttcagctgaagctctctccaagagggttgctgtttgttgctgttcccctccacgtattcaagctcaagcaaacaccaagcttctttgggtcacccacctgatcagatatcctgccggc

SEQ ID NO: 30182 - DNA, 600 bp, Chicken  19866894249746_7
gtcacacctagctttctgtacttgctccctcacctcttctttgggtgtattttgggttgtgctgttgtactaggttcattcttaggctctgagagcatcagtgcatatttgcccctgcagacggtttccaatttgttcctgccacatcgggcagttgctacagaatgtttcccttgggcataccctttgaytggtatctctctgccgcttgctgtttggtaattggtcctggaagtggttttggatgagctgtrcagstcgcacagctgatgcctggactgcatggctggttagagcacrcagaacatccaatgggttattagagctgttagtcatgccacaaagcatgtggcagcaagacagcacaacctgaattgaccaagatgcacactcttggactgaaacttgctaggaggtgtagttttgtggtgttcatccagttcagctgaagctctctccaagagggttgctgtttgttgctgttcccctccacgtattcaagctcaagcaaacaccaagcttctttgggtcacccacctgatcagatatcctgccggccacgtgaggccagaagggcggtgtgaggctgggaccagccct

SEQ ID NO: 30183 - DNA, 600 bp, Chicken  19866894249746_8
ttcaagctcaagcaaacaccaagcttctttgggtcacccacctgatcagatatcctgccggccacgtgaggccagaagggcggtgtgaggctgggaccagcccttcggtgccagccccaggagctgcccagtttcagcgctgtgggaatcccagggttggagtcgttggggcctggtggtagcagtctgggtttcggctttgatgtctgcatttgctctcattctggcagtgatgctttaatctctgaagcgctgtgctgggttttcgctgtgctcagcttgaatttcttccaagacacygcactgctgaaatagcagaatttgtccatggattccagtgcagtgatcagtctctgtttattgggttgataaactttccacaagagcaggggtggagcaggacctcttacatagagtcaagccaaatcactcagcagcacaattgaagccgttaagcaaagtgcactgcaatgtgctgcttttttctccaaagaagagcctgcatgtgtcatacgtggattttcttgcattaatgtgttttgtgccatggagatgatccttgtttggatgttatttcacatgtaaattgggattaactgg

SEQ ID NO: 30184 - DNA, 600 bp, Chicken  19866894249746_9
aactttccacaagagcaggggtggagcaggacctcttacatagagtcaagccaaatcactcagcagcacaattgaagccgttaagcaaagtgcactgcaatgtgctgcttttttctccaaagaagagcctgcatgtgtcatacgtggattttcttgcattaatgtgttttgtgccatggagatgatccttgtttggatgttatttcacatgtaaattgggattaactggtcatggtttgtatttgaagtgttgagttgtatcattcaatccttgggatgagccctctgctcttttgtggytttccatctttaactgcagaccttctctaggacagcttcacagcagtgtcttcctttgacctttccaaccctcggccaacacaacggctttgcattaaaaacctcaaatttgactgcctaggcaaaagataccttttccttcatcagcaatcgatctcttttgttggaaatatccttaagtatttagggtgatatttttgaagctcctgtggctcgctgtggaagtggacttggtgggaccaggacacattgcttgttgctgaaatagtcgagctgtattctgaatgacgcagccgggct

SEQ ID NO: 30185 - DNA, 600 bp, Chicken  19866894249747_1
gtgtttttaacagatttctcactggaaatggttcatttttgtttgtagcttttattccagctctctggaggtcattacatgagccccacaagagttccttctgtacatagagagcttcacgttgtccttcctcacatacaatcccatcagctctgatgggagggctcttagctgcagattgtcgatattctttactgagcttagtggcatgctgtcactctgctctgcagcatcacttaatgatgttgtcctaatagcaactatgctaaagcaaccaagaatttaaggctaatagagatwttgcttattgcattgaagtagtgccagggggactaataaaaaagttatggatgtgtctcatgctgtcagtctctctgatgtggccttgcacatactcctgtttaaaatttttctgtacacttacaacagtggcaatacagtctagcttttaattttcccttaccttgctttttcttaaacatgttgctgagagatttgagcctctctgctctatgtgcatgcctattatttctggcttgccttggctgaatttcagcttggcttacttcaagtgatcaagacttctctgaaaactcatat

SEQ ID NO: 30186 - DNA, 600 bp, Chicken  19866894249749_1
tatttagccaaaacttgaacacagtttgcatcagtgtgacagaattgcatgttgcttctttctgcattgttaactgtcagactgcctcaagttaaactcagttcagtgagacagtcattaactgctgccccatacgtactacgacagctaactcttatctgtaatacttgctagtatggccaagacaccataaggttaaactagaaatgaagcggtctgaaggagactagagtcagcatatgcagctgataatttcttagttcagcttactttatagtggtatcagtagttctgtaatgycaagcagctgtaggaacaagactctacagttcaccttgggcagagtgagcaagtattgcayctcttggaattttgttctccagaaatgacagttgttatgttttttgtgctctttctgctgcaggtagataataaaggtcgcaattttctacatgtagctgttcagaactctgacattgagagtgtgttgttcctgataagtgtacaggctaacgtaaactctcgggtccaggatgcttctaaactaacacctctccacctggcagtgcaagctggctcagagatcattgtgcgtaatct

SEQ ID NO: 30187 - DNA, 600 bp, Chicken  19866894249749_2
ctgcattgttaactgtcagactgcctcaagttaaactcagttcagtgagacagtcattaactgctgccccatacgtactacgacagctaactcttatctgtaatacttgctagtatggccaagacaccataaggttaaactagaaatgaagcggtctgaaggagactagagtcagcatatgcagctgataatttcttagttcagcttactttatagtggtatcagtagttctgtaatgycaagcagctgtaggaacaagactctacagttcaccttgggcagagtgagcaagtattgcayctcttggaattttgttctccagaaatgacagttgttatgttttttgtgctctttctgctgcaggtagataataaaggtcgcaattttctacatgtagctgttcagaactctgacattgagagtgtgttgttcctgataagtgtacaggctaacgtaaactctcgggtccaggatgcttctaaactaacacctctccacctggcagtgcaagctggctcagagatcattgtgcgtaatctggtaggtactggggagtcattttccccatctgcttgaaatgtctgttctcccttaatgcaa

SEQ ID NO: 30188 - DNA, 599 bp, Chicken  19866894249750_1
  misc_feature (1)..(95): n is any nucleotide
nnnnnnnnnnnnnnnnnnnnnnnnnnnnnnnnnnnnnnnnnnnnnnnnnnnnnnnnnnnnnnnnnnnnnnnnnnnnnnnnnnnnnnnnnnnnnnntgagaagaagaaacctataaaggtcccatttactgctttatgacaatttatcaccaagataacacttaatactttctttcatggggtattccctaatagccttcatggaaaaggagaagccttagtgctggttctttgtcctacagagaaggacttgggggtcctgatgggcaagaagctgcacatgagccagtagtgtgcacaygcagcccagaggaccaacagtattaaaagaggagcgaccagcagggagagggaggtgattgtccccctctactgtgtccttgtgaggcctcatctggagtactgcgtccaggcctggggcccccagtacagaaggtgcaaaactgttgcagcgggtccagaggagggccacaaagatcattggagagctggagaaaggttgagggagctgggcttstgtagcttggagaagagaaggttctggtgagacctcrttgtggccttctggtaaacgaagggagcttacaagcaagagggaga

SEQ ID NO: 30189 - DNA, 600 bp, Chicken  19866894249750_2
ttagtgctggttctttgtcctacagagaaggacttgggggtcctgatgggcaagaagctgcacatgagccagtagtgtgcacaygcagcccagaggaccaacagtattaaaagaggagcgaccagcagggagagggaggtgattgtccccctctactgtgtccttgtgaggcctcatctggagtactgcgtccaggcctggggcccccagtacagaaggtgcaaaactgttgcagcgggtccagaggagggccacaaagatcattggagagctggagaaaggttgagggagctgggcttstgtagcttggagaagagaaggttctggtgagacctcrttgtggccttctggtaaacgaagggagcttacaagcaagagggagacctagtttttacacagtctgatagtgataggataaggggaatggctttaaactaaaagaggagatttaggttagttgttaagcagaaattttttactcagggtggtgaggcactggcacaggttgcccagagaaactgtggcatatcttgtttaacgcttagcttgtttgcatgatgtctgtgatcatttgcatagcatatttttagttgaaatact

SEQ ID NO: 30190 - DNA, 600 bp, Chicken  19866894249750_3
gggtcctgatgggcaagaagctgcacatgagccagtagtgtgcacaygcagcccagaggaccaacagtattaaaagaggagcgaccagcagggagagggaggtgattgtccccctctactgtgtccttgtgaggcctcatctggagtactgcgtccaggcctggggcccccagtacagaaggtgcaaaactgttgcagcgggtccagaggagggccacaaagatcattggagagctggagaaaggttgagggagctgggcttstgtagcttggagaagagaaggttctggtgagacctcrttgtggccttctggtaaacgaagggagcttacaagcaagagggagacctagtttttacacagtctgatagtgataggataaggggaatggctttaaactaaaagaggagatttaggttagttgttaagcagaaattttttactcagggtggtgaggcactggcacaggttgcccagagaaactgtggcatatcttgtttaacgcttagcttgtttgcatgatgtctgtgatcatttgcatagcatatttttagttgaaatactagacaagtaatacccttcagtcttttggttgttttta

SEQ ID NO: 30191 - DNA, 600 bp, Chicken  19866894249751_1
caaggaccttatggtgcagcactcagctttaaccttcattagttacaaagtaaaggcacacaaacatttaatgggtaaaggagctctgcttctgtatatgaaggattcagtggatatcagggacattcaaaaacatcagctgcctcaagtccaagcaagctgtttactgagtcttctctactaggaggtttaagctagtcaagagcgatagcatttttcactcttgtgctcctctggttacacagtggtagaggcaaagacagtgcctcctacagtgtttaagcattttttatgcacctmaaatttgaagtgttgaagtgctaaattggctgagctttaagcaagtttacctctacaaattaatagtttaaacagctgaacatagtcagatgttccagttgaggacaaagcacccatgaagtttctgtgactggcagatttctcctgctttggactagcttttgttggctgtgccccataacctgatataactgtaaagacagtgatttcacctgcagagacaaaagtctgcttgtttgaaagctgttgtacttttaatttattttagatctctcttctacagatatctactatttgaat

SEQ ID NO: 30192 - DNA, 600 bp, Chicken  19866894249755_1
cagttccactcggttcccaaagtcccaaaacttttgaaaactaccttgcagaaggactactgatctgccattgaaagcattccagcgggaggacaacacagcccgggggcacaacacacactgagaatgccagggacagatacagcccacagagtgccccagcactgatggtaacgcctcccagcagaacctgtactcatagcattgctgggagcggcaatgcacagcacagctcaagccattactcaacattagctttgccagccctccaactcggattcacacatccacattaaccaycagcaacgcggagcagcgaggytggccatatggtcactgagtgcggacagacaccctgagacaacacttcaagagatgccaacagcccctttgcacagcagcccccactacygatgtattttcccagccactaycagtgactcctggcatacacacactggatggtggatagtgggcaaggtcrggtggttggcagggcgctgctcctggacatacacacagcacacaggaagcagtgatgtgccgtaaatgcattccctcctgcacccaacccgaggcacacctgccaccaacgccacg

SEQ ID NO: 30193 - DNA, 600 bp, Chicken  19866894249755_2
tcccaaaacttttgaaaactaccttgcagaaggactactgatctgccattgaaagcattccagcgggaggacaacacagcccgggggcacaacacacactgagaatgccagggacagatacagcccacagagtgccccagcactgatggtaacgcctcccagcagaacctgtactcatagcattgctgggagcggcaatgcacagcacagctcaagccattactcaacattagctttgccagccctccaactcggattcacacatccacattaaccaycagcaacgcggagcagcgaggytggccatatggtcactgagtgcggacagacaccctgagacaacacttcaagagatgccaacagcccctttgcacagcagcccccactacygatgtattttcccagccactaycagtgactcctggcatacacacactggatggtggatagtgggcaaggtcrggtggttggcagggcgctgctcctggacatacacacagcacacaggaagcagtgatgtgccgtaaatgcattccctcctgcacccaacccgaggcacacctgccaccaacgccacgtgctgggtgtggtgctgtattg

SEQ ID NO: 30194 - DNA, 600 bp, Chicken  19866894249755_3
aacacacactgagaatgccagggacagatacagcccacagagtgccccagcactgatggtaacgcctcccagcagaacctgtactcatagcattgctgggagcggcaatgcacagcacagctcaagccattactcaacattagctttgccagccctccaactcggattcacacatccacattaaccaycagcaacgcggagcagcgaggytggccatatggtcactgagtgcggacagacaccctgagacaacacttcaagagatgccaacagcccctttgcacagcagcccccactacygatgtattttcccagccactaycagtgactcctggcatacacacactggatggtggatagtgggcaaggtcrggtggttggcagggcgctgctcctggacatacacacagcacacaggaagcagtgatgtgccgtaaatgcattccctcctgcacccaacccgaggcacacctgccaccaacgccacgtgctgggtgtggtgctgtattggaagctctggtgctttaaggagctgtcctgaatgacagtcccggctgtgcctgccagcatagaaaagatgtgaaagtcactctttctgtg

SEQ ID NO: 30195 - DNA, 600 bp, Chicken  19866894249755_4
gacagatacagcccacagagtgccccagcactgatggtaacgcctcccagcagaacctgtactcatagcattgctgggagcggcaatgcacagcacagctcaagccattactcaacattagctttgccagccctccaactcggattcacacatccacattaaccaycagcaacgcggagcagcgaggytggccatatggtcactgagtgcggacagacaccctgagacaacacttcaagagatgccaacagcccctttgcacagcagcccccactacygatgtattttcccagccactaycagtgactcctggcatacacacactggatggtggatagtgggcaaggtcrggtggttggcagggcgctgctcctggacatacacacagcacacaggaagcagtgatgtgccgtaaatgcattccctcctgcacccaacccgaggcacacctgccaccaacgccacgtgctgggtgtggtgctgtattggaagctctggtgctttaaggagctgtcctgaatgacagtcccggctgtgcctgccagcatagaaaagatgtgaaagtcactctttctgtgcctgcatatggctctaaagagg

SEQ ID NO: 30196 - DNA, 600 bp, Chicken  19866894249755_5
cagaacctgtactcatagcattgctgggagcggcaatgcacagcacagctcaagccattactcaacattagctttgccagccctccaactcggattcacacatccacattaaccaycagcaacgcggagcagcgaggytggccatatggtcactgagtgcggacagacaccctgagacaacacttcaagagatgccaacagcccctttgcacagcagcccccactacygatgtattttcccagccactaycagtgactcctggcatacacacactggatggtggatagtgggcaaggtcrggtggttggcagggcgctgctcctggacatacacacagcacacaggaagcagtgatgtgccgtaaatgcattccctcctgcacccaacccgaggcacacctgccaccaacgccacgtgctgggtgtggtgctgtattggaagctctggtgctttaaggagctgtcctgaatgacagtcccggctgtgcctgccagcatagaaaagatgtgaaagtcactctttctgtgcctgcatatggctctaaagaggacaggcacagcttcgtgcaagaggggagcacagaagcaatcctgctgtcc

SEQ ID NO: 30197 - DNA, 600 bp, Chicken  19866894249756_1
gagaaagaaactcattgaaaaatactaaattccacaatcgtttcatggccacattctctcgttactgcgcgccactcatttccagtttaccgttccagctgggcgactacagcaatattaattacggttgcaaagggagctcttaaaatctatcccgtcgacaggtggagagaacgatgaaaagcttctatggctgagatggaaacccggtttgtttttaatcatactttgcaagcaatttgtacttggccgtcataacggacataacaagctctgcagggccacgtgaatgaggccccraaatgaagcacccgtagctccaagtggagcaaccatttatcccccgttctatatacagcaaacaaaatgctttatggacatttaaatttgctccaaattgggtctggggcaaagagcagctctcagaaccaaaccctggcattggtgatggagcaccgcgggaggtgcccacctttggtggcggtgggacagtgggccgcacccctgcattctgctcccagttgtgccctgccctgtgcagccgtggggcctgggaacccagagtgggttctggccgtgtgtgggaacatctttgctctt

SEQ ID NO: 30198 - DNA, 600 bp, Chicken  19866894249757_1
tttctatttcttcaaaatacccaccagaaagtcttatatgacccagagcctgagcttagatcaaatcatttccatagtgtcttgaagacatgcctttttcaataaccttctgattttttccagctttagcatctgtgattgaaaatgctcagaggatgaactaaaagcataagaaaatattattttattgcagaagttatacatcttccaaacttttctatatatcaatgtgactgcatcaaaaggatttgctgaaattttgtctaaaatctaggcatgtggtgtcagcctatcaacctytgcatgcagcttctgttctaagtcattctgtaggatagattctgaagaatacgtagatgtataactatacatccactcatgtctttccaaaaggggcagtttctctcttgagaaactattctattttcatggaatttgaagctattgcattggatggagcagtagaagcaaaggatgtgaggtaatacaagggccctaggggagcaggaggagcaggatctatctgtgcagtggttgtgatgtctgtgttctcctagcagtgtctcctgtcccaggataaggctccaggttaggattcag

SEQ ID NO: 30199 - DNA, 489 bp, Chicken  19866894249758_1
gcttaccatcaatatctatcagcacctggaaacgaagaggctctggtagcactgggtgtcagcacagctgcccaaaaagccccagcaagcagcgctcaccgtcagcctcctcttgacgtagcggatgaccaggaaggtgtcgtggttgaggtttcgcaccatggctgtgcagccccccagctccgtgggtctgccgtcccggtcgtggtcgtaggtgagagatccattgttcaccatggcagagatgtaggggaaaacacgctgtggggagaaggccaaactcagctcccacatctgccycagcatcacagcgcgcctgcagggtctggaaatgctgtctgagttttgggtggtcccagctggaagcaggagctgggatcactgtgggtcctttcccacgcaggctattctatgatcctatgacatcctactgaccccaggctctttcaccccagctatgcttccccaaaaatcatccctggtcatccc

SEQ ID NO: 30200 - DNA, 600 bp, Chicken  19866894249763_1
atgaataagcagccttttgtcatgaagggccattaacagtgacattggggctctgtattcattttgtatctgggaaagaatctggctcttacccaactgttgactttgtcttaactttatggcttaatagtcaaacattctcaaagttctaaaaaaataaaaaataaaaaataaaaaaaattccttataataggaaggaaacattggcgtaaggtttgggtcatattttttggtttgttgaagtacttggtgggatttgcctgtttgaaatggctttggtgtgtcttttgttttggtacytagacattggttccattaacagatcagttcttttaacaggtatgtcttaacgtcagctgtattagttttctttagaaataggctcatttgcctgcagcagcaccacttgctgcttttctcttgtctccacaggcccagccactgaagaggagaaattgactcttgttgctgcacagtagtgctcttgccctgcttttcagagccactaggaaaacactgctaaatgggaacctattgaatatcacagtgctcagttttgcaggcttctctcagacagggaggagggggatggagagaggg

SEQ ID NO: 30201 - DNA, 600 bp, Chicken  19866894249763_2
gctgcacagtagtgctcttgccctgcttttcagagccactaggaaaacactgctaaatgggaacctattgaatatcacagtgctcagttttgcaggcttctctcagacagggaggagggggatggagagagggtggcaccactgaggaattcagttggcacaaaactacaatttgaagccttctgatttggtatctttcacatgtatttatattcaaaagtaactcagcctttaatagacagccttctgtgctttctcttctttacagtgaacttccatcccctgaaatattgggcagayctaatatggctgctaaatttagtgagaaaagatttccaagtgaaggtggtagtaatgataaaggacattcccaaaacttaggagtcaaaacacagacctgaaactggcattgcaggtggcagttgcttaaataatatggttccctgactgctggcatttctaaattttggcaaccgacatctgtgtctaaatgagctgatttctacagctgctgaagctcgggatcaaccgaatcttcatatgctattcctcctttccagagtgctccatggcagacctttatggatctctatgtcaaag

SEQ ID NO: 30202 - DNA, 600 bp, Chicken  19866894249764_1
tcacccactggcacaacttaggatatgaggaatttggtccagtacaatccagatctaatgaaatttcctgctgtatcacataataaacaatagaggtgttgactgtgtactgattgcagtttatgaaatgaacagcaggtgggagagaagcaatatgcatcctctggtagacctccagctaacaatgctacatttgaaaatgtgaagcataccagtgctgaaatcaaaccttttataccatgttcttgaaaacagggtgaggtgggagggagcagagggatgggggagaagaagggaaayrtgaaatcatggcatttgtttatgaaacgtttttccttttcagcctctttggtcctccytttcctatttcatacctgtatttctcattgcctgacagttctgtcatccgtcagctgctcccaagcagtttgcctccagttgatttctgcctaccttggtggcaggcacctccctgactattcatgtctctggcttcctgcttttatattttgtcaacctgtttatttcaaaacagtttctctgagcctcatctcgctgctgcccttatgcctacccatccatctccattaaaaactaaat

SEQ ID NO: 30203 - DNA, 600 bp, Chicken  19866894249764_2
cacccactggcacaacttaggatatgaggaatttggtccagtacaatccagatctaatgaaatttcctgctgtatcacataataaacaatagaggtgttgactgtgtactgattgcagtttatgaaatgaacagcaggtgggagagaagcaatatgcatcctctggtagacctccagctaacaatgctacatttgaaaatgtgaagcataccagtgctgaaatcaaaccttttataccatgttcttgaaaacagggtgaggtgggagggagcagagggatgggggagaagaagggaaayrtgaaatcatggcatttgtttatgaaacgtttttccttttcagcctctttggtcctccytttcctatttcatacctgtatttctcattgcctgacagttctgtcatccgtcagctgctcccaagcagtttgcctccagttgatttctgcctaccttggtggcaggcacctccctgactattcatgtctctggcttcctgcttttatattttgtcaacctgtttatttcaaaacagtttctctgagcctcatctcgctgctgcccttatgcctacccatccatctccattaaaaactaaata

SEQ ID NO: 30204 - DNA, 600 bp, Chicken  19866894249764_3
gaaatttcctgctgtatcacataataaacaatagaggtgttgactgtgtactgattgcagtttatgaaatgaacagcaggtgggagagaagcaatatgcatcctctggtagacctccagctaacaatgctacatttgaaaatgtgaagcataccagtgctgaaatcaaaccttttataccatgttcttgaaaacagggtgaggtgggagggagcagagggatgggggagaagaagggaaayrtgaaatcatggcatttgtttatgaaacgtttttccttttcagcctctttggtcctccytttcctatttcatacctgtatttctcattgcctgacagttctgtcatccgtcagctgctcccaagcagtttgcctccagttgatttctgcctaccttggtggcaggcacctccctgactattcatgtctctggcttcctgcttttatattttgtcaacctgtttatttcaaaacagtttctctgagcctcatctcgctgctgcccttatgcctacccatccatctccattaaaaactaaatattgaatatcaataaaaataacacagcctgttcagggaggaggtcatttgcgtgacgct

SEQ ID NO: 30205 - DNA, 600 bp, Chicken  19866894249767_1
ggcatgttttttttgtgtggtttgtttggtgtttgggctgtttgtttcatattttaaaggtttgatcattattcctgattaaagtcaagaaattaaagaagagtgggagaagtaggtgaaatcttggagaactaaaaattacataaggagcattgagtgaatagtttgcagtatggtatggcttaatgttgtgattggggtagaatcttcttggattttttttattccttcaggtgtgttgtgctctgattaagcctggtttattgaaaaggatgagaataggcttaagcacatcttcartacaacccctacaattctgtgattctgcgaaaggaaagtttgaagtgtgtgatgggtagttacccgagcaaaaatgcagaatagcaaattgyaaatgtattctatggagtattttctcttcctttgtactctactttgcttttcttcaccattactactttctgaattttctgttggatgtcttaatcaacaaaatgtcttttaagtcatgacatctttaaagatagacaaacataatatgtaaaatagatgtagtgtgagtgtcatttcaagatgaattgctgattttggtgttggagt

SEQ ID NO: 30206 - DNA, 600 bp, Chicken  19866894249767_2
ttaaagaagagtgggagaagtaggtgaaatcttggagaactaaaaattacataaggagcattgagtgaatagtttgcagtatggtatggcttaatgttgtgattggggtagaatcttcttggattttttttattccttcaggtgtgttgtgctctgattaagcctggtttattgaaaaggatgagaataggcttaagcacatcttcartacaacccctacaattctgtgattctgcgaaaggaaagtttgaagtgtgtgatgggtagttacccgagcaaaaatgcagaatagcaaattgyaaatgtattctatggagtattttctcttcctttgtactctactttgcttttcttcaccattactactttctgaattttctgttggatgtcttaatcaacaaaatgtcttttaagtcatgacatctttaaagatagacaaacataatatgtaaaatagatgtagtgtgagtgtcatttcaagatgaattgctgattttggtgttggagtgattgtggattgtaagcatcttggaaactggaattagagttaacattcctgaaaatctgtttgatgcctctcttgaccattgtcagttcaaa

SEQ ID NO: 30207 - DNA, 600 bp, Chicken  19866894249767_3
tcttggaaactggaattagagttaacattcctgaaaatctgtttgatgcctctcttgaccattgtcagttcaaacttgatgcaagtgaaactagagaaatacgtagttagaaaaacttactgattgaatacttacagaatgttaaatttttctgaaccagtgtagaacttcatgtaagtatgattgtcatttgtaataagtccttcattacctaagtgatttttttcatttagtctgtctgcgttattagtatatagaatgcctaaatgcttatgtgtattgctttaggagtaacaaaaractttgaaaaagccatttttgtatattgagagaggtattcagcatttccctacatggtggcaggccccaccatactttagttcagtgtatttctgagtaactatttgttttcccaaaatattttgttttgttgttttttgtaaygaggagtggaatttyggaatgtctgttagtactggttggtttaggtgggatgtgttgtatcacttaccagaaaatgtactgacttctgagcaccttggagattcaaaaacataaccataaaaggtttcagggagatttgcattccctttcctgctg

SEQ ID NO: 30208 - DNA, 600 bp, Chicken  19866894249767_4
aatttttctgaaccagtgtagaacttcatgtaagtatgattgtcatttgtaataagtccttcattacctaagtgatttttttcatttagtctgtctgcgttattagtatatagaatgcctaaatgcttatgtgtattgctttaggagtaacaaaaractttgaaaaagccatttttgtatattgagagaggtattcagcatttccctacatggtggcaggccccaccatactttagttcagtgtatttctgagtaactatttgttttcccaaaatattttgttttgttgttttttgtaaygaggagtggaatttyggaatgtctgttagtactggttggtttaggtgggatgtgttgtatcacttaccagaaaatgtactgacttctgagcaccttggagattcaaaaacataaccataaaaggtttcagggagatttgcattccctttcctgctgtttgagttgaccttattatgccaaattgagttaacaagattgccagccttccatttatattttggtgccttatctttcaagagaaaagtaaattactcttcacaggctttgtaatcgccaaacttcacttctcatgttgcctct

SEQ ID NO: 30209 - DNA, 600 bp, Chicken  19866894249767_5
gtgtagaacttcatgtaagtatgattgtcatttgtaataagtccttcattacctaagtgatttttttcatttagtctgtctgcgttattagtatatagaatgcctaaatgcttatgtgtattgctttaggagtaacaaaaractttgaaaaagccatttttgtatattgagagaggtattcagcatttccctacatggtggcaggccccaccatactttagttcagtgtatttctgagtaactatttgttttcccaaaatattttgttttgttgttttttgtaaygaggagtggaatttyggaatgtctgttagtactggttggtttaggtgggatgtgttgtatcacttaccagaaaatgtactgacttctgagcaccttggagattcaaaaacataaccataaaaggtttcagggagatttgcattccctttcctgctgtttgagttgaccttattatgccaaattgagttaacaagattgccagccttccatttatattttggtgccttatctttcaagagaaaagtaaattactcttcacaggctttgtaatcgccaaacttcacttctcatgttgcctctctctcatgtcctcca

SEQ ID NO: 30210 - DNA, 552 bp, Chicken  19866894249767_6
ggagatttgcattccctttcctgctgtttgagttgaccttattatgccaaattgagttaacaagattgccagccttccatttatattttggtgccttatctttcaagagaaaagtaaattactcttcacaggctttgtaatcgccaaacttcacttctcatgttgcctctctctcatgtcctccacccatactcttctgtgaggttgtgccaggtattttttcagtgctgtaactgcagtcattcttgagcaaactgtcacaaccactactgtgtccctgaaggaatctgtgcctctttyrctatctgatataatggaaagaaacagcaggccttgcttaaagaagtcttaatcctggctgcatacagagcatactcagtgtacagactagcattagtggaagctttttcttttgatgtttttccccagctaaggtatttctgaatgtttgcttctttagaaaattctagaatacttcttcgtgtgggaagaagtttataggactgttcaaaccacttcagaaggaattaatttagggtcaagtggaaataa

SEQ ID NO: 30211 - DNA, 551 bp, Chicken  19866894249767_7
gagatttgcattccctttcctgctgtttgagttgaccttattatgccaaattgagttaacaagattgccagccttccatttatattttggtgccttatctttcaagagaaaagtaaattactcttcacaggctttgtaatcgccaaacttcacttctcatgttgcctctctctcatgtcctccacccatactcttctgtgaggttgtgccaggtattttttcagtgctgtaactgcagtcattcttgagcaaactgtcacaaccactactgtgtccctgaaggaatctgtgcctctttyrctatctgatataatggaaagaaacagcaggccttgcttaaagaagtcttaatcctggctgcatacagagcatactcagtgtacagactagcattagtggaagctttttcttttgatgtttttccccagctaaggtatttctgaatgtttgcttctttagaaaattctagaatacttcttcgtgtgggaagaagtttataggactgttcaaaccacttcagaaggaattaatttagggtcaagtggaaataa

SEQ ID NO: 30212 - DNA, 600 bp, Chicken  19866894249773_1
gtagtaaacaaatgaagggattttattgctttcttgtatcacagcaaattggtttttggtacatgaccttgtcactgatttagtaaaacctccttaggggtttgtgaagaaaatatggtagagaagaggaggggcctttctaatgagtttggatgtatgatttcatctgaactgaaaaacaattcatatctgtattttggaaattgcatatttgggtatgttttccttcctgagaatgtttcttacaaaatgcctttaaaatttctccattaaatattgtaggtacaatgaagaattccrtcaaacctaagaagactgcatcccgaagggtaagatgatacagtttttaatggtattatgcctttatgttatgagatacattcctttttcacttgagtacaatctcttcccttgcagagttgaatctgcaaagatgctacttccctcagcaggagctgggaacttgtgcattgctcacagataagttgaaaccctgaccaaaaaaaaaaataaaataaaataaaaaaaaaaattgtcatcaacggaaaatcagttttggtattactgaaaagatggttattccaccatcaatactatgca

SEQ ID NO: 30213 - DNA, 600 bp, Chicken  19866894249775_1
ggggtaggaaaagactcctcagtcattaagtcttcatcaaaactactcaaatagtttcctcacagtcacatgggacagtgggaaagacaattacagtgtgatagcagcaacataatcacattttagaagcagtcattttgggcaaaaattctacatctagtattaataaacagagatttcagcttaaaagcaatggatgaggtagaggctgcagattctttgctaagtatatcattaattttgttccccactaaaaactacgccgttaattgcatatgtgtttgtattttcaattccaastgatctggtgcagtagaagagtgcaccagatccaaaaccaccagcactggtgttatcttagcaagtaactgtcttcagagaaattctccaaggaattcagaggataacaaggtgcaatcacagaaaatgcacagcccagtttgagagttgttatacagaaagatagaaaataatacaattctacaagtaggagaaagctctactcttcctacaaacatacttgaagaatctcaattactcaaaggagagctcaggaaagcaggaataactttagatgacttaatagggagggttttttta

SEQ ID NO: 30214 - DNA, 600 bp, Chicken  19866894249777_1
ttttgtgtgacttgactgagttttccatgtccaaaacttctttaagaatctaacttttctgacatgtttttttttttcatgaagtagagccaagatgaaggaaatgattttgtagccataatcatgaaggtcagaaaaagaaatgaaagcaaagagtgcaagatttatattcacttgttcctctgagtttctcccaagtaatttgggaggaactcagttttgagtgttatgaatgttctgtaatgaataacgttgcaactggaacattatcagtgcgatctgaaggtgggtttggagatygcatacaggctgctcagcagtggaaatggagctagttaaaattcagctgttttctgcatgagtcaacatgggactgaagtggtaggagttggaatatctgcacatcttttgttatagataatgtaattatattatcacttcagctcaactataaaaagaactcaaatttgcactaaaaagatctttaccccctttctgctgatcgctgcttagaagagtattttacacgagaggtttgttatctttaatagcactaaaattacttaaagcaattacctgcatcattttaagctctacaga

SEQ ID NO: 30215 - DNA, 600 bp, Chicken  19866894249777_2
ttgacctcctccattccccaattagaagtgggcctgactttaaagaacccatttcaacttcaggacaaacaaaaatccctctaaaccgagtatcaaagtaaactacgtggcaacctgacaacagcatccttggacagaaacaaatctgagcttcgaaaatattaagacttttacagtgcaatatagtagaaactaactacttaaaggaagatgtagtgtcacatctttcacacagctctgatttttattttttcccctctctttcccttttggtagaaatctcctatagcatccagtgaygtagggtcaacgaaagaactttcctctactgaagtttattagctgttggtctaggatcccattgggcagagataattctgcaggtttttgtataatcagaaagctgcgttggttaagccttggagaacaattctctgttgtcaaggacacagtttaacaaaatttcattgctggctgtgatgtatccctcatcacttgtacttgtgttcttatgatttttatctcccacatcagtgtacaagagctgaaatatagagctaaggtgtggctttttgtataataatgatgtagatgggaatt

SEQ ID NO: 30216 - DNA, 600 bp, Chicken  19866894249780_1
tttgtcctcactttacaataatcctgacttgctcatgtgttgtgagataatgtaggagtctgaacaaagcctaactgtacagtgtctatacccttaaggcttgctacttctcttagaaagattttcgattgatctgatatgatataaacctgacaaatgagttaacactcactgcatttgctgcctactcatttactacttagtcatctagcgttctttcaggtaccctacaaaaagacagttcaattttttggtttattaagttcccacaataagaactggcccatcattctacaaccyttttgccatttttttttcaattcctatagttgcacttttccactcttycagaagttgattcacctctacacattctcaaatgcattgaggcactgttgagattgcttcacaaaccagaaaagtattctgtaagagctagagaatcagaaatacctagctgtgctcaaagcagatcttttgttcttcctcccgttwgtcattgatgtgaattgtaacagctgtttgagcaccattgactacctaacatgctgaacagtcaaggtgtgatatagtcctcgcagttttctctcaggagaggca

SEQ ID NO: 30217 - DNA, 570 bp, Chicken  19866894249780_2
aatgtaggagtctgaacaaagcctaactgtacagtgtctatacccttaaggcttgctacttctcttagaaagattttcgattgatctgatatgatataaacctgacaaatgagttaacactcactgcatttgctgcctactcatttactacttagtcatctagcgttctttcaggtaccctacaaaaagacagttcaattttttggtttattaagttcccacaataagaactggcccatcattctacaaccyttttgccatttttttttcaattcctatagttgcacttttccactcttycagaagttgattcacctctacacattctcaaatgcattgaggcactgttgagattgcttcacaaaccagaaaagtattctgtaagagctagagaatcagaaatacctagctgtgctcaaagcagatcttttgttcttcctcccgttwgtcattgatgtgaattgtaacagctgtttgagcaccattgactacctaacatgctgaacagtcaaggtgtgatatagtcctcgcagttttctctcaggagaggcaatagatgatcaagctaag

SEQ ID NO: 30218 - DNA, 423 bp, Chicken  19866894249780_3
ctacttagtcatctagcgttctttcaggtaccctacaaaaagacagttcaattttttggtttattaagttcccacaataagaactggcccatcattctacaaccyttttgccatttttttttcaattcctatagttgcacttttccactcttycagaagttgattcacctctacacattctcaaatgcattgaggcactgttgagattgcttcacaaaccagaaaagtattctgtaagagctagagaatcagaaatacctagctgtgctcaaagcagatcttttgttcttcctcccgttwgtcattgatgtgaattgtaacagctgtttgagcaccattgactacctaacatgctgaacagtcaaggtgtgatatagtcctcgcagttttctctcaggagaggcaatagatgatcaagctaag

SEQ ID NO: 30219 - DNA, 600 bp, Chicken  19866894249782_1
tgatggagaaatgaggtccctcagtgtgggaagcagggtgggctgcgctctgcaccagcaggctcagggtagtcctccaccaaagttgaagaagcgctcgcagagcaagctctcatctccacagaggtctttctggaaggataactcgccctaatttgtttgagtcttcagaaatctctggctgacagaaatgtcccggttgccaaagcctttttggactgctttatttggagttgcggaaggttttgtctggaggtagtcttgcttgcaattaaggagggtgtgtgtttccctggttgygttgctggaagtcatcaggctgttcagtccctcataaagcctcacagtgctgctcctcaccctcactgcttctttgcacttatgcctcacgggcggaccatcactgcgctctgtgctgtgctccctgtggggctgcagtcccccacatctctgtgctctctctgctcaggtcccrgttttttggtcatcccagggatggccgcctcgtgccacctccaaagcygcacattgcagagggtgctcacggggcaacttttcccctcccgctccccttctcatccttgttgctgcgttgagcat

SEQ ID NO: 30220 - DNA, 600 bp, Chicken  19866894249782_2
ctctggctgacagaaatgtcccggttgccaaagcctttttggactgctttatttggagttgcggaaggttttgtctggaggtagtcttgcttgcaattaaggagggtgtgtgtttccctggttgygttgctggaagtcatcaggctgttcagtccctcataaagcctcacagtgctgctcctcaccctcactgcttctttgcacttatgcctcacgggcggaccatcactgcgctctgtgctgtgctccctgtggggctgcagtcccccacatctctgtgctctctctgctcaggtcccrgttttttggtcatcccagggatggccgcctcgtgccacctccaaagcygcacattgcagagggtgctcacggggcaacttttcccctcccgctccccttctcatccttgttgctgcgttgagcatgtggccaagaaagcccacaggaagcccctgcattgggggttgctgctgggaaggaggccacacgttcctggcctggctgtgggcataaacccatttgttcagtggagaatcagagctgacgagcatggactgctaatgaaaagcctttactccagagcacgctgctcactgagca

SEQ ID NO: 30221 - DNA, 565 bp, Chicken  19866894249782_3
ttatttggagttgcggaaggttttgtctggaggtagtcttgcttgcaattaaggagggtgtgtgtttccctggttgygttgctggaagtcatcaggctgttcagtccctcataaagcctcacagtgctgctcctcaccctcactgcttctttgcacttatgcctcacgggcggaccatcactgcgctctgtgctgtgctccctgtggggctgcagtcccccacatctctgtgctctctctgctcaggtcccrgttttttggtcatcccagggatggccgcctcgtgccacctccaaagcygcacattgcagagggtgctcacggggcaacttttcccctcccgctccccttctcatccttgttgctgcgttgagcatgtggccaagaaagcccacaggaagcccctgcattgggggttgctgctgggaaggaggccacacgttcctggcctggctgtgggcataaacccatttgttcagtggagaatcagagctgacgagcatggactgctaatgaaaagcctttactccagagcacgctgctcactgagcatgcgttcccagcg

SEQ ID NO: 30222 - DNA, 600 bp, Chicken  19866894249794_1
ccagcagtggagcgatttgcttgtgaaatgcaacctctgttctaacgctgctaaaaatgaacaaaagtgctcgaggactaactgctgctcgtagggcagcgagcaggcttggggggcagcaggctgtgggcagtggctgcccggtcccatcacatgctgcctgtgccagccgggaaccacgagctcccatctggtgatcactgccagcagcgctccccaggtcagcagctggtctgcctgggctggcagggggcagaggcaggagctaccaccttagacggggctgttgtgggtcaggarcaatgcatttaygtgtgtgcacgtgtccccatgcagcctktcctccctgcatggaaatacctgagaataacacacggcgatgatctgcttgctctgtgctgcactgctgacatctgagggcagaagcctccrgtttgtcttggtttgctgtagatccctgtttgcacaatccatcacgagaactctacragtcgaaagaccaaacagatttcttgtgcagcctcagcccgcgcctcccgctctggcatcgctgtgcagcgatgctccccctttaatgatgtgatcctagcctcttttttt

SEQ ID NO: 30223 - DNA, 600 bp, Chicken  19866894249794_2
cgatttgcttgtgaaatgcaacctctgttctaacgctgctaaaaatgaacaaaagtgctcgaggactaactgctgctcgtagggcagcgagcaggcttggggggcagcaggctgtgggcagtggctgcccggtcccatcacatgctgcctgtgccagccgggaaccacgagctcccatctggtgatcactgccagcagcgctccccaggtcagcagctggtctgcctgggctggcagggggcagaggcaggagctaccaccttagacggggctgttgtgggtcaggarcaatgcatttaygtgtgtgcacgtgtccccatgcagcctktcctccctgcatggaaatacctgagaataacacacggcgatgatctgcttgctctgtgctgcactgctgacatctgagggcagaagcctccrgtttgtcttggtttgctgtagatccctgtttgcacaatccatcacgagaactctacragtcgaaagaccaaacagatttcttgtgcagcctcagcccgcgcctcccgctctggcatcgctgtgcagcgatgctccccctttaatgatgtgatcctagcctctttttttcccagtcccctg

SEQ ID NO: 30224 - DNA, 600 bp, Chicken  19866894249794_3
tctaacgctgctaaaaatgaacaaaagtgctcgaggactaactgctgctcgtagggcagcgagcaggcttggggggcagcaggctgtgggcagtggctgcccggtcccatcacatgctgcctgtgccagccgggaaccacgagctcccatctggtgatcactgccagcagcgctccccaggtcagcagctggtctgcctgggctggcagggggcagaggcaggagctaccaccttagacggggctgttgtgggtcaggarcaatgcatttaygtgtgtgcacgtgtccccatgcagcctktcctccctgcatggaaatacctgagaataacacacggcgatgatctgcttgctctgtgctgcactgctgacatctgagggcagaagcctccrgtttgtcttggtttgctgtagatccctgtttgcacaatccatcacgagaactctacragtcgaaagaccaaacagatttcttgtgcagcctcagcccgcgcctcccgctctggcatcgctgtgcagcgatgctccccctttaatgatgtgatcctagcctctttttttcccagtcccctggcctcttgcagggcatatgatagatggt

SEQ ID NO: 30225 - DNA, 600 bp, Chicken  19866894249794_4
gtggctgcccggtcccatcacatgctgcctgtgccagccgggaaccacgagctcccatctggtgatcactgccagcagcgctccccaggtcagcagctggtctgcctgggctggcagggggcagaggcaggagctaccaccttagacggggctgttgtgggtcaggarcaatgcatttaygtgtgtgcacgtgtccccatgcagcctktcctccctgcatggaaatacctgagaataacacacggcgatgatctgcttgctctgtgctgcactgctgacatctgagggcagaagcctccrgtttgtcttggtttgctgtagatccctgtttgcacaatccatcacgagaactctacragtcgaaagaccaaacagatttcttgtgcagcctcagcccgcgcctcccgctctggcatcgctgtgcagcgatgctccccctttaatgatgtgatcctagcctctttttttcccagtcccctggcctcttgcagggcatatgatagatggtgcctgctgaatcatcagcagttgtttcgtagcacgctgcattatttactgtacggcagccaaatcctgcactcagtacataattattaattt

SEQ ID NO: 30226 - DNA, 600 bp, Chicken  19866894249794_5
tctggtgatcactgccagcagcgctccccaggtcagcagctggtctgcctgggctggcagggggcagaggcaggagctaccaccttagacggggctgttgtgggtcaggarcaatgcatttaygtgtgtgcacgtgtccccatgcagcctktcctccctgcatggaaatacctgagaataacacacggcgatgatctgcttgctctgtgctgcactgctgacatctgagggcagaagcctccrgtttgtcttggtttgctgtagatccctgtttgcacaatccatcacgagaactctacragtcgaaagaccaaacagatttcttgtgcagcctcagcccgcgcctcccgctctggcatcgctgtgcagcgatgctccccctttaatgatgtgatcctagcctctttttttcccagtcccctggcctcttgcagggcatatgatagatggtgcctgctgaatcatcagcagttgtttcgtagcacgctgcattatttactgtacggcagccaaatcctgcactcagtacataattattaatttcctcgtcggctaattaaagattgtttcacaatgcacacacatcagggagctgaatta

SEQ ID NO: 30227 - DNA, 600 bp, Chicken  19866894249795_1
ttaattaaatgtcactactgataagcttaggatgctccttctttttaatgtgactcattctaaactagttctaaagatggagagtgtacaaataattcctgcaaaatgctgggaaacctaactttctggaagaaatatataacagattttaacttataattagaactacaacaaaaataaaaacacacatacgatttgttaacatgtgaaacatttctgtaagaagattttcttttgatacaaacatccgtagcaggaagctatacttcacaccattaaaacattaccgaacagtttacrgagaagaaaatcgaacctttgatttatagcactcggtggatttttgtcacagaattatgtatccaaataactgtataatagacgtaatgccatgcaggaatgaagcaaatattttaagcggaattgttgttattgacaagttactgagagagtgcaaaattggaatacattaaaatttatgaccatgaaatcctttttacagtacctcttgatatatcgtgttttaaatcaatacctgtcaagtcttttaggtaactgtatgatggtgttgttttagccttctacaaaagactacaaaaa

SEQ ID NO: 30228 - DNA, 600 bp, Chicken  19866894249797_1
atttcattaacactaaaattttatttcattggctgaaaattatcactggaaccctaggaaattttttgtaaagcacataaaagatgaaaaaaatattttcaaatgaaacagggaatacgtatctgtctcgtagtagtatttatccaagtttctttcagctgatcactagctataacactgggtgaaatcaatgaaagcgagattcagacagttttccctgtattcatgtaaggaaatcttagatattgatgaagctatatcatttcctgtttcctatacatagtcacttactaaatcctwgtctttcactgcataacatcagtttttcagctccattctgtctgatatcagcgagacagcaatgaaagagcatcagctatctaccctctgcacgagaaagactttctggtcgatatataaaaagtactgaaacttcaatattttactgttcagagagtaagttattttcacagagatttagccttttctcctttcatgcaacattgtagtaaacacacttaatttgcaaaatataaatagtaaatttttataaaagcacactttacattctctgaaccttctgcattatttcataaagga

SEQ ID NO: 30229 - DNA, 600 bp, Chicken  19866894249797_2
atccaaggttaaagtattaaaggtttctaagtgataagtcaacaaacaaatacaacaaatacaacaaaaaaagcacacacagaaaagaaagttgcatttatcaagacccacctctccaaagcaacttgaaatgcacctagttagtgcaaaggttagtgtcatggtattatgatttttgttattggtattccacatcatcacatcaagtagtgcactgtgaatctcggaagaaaagaaatgtgctacagctcccagaaaaatgtgctgttccatgtccattttctggttggttggaaagayaaaatttactgaaagtcacgagactgcctctcttctctccctggctgcgtggagtaagaacctcagctttcagaaattctctcatttatttgatttattagctttgatcccaactaacttttatttctgcctttctaattaggaaattaattttcctctgcagatcattggcactgctttgtcttttttttcccccctttttgttccctttccctttcccctycccccctcctctttcggcaagtgggcctgtgggtctgctgtccccctgtcacagatgtagatagatctagagataaa

SEQ ID NO: 30230 - DNA, 574 bp, Chicken  19866894249797_3
tcggaagaaaagaaatgtgctacagctcccagaaaaatgtgctgttccatgtccattttctggttggttggaaagayaaaatttactgaaagtcacgagactgcctctcttctctccctggctgcgtggagtaagaacctcagctttcagaaattctctcatttatttgatttattagctttgatcccaactaacttttatttctgcctttctaattaggaaattaattttcctctgcagatcattggcactgctttgtcttttttttcccccctttttgttccctttccctttcccctycccccctcctctttcggcaagtgggcctgtgggtctgctgtccccctgtcacagatgtagatagatctagagataaatgtgacagatataaaataccaagaatatttattcctttaggaactacacctattatctcaaagtttcctgaaagatgtgaaggttgaagaaaaacccattaggatttgctaatcaacatgctgaataaataaatatatataggaccatgaaggcccatgctttaggctgcagatgaatgcttccttggcagattgaa

SEQ ID NO: 30231 - DNA, 600 bp, Chicken  19866894249804_1
ctcattcctattttcaattactaatttctttcatacagaagtactgttcctttatctcataaaaagattggtagttcatcatccttgttttgggtcagggcctcaggaatgctggacattaaaaatacataaataaatacataaatgtttcagaagagtatttagatggataacagcagtctgaacagttcatttttctctatcatgtgacctttttccagcatagtgattttttaaaaaaatacctcatgtatcattaatatttcctgtatcttttgattgacactcagtatactgttrtgatttcaggtactaatacattatagttgcaagttatcctattcattctgaattcctgctgtactgtaccaggatcatcaagaactgcagactgctctgcagacgttgttcagtccacaatgtcagagaaggtgctcaaggcacagagatgcatgtttcagagagcaggcaaatagatatgggtgatagatagcaggcatgctagatatatctgcaggtgtctccaggcacccagggtcagtaataccctgagtcagtagaaaaggcacaggaatgtctgagcaaaggtaaggaatgcct

SEQ ID NO: 30232 - DNA, 599 bp, Chicken  19866894249813_1
  misc_feature (1)..(136): n is any nucleotide
nnnnnnnnnnnnnnnnnnnnnnnnnnnnnnnnnnnnnnnnnnnnnnnnnnnnnnnnnnnnnnnnnnnnnnnnnnnnnnnnnnnnnnnnnnnnnnnnnnnnnnnnnnnnnnnnnnnnnnnnnnnnnnnnnnnnnnnnacaaagcaaaggaagagagttcacatatttaggacaagtctcgaattgagacctgacttctattgttaagcgtgtgtgtgattaaaaaaaaaaacacattcatgcagtaacatcgacaggagctaccctgagtgatgtgcaaatactgttttagaacaagtgayttctctcacaagcataattcccagacacaggaagaccagacctggtagcccgatttaattccaagacaaaaagaactcttgacattacttggctttctgcaagatctttgtgagagcagattcagctaagagctttaagctctctcctttgcgaacgttactatacaaaagaagcaatattgactcctttttacaaaacacacatttctcctttacatgagaatacagcgatattctgctctccgcagttaacgacttaaaggatgactctcctcaaagcatccagaatctctgtgcca

SEQ ID NO: 30233 - DNA, 559 bp, Chicken  19866894249820_1
agatgatgcacggctgggccctggtgcccgccacctctgtgaggtgcctggggaggtggctctgtgtaagttctaatccctggggatcgagtcctgagggtgtctcctctttggtgtactcagccaattagcaatctattgtttttgttattaatgtagacaaagttttccaaagcgaaagccagctttggatgtcagaataccagtttccaaacaaagcttacttagccattttatcttgcaagcgaaattataccagcatgctaatagtttgacaagtctgttcttgagcagagctgytaagcggataaaaaacaaacaaacaaaagctctcctcctgcttatatgttttgcccatgatgggtttttttcctctctctctaaaaatgtttttaataaaaagaatatgacttgaaaatgtccttttacttctcacatataaatctatttgtcatactctctccccccctcaatttgtgttatggatgcttaaagtatgaatgctccatacattgtgaaaagggtatatcgagtaatttttaacgatgctctgaaatga

SEQ ID NO: 30234 - DNA, 600 bp, Chicken  19866894249831_1
aaattcataagaggaaagactgtatttgttattcttccctcactttccatccgagctattctccattcaaaaacagtcaagtatcctgttaaggaatgaatacaatacccatgtgattttgatgacaaattgtgtatgataaacaatgactagcagaaatgatcactgcgtgaataagcccaacgcttgtttgcataagccagccagtaaatatttaagaataataaaaagatccctagaaatcagaatagctccgtgggcatatcacaaccccaaaaaaaaaaaaaaaaaaaaaaaaaratgacaaaatttgtggaataatttatttgctgtggaaaatttgaccatacgcatctttgaacttcaaacacaagaattaaatacaaccagttatttctttttatatgttccagtacagctggctataagttaagcttccttctataggattccttagaatattactaaggtatttcttaaattaggtatttcgtactgataatttatattggttcttaagaagcctgaaacttcttttttttcccccttctttttgcccccctccccaaacctttttacttccttctgctatactattaa

SEQ ID NO: 30235 - DNA, 460 bp, Chicken  19866894249839_1
tcccagacatcagatcccacaggacctctcactattggctctctacacaactgtcatgatggacacaggtccctcctggtcctgctggcttctgggaaggtgaggaaggacaaaaggggaggagagctgacctggcaacaggtgcacagtccccttggctgatggcaaccatcactgagctgcctgcaaaccagaaagggctctgaaagaatgagctgggagagggactcaaaagcagggctctccatacatgcagaaacagcaccccatgaccctagtggcacccttgaccccagggarcaagctttgttgtgttacatatggtatgttgaaccacagggacactgggaaatgcctgccctatttcagtttccatttgaggcagtaggccatgggggaacgggcttattcacaaggaacccacagcagacgtttcagcctgtggcagtgcctctgcggg

SEQ ID NO: 30236 - DNA, 600 bp, Chicken  19866894249840_1
aaggcaaagcttcaaagagacaggattatacaatgagatagcagttcaacacacacagatattcttttgttattttctgaactacattcatctcctttttcagcagggatttttttttttttttaactaaagaaaaatccaactgtgtattcccaactgataagaaatgggtgtcagtgcaataggaaagctgtagaaattttgataaaagctctttctgaagaaaaaaaaagaaaaggcatcaaagaggttatgttggacagcgtattagatatcatggttacagctgaccagagaagraagctttctctactacttatctttggataccccattaattttcagtttaacagcaatgtcacatgttggctagggttcaaatatgataaaagaggcatataaatgaaagagatttacagattacttagataacattaaaagtcatatcaaaatttaaactatttctagtattatgagcatagttaaaacccataaggattaacatctcagtattgtacaaactcatgaattcatgctcataaatacaggcatatctcaatacacacacatttagagtcacatcccagcaaaactctcctg

SEQ ID NO: 30237 - DNA, 599 bp, Chicken  19866894249858_1
  misc_feature (1)..(16): n is any nucleotide
nnnnnnnnnnnnnnnnagcagagctccaatggccgaattctgtctccacaatgatccgggagggaaattgtgtgctgctctgcacagctcctagctcagggctattcttaagctgtgtaatagcatcctgtgagggtactgtgcctgagtgaattatcagtgcaactgtttgttagtattcatattacattcataattggtatgcctgtgatttagtgcaccagcttgcaaatagctaattcattgtattaaagcactagccttgcctctgctaatcatgaatcacaccttcaaaattayaaagtttctttcaggccaaagccatgagggatcttttttccctttgctttatgattctgagctctaaatagggtcacagagttttcccgtctgaactggaacttctagaattaaacaggaccttccttccacctgtcacttgctttgaaaagctgaaggaccatcttaaaaccctccgtctcaaaatgaatttcacagtcatcttcagttctgtatttctcaccaccttgtgggtacagtcagtgtttccatttaatttccaagccgtagacacttctgtcacattcctattcccacct

SEQ ID NO: 30238 - DNA, 600 bp, Chicken  19866894249859_1
caacaaagacacaaagcatagtgcacaagtgccaagcgatgacctcactgacaacacggctcccattccgtgttttggccacttctttggcgtgccatgacacaaacgtgcaagatcactcctttggcctccaataccctcacttgaaaggtgccacgagtgccaaaaggacacgtcctcacgagaaggacgtgaaaaggcggagttgctggaaggagaacacacatcaaatgactggcaacactacgtcatgcaagagctgcaactgcacaatgctgccatgcgcagaggctctctccwcgccctcaggcactgacacagcagcataaaagcccgtcctgcgtctcactccctcacacccttctcttgacaccttctcctcagcactcctccaggtgagcctgcaccccacgccctccttcacgcaccccaccgggctttgctctccacaccmcctgtgcccccagactctgcagcccgtctgtctccccaactggagggggctctccacaacctcaagccacaactacttactccctgggccaacctagcacaactccttgtgtcctgaacaacctctgctcacccaacaccctctct

SEQ ID NO: 30239 - DNA, 600 bp, Chicken  19866894249859_2
cacgagtgccaaaaggacacgtcctcacgagaaggacgtgaaaaggcggagttgctggaaggagaacacacatcaaatgactggcaacactacgtcatgcaagagctgcaactgcacaatgctgccatgcgcagaggctctctccwcgccctcaggcactgacacagcagcataaaagcccgtcctgcgtctcactccctcacacccttctcttgacaccttctcctcagcactcctccaggtgagcctgcaccccacgccctccttcacgcaccccaccgggctttgctctccacaccmcctgtgcccccagactctgcagcccgtctgtctccccaactggagggggctctccacaacctcaagccacaactacttactccctgggccaacctagcacaactccttgtgtcctgaacaacctctgctcacccaacaccctctcttccagagaccctctactgccatgtcctgctccaacctctgccgtcccatgcggacccaccccgctggctaacagctgcaacgagccctgtgtcaggcagtgccaggactcccaggtcgtcatccagccttccaccggggggggggcaccctgcc

SEQ ID NO: 30240 - DNA, 599 bp, Chicken  19866894249867_1
  misc_feature (1)..(59): n is any nucleotide
nnnnnnnnnnnnnnnnnnnnnnnnnnnnnnnnnnnnnnnnnnnnnnnnnnnnnnnnnnnactaattttgtccatttttagtttagctaaaataggtgtttctcagtatggtgaggtgctgctaagggaaaacaagactgttaaaggatctttctgcctctatctaaaataacgtaattgttattaaatctgttttttcatgcttctacaatagagttaaagagttactgtatggggaaaaaatacagaggcttagagccagacagatgtgatgatataaaagattttagcaaaaggattmaaaaaaaaaaaaaggtgaaaaaatataatgtgaaaaaaacatatattcaaaaacaattaggaagaaaaaggagaaaaatcaacagtcatactctactcttgcatcagtgagatagcaktaaagaaattccactgtacatctagtcatcagctataaattgtagtcagaaacagcctgttgaatttatgaagcaatgtaaacatgcagagtctccttcctatagggtgtgtcacctgtattagcaatttacttgcatatcctcagacctacattactaaaattgtttaagagtcatattt

SEQ ID NO: 30241 - DNA, 599 bp, Chicken  19866894249867_2
  misc_feature (1)..(58): n is any nucleotide
nnnnnnnnnnnnnnnnnnnnnnnnnnnnnnnnnnnnnnnnnnnnnnnnnnnnnnnnnnactaattttgtccatttttagtttagctaaaataggtgtttctcagtatggtgaggtgctgctaagggaaaacaagactgttaaaggatctttctgcctctatctaaaataacgtaattgttattaaatctgttttttcatgcttctacaatagagttaaagagttactgtatggggaaaaaatacagaggcttagagccagacagatgtgatgatataaaagattttagcaaaaggattamaaaaaaaaaaaaggtgaaaaaatataatgtgaaaaaaacatatattcaaaaacaattaggaagaaaaaggagaaaaatcaacagtcatactctactcttgcatcagtgagatagcaktaaagaaattccactgtacatctagtcatcagctataaattgtagtcagaaacagcctgttgaatttatgaagcaatgtaaacatgcagagtctccttcctatagggtgtgtcacctgtattagcaatttacttgcatatcctcagacctacattactaaaattgtttaagagtcatatttt

SEQ ID NO: 30242 - DNA, 600 bp, Chicken  19866894249867_3
tgctaagggaaaacaagactgttaaaggatctttctgcctctatctaaaataacgtaattgttattaaatctgttttttcatgcttctacaatagagttaaagagttactgtatggggaaaaaatacagaggcttagagccagacagatgtgatgatataaaagattttagcaaaaggattaaaaaaaaaaaaaaggtgaaaaaatataatgtgaaaaaaacatatattcaaaaacaattaggaagaaaaaggagaaaaatcaacagtcatactctactcttgcatcagtgagatagcaktaaagaaattccactgtacatctagtcatcagctataaattgtagtcagaaacagcctgttgaatttatgaagcaatgtaaacatgcagagtctccttcctatagggtgtgtcacctgtattagcaatttacttgcatatcctcagacctacattactaaaattgtttaagagtcatattttcagatattgaacaacttcagcattttttagctttacttcagaattttgtgtagtgaaactgcagagccaacaaaccaggcaaattatctatccatttgcatgcaatcataattaacat

SEQ ID NO: 30243 - DNA, 531 bp, Chicken  19866894249867_4
aaaatgatttttacaggtaggattctgctttatagctatgcaaaattcatgtcttgccagtactattctacagaatctaagcaagatatgctgatttttaataaagaagatataaaaaagggcttttattttctagctacaaacatttatttctctctttaaattttagaagctataaattactctttgttttcaaggtaagaaattacatttagctacagtgcaaagtaagaattgcagaagtgcgtgattagtgccaagtcagtgtattcatgttgttctaacaatgtgacatgacaygtttttacttggagataatgttttttgttgaatagctgctgtgacagaaaaatcagacaaacgttcagacttacagaccttcatatctgaaagaatagcttaattatgaagagaagcagctttcaaattggcacaggtgttgaaaaccattgattatggtttagttagctatacaccagttaaattagctacaaatggtgttaattccatagaaagatcttgaccaaaggt

SEQ ID NO: 30244 - DNA, 600 bp, Chicken  19866894249872_1
caccatgagtagagtaggatgcatgctggcaccctcactcctcttctgcaagaccaggcttctcaccttaaacctgtagcgcacttaagacatagtacatactgagctgtgaactgcagtggttgagatactgacaccttccatttgtacaccattgtttagcgactgtgtcatttggtagaagagcagaatgaagatctgttgacagtaacaaactgtaaaatatgcagctataattacaccgggaacacttttcagagcctcaggtcactcttgaaccttgatttatttatttatttwtttacttgcagaagagatgcgagtatttccatctcttccagcaatagaagagagtttaattcttacagctgcaaagttttctgaagtctttatataattgaagtgkatataaaggatataaataatatgcttgtgtatcagtgcataattcttgtccttaaacatgtagtgtagaacaataagctcaactccacgtatccaagccatactcttaactactcaatcctgcaagcccatagagacaaaaacagagattatggaagagtttttggtcttaccaattgttaacctggagtagcg

SEQ ID NO: 30245 - DNA, 600 bp, Chicken  19866894249872_2
ctgtgaactgcagtggttgagatactgacaccttccatttgtacaccattgtttagcgactgtgtcatttggtagaagagcagaatgaagatctgttgacagtaacaaactgtaaaatatgcagctataattacaccgggaacacttttcagagcctcaggtcactcttgaaccttgatttatttatttatttwtttacttgcagaagagatgcgagtatttccatctcttccagcaatagaagagagtttaattcttacagctgcaaagttttctgaagtctttatataattgaagtgkatataaaggatataaataatatgcttgtgtatcagtgcataattcttgtccttaaacatgtagtgtagaacaataagctcaactccacgtatccaagccatactcttaactactcaatcctgcaagcccatagagacaaaaacagagattatggaagagtttttggtcttaccaattgttaacctggagtagcgtaagatttgtttgtgctgcaatctgtttcttctcatcctctgttggatatggatgctaaacaagagaaaaaagcaaataagaaatgcataagcttctgtttcattt

SEQ ID NO: 30246 - DNA, 600 bp, Chicken  19866894249872_3
gtgtagaacaataagctcaactccacgtatccaagccatactcttaactactcaatcctgcaagcccatagagacaaaaacagagattatggaagagtttttggtcttaccaattgttaacctggagtagcgtaagatttgtttgtgctgcaatctgtttcttctcatcctctgttggatatggatgctaaacaagagaaaaaagcaaataagaaatgcataagcttctgtttcatttcctcatcaaaaataaggactcctttatcacaagtgattaaagatgctatactaaggtcatcyaactcgttatgaacaaatttaagaacgctcacaaacttttatagataaaaatcatttaataaaaagtgtgttactatgcaaaactggttttatccttgcaaatatgcatcgtatcgttgaactgttgatgtttaattcagcgaaagagattctcatggctgacagtctttattaaacagcgtgatctctgggcaacaagcatgtgataagatctgattagttatgctttctaaaggcaatgtcatatgagaatactgacaagccttttctagttaaaataagctactctgaactaagtgg

SEQ ID NO: 30247 - DNA, 600 bp, Chicken  19866894249877_1
caagcaacttccacttaaggctaatgtaactattacctcattaggactgcaactttacactcttcaaataaaagctttattgaattttaaatatgtatttgacaatcaaaagcttgaaatccgctttatgaaattatgctcctttattgatactgactagctttataaatgtttatcttaattatgctttattgtgattaaaaaggattgcagatactctgccatttctgtaaagtgagcttttggaggcttttttttttgttgaagatgggggtagggtacaaagaatagcccagctcyggcgaggaggccccttacagtccatatgaatccacttacatgtaaattgcttgtctctatgaattaaggtgaaggttatgaaagaactgcatttctgtgtttattgtaggatttttgacagtctctttcctctttcaagtaaatttggcttaagtccacagtcagtacagttttaagtaaactcctcttttgttacattaacaaggttataacatcactgaggcagatttccagctgcatggattgaggcctaagcatgcagactgaagggataattaaaaccttagggtgagtgagtta

SEQ ID NO: 30248 - DNA, 600 bp, Chicken  19866894249885_1
catgatggagaaacaggtgtcagtagttgccagaacaatatattgtgaatatttactcctgtgaaactgtacgaacactctagattataaaagcagcaaagacaacagctcaaacatatgcttagaatagttatcattttaaacctcatatttaggaataaaaaatgaaggttttatttgttttcttgttttgtttcatttaaacctaatgcatataacacatttattctagacacttgataaaatgtctactaattacagagtttcatttggagatgcctccaaaaacacttctcttawctctactgcttctggtaaactctcactgatgacagcacactggggccaagactacgcatccatttagtctgtagttttgtattgtaattacaagacttgaaaaaatagaatcatagaatcacaagggtggaaagtgcaggacctggcacatggccttgttgaacctcatcccattyacctcagctcagtgatccagcttatctagatccctctgaagggcctcccttgaagttcacatggatacccaaactcagagggcatatattgtccttaatgttcagcaaaggcacatctttaatg

SEQ ID NO: 30249 - DNA, 600 bp, Chicken  19866894249885_2
tttgttttcttgttttgtttcatttaaacctaatgcatataacacatttattctagacacttgataaaatgtctactaattacagagtttcatttggagatgcctccaaaaacacttctcttawctctactgcttctggtaaactctcactgatgacagcacactggggccaagactacgcatccatttagtctgtagttttgtattgtaattacaagacttgaaaaaatagaatcatagaatcacaagggtggaaagtgcaggacctggcacatggccttgttgaacctcatcccattyacctcagctcagtgatccagcttatctagatccctctgaagggcctcccttgaagttcacatggatacccaaactcagagggcatatattgtccttaatgttcagcaaaggcacatctttaatgttatgcatggattttgacacctattaatttcatcaagattttaacagatactcaaatatagaactttatataagcttttcgagtagcattaatagtatcaccactgttttatttttaaattttaaatttaccaagacattgaattctggaaaaaaatttcaacttagacttgcaat

SEQ ID NO: 30250 - DNA, 599 bp, Chicken  19866894249886_1
  misc_feature (1)..(149): n is any nucleotide
nnnnnnnnnnnnnnnnnnnnnnnnnnnnnnnnnnnnnnnnnnnnnnnnnnnnnnnnnnnnnnnnnnnnnnnnnnnnnnnnnnnnnnnnnnnnnnnnnnnnnnnnnnnnnnnnnnnnnnnnnnnnnnnnnnnnnnnnnnnnnnnnnnnnnacaaagttctcagaggtactagactgtgctgattctgtgatggattacacaactgtatgcatgaaaactggatggctttacttgcattgatagcatttcaaaacatgcaatgagcacaatagtaaagagcatcagagaccaacatacgagmaaataggctgcctggtgtmaaaatgttcagcagtatacagtccagctcaaaaattagtattaatgtagttgatacatatgtatcaaaagcagatagttcttsaattggtagtctgttctcgtttttcaggtgtatctattactgggatgagaggaaacggccttaagttgtgctggaaagrgtggtgaggcactggaaagggctgcccggggaggtggtggactcactgtcctggaggtgttcaagaaatgcatggatgtgacactgacagaygtggttagtgggcatggtgggggtgg

SEQ ID NO: 30251 - DNA, 599 bp, Chicken  19866894249886_2
  misc_feature (1)..(130): n is any nucleotide
nnnnnnnnnnnnnnnnnnnnnnnnnnnnnnnnnnnnnnnnnnnnnnnnnnnnnnnnnnnnnnnnnnnnnnnnnnnnnnnnnnnnnnnnnnnnnnnnnnnnnnnnnnnnnnnnnnnnnnnnnnnnnnnnnnacaaagttctcagaggtactagactgtgctgattctgtgatggattacacaactgtatgcatgaaaactggatggctttacttgcattgatagcatttcaaaacatgcaatgagcacaatagtaaagagcatcagagaccaacatacgagmaaataggctgcctggtgtmaaaatgttcagcagtatacagtccagctcaaaaattagtattaatgtagttgatacatatgtatcaaaagcagatagttcttsaattggtagtctgttctcgtttttcaggtgtatctattactgggatgagaggaaacggccttaagttgtgctggaaagrgtggtgaggcactggaaagggctgcccggggaggtggtggactcactgtcctggaggtgttcaagaaatgcatggatgtgacactgacagaygtggttagtgggcatggtgggggtgggctggctgttggatttggt

SEQ ID NO: 30252 - DNA, 599 bp, Chicken  19866894249886_3
  misc_feature (1)..(47): n is any nucleotide
nnnnnnnnnnnnnnnnnnnnnnnnnnnnnnnnnnnnnnnnnnnnnnnacaaagttctcagaggtactagactgtgctgattctgtgatggattacacaactgtatgcatgaaaactggatggctttacttgcattgatagcatttcaaaacatgcaatgagcacaatagtaaagagcatcagagaccaacatacgagmaaataggctgcctggtgtmaaaatgttcagcagtatacagtccagctcaaaaattagtattaatgtagttgatacatatgtatcaaaagcagatagttcttsaattggtagtctgttctcgtttttcaggtgtatctattactgggatgagaggaaacggccttaagttgtgctggaaagrgtggtgaggcactggaaagggctgcccggggaggtggtggactcactgtcctggaggtgttcaagaaatgcatggatgtgacactgacagaygtggttagtgggcatggtgggggtgggctggctgttggatttggtgatcttagatgttgtttccaactttaacgattctgtgttgtgtttttcataatgacaccttgggctcttctgaactgtccttt

SEQ ID NO: 30253 - DNA, 600 bp, Chicken  19866894249886_4
ttctgtgatggattacacaactgtatgcatgaaaactggatggctttacttgcattgatagcatttcaaaacatgcaatgagcacaatagtaaagagcatcagagaccaacatacgagmaaataggctgcctggtgtmaaaatgttcagcagtatacagtccagctcaaaaattagtattaatgtagttgatacatatgtatcaaaagcagatagttcttsaattggtagtctgttctcgtttttcaggtgtatctattactgggatgagaggaaacggccttaagttgtgctggaaagrgtggtgaggcactggaaagggctgcccggggaggtggtggactcactgtcctggaggtgttcaagaaatgcatggatgtgacactgacagaygtggttagtgggcatggtgggggtgggctggctgttggatttggtgatcttagatgttgtttccaactttaacgattctgtgttgtgtttttcataatgacaccttgggctcttctgaactgtcctttagggcaggaaggagtgagacacagagtcctccctttagcaaagtacgtacctaaagtacgtaccttttttgcaataggtt

SEQ ID NO: 30254 - DNA, 600 bp, Chicken  19866894249886_5
aagagcatcagagaccaacatacgagmaaataggctgcctggtgtmaaaatgttcagcagtatacagtccagctcaaaaattagtattaatgtagttgatacatatgtatcaaaagcagatagttcttsaattggtagtctgttctcgtttttcaggtgtatctattactgggatgagaggaaacggccttaagttgtgctggaaagrgtggtgaggcactggaaagggctgcccggggaggtggtggactcactgtcctggaggtgttcaagaaatgcatggatgtgacactgacagaygtggttagtgggcatggtgggggtgggctggctgttggatttggtgatcttagatgttgtttccaactttaacgattctgtgttgtgtttttcataatgacaccttgggctcttctgaactgtcctttagggcaggaaggagtgagacacagagtcctccctttagcaaagtacgtacctaaagtacgtaccttttttgcaataggtttgtactggattcatggggggagctggaaaaaaaaccttcaaaggaaagcagtgctgctggtcttgaaaaaactctgaaagtcacttaacaga

SEQ ID NO: 30255 - DNA, 599 bp, Chicken  19866894249891_1
  misc_feature (1)..(252): n is any nucleotide
nnnnnnnnnnnnnnnnnnnnnnnnnnnnnnnnnnnnnnnnnnnnnnnnnnnnnnnnnnnnnnnnnnnnnnnnnnnnnnnnnnnnnnnnnnnnnnnnnnnnnnnnnnnnnnnnnnnnnnnnnnnnnnnnnnnnnnnnnnnnnnnnnnnnnnnnnnnnnnnnnnnnnnnnnnnnnnnnnnnnnnnnnnnnnnnnnnnnnnnnnnnnnnnnnnnnnnnnnnnnnnnnnnnnnnnnnnnnnnnnnnnnnnnnnnnncaaaaactgactggattgcctacgccctgctgtgttgctgcttctacwagacactaaggtgctgagctattccacatccaacatcccaattaaatcacagccctacaattgcatgcagacctctaattgctcctgtttattctccrtagtcactttgcagaggtatttagtcctgaagattccccaggatgtgtgagaacttcccccccatcrygttaccctgttattgcttccttattttagtgcatacatctgaggtgggttcccttcagctgtattcattagaggatctcttctctccatcagcctgcaccttccacttgccagttcaccatttacttacttta

SEQ ID NO: 30256 - DNA, 599 bp, Chicken  19866894249891_2
  misc_feature (1)..(154): n is any nucleotide
nnnnnnnnnnnnnnnnnnnnnnnnnnnnnnnnnnnnnnnnnnnnnnnnnnnnnnnnnnnnnnnnnnnnnnnnnnnnnnnnnnnnnnnnnnnnnnnnnnnnnnnnnnnnnnnnnnnnnnnnnnnnnnnnnnnnnnnnnnnnnnnnnnnnnnnnnncaaaaactgactggattgcctacgccctgctgtgttgctgcttctacwagacactaaggtgctgagctattccacatccaacatcccaattaaatcacagccctacaattgcatgcagacctctaattgctcctgtttattctccrtagtcactttgcagaggtatttagtcctgaagattccccaggatgtgtgagaacttcccccccatcrygttaccctgttattgcttccttattttagtgcatacatctgaggtgggttcccttcagctgtattcattagaggatctcttctctccatcagcctgcaccttccacttgccagttcaccatttacttactttattttgggtattgtcacttctagtttaagtctcttctcaccacattggtcagcctattggcagatatatttctgggttaacttgggttggtggaaccca

SEQ ID NO: 30257 - DNA, 599 bp, Chicken  19866894249891_3
  misc_feature (1)..(87): n is any nucleotide
nnnnnnnnnnnnnnnnnnnnnnnnnnnnnnnnnnnnnnnnnnnnnnnnnnnnnnnnnnnnnnnnnnnnnnnnnnnnnnnnnnnnnnncaaaaactgactggattgcctacgccctgctgtgttgctgcttctacwagacactaaggtgctgagctattccacatccaacatcccaattaaatcacagccctacaattgcatgcagacctctaattgctcctgtttattctccrtagtcactttgcagaggtatttagtcctgaagattccccaggatgtgtgagaacttcccccccatcrygttaccctgttattgcttccttattttagtgcatacatctgaggtgggttcccttcagctgtattcattagaggatctcttctctccatcagcctgcaccttccacttgccagttcaccatttacttactttattttgggtattgtcacttctagtttaagtctcttctcaccacattggtcagcctattggcagatatatttctgggttaacttgggttggtggaacccatctcctcctaggagttcttaatccacaaaggcagtcccttggtcataaaaccgaaatcccctctgct

SEQ ID NO: 30258 - DNA, 599 bp, Chicken  19866894249891_4
  misc_feature (1)..(86): n is any nucleotide
nnnnnnnnnnnnnnnnnnnnnnnnnnnnnnnnnnnnnnnnnnnnnnnnnnnnnnnnnnnnnnnnnnnnnnnnnnnnnnnnnnnnnncaaaaactgactggattgcctacgccctgctgtgttgctgcttctacwagacactaaggtgctgagctattccacatccaacatcccaattaaatcacagccctacaattgcatgcagacctctaattgctcctgtttattctccrtagtcactttgcagaggtatttagtcctgaagattccccaggatgtgtgagaacttcccccccatcrygttaccctgttattgcttccttattttagtgcatacatctgaggtgggttcccttcagctgtattcattagaggatctcttctctccatcagcctgcaccttccacttgccagttcaccatttacttactttattttgggtattgtcacttctagtttaagtctcttctcaccacattggtcagcctattggcagatatatttctgggttaacttgggttggtggaacccatctcctcctaggagttcttaatccacaaaggcagtcccttggtcataaaaccgaaatcccctctgctg

SEQ ID NO: 30259 - DNA, 599 bp, Chicken  19866894249895_1
  misc_feature (1)..(173): n is any nucleotide
nnnnnnnnnnnnnnnnnnnnnnnnnnnnnnnnnnnnnnnnnnnnnnnnnnnnnnnnnnnnnnnnnnnnnnnnnnnnnnnnnnnnnnnnnnnnnnnnnnnnnnnnnnnnnnnnnnnnnnnnnnnnnnnnnnnnnnnnnnnnnnnnnnnnnnnnnnnnnnnnnnnnnnnnnnnnnccccaacagagcacacacaggcatctgtccaaagcctgtgtttatttgggcgtgctgcaggctgcggggaggggggacacctggccgcccctgcactcctcccctacaactatttacaaccccagcrataggcaggatgcctcatctcacccctcctggccgtgtccccgtcgtgyggcccgtgtcctgtcctcagcrggggacgaggccatgtccccgtgcctgcagcccagcctcctcccagctttggctccaaaataaccagaagaggaaactgaggcgctgagactgagctcaccccgtgccacctctcgctgctggtttgtcccctcccatcaccggctcgtccccctctgcgtggcagcgccataccccaaagggcatcacccctcctgcaccagggccgcccatcacaccaggacccgg

SEQ ID NO: 30260 - DNA, 599 bp, Chicken  19866894249895_2
  misc_feature (1)..(124): n is any nucleotide
nnnnnnnnnnnnnnnnnnnnnnnnnnnnnnnnnnnnnnnnnnnnnnnnnnnnnnnnnnnnnnnnnnnnnnnnnnnnnnnnnnnnnnnnnnnnnnnnnnnnnnnnnnnnnnnnnnnnnnnnnnnnccccaacagagcacacacaggcatctgtccaaagcctgtgtttatttgggcgtgctgcaggctgcggggaggggggacacctggccgcccctgcactcctcccctacaactatttacaaccccagcrataggcaggatgcctcatctcacccctcctggccgtgtccccgtcgtgyggcccgtgtcctgtcctcagcrggggacgaggccatgtccccgtgcctgcagcccagcctcctcccagctttggctccaaaataaccagaagaggaaactgaggcgctgagactgagctcaccccgtgccacctctcgctgctggtttgtcccctcccatcaccggctcgtccccctctgcgtggcagcgccataccccaaagggcatcacccctcctgcaccagggccgcccatcacaccaggacccggagccccacggagctccaggaaggggagggatgagaggctcaggatgcag

SEQ ID NO: 30261 - DNA, 599 bp, Chicken  19866894249895_3
  misc_feature (1)..(102): n is any nucleotide
nnnnnnnnnnnnnnnnnnnnnnnnnnnnnnnnnnnnnnnnnnnnnnnnnnnnnnnnnnnnnnnnnnnnnnnnnnnnnnnnnnnnnnnnnnnnnnnnnnnnnnccccaacagagcacacacaggcatctgtccaaagcctgtgtttatttgggcgtgctgcaggctgcggggaggggggacacctggccgcccctgcactcctcccctacaactatttacaaccccagcrataggcaggatgcctcatctcacccctcctggccgtgtccccgtcgtgyggcccgtgtcctgtcctcagcrggggacgaggccatgtccccgtgcctgcagcccagcctcctcccagctttggctccaaaataaccagaagaggaaactgaggcgctgagactgagctcaccccgtgccacctctcgctgctggtttgtcccctcccatcaccggctcgtccccctctgcgtggcagcgccataccccaaagggcatcacccctcctgcaccagggccgcccatcacaccaggacccggagccccacggagctccaggaaggggagggatgagaggctcaggatgcagccacccccakgtcctccaccgt

SEQ ID NO: 30262 - DNA, 403 bp, Chicken  19866894249895_4
ccccaacagagcacacacaggcatctgtccaaagcctgtgtttatttgggcgtgctgcaggctgcggggaggggggacacctggccgcccctgcactcctcccctacaactatttacaaccccagcrataggcaggatgcctcatctcacccctcctggccgtgtccccgtcgtgyggcccgtgtcctgtcctcagcrggggacgaggccatgtccccgtgcctgcagcccagcctcctcccagctttggctccaaaataaccagaagaggaaactgaggcgctgagactgagctcacckgtcctccaccgtccccagtgccgggaggtgatgttggtgtcaccccagtgactatgtacaacctgcaaataaataccactgccggcaggagagggtaagggga

SEQ ID NO: 30263 - DNA, 599 bp, Chicken  19866894249897_1
  misc_feature (1)..(50): n is any nucleotide
nnnnnnnnnnnnnnnnnnnnnnnnnnnnnnnnnnnnnnnnnnnnnnnnnnccctagataactttctgcttttcctttcagatttttgccagcattgccccatccatttatgggcatgaagatatcaagaggggtttggctttagctctgtttggtggagagcccaaaaacccaggtgagtgtaatgtgttgtgcagggctgattccatggatctgggtttgtcggtgctgttgcaatgagtggttagagctgtctgtgtgttttggtgacagaaaagtgaacagactgaggaaaatctcygattgaagtggctgttctctcacgccagttttcagcgtgatagtagaaacactatgactgagaacagctcctgctgcaagcctaggcatgtttttatccctcttcctctaggaagtcatattttgatgcccctttaaaggcttgatctgttggtgtcctgatttgttatcatcttaaaagaatgcattcmgcaggtttagaaatgcttttctacactcaatttaaaaagctgyagttgcagtggaaaggaaaaagctctgctttattctcagtgcttttgtgccrctgtatttgatcct

SEQ ID NO: 30264 - DNA, 600 bp, Chicken  19866894249897_2
gtgcagggctgattccatggatctgggtttgtcggtgctgttgcaatgagtggttagagctgtctgtgtgttttggtgacagaaaagtgaacagactgaggaaaatctcygattgaagtggctgttctctcacgccagttttcagcgtgatagtagaaacactatgactgagaacagctcctgctgcaagcctaggcatgtttttatccctcttcctctaggaagtcatattttgatgcccctttaaaggcttgatctgttggtgtcctgatttgttatcatcttaaaagaatgcattcmgcaggtttagaaatgcttttctacactcaatttaaaaagctgyagttgcagtggaaaggaaaaagctctgctttattctcagtgcttttgtgccrctgtatttgatccttcagtacttttggttcttctcaatgttctaaatcgtaacaaaatatgacaacagctatgtctgattttyccttagctttcctgtgaagtggtttctctgcatactctgccttcccttcagctttgtggtgcttgggatagggttgctatcaagccctgcacagaggactcagctgcctgtgtgtctctcct

SEQ ID NO: 30265 - DNA, 600 bp, Chicken  19866894249897_3
caatgagtggttagagctgtctgtgtgttttggtgacagaaaagtgaacagactgaggaaaatctcygattgaagtggctgttctctcacgccagttttcagcgtgatagtagaaacactatgactgagaacagctcctgctgcaagcctaggcatgtttttatccctcttcctctaggaagtcatattttgatgcccctttaaaggcttgatctgttggtgtcctgatttgttatcatcttaaaagaatgcattcmgcaggtttagaaatgcttttctacactcaatttaaaaagctgyagttgcagtggaaaggaaaaagctctgctttattctcagtgcttttgtgccrctgtatttgatccttcagtacttttggttcttctcaatgttctaaatcgtaacaaaatatgacaacagctatgtctgattttyccttagctttcctgtgaagtggtttctctgcatactctgccttcccttcagctttgtggtgcttgggatagggttgctatcaagccctgcacagaggactcagctgcctgtgtgtctctcctgttgctgttgtaggtggcaaacacaaagtccgcggggatatca

SEQ ID NO: 30266 - DNA, 600 bp, Chicken  19866894249897_4
ctgaggaaaatctcygattgaagtggctgttctctcacgccagttttcagcgtgatagtagaaacactatgactgagaacagctcctgctgcaagcctaggcatgtttttatccctcttcctctaggaagtcatattttgatgcccctttaaaggcttgatctgttggtgtcctgatttgttatcatcttaaaagaatgcattcmgcaggtttagaaatgcttttctacactcaatttaaaaagctgyagttgcagtggaaaggaaaaagctctgctttattctcagtgcttttgtgccrctgtatttgatccttcagtacttttggttcttctcaatgttctaaatcgtaacaaaatatgacaacagctatgtctgattttyccttagctttcctgtgaagtggtttctctgcatactctgccttcccttcagctttgtggtgcttgggatagggttgctatcaagccctgcacagaggactcagctgcctgtgtgtctctcctgttgctgttgtaggtggcaaacacaaagtccgcggggatatcaacgtgcttctgtgtggagaccctggtactgcaaagtcacagtttcttaagta

SEQ ID NO: 30267 - DNA, 600 bp, Chicken  19866894249897_5
tcctgctgcaagcctaggcatgtttttatccctcttcctctaggaagtcatattttgatgcccctttaaaggcttgatctgttggtgtcctgatttgttatcatcttaaaagaatgcattcmgcaggtttagaaatgcttttctacactcaatttaaaaagctgyagttgcagtggaaaggaaaaagctctgctttattctcagtgcttttgtgccrctgtatttgatccttcagtacttttggttcttctcaatgttctaaatcgtaacaaaatatgacaacagctatgtctgattttyccttagctttcctgtgaagtggtttctctgcatactctgccttcccttcagctttgtggtgcttgggatagggttgctatcaagccctgcacagaggactcagctgcctgtgtgtctctcctgttgctgttgtaggtggcaaacacaaagtccgcggggatatcaacgtgcttctgtgtggagaccctggtactgcaaagtcacagtttcttaagtacatagagaaggtgtccagcagggccatcttcaccactggccagggtgcttctgctgtgggtctcacagcttatgtccagaggc

SEQ ID NO: 30268 - DNA, 600 bp, Chicken  19866894249897_6
cacccggtcagcaaagagtggactttggaagcaggagccctcgtgctggctgacagaggtgtctgcctgattgatgaatttgacaaggtgagttccagctgcatctctctgggaaagcggagctgtggaggagctgaccataacccctgtgatgaggacatgtgataacttggggtgccatctgccagcagagtgggcttcctgcagtatgtttagacccctgctggtctgcgtagtacagtttgctatctcttcagagcaccccatgcaagctaattccccttggtgcattgggcaacrttgacttgaggtgaatcatctttgctttcttgtagatgaacgaccaggataggaccagcatacatgaagccatggaacagcaaagtatttccatctccaaagcaggcattgtcacatccttacaggctcgctgcactgttattgctgctgccaatcccataggtaagtgctgagagccacaggaatactcatgtctccagcatcagtcctgttgtctcaagtgctatcgtgcagcttcccttctctccagtctggaacacagatgcatgcagtgaagtctctctgtgaaggagatcgatg

SEQ ID NO: 30269 - DNA, 600 bp, Chicken  19866894249899_1
tggggttactcactcacttcccttcctctgaattttgctttcagtgtttctgaaaactggcagaaaagctatttatcaggatcgtatgtccatcatgtcaggccattgcatcaccacgttctcgattagaccaaaagaagagaaaatgggcaaatgtagctcttcctggattgcagcaactacagtcaatagaactgctgtttgcatgactgaaatcaacgtacttctgcgcccctccttccaacaggacaattttaagggacagagcagggtgactgctccttctccgcccgtcctacycctcatctcttaggttttatttctagagtcccgttatgcgcaggcagtgaggctgatttcagtgctttagtggctgcattagtcaaacacacagcagatgtcagtgcattacaaaacttggtttgcgaataataaaggaagtcataaatgacaaatgagagcaaaatcgaagggaactgcaaagctctgcaactgctgcgggggtcccccctccgtgtttggcactaccctgccaggcaccaacggagagcattactgcgatttttacaccttcttctgttgaaattttcttaggctttt

SEQ ID NO: 30270 - DNA, 599 bp, Chicken  19866894249903_1
  misc_feature (1)..(164): n is any nucleotide
nnnnnnnnnnnnnnnnnnnnnnnnnnnnnnnnnnnnnnnnnnnnnnnnnnnnnnnnnnnnnnnnnnnnnnnnnnnnnnnnnnnnnnnnnnnnnnnnnnnnnnnnnnnnnnnnnnnnnnnnnnnnnnnnnnnnnnnnnnnnnnnnnnnnnnnnnnnnnnnnnnnnaaaagaaggcagagagtaagaaattgctcatacacaagaaggaaactcaaggctgaaaaagtcctgaagctttgatcaatcttttcccactggtattgatggtattgagatttactacagctctcccagctattaktgttaggctgattgttaccaagggctgttatcatttacaatagctaaataaaatactaccttaagatacaaattcattcataaatctcaacaaaggttactgaaaggttactgcacttcaattaaagatayccaccattttcarctaaatgcagatttkatttagatggacacaaaatataaattcaacactgcaaatgcataaccttcagtgttttatgggaaaataagaacaaagactggacaattttccccacaggggctgaaggagtttaaattgcctgaaacacttmttatytc

SEQ ID NO: 30271 - DNA, 600 bp, Chicken  19866894249903_10
ttaattcaaggaatccttatttccattgcctagcataggccatctgcaaattaacatcctcaaccatatgccatgctttgcaggtctgattttagagctcagctgcctttatcacaaagaaactactgtttatctgtcttatttgctttaacagttaccttacagctcttacgggawactaccaacagtctccatttgaaggaacaatgtggtttcacacagaaccagagtggtgataacaatggacaattgtaagagcaagaaatattgtgaaggttttgttrcttttgagggtttttygggttgttatttgctggcttgcttgcttcttttttaatgcagaaagatgttgagtttgggagaagttataggcaaggcttaattatgtaggaaaactagaatagagacacagaaaaaattaaaggcattcagtcatggaaatatttgcaaaaacacaacctgactcaaatgaacgattctttgggaaccaacatgagtacttaaatgagcacattccacagtttgcaggatcaaacatttaaaacraatctttaaaaacaatttagaaagatacaaggaatatgtaactgaataacagca

SEQ ID NO: 30272 - DNA, 600 bp, Chicken  19866894249903_11
caattgtaagagcaagaaatattgtgaaggttttgttrcttttgagggtttttygggttgttatttgctggcttgcttgcttcttttttaatgcagaaagatgttgagtttgggagaagttataggcaaggcttaattatgtaggaaaactagaatagagacacagaaaaaattaaaggcattcagtcatggaaatatttgcaaaaacacaacctgactcaaatgaacgattctttgggaaccaacatgagtacttaaatgagcacattccacagtttgcaggatcaaacatttaaaacraatctttaaaaacaatttagaaagatacaaggaatatgtaactgaataacagcatatgaaacgcagcatctgactaaaactaatgttaattatacctcattaaaaataaacctcaaattgggacaaaaaatctgaatgctaatataggctagttaaatgtgatgataaaaagtcggctagggaatgcactaggaaatgcagtgagaatggagtaatcaaaagctgaagtaaaaacaaggcagaaaaccaaaaactacatcaggaaagaaaatgggatgagtatagagagagaacacgttc

SEQ ID NO: 30273 - DNA, 599 bp, Chicken  19866894249903_2
  misc_feature (1)..(33): n is any nucleotide
nnnnnnnnnnnnnnnnnnnnnnnnnnnnnnnnnaaaagaaggcagagagtaagaaattgctcatacacaagaaggaaactcaaggctgaaaaagtcctgaagctttgatcaatcttttcccactggtattgatggtattgagatttactacagctctcccagctattaktgttaggctgattgttaccaagggctgttatcatttacaatagctaaataaaatactaccttaagatacaaattcattcataaatctcaacaaaggttactgaaaggttactgcacttcaattaaagatayccaccattttcarctaaatgcagatttkatttagatggacacaaaatataaattcaacactgcaaatgcataaccttcagtgttttatgggaaaataagaacaaagactggacaattttccccacaggggctgaaggagtttaaattgcctgaaacacttmttatytcattatctatttcaaccattttactgtgcaaaacacctccctccctcaaaaaagtcaraacagaagtctgaacatctgagtcactctattctgatgtgcgtaattatacagcatacacactgtggatttact

SEQ ID NO: 30274 - DNA, 599 bp, Chicken  19866894249903_3
  misc_feature (1)..(20): n is any nucleotide
nnnnnnnnnnnnnnnnnnnnaaaagaaggcagagagtaagaaattgctcatacacaagaaggaaactcaaggctgaaaaagtcctgaagctttgatcaatcttttcccactggtattgatggtattgagatttactacagctctcccagctattaktgttaggctgattgttaccaagggctgttatcatttacaatagctaaataaaatactaccttaagatacaaattcattcataaatctcaacaaaggttactgaaaggttactgcacttcaattaaagatayccaccattttcarctaaatgcagatttkatttagatggacacaaaatataaattcaacactgcaaatgcataaccttcagtgttttatgggaaaataagaacaaagactggacaattttccccacaggggctgaaggagtttaaattgcctgaaacacttmttatytcattatctatttcaaccattttactgtgcaaaacacctccctccctcaaaaaagtcaraacagaagtctgaacatctgagtcactctattctgatgtgcgtaattatacagcatacacactgtggatttactacgaggtaaactg

SEQ ID NO: 30275 - DNA, 599 bp, Chicken  19866894249903_4
  misc_feature (1)..(5): n is any nucleotide
nnnnnaaaagaaggcagagagtaagaaattgctcatacacaagaaggaaactcaaggctgaaaaagtcctgaagctttgatcaatcttttcccactggtattgatggtattgagatttactacagctctcccagctattaktgttaggctgattgttaccaagggctgttatcatttacaatagctaaataaaatactaccttaagatacaaattcattcataaatctcaacaaaggttactgaaaggttactgcacttcaattaaagatayccaccattttcarctaaatgcagatttkatttagatggacacaaaatataaattcaacactgcaaatgcataaccttcagtgttttatgggaaaataagaacaaagactggacaattttccccacaggggctgaaggagtttaaattgcctgaaacacttmttatytcattatctatttcaaccattttactgtgcaaaacacctccctccctcaaaaaagtcaraacagaagtctgaacatctgagtcactctattctgatgtgcgtaattatacagcatacacactgtggatttactacgaggtaaactgaagtgttgtaattga

SEQ ID NO: 30276 - DNA, 600 bp, Chicken  19866894249903_5
gctattaktgttaggctgattgttaccaagggctgttatcatttacaatagctaaataaaatactaccttaagatacaaattcattcataaatctcaacaaaggttactgaaaggttactgcacttcaattaaagatayccaccattttcarctaaatgcagatttkatttagatggacacaaaatataaattcaacactgcaaatgcataaccttcagtgttttatgggaaaataagaacaaagactggacaattttccccacaggggctgaaggagtttaaattgcctgaaacacttmttatytcattatctatttcaaccattttactgtgcaaaacacctccctccctcaaaaaagtcaraacagaagtctgaacatctgagtcactctattctgatgtgcgtaattatacagcatacacactgtggatttactacgaggtaaactgaagtgttgtaattgatgttaattcaaggaatccttatttccattgcctagcataggccatctgcaaattaacatcctcaaccatatgccatgctttgcaggtctgattttagagctcagctgcctttatcacaaagaaactactgttta

SEQ ID NO: 30277 - DNA, 600 bp, Chicken  19866894249903_6
taktgttaggctgattgttaccaagggctgttatcatttacaatagctaaataaaatactaccttaagatacaaattcattcataaatctcaacaaaggttactgaaaggttactgcacttcaattaaagatayccaccattttcarctaaatgcagatttkatttagatggacacaaaatataaattcaacactgcaaatgcataaccttcagtgttttatgggaaaataagaacaaagactggacaattttccccacaggggctgaaggagtttaaattgcctgaaacacttmttatytcattatctatttcaaccattttactgtgcaaaacacctccctccctcaaaaaagtcaraacagaagtctgaacatctgagtcactctattctgatgtgcgtaattatacagcatacacactgtggatttactacgaggtaaactgaagtgttgtaattgatgttaattcaaggaatccttatttccattgcctagcataggccatctgcaaattaacatcctcaaccatatgccatgctttgcaggtctgattttagagctcagctgcctttatcacaaagaaactactgtttatctgt

SEQ ID NO: 30278 - DNA, 600 bp, Chicken  19866894249903_7
taccttaagatacaaattcattcataaatctcaacaaaggttactgaaaggttactgcacttcaattaaagatayccaccattttcarctaaatgcagatttkatttagatggacacaaaatataaattcaacactgcaaatgcataaccttcagtgttttatgggaaaataagaacaaagactggacaattttccccacaggggctgaaggagtttaaattgcctgaaacacttmttatytcattatctatttcaaccattttactgtgcaaaacacctccctccctcaaaaaagtcaraacagaagtctgaacatctgagtcactctattctgatgtgcgtaattatacagcatacacactgtggatttactacgaggtaaactgaagtgttgtaattgatgttaattcaaggaatccttatttccattgcctagcataggccatctgcaaattaacatcctcaaccatatgccatgctttgcaggtctgattttagagctcagctgcctttatcacaaagaaactactgtttatctgtcttatttgctttaacagttaccttacagctcttacgggawactaccaacagtctccatt

SEQ ID NO: 30279 - DNA, 600 bp, Chicken  19866894249903_8
cctccctcaaaaaagtcaraacagaagtctgaacatctgagtcactctattctgatgtgcgtaattatacagcatacacactgtggatttactacgaggtaaactgaagtgttgtaattgatgttaattcaaggaatccttatttccattgcctagcataggccatctgcaaattaacatcctcaaccatatgccatgctttgcaggtctgattttagagctcagctgcctttatcacaaagaaactactgtttatctgtcttatttgctttaacagttaccttacagctcttacgggawactaccaacagtctccatttgaaggaacaatgtggtttcacacagaaccagagtggtgataacaatggacaattgtaagagcaagaaatattgtgaaggttttgttrcttttgagggtttttygggttgttatttgctggcttgcttgcttcttttttaatgcagaaagatgttgagtttgggagaagttataggcaaggcttaattatgtaggaaaactagaatagagacacagaaaaaattaaaggcattcagtcatggaaatatttgcaaaaacacaacctgactcaaatgaacgat

SEQ ID NO: 30280 - DNA, 600 bp, Chicken  19866894249903_9
agtgttgtaattgatgttaattcaaggaatccttatttccattgcctagcataggccatctgcaaattaacatcctcaaccatatgccatgctttgcaggtctgattttagagctcagctgcctttatcacaaagaaactactgtttatctgtcttatttgctttaacagttaccttacagctcttacgggawactaccaacagtctccatttgaaggaacaatgtggtttcacacagaaccagagtggtgataacaatggacaattgtaagagcaagaaatattgtgaaggttttgttrcttttgagggtttttygggttgttatttgctggcttgcttgcttcttttttaatgcagaaagatgttgagtttgggagaagttataggcaaggcttaattatgtaggaaaactagaatagagacacagaaaaaattaaaggcattcagtcatggaaatatttgcaaaaacacaacctgactcaaatgaacgattctttgggaaccaacatgagtacttaaatgagcacattccacagtttgcaggatcaaacatttaaaacraatctttaaaaacaatttagaaagatacaaggaatatg

SEQ ID NO: 30281 - DNA, 515 bp, Chicken  19866894249915_1
gtgcatgacactgtgcagaatttgagaatgatggtgtgggctggactcagtgcatttggcctgctgacgagtcattggttcttggcagcaactgtgtgagatgaatacctatctactgtgctcttttgtgctactgacagaatatttctagtactatgtatgaatcctaaagtaaataaaatatatttgtccattacttctactgtatcaattatgttttccattgatcttcaagcatttttattttttttgtagagactgtggatcagttgagagtagacctcttctctgatagatgcwgcacaaaccaacccactgcacgtgacttaccatcacaccagtacacaaggtactgattagtgcagtggacaaatttatgtaagagttatccagcaagactgactaaatgtaaagactctgtctatcccactcagagtcccagaactacaaattatatgaaaccgtgagagtattttagagaattaccactatggacttgtcctgttcttggactt

SEQ ID NO: 30282 - DNA, 600 bp, Chicken  19866894249919_1
gttaccataacaacagtgatgaagaataaaaactataaaaaactttatacacaatataaaaacattcatatgtattaaataattaagaggcttgggacagcatgatttgaaaagcaatcatagttacaaagcagattacacacaataagtgcaacttattagagttgtttcaagccatgtcaagtagaaaagaagctactgaagtacataattggcatactaaagcactatgacataccctctactgtaaagcatttgcgcaaaggataactgatgcataatgaacctcacagctgggtwgctgcggcatagctgcttactttttggtgatgaagtgatgaagaaacatctttagatgaagtagcacagttttctgtgacatattcacagtgttttacagatgattgaggtagcttttggcaatagtcctttcactgtccgcctttcttcctgctatttccctccacaacaacacaagagtcttgattatatttggtcacagcctctttggtggataatagggaggaaaaaaaaaaacaacaacaaagcacccaccccaccatcctgatgtgttttctgcattatgatgtcatctttcag

SEQ ID NO: 30283 - DNA, 600 bp, Chicken  19866894249919_2
aatgtctcagaaaaagtcttcttccaccaattcctgtgttgcctacagagattccaagacaggacttgggcatcaactgtatggaatagccacattagaatactgaagtttattctccatttcatcctctgtctacaattttctcttaatattatagagaaatacagctgaaaatcagaatttctaaattaccagtagtcacatcatagtgctaatagctttaacctattagtgcctctattctaaaaacaaataaacaaaaaaagaaaaaagaaaaaacaaaacacacacacacaccamammaaaaaaaaaaaaaaaggaagaaaatatagtcatatatatgtagacttaactggaacctcaggctccaaattctaatttgaagactttttcctttttaggaagctttgaattctttcccctaaaaatatacattttgctctaaagcatacccattatcaattgaaacaattcatcttttgagtggctaaactaaaaggaaacaattttttaaatggcaaaacctcctaccaaggaattgtgcagtcaccaagtcacaggagagctcagcctgccaaaataactgaacaaaaacattct

SEQ ID NO: 30284 - DNA, 600 bp, Chicken  19866894249919_3
tgtctcagaaaaagtcttcttccaccaattcctgtgttgcctacagagattccaagacaggacttgggcatcaactgtatggaatagccacattagaatactgaagtttattctccatttcatcctctgtctacaattttctcttaatattatagagaaatacagctgaaaatcagaatttctaaattaccagtagtcacatcatagtgctaatagctttaacctattagtgcctctattctaaaaacaaataaacaaaaaaagaaaaaagaaaaaacaaaacacacacacacaccamammaaaaaaaaaaaaaaaggaagaaaatatagtcatatatatgtagacttaactggaacctcaggctccaaattctaatttgaagactttttcctttttaggaagctttgaattctttcccctaaaaatatacattttgctctaaagcatacccattatcaattgaaacaattcatcttttgagtggctaaactaaaaggaaacaattttttaaatggcaaaacctcctaccaaggaattgtgcagtcaccaagtcacaggagagctcagcctgccaaaataactgaacaaaaacattctga

SEQ ID NO: 30285 - DNA, 600 bp, Chicken  19866894249919_4
gtctcagaaaaagtcttcttccaccaattcctgtgttgcctacagagattccaagacaggacttgggcatcaactgtatggaatagccacattagaatactgaagtttattctccatttcatcctctgtctacaattttctcttaatattatagagaaatacagctgaaaatcagaatttctaaattaccagtagtcacatcatagtgctaatagctttaacctattagtgcctctattctaaaaacaaataaacaaaaaaagaaaaaagaaaaaacaaaacacacacacacaccamammaaaaaaaaaaaaaaaggaagaaaatatagtcatatatatgtagacttaactggaacctcaggctccaaattctaatttgaagactttttcctttttaggaagctttgaattctttcccctaaaaatatacattttgctctaaagcatacccattatcaattgaaacaattcatcttttgagtggctaaactaaaaggaaacaattttttaaatggcaaaacctcctaccaaggaattgtgcagtcaccaagtcacaggagagctcagcctgccaaaataactgaacaaaaacattctgaa

SEQ ID NO: 30286 - DNA, 600 bp, Chicken  19866894249919_5
agacttaactggaacctcaggctccaaattctaatttgaagactttttcctttttaggaagctttgaattctttcccctaaaaatatacattttgctctaaagcatacccattatcaattgaaacaattcatcttttgagtggctaaactaaaaggaaacaattttttaaatggcaaaacctcctaccaaggaattgtgcagtcaccaagtcacaggagagctcagcctgccaaaataactgaacaaaaacattctgaagtgctgggctcaatctgggggaaaaatcaacaaacaaacaraaaaatctaagaatctaaaaggctctgaagagcaacagtccaccgtatcacgatgatttatggctgctacaacctctcgtatgtgcccatgagtagttgcacattgcctatttggatttgataaacaaagtagtaagagacaatttttgtcccattgagaaaacaactcttcctgccagtaaatttaatctgtagttaactgagcatttgacaataacttgctaacaatcatgcaatgaaacaaaaggcagtgccacacgctaaggctttacttcccatttagctccactgatgtactga

SEQ ID NO: 30287 - DNA, 533 bp, Chicken  19866894249923_1
ggttgggaatccacgcgcatgaaatgttccccatcaaagtgatggcaaaacccatcccagtgctgtcatcacctgaagatctgctgcagcgatgcgctcctttgtgagtagcagtgatcataaatgtttattgctggataataaaacgcgagagccttctgcgccggctgcgaattccatgggagtttaaggagctctaagggaaagcgttcgcgttgctccaggtggttccaaggagcccacatcaggaacagcttcccaacaaggtcccacatccaaagtcttccgaaggaatccagyacagacatcgcagagacccttctggatctcccccaacgcgttggttgattcttctcccatggcacaactgagccccgctgctcaaacctccaaaaaacagagcagcaccagtgacccctccagacccactgaaaggtcagggtgcagtgaggccatgccccataaccagagtgcattccctgcttccccagtcctaatgtcttcattcccatcggttcctttctaggagggga

SEQ ID NO: 30288 - DNA, 584 bp, Chicken  19866894249928_1
gcacagctgtgggtggttttgctatgctgatctgtccttgcttctatgtcagtacctgatactttgcagtttcagaacgtgttactttaaaatagatatttatagaactgtaattgagaaggagttgaggataaagttgtgaatttaactcgcaaattgatactgttctgcatgttttgacaactttgttcagcttcagttcagaaaaactctcttcttctgggaagagaactaataatagttaactgaaaaagctcttacacataaattgacaataacatttttatcagtatttcatgrtgatattctgagttgtggtgttgttttcctctgaaaatactttaaaacaaattcttctaaccatcctttaaaacttctttaaggttcataagtggcagtagagatgggacagcacgaatctggcgctttgaagaagctgagtggaggagtattctgttggatatgtcagatcgattaccagggtaggtgaagtattccccttttttatctgttacataaaatcagaaagctccaggaactcatcaatgctatttggatttagaagaagccttaacaatgttatg

SEQ ID NO: 30289 - DNA, 600 bp, Chicken  19866894249930_1
agtgctggaaggcatcacatctatcatgtctttctgtcctccttctcccagcctgtgctacagctgtgtcagtcaaactcggcattctttcagctgtccatgtgctattttctgtgtgtgtgtgtgcttttctgcagcttgtgctggagtctctgaccaaccagccttggttcaggctggagctgttcttgttgccactactattacaaatccttccagtatttttccttctcccttcttttcctccagattaaatagttgcatgtctgtgtgaaacttgcatttgagtatgtccgtaaragaggaagagaggtccttaccttccatataggagtgtcgattattcctttagggaaacttcttgcagaaggacatgggatacagcgtacaggggcataacgttctcacaaggggtttttagatcaagagaaggtattaaggaccaggtttagtaggagcctgtcaaagaatgagatctgggcattcagaggactggttagtcaatggcacagtggagttcttgttttcttgtttccatgctttggagggagctgggctaacatcaacatctcagatgggatttttcttaatttgagttct

SEQ ID NO: 30290 - DNA, 600 bp, Chicken  19866894249955_1
ctagggagggtatccatcagcgtcctcagggctggtatgatttttttgctgcaagtgaggatctgctgatctgggagcatgctgaaaagttaatctatttctgcagatgttctgtgtagttgtggtcacttgggatggttattacctggaaatctgatttcaggggaacaggcattttgcccttaataattaagcaataatgcattatataacaaacctgatatctggttagttcttgaaaatatgtctaaatccgattacctgggaaatgcacgcaatttaggaatgaacctttaacaraatatgaagacatactgaagaataagttgccttcagtgggagtttggatattacagagacatatgttgtttaaaatagatctccacaaaatatgcatatattttacgttggaataatgataatgtttaaattaaattgttacaacaacggcaattctgatcttggggaataatgatctgaaatcttgatccttttgtgtgatcattatatatggacctttgtacagagttcccagccacataattctgcctgtggtgatgctaattttagcagaaaaactgactacattatttactggct

SEQ ID NO: 30291 - DNA, 600 bp, Chicken  19866894249958_1
aaggagaaacttggctgggaagggcaaatcttttcaggttattgtgaacaggagttaccagggttttcaatacaataattttgtatgggagtgaatcaagaggtgtggatcctaaacagtaaggcaattaatattgttttggggagagatcatgtagttgctctcaaaagggttattaatcagaggaacaaagatgaactaagaagtcaactgatgtgtgtgctccaacatttccagcagcagagaaggtgttgctttcaactcatgtacatttattccatgagatactgggaggaaackgtactggatacttctacattgttaagactaaactgaccttgtgatgaaaatgtttgtaatttgaggagcatacagcagatggattctcctcaagaaaaaggataaatgctactaaatactatcatttcttagtggaattggattggagagactataatagtgcctaaaatggttaaagaagcaacttgactgctttcaggttctgtgatttatgctaggcttgaatgtagtccatgcattactcattgggtggtattacagcttccagtttctttagttttttgatgcagatgaatagtc

SEQ ID NO: 30292 - DNA, 599 bp, Chicken  19866894249959_1
  misc_feature (1)..(154): n is any nucleotide
nnnnnnnnnnnnnnnnnnnnnnnnnnnnnnnnnnnnnnnnnnnnnnnnnnnnnnnnnnnnnnnnnnnnnnnnnnnnnnnnnnnnnnnnnnnnnnnnnnnnnnnnnnnnnnnnnnnnnnnnnnnnnnnnnnnnnnnnnnnnnnnnnnnnnnnnnnctgctcagaccagctgaaactttcagcttcgttttctgaagttaaaagaaaattcaggggaagaccatgaagagaaggaaactgcccaaaactctctgaggagcctttgtctaaatgttgagatatcatgaattcccaatagcttwagtaagccatagtttttaacgtcactgcagtttcttcatgcatttacatcccaatatatatttcaatctcayccgccttcaggtttgattccctatgattcaaagccagaaagatttcctcctcacagagacgtggcaagtcaggcacagcarctgaggtcaagtgatttcagcagaaagctcagtatagtggagagcagaattagctctctattttagtccccctaccatgtccccttggcatttctaagcacttgtagcacaatatccaaaatggctccagccagctgctgtttagc

SEQ ID NO: 30293 - DNA, 599 bp, Chicken  19866894249959_2
  misc_feature (1)..(82): n is any nucleotide
nnnnnnnnnnnnnnnnnnnnnnnnnnnnnnnnnnnnnnnnnnnnnnnnnnnnnnnnnnnnnnnnnnnnnnnnnnnnnnnnnnctgctcagaccagctgaaactttcagcttcgttttctgaagttaaaagaaaattcaggggaagaccatgaagagaaggaaactgcccaaaactctctgaggagcctttgtctaaatgttgagatatcatgaattcccaatagcttwagtaagccatagtttttaacgtcactgcagtttcttcatgcatttacatcccaatatatatttcaatctcayccgccttcaggtttgattccctatgattcaaagccagaaagatttcctcctcacagagacgtggcaagtcaggcacagcarctgaggtcaagtgatttcagcagaaagctcagtatagtggagagcagaattagctctctattttagtccccctaccatgtccccttggcatttctaagcacttgtagcacaatatccaaaatggctccagccagctgctgtttagcggtaatccagttgctcatcaagacgagctatgctgcttccagcttttcattttattccacttgggagtcgga

SEQ ID NO: 30294 - DNA, 599 bp, Chicken  19866894249959_3
  misc_feature (1)..(1): n is any nucleotide
nctgctcagaccagctgaaactttcagcttcgttttctgaagttaaaagaaaattcaggggaagaccatgaagagaaggaaactgcccaaaactctctgaggagcctttgtctaaatgttgagatatcatgaattcccaatagcttwagtaagccatagtttttaacgtcactgcagtttcttcatgcatttacatcccaatatatatttcaatctcayccgccttcaggtttgattccctatgattcaaagccagaaagatttcctcctcacagagacgtggcaagtcaggcacagcarctgaggtcaagtgatttcagcagaaagctcagtatagtggagagcagaattagctctctattttagtccccctaccatgtccccttggcatttctaagcacttgtagcacaatatccaaaatggctccagccagctgctgtttagcggtaatccagttgctcatcaagacgagctatgctgcttccagcttttcattttattccacttgggagtcggattattgccttgtaaagcaacattctgacactattattgcttaattatagcatgcaatatacaagtatttggtagtcatctt

SEQ ID NO: 30295 - DNA, 561 bp, Chicken  19866894249961_1
tccagcatgaaactatacagggtttgaactcagaaactggtgtcccaagtttaatttggacagctgcctgaatatacacctcaattcattaaaaaaaaaacaaaacacaaaggcaggtacagcaaagtcacttgaaggaaacaaaaagacagcaccaagagccttcaacatagttaaaccatgtgaaacatttcagaggggttttctagtatttacccagctaagttgtctgcaatggtactatactgtgcactaagacaataacaaccctccacaatcaaatgaggtaattcgtactcygtaaaagaattatgcttcagttggttttgtacatagacactctgcaacagcttcggtattttttaaatccttttaacaacaaggccaaaaaaataaaccagactttgaatattacaactttgtcttgccagcagacaggaggtgaagagctcatgttctggaaatacggcagattccacgacatatcagtaagcaaatcctgccttcacagccacacacttcagccttggaatgcatataggctggagccaacaacgatga

SEQ ID NO: 30296 - DNA, 600 bp, Chicken  19866894249989_1
tacagttgggccgtgctgaggcaaagtcccctgggaatgacggccttctcccttcctgctgcactgaaagctgtgtaattgttcagctctctggttttaccattgccttttgaaactacaggggccagcaagagccaccactgcttctgccacacgtatggcttctctgaatatcccaaccttctggccactaacttcagccacggtgccagagcagtctggggagagaactgtatataatacttaagctcagctggactgacttaaattttacaatattctgacaaaataagctctacrttgcttaacatcttgaacagttttaaaccggtacaaaacaacctttataaaccaagcagcatttataatgcttcatatataaaaacagtacatattttttaaagtttattacatatctatgtagatatgcttgctggaaaagctaggtctgttgtagaccaaatgctacaaatgaagacttgtggcttaccagtttcttttctatattttcttggaaaatgtttctagttagagtttaaatataaaatgtaaatgctgtacagatatgtattgatataagcattacttggtgtacacaag

SEQ ID NO: 30297 - DNA, 600 bp, Chicken  19866894249994_1
aatacatcatttatgtgctattgttttgatgatgtatgaaagtaatgcatcatttcaggacttccagcagaaatatcccagaggctgtcatgctttgtttaaaaaaaaaaaaaaaaagagttctttagaaatgcagaaaagagattagttatttatggtagatggaaagatgggggtgttaggagggaagtggatggaagagagagaatgtaatatagagatgctttgatttccaggggtacctaaatcaataggaacagcaggtgtttattgaatccgagcattaggaaagggaatttytgcatttctaactgtgcactttcagcccagtgccccttttcccttctttgtaactgcagtaagagtggtgamagcactatatggacaaggtttccactgagctcagctctgcttcaggattggaaggaaagctgaattccacagataataagctgtgaaaaatctcacttggactttaaatcagcactgaacagtttgggcctgtgtttcatttggttaaggtatatgtattaatttatgtaattcattacatctgtctattttcctttgagatgttaattctccttatatcaagggcat

SEQ ID NO: 30298 - DNA, 600 bp, Chicken  19866894249994_2
atatcccagaggctgtcatgctttgtttaaaaaaaaaaaaaaaaagagttctttagaaatgcagaaaagagattagttatttatggtagatggaaagatgggggtgttaggagggaagtggatggaagagagagaatgtaatatagagatgctttgatttccaggggtacctaaatcaataggaacagcaggtgtttattgaatccgagcattaggaaagggaatttytgcatttctaactgtgcactttcagcccagtgccccttttcccttctttgtaactgcagtaagagtggtgamagcactatatggacaaggtttccactgagctcagctctgcttcaggattggaaggaaagctgaattccacagataataagctgtgaaaaatctcacttggactttaaatcagcactgaacagtttgggcctgtgtttcatttggttaaggtatatgtattaatttatgtaattcattacatctgtctattttcctttgagatgttaattctccttatatcaagggcattctgagtgtggggttggggtaggaaggacttgttggtttcccacttcattacaacaaactggggagctttcc

SEQ ID NO: 30299 - DNA, 600 bp, Chicken  19866894249999_1
tttttaatctcttcagcattttcctgcctcatagatagattaaaaagcagaagtaatagttcttccaataagagtgagttttcttcctgactctgagtctgtcatcttgagtttcctcacttttctgaaagaattgcatatgttctctctcaagctggaggatatggtattattggtaacctgatttcactctgactttctttgcaacgtagcatcatggttcagacttagtgctgagggtgtggtatttgttttgttggtgtttttttctttgcaactaaaattgttctctctctctcmttttttttttcttgtaagagaaaatattaaaaatctgtgaaaattgacacgatgcataccttactttccctgaaattttcaatctctgtgtctgaagaaacctgttttaagagctcctttgtaatgtctgtagagatgtttgtcttcctgagatctttcatttttcagtacttttttgatgaatatcttgtaagcctgtttcttcagaacaggacttggatgtggagacaagatacttgtctaggcccaatgccttttaagtgtgttgtatatagcatgcttgtttttcatttatccctc

SEQ ID NO: 30300 - DNA, 600 bp, Chicken  19866894250004_1
tggagtccaactaagagtttcaggttcctgcttagattttagtgtctactacagcttttctgttcagaaggtatcacatggttttagggcagttggagcaaagtggaatcaatcagtgttcctttcttgaggaaatttcctgtcctgtgaagtggggtcctgtgggatctgctgaaatgctcgcactggagctgatgcttgtataagcacagaagaggacacagaccttggctgtgagcattcatggtttgagctaggatggggacagctggaagggagtactttccatatgttggagawttgatgctgaaggggtggaagcgtctgttaaatctgaaatgtagatccagagcatttgatttctggacttgtgcattaactgcattcctccaactccttgctgccccctttggtgagaagttctctgtacagagccacgggcccaccagygctgatgtgggatggggaagaggcctgcctcttcggcttctaggctactccatgttactgagtggggaaaagggaaagggagaggttgcagcatggttgttatttttgttgttgttgtttttacctcaactgcagtataaagctttctct

SEQ ID NO: 30301 - DNA, 600 bp, Chicken  19866894250004_2
agtggggtcctgtgggatctgctgaaatgctcgcactggagctgatgcttgtataagcacagaagaggacacagaccttggctgtgagcattcatggtttgagctaggatggggacagctggaagggagtactttccatatgttggagawttgatgctgaaggggtggaagcgtctgttaaatctgaaatgtagatccagagcatttgatttctggacttgtgcattaactgcattcctccaactccttgctgccccctttggtgagaagttctctgtacagagccacgggcccaccagygctgatgtgggatggggaagaggcctgcctcttcggcttctaggctactccatgttactgagtggggaaaagggaaagggagaggttgcagcatggttgttatttttgttgttgttgtttttacctcaactgcagtataaagctttctcttacccaagatgtgttcttggcagatagtagctgctgtagttaatgctgctgggaaacgtactcaactcctgtcagggtcactgatgctcagagccctgtaaacatcacactgagtaatctggacaatctgtgaacaaaagcaggggcact

SEQ ID NO: 30302 - DNA, 599 bp, Chicken  19866894250008_1
  misc_feature (1)..(53): n is any nucleotide
nnnnnnnnnnnnnnnnnnnnnnnnnnnnnnnnnnnnnnnnnnnnnnnnnnnnntgacgggatttttaagaactggcaaaaagcccaaactatgacagtttcttgtctaaatatgaaaatttcctgacagctccattatgcataatttttgacatcccacgagggtcttggagcctataaagaacacactttctgtctcccttctctcaaaggagaaaggtaagtgcagcttctcaaaaagactgtatcagagcaggcttaatttccttgcattttgcaaactgtcttacaaggtcattastgctgttatagttgtttgttcattgtgttatttataccatggcatctggccacattaaaagcattaaaataaaatatctgtccataaggtagatataattgtcatcttcctcttaaccacctctacttatcacgcaggaagaagaaagctggtgcgtttaacttggccctgctgatctgaggggacaggctgagacacatatcactttctgaaaagcagtaagcctcctccataaccagcacccacaaatggagtcctggaaatgccatgtgttcagtaaaattttgaagctgaataat

SEQ ID NO: 30303 - DNA, 599 bp, Chicken  19866894250009_1
  misc_feature (1)..(128): n is any nucleotide
nnnnnnnnnnnnnnnnnnnnnnnnnnnnnnnnnnnnnnnnnnnnnnnnnnnnnnnnnnnnnnnnnnnnnnnnnnnnnnnnnnnnnnnnnnnnnnnnnnnnnnnnnnnnnnnnnnnnnnnnnnnnnnnntgatttttttttatggttgctgtatggattattcttgttttctttcacttttgagtagctaaaagaaaaaatattattcaaaaatagtggaattgtctgccatttaaagcacaacataaagtccttatgctcactaatgattgtagagccaagatttcaatttcacagaaasaaagaacagaaaaagtagctgaggttgaaaagcgacctctggaggtcatctggccacccaccactgttcaaggacaactggagctgcttgcccaagagcatgtccagacagcttttaaagttctccaagtatggagagtccacawgtaacctttgtcagtgctcagacactttcacagtaaataagcattttgtgatgttcaaatggatcctcccatgtcccagtttctgcccattgacgcttgtgctggtactgggcaccactgaaaagagtgtgattccatcctcttttaaccttct

SEQ ID NO: 30304 - DNA, 600 bp, Chicken  19866894250009_2
tgctgtatggattattcttgttttctttcacttttgagtagctaaaagaaaaaatattattcaaaaatagtggaattgtctgccatttaaagcacaacataaagtccttatgctcactaatgattgtagagccaagatttcaatttcacagaaasaaagaacagaaaaagtagctgaggttgaaaagcgacctctggaggtcatctggccacccaccactgttcaaggacaactggagctgcttgcccaagagcatgtccagacagcttttaaagttctccaagtatggagagtccacawgtaacctttgtcagtgctcagacactttcacagtaaataagcattttgtgatgttcaaatggatcctcccatgtcccagtttctgcccattgacgcttgtgctggtactgggcaccactgaaaagagtgtgattccatcctcttttaaccttctcttcaagtatttatagatattgtcaaaatcccctcttagtcttttcttctccaggctgaacagtcccagcttactcagcctctcctcacaggagaagtgcaccagtcccttagccatttttgtagcctcttgttggattctttcta

SEQ ID NO: 30305 - DNA, 600 bp, Chicken  19866894250016_1
cactggctgctgctcagcgcacctgcagagccagccctgagctcagcctggccctggcaatggctgccacatgagaagcagactccagtcgctgacctgctataaacttctctgggtctgctccaggagagtcaataactggctttttattaacagatgtatttagtagatagaagctcatggaatttactgtctggaccgtcaacgtctattgcactgtgcaaaagggaaagaggcaaggattttacgcctccacactgcgtatgtactgatattgggaagtaccaagaggagagggtrtataattggaaaaagaaaaacaattttctcaagctcagctcaccactcctgtgatggcagatgcctttaaatcattaccatcaatgttctgaactactgcyttgttggraaaacaaataaaaacaaaacgaaagctaggcaacactcaattcagctcaatctatcaggcggaaaattgcatattgataaaacttgcttcacaagggtttaatgctcttcttttcaaggctctagttccactttagctaagcattcggtttgcagaatcccagtggcagttctgtagagcattataaacat

SEQ ID NO: 30306 - DNA, 600 bp, Chicken  19866894250016_2
ataaacttctctgggtctgctccaggagagtcaataactggctttttattaacagatgtatttagtagatagaagctcatggaatttactgtctggaccgtcaacgtctattgcactgtgcaaaagggaaagaggcaaggattttacgcctccacactgcgtatgtactgatattgggaagtaccaagaggagagggtrtataattggaaaaagaaaaacaattttctcaagctcagctcaccactcctgtgatggcagatgcctttaaatcattaccatcaatgttctgaactactgcyttgttggraaaacaaataaaaacaaaacgaaagctaggcaacactcaattcagctcaatctatcaggcggaaaattgcatattgataaaacttgcttcacaagggtttaatgctcttcttttcaaggctctagttccactttagctaagcattcggtttgcagaatcccagtggcagttctgtagagcattataaacatatcatcatttggctttatgaaaaaaatgatttgcaatccacgactcaagcacagtgcctgtggtattttccagtttctcattttttgggtcttcatctcct

SEQ ID NO: 30307 - DNA, 600 bp, Chicken  19866894250016_3
ctctgggtctgctccaggagagtcaataactggctttttattaacagatgtatttagtagatagaagctcatggaatttactgtctggaccgtcaacgtctattgcactgtgcaaaagggaaagaggcaaggattttacgcctccacactgcgtatgtactgatattgggaagtaccaagaggagagggtrtataattggaaaaagaaaaacaattttctcaagctcagctcaccactcctgtgatggcagatgcctttaaatcattaccatcaatgttctgaactactgcyttgttggraaaacaaataaaaacaaaacgaaagctaggcaacactcaattcagctcaatctatcaggcggaaaattgcatattgataaaacttgcttcacaagggtttaatgctcttcttttcaaggctctagttccactttagctaagcattcggtttgcagaatcccagtggcagttctgtagagcattataaacatatcatcatttggctttatgaaaaaaatgatttgcaatccacgactcaagcacagtgcctgtggtattttccagtttctcattttttgggtcttcatctcctggctgatt

SEQ ID NO: 30308 - DNA, 597 bp, Chicken  19866894250020_1
aatattagagaggcagtttcctctctgtccttagtgcttccagatggagcccctcgcacagaccaaagggccgggctgcagctctgctctcagcacgggcagccccgtgtgggcagtgggacagatctgccctttgttggaggcggcagagccccgctgcgcccagagctgtgcagttgtttccgctttcatcggagaaagttagaaagaaaaagagatcagggcattctgtagggcctcagggagctgtacaggggaagacacccctgggacaacacccccggccccactgctgccctstgagcccagtcaggagtgggtctgtgtgggcactgggagcrctacaatgagcgctaatggcgttcattgccaggaggagatgtcagcacggagccgtgggcactggaggctccttggctctcacctgggtgtgtgtgcctstgtttgccattagagccctgagcgtcagtaccctcagggcatggccaagcccccacagctgtcccccccgcaggagccccctccccagagctgtcagtgttatctgagctggggctcaaccaggctgttgtgacgaggacagacgttccacgcaga

SEQ ID NO: 30309 - DNA, 556 bp, Chicken  19866894250020_2
agatggagcccctcgcacagaccaaagggccgggctgcagctctgctctcagcacgggcagccccgtgtgggcagtgggacagatctgccctttgttggaggcggcagagccccgctgcgcccagagctgtgcagttgtttccgctttcatcggagaaagttagaaagaaaaagagatcagggcattctgtagggcctcagggagctgtacaggggaagacacccctgggacaacacccccggccccactgctgccctstgagcccagtcaggagtgggtctgtgtgggcactgggagcrctacaatgagcgctaatggcgttcattgccaggaggagatgtcagcacggagccgtgggcactggaggctccttggctctcacctgggtgtgtgtgcctstgtttgccattagagccctgagcgtcagtaccctcagggcatggccaagcccccacagctgtcccccccgcaggagccccctccccagagctgtcagtgttatctgagctggggctcaaccaggctgttgtgacgaggacagacgttccacgcaga

SEQ ID NO: 30310 - DNA, 456 bp, Chicken  19866894250020_3
ggcggcagagccccgctgcgcccagagctgtgcagttgtttccgctttcatcggagaaagttagaaagaaaaagagatcagggcattctgtagggcctcagggagctgtacaggggaagacacccctgggacaacacccccggccccactgctgccctstgagcccagtcaggagtgggtctgtgtgggcactgggagcrctacaatgagcgctaatggcgttcattgccaggaggagatgtcagcacggagccgtgggcactggaggctccttggctctcacctgggtgtgtgtgcctstgtttgccattagagccctgagcgtcagtaccctcagggcatggccaagcccccacagctgtcccccccgcaggagccccctccccagagctgtcagtgttatctgagctggggctcaaccaggctgttgtgacgaggacagacgttccacgcaga

SEQ ID NO: 30311 - DNA, 599 bp, Chicken  19866894250025_1
  misc_feature (1)..(118): n is any nucleotide
nnnnnnnnnnnnnnnnnnnnnnnnnnnnnnnnnnnnnnnnnnnnnnnnnnnnnnnnnnnnnnnnnnnnnnnnnnnnnnnnnnnnnnnnnnnnnnnnnnnnnnnnnnnnnnnnnnnnnncttgagaagtaaaatgggatgtgttgagagtctgtttttagtgtaaaatctgttattctacgtatcatgctaaaaatagtattatatgtaatattggtcagtgaagatgatattgcttcatttcttttattgataagagaaatgattgactgagattatactcttatctacttaataaccaracttcatgcagcaattgaagaccttacactgtgaagctgaacctctttgattagcyctgaagaaatacagttggttaatacaatactaaaagctaaagaattttgagtagtaattgtagctacataactcaatcttttcttaatggatttactggctatccgtgttcctgcctgttgctgttgagaacagaccgtgtatctaaataacgagggtaggataaaatgccctcagtgatactttcatctgtgcgccttatcctgccaaaaagatctaaagattatttcatattgagaagatg

SEQ ID NO: 30312 - DNA, 599 bp, Chicken  19866894250025_2
  misc_feature (1)..(62): n is any nucleotide
nnnnnnnnnnnnnnnnnnnnnnnnnnnnnnnnnnnnnnnnnnnnnnnnnnnnnnnnnnnnnncttgagaagtaaaatgggatgtgttgagagtctgtttttagtgtaaaatctgttattctacgtatcatgctaaaaatagtattatatgtaatattggtcagtgaagatgatattgcttcatttcttttattgataagagaaatgattgactgagattatactcttatctacttaataaccaracttcatgcagcaattgaagaccttacactgtgaagctgaacctctttgattagcyctgaagaaatacagttggttaatacaatactaaaagctaaagaattttgagtagtaattgtagctacataactcaatcttttcttaatggatttactggctatccgtgttcctgcctgttgctgttgagaacagaccgtgtatctaaataacgagggtaggataaaatgccctcagtgatactttcatctgtgcgccttatcctgccaaaaagatctaaagattatttcatattgagaagatgaactgtcatcattaggagaaatgctggattcttgtttgccagggagctcataaaat

SEQ ID NO: 30313 - DNA, 600 bp, Chicken  19866894250025_3
acgagggtaggataaaatgccctcagtgatactttcatctgtgcgccttatcctgccaaaaagatctaaagattatttcatattgagaagatgaactgtcatcattaggagaaatgctggattcttgtttgccagggagctcataaaatggacagactggccttgtcttgaaattgaagaagcatagaacacgttgtcattacaaaatacacacttggatacagattgaagcataaagtatagttgaaaattggactactcaaagatttgcggtttcatttttgtcattacaataacttkttgagccaatgtaattgtgctcattagagtgagattaagagcagaatacaagagttctgtactctttcataacgcttaaaatagctgcttgtaacgtggagttgtatgctggaggtgcatctgtcaaagatatcccttaatgttcttaaaataaaggacttcataaagtaaggaattgtttgctctcctgtgagattcatctgagtgaaattcacttttatagtgataagtcagaagaagcttttatatccttattcacgcacagaatgctacttaaataaaaatattttgtcattttta

SEQ ID NO: 30314 - DNA, 600 bp, Chicken  19866894250025_4
tgtactctttcataacgcttaaaatagctgcttgtaacgtggagttgtatgctggaggtgcatctgtcaaagatatcccttaatgttcttaaaataaaggacttcataaagtaaggaattgtttgctctcctgtgagattcatctgagtgaaattcacttttatagtgataagtcagaagaagcttttatatccttattcacgcacagaatgctacttaaataaaaatattttgtcatttttaaaaaagcacaccagtgtgtaaactcagtcacaattactgttaattgacatgcttgtrttctatcagaagtgtgtgcaaccatagtatgcttgtaaataaggagtaacccagtcctcctcgtattctgtaggctgtccccattgcttatctgtcagtttcaggaaatgcaccaattgtacccaagaaagccrcagtttgacatcagtgaaaatacaacatttaacagcctctaatctcattctgctgaattctgatcttattctactaaattcatgcttcagctgagtgaatgtacatcctaatcttagctgcgtctgttgtagtgctgttcattttccagcttattttcaacaatta

SEQ ID NO: 30315 - DNA, 600 bp, Chicken  19866894250025_5
gagattcatctgagtgaaattcacttttatagtgataagtcagaagaagcttttatatccttattcacgcacagaatgctacttaaataaaaatattttgtcatttttaaaaaagcacaccagtgtgtaaactcagtcacaattactgttaattgacatgcttgtrttctatcagaagtgtgtgcaaccatagtatgcttgtaaataaggagtaacccagtcctcctcgtattctgtaggctgtccccattgcttatctgtcagtttcaggaaatgcaccaattgtacccaagaaagccrcagtttgacatcagtgaaaatacaacatttaacagcctctaatctcattctgctgaattctgatcttattctactaaattcatgcttcagctgagtgaatgtacatcctaatcttagctgcgtctgttgtagtgctgttcattttccagcttattttcaacaattatggtctaattcaaagcaagtactttcccatcacctctttttcttcttttcctcttcagatttgccacttctaaaatgaaaatgagttcaataggatctttttagaaaggcttctattttgtacaatgtggtttc

SEQ ID NO: 30316 - DNA, 600 bp, Chicken  19866894250025_6
gagtaacccagtcctcctcgtattctgtaggctgtccccattgcttatctgtcagtttcaggaaatgcaccaattgtacccaagaaagccrcagtttgacatcagtgaaaatacaacatttaacagcctctaatctcattctgctgaattctgatcttattctactaaattcatgcttcagctgagtgaatgtacatcctaatcttagctgcgtctgttgtagtgctgttcattttccagcttattttcaacaattatggtctaattcaaagcaagtactttcccatcacctctttttcrtcttttcctcttcagatttgccacttctaaaatgaaaatgagttcaataggatctttttagaaaggcttctattttgtacaatgtggtttctgcattattatggtacttatttgtagactagccttcaagcctacttgcacttcgagggttctggcagaagttcatttacgtttgaaagctcaggacacttcaaaggtatctttatgattgtatttgaggaaaagaggagtgtataactgtctcttttgcctggtaaaagtttgtttggtttcgtgtctattgtacaacctctccttctt

SEQ ID NO: 30317 - DNA, 600 bp, Chicken  19866894250026_1
gctgtctctgagcagtctccctggctgcatgcgtgcgttttgagcttgctgtggtgttccacatggggccaagagatgctcgtgttgctgtcagagactgactgacttcagccagacctgaatcttggaaatgactgcagggtgagaagcgcaggtatcctgctggagagcaacaggagagtagggcagggcaggagatcagccaccggtcagactagcagtagctggtacatcaggtggcattgacccaagtaaggtacagacatccttgtagtgtcttcacactctttgacactatawaggatcaaagcgttgtttagcttggagaagagaaggctccagggaagactgcattgtggccttccagtacttgaagggagcatgtaaacaggaggggaacagctgtttacgagggtggacagtgataggacaagggggaatggttttaaactgagacaggggaggtttaggttggatattggaaggaagttttcactcagaggtggtgatgcactggaacaggttgcccaaggaggttgtggatgccccatctctagatgcattcaaggccaggctggatgtggctctgggcagcctggt

SEQ ID NO: 30318 - DNA, 600 bp, Chicken  19866894250037_1
tgctttcagaaagtttatcctactttgcactatctagaaagtagtagcaggcaggctgtttttcatttttgagttttttactaaagggctagctgttaatggctatttagaaaatggtaagcgaaagaaatacttggtaagtataggagatgccctgctttctatagagtaagagaggcatgaaagaaaaatccaatttattggaagagacacggaagaaggaaattgaatgatattttacagtatagaatgcattgagggccttttaacaagaatatctgacaaagactatggatgccwcaaatgtcaacgacagaggaaaaggaaagattcgtgatayagttatttagagaacagctttgagaattcaaagtgatgaatctgggaagagtcagctgcaattcttggcttcaccagattttgttacttcataagaaaaaggaaatccaaagcaatggatataaatatcagcrtgagagaaaggcaacagttcattaaaatacactgtagtcatgaatacactgctggtaggagaagaattctacacagaagacaaagaagacagttgcaactgaagcttttatctacagtcaaggaagt

SEQ ID NO: 30319 - DNA, 600 bp, Chicken  19866894250037_2
gtagtagcaggcaggctgtttttcatttttgagttttttactaaagggctagctgttaatggctatttagaaaatggtaagcgaaagaaatacttggtaagtataggagatgccctgctttctatagagtaagagaggcatgaaagaaaaatccaatttattggaagagacacggaagaaggaaattgaatgatattttacagtatagaatgcattgagggccttttaacaagaatatctgacaaagactatggatgccwcaaatgtcaacgacagaggaaaaggaaagattcgtgatayagttatttagagaacagctttgagaattcaaagtgatgaatctgggaagagtcagctgcaattcttggcttcaccagattttgttacttcataagaaaaaggaaatccaaagcaatggatataaatatcagcrtgagagaaaggcaacagttcattaaaatacactgtagtcatgaatacactgctggtaggagaagaattctacacagaagacaaagaagacagttgcaactgaagcttttatctacagtcaaggaagtcgtaaaagattacaaaattgctgagacaacatacttcctt

SEQ ID NO: 30320 - DNA, 600 bp, Chicken  19866894250037_3
agaggcatgaaagaaaaatccaatttattggaagagacacggaagaaggaaattgaatgatattttacagtatagaatgcattgagggccttttaacaagaatatctgacaaagactatggatgccwcaaatgtcaacgacagaggaaaaggaaagattcgtgatayagttatttagagaacagctttgagaattcaaagtgatgaatctgggaagagtcagctgcaattcttggcttcaccagattttgttacttcataagaaaaaggaaatccaaagcaatggatataaatatcagcrtgagagaaaggcaacagttcattaaaatacactgtagtcatgaatacactgctggtaggagaagaattctacacagaagacaaagaagacagttgcaactgaagcttttatctacagtcaaggaagtcgtaaaagattacaaaattgctgagacaacatacttccttataatttcagggtacaagatttcagggatctagctggcttcacagtaatcaactcagatacgggcattgcagccaacttgtcttggatcagagtaatgtcctacacagacaggtaacgtgaattaaaaatatt

SEQ ID NO: 30321 - DNA, 600 bp, Chicken  19866894250045_1
gggcttctatgaagacgtgctactaagcaaacaatatgttccttgtgttcttgcagggatggtcatctcatgaattttattatttactaagataaaacatgatttggaacttgagaaaataagatctgtgaaaaatatccaaatttgtatatttagtctctgtaactctttcatttgtgtattaaagtggtaatattttccaggtgttctttacactaaaatgaaattaacaggtttcacacgtcaacaaaatactgataggcaacaaaacatgttctgatatttcctccaaaatattayattttattaaaaataaataaatkatgctcctyatcttcatagaaggaaagcagaatgccaacaaaagccaagcaaaaatccctgacaaagatcaggtaaaacatgtttgaacagagagattcattatagtaacatgcatttgctctggaatattctcatgccaagtactttttgctgtatttctcagctgctgctagttttatcatttttttttagctgaggctagactttggtgattgacaagcactccatcccaacacactgtctgtctgcaaccagagagggaaacagaatgcagaa

SEQ ID NO: 30322 - DNA, 600 bp, Chicken  19866894250045_2
taagcaaacaatatgttccttgtgttcttgcagggatggtcatctcatgaattttattatttactaagataaaacatgatttggaacttgagaaaataagatctgtgaaaaatatccaaatttgtatatttagtctctgtaactctttcatttgtgtattaaagtggtaatattttccaggtgttctttacactaaaatgaaattaacaggtttcacacgtcaacaaaatactgataggcaacaaaacatgttctgatatttcctccaaaatattayattttattaaaaataaataaatkatgctcctyatcttcatagaaggaaagcagaatgccaacaaaagccaagcaaaaatccctgacaaagatcaggtaaaacatgtttgaacagagagattcattatagtaacatgcatttgctctggaatattctcatgccaagtactttttgctgtatttctcagctgctgctagttttatcatttttttttagctgaggctagactttggtgattgacaagcactccatcccaacacactgtctgtctgcaaccagagagggaaacagaatgcagaatataattgtctcctctttttctt

SEQ ID NO: 30323 - DNA, 600 bp, Chicken  19866894250045_3
aatatgttccttgtgttcttgcagggatggtcatctcatgaattttattatttactaagataaaacatgatttggaacttgagaaaataagatctgtgaaaaatatccaaatttgtatatttagtctctgtaactctttcatttgtgtattaaagtggtaatattttccaggtgttctttacactaaaatgaaattaacaggtttcacacgtcaacaaaatactgataggcaacaaaacatgttctgatatttcctccaaaatattayattttattaaaaataaataaatkatgctcctyatcttcatagaaggaaagcagaatgccaacaaaagccaagcaaaaatccctgacaaagatcaggtaaaacatgtttgaacagagagattcattatagtaacatgcatttgctctggaatattctcatgccaagtactttttgctgtatttctcagctgctgctagttttatcatttttttttagctgaggctagactttggtgattgacaagcactccatcccaacacactgtctgtctgcaaccagagagggaaacagaatgcagaatataattgtctcctctttttcttctacagttg

SEQ ID NO: 30324 - DNA, 600 bp, Chicken  19866894250047_1
taagtaagtcttctgtgtttagaaagaaggagataatcttttgagctgtggttgcttttattgcctggctcccttgcctttggtggtaaatgcactgcctgacagctcggtgtgtgaggctgtagttgaactactgccccatcttgctgttgcctcatcatgggagcaattactgcttggcaagagctggaggtgtgaagtcatatggcctccagctgtggttaaggtgcagagagcgtggcctcacagcccctgagctgctgtaccccgtgtgtaccctgcagggaataaggtaacacyttttttgctccttcagtggaggagtaactgctttgggattggtagctggacagagcattacagtagggtggcgtgttctgctgagcatcttctggagcaatctcttcttgctttaaggctttgctgaagcacatttatgtcactgggagcctaaccacccagttaacaggctcagacagtcctgtcatggcaacaactgagcatcatgtgcaacccattagctagctggcatctagctgctgaggtttgcgctaccaaaacagcagtgattgcagagcacagggggtctcagtgtggtgc

SEQ ID NO: 30325 - DNA, 515 bp, Chicken  19866894250055_1
aggggtttgggaatagcagaggatcggcaccttcctagggctcctccatgggttgtgtgagggatggtgaacctgctcttcactcatggggagtttggggatgccccaggtgcacaagctgtgttttcctctcctacagttcccagggctgccagttattgatgtgctggaaggcacaggggttggtgggcaattaatgatgagagactcctgagatttgtttctccacttgctgctattgggtgtgatgtctgcctgtgccagagctcctgagagcaaatttccccacaagagatgcaygctgtagtgattgtgcacaacctgctctgctctgcatcttcctaagcccttgctgttaggatggggccataaccgagacagctgagggatccaaggctggaatatacaaagcagcccaccctgttgcagcgctctgcttctctcaaatagagcaacaaggtgctggagcttcttgcaagcagcagtgcccagagcaagccccttgcacacctcag

SEQ ID NO: 30326 - DNA, 600 bp, Chicken  19866894250058_1
aggaaagagcactgaacaattttattatagtgccaaagattaatcctggaatgtaaagctgcgagagtcctattacggacctgcttcattaaaggatgtggaacaagacgttcgtaaggcaccaataaatccattaagtgacaggggactctgaaatggcctttgatgattttagttattaaaattgctgaggttgctgaggttggtgactgcaaatacacttgtggctggcacccactgtcccttttaactcccagtcctctggtccaaattctccttgaaataagcagccatcactcygctctagttaaatgggcaacccccagctacccggactgaatccagtatggattctggactgacaagatgcgagaaaagaacttgtgtgtttaaaatctgctctttcaggtagctaagaacccagagtgaacagtgctttaaacccaggtatcatctagagttttttcaattccttatcagatcactgtaagctggaccttagcagactctttcatttccataaactggaatttctggagctgaaaatgccccaaaagaagcagcagcactttgataaaactgtcccaagcagtggcagac

SEQ ID NO: 30327 - DNA, 600 bp, Chicken  19866894250058_2
aaatgggcaacccccagctacccggactgaatccagtatggattctggactgacaagatgcgagaaaagaacttgtgtgtttaaaatctgctctttcaggtagctaagaacccagagtgaacagtgctttaaacccaggtatcatctagagttttttcaattccttatcagatcactgtaagctggaccttagcagactctttcatttccataaactggaatttctggagctgaaaatgccccaaaagaagcagcagcactttgataaaactgtcccaagcagtggcagacaagaagccygtgctactgaagagcagtactgttgtctagtcaaacatgtctttaaattttgaccagcagcgtaagaaatagcatctgatttgtcagcagcatgaagaaaagccattgggaaacctgcaattctctctgcatcctaacgcctccaccttccaaagatacctgagcaaagttttaaatggaagtattttgacgtttcatgttagattgagaagtagctctttagatcaggggttgaagatttccatgccagagaaatacgcgctgctcagataaaggatgcttgagccctgttgatattct

SEQ ID NO: 30328 - DNA, 600 bp, Chicken  19866894250060_1
gaagactgtcagtcagccctaggttgaagaaagtaactctttttaaggactctttgtacaagtatgagagcatctgaaactagcttctgatgaaacttgtgaataaaatcaaactttttatataaagacctaatgaagctggagtaataggaatacggtaacagaaaaagtaaaagaaaattcagaaagcatctctgtttcttctaccttgcctcgaagtaggtgacaacttacttaaaatgtgacaacttaatccagctccttgagtggaaacagttcatttggttagcaactcagctrtcaaaggggaaatggtgaagtcatcatcaatttaccaaacttagccagtcaaaaagkcttygatggaaagagcagagaagacaaagaaacaggggacactccctgacagaagaacctggtaaaatgggaagctcacctactgagctgtatcaaaagaaatgcacatatgaaaagtgttcaaaacactatttgtgttttgattcttaatttctccttagtatattcctgtaggtagacagatcaataaagattattacccccctttacagaacatgaaaatgaagcacaayggagcatatt

SEQ ID NO: 30329 - DNA, 600 bp, Chicken  19866894250060_2
acaagtatgagagcatctgaaactagcttctgatgaaacttgtgaataaaatcaaactttttatataaagacctaatgaagctggagtaataggaatacggtaacagaaaaagtaaaagaaaattcagaaagcatctctgtttcttctaccttgcctcgaagtaggtgacaacttacttaaaatgtgacaacttaatccagctccttgagtggaaacagttcatttggttagcaactcagctrtcaaaggggaaatggtgaagtcatcatcaatttaccaaacttagccagtcaaaaagkcttygatggaaagagcagagaagacaaagaaacaggggacactccctgacagaagaacctggtaaaatgggaagctcacctactgagctgtatcaaaagaaatgcacatatgaaaagtgttcaaaacactatttgtgttttgattcttaatttctccttagtatattcctgtaggtagacagatcaataaagattattacccccctttacagaacatgaaaatgaagcacaayggagcatattcagagagaggttgtgaattggagatttagtcttctaagctggaactggctatgagct

SEQ ID NO: 30330 - DNA, 600 bp, Chicken  19866894250060_3
gtatgagagcatctgaaactagcttctgatgaaacttgtgaataaaatcaaactttttatataaagacctaatgaagctggagtaataggaatacggtaacagaaaaagtaaaagaaaattcagaaagcatctctgtttcttctaccttgcctcgaagtaggtgacaacttacttaaaatgtgacaacttaatccagctccttgagtggaaacagttcatttggttagcaactcagctrtcaaaggggaaatggtgaagtcatcatcaatttaccaaacttagccagtcaaaaagkcttygatggaaagagcagagaagacaaagaaacaggggacactccctgacagaagaacctggtaaaatgggaagctcacctactgagctgtatcaaaagaaatgcacatatgaaaagtgttcaaaacactatttgtgttttgattcttaatttctccttagtatattcctgtaggtagacagatcaataaagattattacccccctttacagaacatgaaaatgaagcacaayggagcatattcagagagaggttgtgaattggagatttagtcttctaagctggaactggctatgagcttctc

SEQ ID NO: 30331 - DNA, 508 bp, Chicken  19866894250060_4
aactcagctrtcaaaggggaaatggtgaagtcatcatcaatttaccaaacttagccagtcaaaaagkcttygatggaaagagcagagaagacaaagaaacaggggacactccctgacagaagaacctggtaaaatgggaagctcacctactgagctgtatcaaaagaaatgcacatatgaaaagtgttcaaaacactatttgtgttttgattcttaatttctccttagtatattcctgtaggtagacagatcaataaagattattacccccctttacagaacatgaaaatgaagcacaayggagcatattcagagagaggttgtgaattggagatttagtcttctaagctggaactggctatgagcttctctctgcaaaatatttttcctatggaatccctacctgacctgcatctcctttagagctcacgtgagaaaatgtctggttggaagttttctaaaatctgacttccagcattaatagaatccacttcccagtggtgcaaca

SEQ ID NO: 30332 - DNA, 599 bp, Chicken  19866894250061_1
  misc_feature (1)..(74): n is any nucleotide
nnnnnnnnnnnnnnnnnnnnnnnnnnnnnnnnnnnnnnnnnnnnnnnnnnnnnnnnnnnnnnnnnnnnnnnnnnaaaagctgcctttgagcatactgggtgtgcgctgagtgcttctttattaactgtggtgacatgtggaagatgaagattaacaagtaaaacaatatcgacttcaattcagacttttgcagatactcatcaggtgttgattcaagaaactattttcctttcaatacgcatttcttaatctaaaaagaaattctaggcatgcaatgataaaaagggattcaaacaattmcttaactgtaatcagtggtgcaaccactcctaataaaayagtgatctctacaaagatccatttgcagggctgaccaacagacagcgagctgacaayaaactcagtgcaagttccccttctgctggtgtcctaatggctgtattcaactcagcatctctggctcttagtaagagatgagaagttggacagaacctctgccagaaggtggctgcacgttccagcacctcgtaggaaatcagaaacctcattctggtgggtctaaaggaactgaatcactggagactgacagctccccttag

SEQ ID NO: 30333 - DNA, 599 bp, Chicken  19866894250061_2
  misc_feature (1)..(35): n is any nucleotide
nnnnnnnnnnnnnnnnnnnnnnnnnnnnnnnnnnnaaaagctgcctttgagcatactgggtgtgcgctgagtgcttctttattaactgtggtgacatgtggaagatgaagattaacaagtaaaacaatatcgacttcaattcagacttttgcagatactcatcaggtgttgattcaagaaactattttcctttcaatacgcatttcttaatctaaaaagaaattctaggcatgcaatgataaaaagggattcaaacaattmcttaactgtaatcagtggtgcaaccactcctaataaaayagtgatctctacaaagatccatttgcagggctgaccaacagacagcgagctgacaayaaactcagtgcaagttccccttctgctggtgtcctaatggctgtattcaactcagcatctctggctcttagtaagagatgagaagttggacagaacctctgccagaaggtggctgcacgttccagcacctcgtaggaaatcagaaacctcattctggtgggtctaaaggaactgaatcactggagactgacagctccccttagaataaagccacgtgcaagcattaacacaaggcgtgattc

SEQ ID NO: 30334 - DNA, 600 bp, Chicken  19866894250061_3
gggtgtgcgctgagtgcttctttattaactgtggtgacatgtggaagatgaagattaacaagtaaaacaatatcgacttcaattcagacttttgcagatactcatcaggtgttgattcaagaaactattttcctttcaatacgcatttcttaatctaaaaagaaattctaggcatgcaatgataaaaagggattcaaacaattmcttaactgtaatcagtggtgcaaccactcctaataaaayagtgatctctacaaagatccatttgcagggctgaccaacagacagcgagctgacaayaaactcagtgcaagttccccttctgctggtgtcctaatggctgtattcaactcagcatctctggctcttagtaagagatgagaagttggacagaacctctgccagaaggtggctgcacgttccagcacctcgtaggaaatcagaaacctcattctggtgggtctaaaggaactgaatcactggagactgacagctccccttagaataaagccacgtgcaagcattaacacaaggcgtgattccctggcaatgctgatcaccaaaactaccccatcactcagtgcagcaagccccagtcct

SEQ ID NO: 30335 - DNA, 600 bp, Chicken  19866894250062_1
cctttgttgtttttttcataggcctcttctagagttaatgaatgctttccaacttcgtatgcaaaggtacagtaacttctccatattgataacatcagtgctagtgttcagaatattgctatatcctggtgtcttaattgaagactttgtatctgtcactgactattcttgtgctgtcataaacaagttacacagtgggtttagaaagctgtgaaaggtttgcaagtaatggtaggattcttctataacaacgattcctgcaagggctccattccaagtcagcgctttcatcctccagtsttgcctaacatcagtgaagaaatcctgcattgctgcaaggtagcaggcatattttttaacttatattattataattattattattctcttgcatttcaaacaaataatagatttttttttccctttatgagagtcagagaacagttaactgtggtttctaagcttctagcatatgatgtttaaagccatttagatatataattcatctttgaaggcagtcggccagccctttaaacttcactagtgattgtgtgtgtgttttgtgggatggtagtcctttctcctgttgctaaacagaaa

SEQ ID NO: 30336 - DNA, 600 bp, Chicken  19866894250078_1
agaagcacagccagcagtttgaaggaggtgatcctacctctccacactgtgctagtgaggccttgcttgagtactgtgtccagatgtggagttctctgtacaggagatacatagatctgttggaacacatgcagaggaggtccacaaaaattatgcaagggatggaacacctctcctttgaggacaggctgagagagctgggactgttcagcatgaggaagagaaggctctgaggtgaccagatagcgacttttcaatatctagaggcaagctacaggaaagacagggacagactctttrctagggtctgtggtgataggacgaggggagatggtttcaagattaaagagggtagatttagattggatataaagaaagagtcttttacggtgagggcagtgaggcactggaacaggttgcccagagatgtggttgatgcaccgtccctggagactttcaaggtgaggctgggtcaggccctcgacaacctgatctagctgtgcatgtccctgttcattgcaaaggagttggactacatgatctttaactcttcggattctatgattctacgattcaaattcattttctcagttttaagga

SEQ ID NO: 30337 - DNA, 600 bp, Chicken  19866894250080_1
taaatgaagcaatgcaattatttcatcatttcttacagctacattcatcagactataatgccttagtgctgtgaccatgaaagtaaagaactcagtttttccccaatagtactacaaccacagtaaaataaaaaaaaaaaaaaaaaagatttttagaacttccatagtataaaaaatcaatcaactaaccaaaaaccacacactataagtttgtcatttcataagtttgtttaagctgtattctttctgaaggtatgctgtagtcctaaactgtactgcaatatgtttcttagtcttctstaagaatgctaatagattttttgtttatcaacaacaacctggaattacattgcaggtcctttcaaggtatggttttacctcatggtcaccaggaccagaggttgtgctttgttttctctcctttcattagggagaagcctgtacagaattatcacccatttcacaggaagttactgtagaattttgggcattctgttagtttacagcctggtatcttataggaattactgaacaaagtttgttgccctctctctctcctctttccccattttttttcttttttttcccccatacaagaca

SEQ ID NO: 30338 - DNA, 600 bp, Chicken  19866894250083_1
tgggtggatagagcacaacttccgcactaataatgtcaaggtaattaggacatcctgcaaaacctgtaacagggaagaaataaccattgtttattgtcagttctgctgctgagctggtgggctccccttgtaactactcttgcctttcattttgaactcatctctaactttccagaaatacagctgggccaagtccaggagccctgggactcccactgcagccctgcactaaaatctagtctgtattgagcaatcaccagagaagaacaaaccacaccagtagatctgagtatgtgtgayattaaatagcaattcaaactgagataaaaactggcaagtttagctcatctgataatgtacttgtgcgttccttaatagaatgtcctccttcggaaaggacccacaagggtcatcactatccaactcctggcttcacagagaaccatcaccaagaaaatcaaacactatgtctgagagcaccgcctaaacttcttgaactatagcagcttgggaccatgaccactgcctaacctgacccacccctaacttatttttgcaccattccttcggatcctattgctggtcatcagggaaaagtgc

SEQ ID NO: 30339 - DNA, 600 bp, Chicken  19866894250084_1
tacaatataatcagtgactgctcccaagacaaagtaagccaggcaaccctaatgaaaaccaaatactttgggtgccaaacccatactatttctgagagatatttgaagttaaattaatgctgatatattctgatgaggcccatttggattgccataaaagccaatttccagcatgctgtgtgtggcataaccatacaggaaagaaatctatacatccattattaaagcattaacaattacaacagtagctgacataagccttaagctgcacagccaacttcttttgtaaaatatcaaaaytcagtctgaagcctaggagaacaatttagttcatatctcaacacagttagagatcacaaattgtaatcaatcaccatttcactgaatctaacagaatgctgccaacattcccagtgggcctctgtgggtaactgctggggttttgtgcttcaaattaaygtggacctctttctcagagatgctcagcatttgcagcatcttctcaactcagtagacccactgaagggccacactatttatgtttagaccagtactctgatactcccaacaacattatttcacactctatttttggccatc

SEQ ID NO: 30340 - DNA, 445 bp, Chicken  19866894250084_2
gccaatttccagcatgctgtgtgtggcataaccatacaggaaagaaatctatacatccattattaaagcattaacaattacaacagtagctgacataagccttaagctgcacagccaacttcttttgtaaaatatcaaaaytcagtctgaagcctaggagaacaatttagttcatatctcaacacagttagagatcacaaattgtaatcaatcaccatttcactgaatctaacagaatgctgccaacattcccagtgggcctctgtgggtaactgctggggttttgtgcttcaaattaaygtggacctctttctcagagatgctcagcatttgcagcatcttctcaactcagtagacccactgaagggccacactatttatgtttagaccagtactctgatactcccaacaacattatttcacactctatttttggccatctttt

SEQ ID NO: 30341 - DNA, 599 bp, Chicken  19866894250085_1
  misc_feature (1)..(78): n is any nucleotide
nnnnnnnnnnnnnnnnnnnnnnnnnnnnnnnnnnnnnnnnnnnnnnnnnnnnnnnnnnnnnnnnnnnnnnnnnnnnnntccaaatcagaaacacaggtagccaccaagaagttgacaattctatttaggtatttaaaatcctttctgtgaccaaaacttgacataaatacaattaaatagaccaaaaacaattagtcctccattttttttctcctctctttttaactaagactgtcatgcagaagatttgagatttcccaggtttttaaaacattgcagaatgttaaactggagttgacrgttcagtatgggattggcttgctaaaaattggtagaatcaacacaaaactgaaaatatgtgacaaaggactgttggggaaaaggctgaaataaaatgtaatggtataaagatgtgtaaaatctgaagactgtaggtattcacatcactggttaggcgtstaagtgacatttaccctatgctttcacacttatcttttctgacaggtaactttgatccgaaagccacatgtaacttctatgataacatagagcctggtcctgttgtgccaccaaagccatataaaaagggtaggtcaaat

SEQ ID NO: 30342 - DNA, 600 bp, Chicken  19866894250085_2
gacataaatacaattaaatagaccaaaaacaattagtcctccattttttttctcctctctttttaactaagactgtcatgcagaagatttgagatttcccaggtttttaaaacattgcagaatgttaaactggagttgacrgttcagtatgggattggcttgctaaaaattggtagaatcaacacaaaactgaaaatatgtgacaaaggactgttggggaaaaggctgaaataaaatgtaatggtataaagatgtgtaaaatctgaagactgtaggtattcacatcactggttaggcgtstaagtgacatttaccctatgctttcacacttatcttttctgacaggtaactttgatccgaaagccacatgtaacttctatgataacatagagcctggtcctgttgtgccaccaaagccatataaaaagggtaggtcaaataacaaacctcarcttgccttatctgcattgagaaatgttttaayttttttctttgtacaaaacaaaccataccttgtttatataactgcagtcaatgaggtaggttgtttccagtgtgagttctgctcctatgtttgtaaatactgatattcactactag

SEQ ID NO: 30343 - DNA, 600 bp, Chicken  19866894250085_3
gattggcttgctaaaaattggtagaatcaacacaaaactgaaaatatgtgacaaaggactgttggggaaaaggctgaaataaaatgtaatggtataaagatgtgtaaaatctgaagactgtaggtattcacatcactggttaggcgtstaagtgacatttaccctatgctttcacacttatcttttctgacaggtaactttgatccgaaagccacatgtaacttctatgataacatagagcctggtcctgttgtgccaccaaagccatataaaaagggtaggtcaaataacaaacctcarcttgccttatctgcattgagaaatgttttaayttttttctttgtacaaaacaaaccataccttgtttatataactgcagtcaatgaggtaggttgtttccagtgtgagttctgctcctatgtttgtaaatactgatattcactactagaaaaggagttgaaagtatacaaactcttaaagctttagctagagctttctaattacattttttttataaatacttttagattaaaacttctgtgtcaggagttctttctagctgtcttctaatacgtgctttaggattttatagtttaactt

SEQ ID NO: 30344 - DNA, 600 bp, Chicken  19866894250085_4
caaaactgaaaatatgtgacaaaggactgttggggaaaaggctgaaataaaatgtaatggtataaagatgtgtaaaatctgaagactgtaggtattcacatcactggttaggcgtstaagtgacatttaccctatgctttcacacttatcttttctgacaggtaactttgatccgaaagccacatgtaacttctatgataacatagagcctggtcctgttgtgccaccaaagccatataaaaagggtaggtcaaataacaaacctcarcttgccttatctgcattgagaaatgttttaayttttttctttgtacaaaacaaaccataccttgtttatataactgcagtcaatgaggtaggttgtttccagtgtgagttctgctcctatgtttgtaaatactgatattcactactagaaaaggagttgaaagtatacaaactcttaaagctttagctagagctttctaattacattttttttataaatacttttagattaaaacttctgtgtcaggagttctttctagctgtcttctaatacgtgctttaggattttatagtttaacttcttaaaatctgcatttattcttttaattaact

SEQ ID NO: 30345 - DNA, 570 bp, Chicken  19866894250087_1
tttgcgtatgtcttttagagactacacagctgtactcctgtctgaatgttgtatgtgcagttagcaaaagattttgtgctttaaaacactgaagtaatttttaatttggtatgataggcctggaagcaagagtgagggattgaatgactcttgtaaagtcatggagttgctgaagttggattcatcccattcttcttgcctttaggtgtcttcatcacaaaatcatcgtttaagtcaatgacatggggcagtgcctctaagaattgcccccaggatgtgtgccttcgtgccttaattttrtgtgcagttgcacaactgaactaatgagtaatagagtggaaacagacattgtggaatatgtactggaaagtcatacaacaaaagggtgttatgcaaaagctgtactctgaggggaggtgaagatggctgtgtgcatcaatttctgcttagggttttttatgctcttctggttatgcttttttcatcacatgtattaataagatttttagagtattctggactggttaagtagttaaaagagtcattgcatagccttttgtttcctgagga

SEQ ID NO: 30346 - DNA, 600 bp, Chicken  19866894250093_1
tgcagctgtctgcccagcatgtcctacatcaactgttggccttgaaagcaaaaaggaacagtctgccaagatagagtctactttcagagggaaaggtcacatttcttagtcagacacagagagaaagagacagctcctagagagaacaactagcttggtttctagtaataaccataaatccataagtactctcatttttttttccaaaatactatcaaaaattccagatcctgaaaaatcttgtttttcctcaagatgatttctgcaactattttcaatctaccagcattaacaaagttwcctttatcctattgttatcctggattgaaacctttgcaagtacaacctcttatctggttctgatgacatgaaaccttgtttttcagcagtttcacttacatcttagttcatacttaatcatgctgcaggtaaaaagaaacccttctttgattgggatcatatatatttacaagtatatgcacaaagagagcaagaggcgttttgtgtagctatccacagaagtcccttcagttgagatgactgttactcacagttctactttccatgcagatggacaggacaaagaaaatgtaaacattc

SEQ ID NO: 30347 - DNA, 600 bp, Chicken  19866894250096_1
tggcaggatccagctccacacctagccttaaggatgatcgtgaaggcatggaagccacccccagcatcccagaggctgttctgcccttggaaccccctccaaagcccagctccccagaggaccctgtgccccaagagcccgccaaggctgcagtgcccactcccaagcttgcagtgcccactgaggctgtagagcccattcctaaggctgtggcacctgttgccatcccgctgcctgctccctgcccaccgctctccaaactcatccaagtgcctcctctctcctcctcgccactgccaygcttggaggacacctcagggctcagcgaggccacgcggccggaggaacgtccatctgtcctgccggcctccaggaagctgctggagggtgagctgcctgtttccattgctgtgtgtgccctctgggggtcccaagaggtgtggggttgggcagtactgggatcagggtgggcatggaacacctggagttggactcctggagtggaacaccttggacgttggactcctggagtcccaaccgagtcccatttttgagaggtattcaatgggattgagcataatgggttcccattgtccatga

SEQ ID NO: 30348 - DNA, 600 bp, Chicken  19866894250097_1
ataagctttttttaacttaattcacagcattcctttggcaatatatgttaatagtacagtaggcaaaaacgctactgatgttttagctgatatacaaaatagttctctgaaacaaagagtattttctgaaaactaggtgacagcaagtgggaaatggtggtggtgttttctggtgcagtgatggtcctttagtaacattcttattaatagagaacattctatcaaacagattgatggaagtgtgaacatatgtaagaaggaagtttctatgcatctctacatatcatatctctaacataygttagttttatgtgtgctgcartttaaacagcacgtagcaatgacacagacagacatttacagtaagctctgcctttgtgttagacaccagggctgaacaacttttcccatttattaggactggagaagatgacaccttagttccatgttaaatctgggatcttactacagcgttacttcactagagctcacttgcgtctgactttacagaaacacaggtttgcataacccagaaagatctcagaaaggactcaggagcattttctcattctattcacacctcaccccactgcagtaacc

SEQ ID NO: 30349 - DNA, 600 bp, Chicken  19866894250097_2
cacagcattcctttggcaatatatgttaatagtacagtaggcaaaaacgctactgatgttttagctgatatacaaaatagttctctgaaacaaagagtattttctgaaaactaggtgacagcaagtgggaaatggtggtggtgttttctggtgcagtgatggtcctttagtaacattcttattaatagagaacattctatcaaacagattgatggaagtgtgaacatatgtaagaaggaagtttctatgcatctctacatatcatatctctaacataygttagttttatgtgtgctgcartttaaacagcacgtagcaatgacacagacagacatttacagtaagctctgcctttgtgttagacaccagggctgaacaacttttcccatttattaggactggagaagatgacaccttagttccatgttaaatctgggatcttactacagcgttacttcactagagctcacttgcgtctgactttacagaaacacaggtttgcataacccagaaagatctcagaaaggactcaggagcattttctcattctattcacacctcaccccactgcagtaaccggctgctgcagttcaagaggca

SEQ ID NO: 30350 - DNA, 600 bp, Chicken  19866894250098_1
ttctcatcaaagttggcgacgtacactaagaacttcctgaaccggcgcttctcgaacaaaccccattaagcctacaaacacagatgttctgtcagaactcacactgctaccaaacggctttttgaactgctgagcgtttcagccatcactcagtaaggcagatagcagcctcaggtactaagcaaggctctctgttccagcaggagagctccacgcagctccttccaactgcaggaaagcttggagagcagtttccaccagacctgctgaaatgcttccaaaaagacacctgtgtttggyatctaccgccaaagcaaatggtgctgagctctctcacagactcaccaaggagctagcaagcactrctggcatcaaaatcccaatgyaagattgcacaaggcaccattcatgtgttttaatcctctacaaattggagaagcaagacagggcttgctgaaacacaaaggcaaagacagcaccaaatgcacctccgtgctctgccagtttgagtctcttcagaaattactgacaaggcagcagtggggccaacctgaaggaacaactgattgcttcacagcagccacaraaatacctgtcgtg

SEQ ID NO: 30351 - DNA, 600 bp, Chicken  19866894250098_2
ttaagcctacaaacacagatgttctgtcagaactcacactgctaccaaacggctttttgaactgctgagcgtttcagccatcactcagtaaggcagatagcagcctcaggtactaagcaaggctctctgttccagcaggagagctccacgcagctccttccaactgcaggaaagcttggagagcagtttccaccagacctgctgaaatgcttccaaaaagacacctgtgtttggyatctaccgccaaagcaaatggtgctgagctctctcacagactcaccaaggagctagcaagcactrctggcatcaaaatcccaatgyaagattgcacaaggcaccattcatgtgttttaatcctctacaaattggagaagcaagacagggcttgctgaaacacaaaggcaaagacagcaccaaatgcacctccgtgctctgccagtttgagtctcttcagaaattactgacaaggcagcagtggggccaacctgaaggaacaactgattgcttcacagcagccacaraaatacctgtcgtgaagacrgctcccacatgcaaacaagcagcataaaggragctccatctgcaggagtcactctagca

SEQ ID NO: 30352 - DNA, 600 bp, Chicken  19866894250098_3
ttctgtcagaactcacactgctaccaaacggctttttgaactgctgagcgtttcagccatcactcagtaaggcagatagcagcctcaggtactaagcaaggctctctgttccagcaggagagctccacgcagctccttccaactgcaggaaagcttggagagcagtttccaccagacctgctgaaatgcttccaaaaagacacctgtgtttggyatctaccgccaaagcaaatggtgctgagctctctcacagactcaccaaggagctagcaagcactrctggcatcaaaatcccaatgyaagattgcacaaggcaccattcatgtgttttaatcctctacaaattggagaagcaagacagggcttgctgaaacacaaaggcaaagacagcaccaaatgcacctccgtgctctgccagtttgagtctcttcagaaattactgacaaggcagcagtggggccaacctgaaggaacaactgattgcttcacagcagccacaraaatacctgtcgtgaagacrgctcccacatgcaaacaagcagcataaaggragctccatctgcaggagtcactctagcacacaatggttctacatacatc

SEQ ID NO: 30353 - DNA, 600 bp, Chicken  19866894250098_4
cacctgtgtttggyatctaccgccaaagcaaatggtgctgagctctctcacagactcaccaaggagctagcaagcactrctggcatcaaaatcccaatgyaagattgcacaaggcaccattcatgtgttttaatcctctacaaattggagaagcaagacagggcttgctgaaacacaaaggcaaagacagcaccaaatgcacctccgtgctctgccagtttgagtctcttcagaaattactgacaaggcagcagtggggccaacctgaaggaacaactgattgcttcacagcagccacaraaatacctgtcgtgaagacrgctcccacatgcaaacaagcagcataaaggragctccatctgcaggagtcactctagcacacaatggttctacatacatcgtgcagctgaagctaatgggctgccctctgctagctcctaatgcgcatcaccgagctattatcaatgatctgtagttttacagtgaagggtgaagtccaagcagctgagaacaattaagactgagcatggtgccacatggacttgtcattctgttttgcctgctgacaaatgcaacgtttttctcatcatcccatccact

SEQ ID NO: 30354 - DNA, 600 bp, Chicken  19866894250098_5
cgccaaagcaaatggtgctgagctctctcacagactcaccaaggagctagcaagcactrctggcatcaaaatcccaatgyaagattgcacaaggcaccattcatgtgttttaatcctctacaaattggagaagcaagacagggcttgctgaaacacaaaggcaaagacagcaccaaatgcacctccgtgctctgccagtttgagtctcttcagaaattactgacaaggcagcagtggggccaacctgaaggaacaactgattgcttcacagcagccacaraaatacctgtcgtgaagacrgctcccacatgcaaacaagcagcataaaggragctccatctgcaggagtcactctagcacacaatggttctacatacatcgtgcagctgaagctaatgggctgccctctgctagctcctaatgcgcatcaccgagctattatcaatgatctgtagttttacagtgaagggtgaagtccaagcagctgagaacaattaagactgagcatggtgccacatggacttgtcattctgttttgcctgctgacaaatgcaacgtttttctcatcatcccatccactcaggaaccaacgttaaatat

SEQ ID NO: 30355 - DNA, 600 bp, Chicken  19866894250098_6
agactcaccaaggagctagcaagcactrctggcatcaaaatcccaatgyaagattgcacaaggcaccattcatgtgttttaatcctctacaaattggagaagcaagacagggcttgctgaaacacaaaggcaaagacagcaccaaatgcacctccgtgctctgccagtttgagtctcttcagaaattactgacaaggcagcagtggggccaacctgaaggaacaactgattgcttcacagcagccacaraaatacctgtcgtgaagacrgctcccacatgcaaacaagcagcataaaggragctccatctgcaggagtcactctagcacacaatggttctacatacatcgtgcagctgaagctaatgggctgccctctgctagctcctaatgcgcatcaccgagctattatcaatgatctgtagttttacagtgaagggtgaagtccaagcagctgagaacaattaagactgagcatggtgccacatggacttgtcattctgttttgcctgctgacaaatgcaacgtttttctcatcatcccatccactcaggaaccaacgttaaatatttacaggcagcataagccccaaatgtaacct

SEQ ID NO: 30356 - DNA, 414 bp, Chicken  19866894250098_7
agtctaagtagcgagtgacttctgtgtagagcaacatctttaccagctgacctgtaggagaggtttggcacaagtcaccagaagcagccttcggcgggcagctcttccattgcagtcacaaacactttgctgtgggctccatattgcacccacacagctcttacacctttgtgtaacagacagggagcggcagaggcttattattaggcagctgtaatgctttcttacaggcagttcacagcctcctcctcattactccagtttccatcagccctctgagtaaaagccaccctgcagcayrttaatccgctgcagtacgctgctgctctgctctctgtagtttatctgcactcagcatgacaaacaaggtcacatctttgggccgcagcagtttctcaccctcaccattcagct

SEQ ID NO: 30357 - DNA, 413 bp, Chicken  19866894250098_8
gtctaagtagcgagtgacttctgtgtagagcaacatctttaccagctgacctgtaggagaggtttggcacaagtcaccagaagcagccttcggcgggcagctcttccattgcagtcacaaacactttgctgtgggctccatattgcacccacacagctcttacacctttgtgtaacagacagggagcggcagaggcttattattaggcagctgtaatgctttcttacaggcagttcacagcctcctcctcattactccagtttccatcagccctctgagtaaaagccaccctgcagcayrttaatccgctgcagtacgctgctgctctgctctctgtagtttatctgcactcagcatgacaaacaaggtcacatctttgggccgcagcagtttctcaccctcaccattcagct

SEQ ID NO: 30358 - DNA, 585 bp, Chicken  19866894250099_1
tgtttgttagatagaggagacgtacatctgactgcagtataaacaagaattttaggacttaattcatttgcttatgctttggtgtcaagtaccatttgaaacaccttggggtatcctgcagggtctctaaccaccgcttccataggtcctatgtgatatctgccaaccccatgtgtatcttgggtgctttagggcatctcaaatggcactaagtgcttctgctcaggcatataaatgaagccctttgttttctggggcttggatagctgatacctgactatttttctgcgagcttacatraagtgctagtgctgagattagtgtatgcctcaattttcaaaataaattgctgaaatscycagtaagtacataggatgggatacaggatgtgttgtgcatgtgaaaaaaggggttgtcatttgggtgatggcctgatgctgtgtttgggagttggttcctttaggagaatagaacaaaatcccaatcctaaaaatgtcccctggctgcagctcttaaagtttctgctgagtctcggaagacagcatgtgggcaggatccagctgaagttcagcaaagccatgggga

SEQ ID NO: 30359 - DNA, 528 bp, Chicken  19866894250099_2
cttaattcatttgcttatgctttggtgtcaagtaccatttgaaacaccttggggtatcctgcagggtctctaaccaccgcttccataggtcctatgtgatatctgccaaccccatgtgtatcttgggtgctttagggcatctcaaatggcactaagtgcttctgctcaggcatataaatgaagccctttgttttctggggcttggatagctgatacctgactatttttctgcgagcttacatraagtgctagtgctgagattagtgtatgcctcaattttcaaaataaattgctgaaatscycagtaagtacataggatgggatacaggatgtgttgtgcatgtgaaaaaaggggttgtcatttgggtgatggcctgatgctgtgtttgggagttggttcctttaggagaatagaacaaaatcccaatcctaaaaatgtcccctggctgcagctcttaaagtttctgctgagtctcggaagacagcatgtgggcaggatccagctgaagttcagcaaagccatgggga

SEQ ID NO: 30360 - DNA, 526 bp, Chicken  19866894250099_3
taattcatttgcttatgctttggtgtcaagtaccatttgaaacaccttggggtatcctgcagggtctctaaccaccgcttccataggtcctatgtgatatctgccaaccccatgtgtatcttgggtgctttagggcatctcaaatggcactaagtgcttctgctcaggcatataaatgaagccctttgttttctggggcttggatagctgatacctgactatttttctgcgagcttacatraagtgctagtgctgagattagtgtatgcctcaattttcaaaataaattgctgaaatscycagtaagtacataggatgggatacaggatgtgttgtgcatgtgaaaaaaggggttgtcatttgggtgatggcctgatgctgtgtttgggagttggttcctttaggagaatagaacaaaatcccaatcctaaaaatgtcccctggctgcagctcttaaagtttctgctgagtctcggaagacagcatgtgggcaggatccagctgaagttcagcaaagccatgggga

SEQ ID NO: 30361 - DNA, 600 bp, Chicken  19866894250103_1
aacacttgatgactgattattgtggcagtgggcttttagcaagtacccagtattatttaaggagttatacgacacactgaaaatgttggcaaagtaaagctgactgcagtgaggctgctaattaacaatataatgtttcttaaaactttatggtttcttgtttaactgttttcctattaaaatacagtcaaacattttgtttgtgaataattcactctaaattattcaaatgttatagcctcatgcattttaagacagaaccaattacgtgaatggactggaattctctataatctggartactgttttttaatctaattctgcttctaagataattactcagaatcagtcactgtcaggattatagcagtaatcagattggagttagaagctgttgataatatctcagagtccaatttcttcccttaataaggagaccaaatcaattcagcaactgagaattacattaggtctgtactaaatatagtttatatccataggtctacagtaaatatagcttatatgcaccagttttcttttttttgttgttgtttgtttgtttctttttttggtatggatctgaggcttacattcattttg

SEQ ID NO: 30362 - DNA, 599 bp, Chicken  19866894250105_1
  misc_feature (1)..(77): n is any nucleotide
nnnnnnnnnnnnnnnnnnnnnnnnnnnnnnnnnnnnnnnnnnnnnnnnnnnnnnnnnnnnnnnnnnnnnnnnnnnnncatatatattacacattctgtgattctatgatgcaaatattttaccagatagactgatgattcttctatttaaagcaaattttggcactaagttggtaccaaatatgttatatagtatgaataaattctctcaatatttgcattagacgccagtgttcttattagagtgcatgagatttctttctttccaggactaaaaacagaaaatgtaaacatttgcatmattaatctcaacactgtaaacatattttttttctcaaaacatatgtaggtatagaatgccaccgtttattcccaggacttgttttaattctctgactgagttaaggctttcagccttgtgagttaccttaagtaaatgaactcacaagttacagtacttaataactgaattttcttttgtgatcaattgtgtcagttctttggtcaaaacaacagaaactgctcaaaataggacaacttaaaccacagctattctagccttgcctttccttcctttccatttttctacaattcctagta

SEQ ID NO: 30363 - DNA, 599 bp, Chicken  19866894250106_1
  misc_feature (1)..(56): n is any nucleotide
nnnnnnnnnnnnnnnnnnnnnnnnnnnnnnnnnnnnnnnnnnnnnnnnnnnnnnnnttcctacaagttatccatttcctactgagtccatatcagccagaaaaggaagagagagtttcctgaatctccaatgccagctcatgaggtgttgtacagttgccttgtaactgacagtcttgagagaagggcatacagtactcatattaaatcacacaagttctttaactcatgctgcagaaattcacgtatatgctcctttcattttcttaaatttgaaatgccacttctcaccactgcttayagagtaagaggtgaaatctttgtttctctctcaaagagagaaatagtttcagaagatgtttttactctgtgccacttcataatagcacaggaacrttttttcaacaagaagaccactgacattggccaatttgttattgccactcaggttgaaatatacactgtagacaataggtagataattaccaactccctttttttccacctgcgtcactgggaggatatacctgtgacacatcagtaatggaagtctcacagtgctgtataatgtcctatatgcacagcacgtctcagttaact

SEQ ID NO: 30364 - DNA, 600 bp, Chicken  19866894250106_2
ccagaaaaggaagagagagtttcctgaatctccaatgccagctcatgaggtgttgtacagttgccttgtaactgacagtcttgagagaagggcatacagtactcatattaaatcacacaagttctttaactcatgctgcagaaattcacgtatatgctcctttcattttcttaaatttgaaatgccacttctcaccactgcttayagagtaagaggtgaaatctttgtttctctctcaaagagagaaatagtttcagaagatgtttttactctgtgccacttcataatagcacaggaacrttttttcaacaagaagaccactgacattggccaatttgttattgccactcaggttgaaatatacactgtagacaataggtagataattaccaactccctttttttccacctgcgtcactgggaggatatacctgtgacacatcagtaatggaagtctcacagtgctgtataatgtcctatatgcacagcacgtctcagttaactgctctgaaaagaagccaggggaacagtctctatgattcagtaagagtggggctggtgccaggattctgaattatgggacctaaaagaagtcaatga

SEQ ID NO: 30365 - DNA, 518 bp, Chicken  19866894250106_3
gtgacacatcagtaatggaagtctcacagtgctgtataatgtcctatatgcacagcacgtctcagttaactgctctgaaaagaagccaggggaacagtctctatgattcagtaagagtggggctggtgccaggattctgaattatgggacctaaaagaagtcaatgaaagggtgaacaagagatgtatcagacggtggcaaaatgatgaaattgaatgatgagtgatgggtggatatcataggataagtcattcgaactggattacagcaaaaacctccttgttcaaatgcattaaaatwtggggttctcccatccataggaaaatgctcakaagccagcttttaagtayattatggtgtttttatgaatagaatatattgattacagtctctatgggagcaagcagaaaaagaattaaaaaatcagtacagaagagaatggagaaaagtgtctagaatctgctgtgcagacagaaaattacaacgtttcagccttctgtatcttgaagcctacttca

SEQ ID NO: 30366 - DNA, 486 bp, Chicken  19866894250106_4
tgtataatgtcctatatgcacagcacgtctcagttaactgctctgaaaagaagccaggggaacagtctctatgattcagtaagagtggggctggtgccaggattctgaattatgggacctaaaagaagtcaatgaaagggtgaacaagagatgtatcagacggtggcaaaatgatgaaattgaatgatgagtgatgggtggatatcataggataagtcattcgaactggattacagcaaaaacctccttgttcaaatgcattaaaatwtggggttctcccatccataggaaaatgctcakaagccagcttttaagtayattatggtgtttttatgaatagaatatattgattacagtctctatgggagcaagcagaaaaagaattaaaaaatcagtacagaagagaatggagaaaagtgtctagaatctgctgtgcagacagaaaattacaacgtttcagccttctgtatcttgaagcctacttca

SEQ ID NO: 30367 - DNA, 468 bp, Chicken  19866894250106_5
cacagcacgtctcagttaactgctctgaaaagaagccaggggaacagtctctatgattcagtaagagtggggctggtgccaggattctgaattatgggacctaaaagaagtcaatgaaagggtgaacaagagatgtatcagacggtggcaaaatgatgaaattgaatgatgagtgatgggtggatatcataggataagtcattcgaactggattacagcaaaaacctccttgttcaaatgcattaaaatwtggggttctcccatccataggaaaatgctcakaagccagcttttaagtayattatggtgtttttatgaatagaatatattgattacagtctctatgggagcaagcagaaaaagaattaaaaaatcagtacagaagagaatggagaaaagtgtctagaatctgctgtgcagacagaaaattacaacgtttcagccttctgtatcttgaagcctacttca

SEQ ID NO: 30368 - DNA, 600 bp, Chicken  19866894250115_1
gtcttctccaagctaatcaagaccatcttcctcaacctttcttcatagaagaggtgttccaacccttggatcatcttcctggtcctcctcttgtcttattcctacagctctgcatccttcctgtgctgggggcccgaggcctgaacacagtactccagctagggtctcacaagggcagggtagaaggggaaaatccccctccctctccctgctggccacccttctgttgatgcagcccaggatactgttgggcttctgggctgcaagagcacactgctgattcatgttcaacttttcatycgcccaaattttcaacccaagtttttctctgcagagctgctctcagtgagttcttctcccagtctgtactcatatctgggattgccttaacccaagtgcaacaccttgcactcggccttgttaaacctcattagattctcatgtgcccactttgtgagcctgtctaggtccctttggatggcatccctaccttccattttgtcaactgcaacactcagcttcatctcatttcactccagtctctgtagaaaactagtcttctcctgtatccagtcaaaaattgcaatgtgggggagccag

SEQ ID NO: 30369 - DNA, 599 bp, Chicken  19866894250118_1
  misc_feature (1)..(96): n is any nucleotide
nnnnnnnnnnnnnnnnnnnnnnnnnnnnnnnnnnnnnnnnnnnnnnnnnnnnnnnnnnnnnnnnnnnnnnnnnnnnnnnnnnnnnnnnnnnnnnnntggcagcggtgcttcattagttcttgtgctcactgtgttgtgctcttgtgctctgaaaatgctagaaccaaaagaaattggaaaaggagggagggaatcaaggctaagctctgtctaatttattatatttatgtttggtttttttgttgttgctgtttttacatgttctggcatgagggcagatcgcttttctggaactgaatygggactaaatttttaagtaggtggacatgtgatgttcatgaggcaaagtagcattacagagggctccagcttttaatttcacgtgtaatcctcttggcagagatagcaggagctcactcacacctctgtgcatgtgtatgagactgtgtgtgtctgttccagcagcatcctggacctctctgcagtggcaagcacaccacagcctggaaagcattttaaagcaaaataaagtttttgctgtttcttagcttaaagtaatctgtaggtgaacaaaaaatggtgacttttttgtaaccctg

SEQ ID NO: 30370 - DNA, 600 bp, Chicken  19866894250119_1
tcctaagaagataatattcttaaagagttattttgatatctaaagcataaaaatcattggctgttcatagtccttgttttcttctccctgttgagtggcatatttagataaatatgttggacttcggccagattgaaatcagaatgtgatactgcatatgcctctgacctgccatctagatatgtcctcaatcaagagcctgtcttcctcaactcctgagcagagccagactctgaattcataagaaatcataactatttttctggttttgtgggctttccagacagatactgtgaatayatgaaattacctttttcttaaatagttctcttaataactcttgtttctggtactatttgtagatagctcacaatacatttttgtagacattgtagatttgcatttaaaccatcctaaatcctaggtacttacaataaagggcactatttgttaaataaataaataaataaatctgccatcttttcttaaattaaatatatatgcattaaaatatgcttttaaaactataggaggaatgaaaaaataataattttctctttattcattttaatccactctgaataaatgctatgtagttag

SEQ ID NO: 30371 - DNA, 600 bp, Chicken  19866894250122_1
cagactgcacttctggcttcatggcagcataggaactcagtttgtcagggaataaagacgggccagcagcccccaaagtggggtcagacagtccctttttatctctgcacttaagaaggagcagcacaggctgcacatctggaaaacaaaggatctaccactatgcaaaagatgcgttctttgtcagtaacacaacgctgagctacgtctgaatggagtccctgaactcctcctatctgtggagctgcccttgcactcagcggggcacctcgcacagctccccaacctcacccctcccartaccacccaggcctcattccaatggccatcatgacacccaagtgtgccgtgagcgagcctgcagcctttctcctggctgagagatggcatcgtgacttcaggaagtcgtcaatatcagcaaataagagaacgataatgagatttcgtaacatttcacagtaaaaaaaaaaccacaactgctttgaaaacacgccgtcccaaaagcatctcagtagtagggtcgccgtgggttgttctgcagggaataacaaaaggaaaactaatcagagtcgccgccttcacagaacaatgagcatttga

SEQ ID NO: 30372 - DNA, 599 bp, Chicken  19866894250127_1
  misc_feature (1)..(88): n is any nucleotide
nnnnnnnnnnnnnnnnnnnnnnnnnnnnnnnnnnnnnnnnnnnnnnnnnnnnnnnnnnnnnnnnnnnnnnnnnnnnnnnnnnnnnnnnctccctttctttctccctttctttctccctttctttctccctttctttctccctttctttctccctttctttctcccgcaaggcataaactgttgtagctgttaggagattgtcaggtggaaatgagcagcactacaagaacaccaaatttttatagcgtttaaggctttgcactgctgtgtacgctcctgcacgtcctcggcactcgttckgcaaatgcagcagagcagcaggagatgcatctggtattgcctttcagcagcatcttgggaatttgcaaagccaccgaaaataatcgggtgttgtttctgccatcccgtggcagtatggatgcagtgcaagaggctgatcgcctgcagcgtggtgctgggctcagccttgccctgrtgcttgttctgtctgaagcataccgacttagttcgttggtatttcagtaggagtaattcatctttacttctgctttaaaaagagtacttttaatggaatttctggagggaaatcccctgtgttt

SEQ ID NO: 30373 - DNA, 600 bp, Chicken  19866894250127_2
aactgttgtagctgttaggagattgtcaggtggaaatgagcagcactacaagaacaccaaatttttatagcgtttaaggctttgcactgctgtgtacgctcctgcacgtcctcggcactcgttckgcaaatgcagcagagcagcaggagatgcatctggtattgcctttcagcagcatcttgggaatttgcaaagccaccgaaaataatcgggtgttgtttctgccatcccgtggcagtatggatgcagtgcaagaggctgatcgcctgcagcgtggtgctgggctcagccttgccctgrtgcttgttctgtctgaagcataccgacttagttcgttggtatttcagtaggagtaattcatctttacttctgctttaaaaagagtacttttaatggaatttctggagggaaatcccctgtgtttttatatccccagacaagacgacattgtctctactgttttcattcctcttcctctgaacagccagcttctgtgcatggtcttcatgaccgctagataaaatttgaatttttactcaagtctagtgtgtaatggcaccatatcttaaatcagacctaagggcttaaatttattaacat

SEQ ID NO: 30374 - DNA, 599 bp, Chicken  19866894250132_1
  misc_feature (1)..(53): n is any nucleotide
nnnnnnnnnnnnnnnnnnnnnnnnnnnnnnnnnnnnnnnnnnnnnnnnnnnnncagataaaacacatggcagcctttggtaacctggcattacgtgtactggtgctgcaggagtacagagcaggcatttagcttagctcccacttgcagaagttggctgctgcccttggagatcttcatgtttcagtcctggggtggttggtgtgtgctgctctgactgcccataaagctgttgctgctctctgcagagcatgtacagagcctttccctggcttgatgtgcctcctctggtcactgctgyctgtgtgggaatcgcagaattgtaggggttggaagggtcctctagagatcaagtccaaatcccttgccaaagcaggctccctacagcaggaagggcagggtagaagtggtatggccaagggcatcacagggctgccaaaggatgctgacaatatttccctgaaatttttttttgtgtacacaaatgggttccagcactgctgccactgcagtaagctgggctggggcataccttgttgaaagaagagcatggatcctaagaaagagtggtgatgcattggcacagctgccctgagaggt

SEQ ID NO: 30375 - DNA, 600 bp, Chicken  19866894250135_1
tttttttttatgataagggtggtgaagcactggaacaggttgttcagagaggtggtgaatgtcccatccttggagacattcaaaggtcaggctggatggagctctgaacctctagctgtaggtgtctctgttcattgcagaggagtcagaccagatagcctttaagggtcccttccaactcaaacaattctgtgattccatgaaagctacttgcttgagctgtttccaaggggttgggaccccaaagtgctgctgttctacttgaagctacaaacccacttctgaagggcattttcaccragaaaataatgactgttcttgagctgggatttgggagggggtggagccagagatgctgccagccacgggtttggattgcccagtttctgtctgcctttggtttatcatcttacaccaacatgagtgtcacattaaggacagcctcaggcagcagagctttgcttctgatggctgcagtgtgatccccatcttgctggtaacacatcttcagagctgttaggctgtgctatggcaattacagatgtaacgagctacggaagtgctgtaacccctgtgtcaacccctatgtcaccggagaga

SEQ ID NO: 30376 - DNA, 433 bp, Chicken  19866894250135_2
tttgggagggggtggagccagagatgctgccagccacgggtttggattgcccagtttctgtctgcctttggtttatcatcttacaccaacatgagtgtcacattaaggacagcctcaggcagcagagctttgcttctgatggctgcagtgtgatccccatcttgctggtaacacatcttcagagctgttaggctgtgctatggcaattacagatgtaacgagctacggaagtgctgtaacccctgtgtcaacccctatgtcaccggagagaatgcgcaaggctcacatagaagggatccytgcaagcattagcatttccatggggttgctcccattcttaacttcgtgcatgcagacattagggtctggcaagactgagatttcagaaacaaaatactgaaaagaatacagaagagaaggagatataagaata

SEQ ID NO: 30377 - DNA, 600 bp, Chicken  19866894250151_1
agatattcgccttccctgggaaggttttataaacaaggaggatggttacattcctaaaaacaagatggtttagtaaacatgagtcccacctaaatcctattctgcacttatggcacactcctgctggctcactgaccacatgaagtgaattacagaactgcagataatagtgtctattaaagggagttgcccaacagcagcttcttgtttgtacagtgcttatcaaagcttaaacttcataattaagattacttgaagctgtggaatataattatgatagtgaattgctggtgataaagyggagtatcctgacagctgcttcagagcctgtgcctgcttaggcttattttggtagaaatacagctgtcttaaacttgccctggctttgtgtgtatatttgtgtacatacttaacccacattctcattcagagtrttccagattctcttggctatcttccccttctataaatgtgaaatatgcatctctgttagctggagttgctagtgttgtgtgaaacaggctgccgtttaaagagctgtgtaggcttgctgagagccatgtgagcatgactatacatctttgcacctagcacagatac

SEQ ID NO: 30378 - DNA, 600 bp, Chicken  19866894250151_2
accacatgaagtgaattacagaactgcagataatagtgtctattaaagggagttgcccaacagcagcttcttgtttgtacagtgcttatcaaagcttaaacttcataattaagattacttgaagctgtggaatataattatgatagtgaattgctggtgataaagyggagtatcctgacagctgcttcagagcctgtgcctgcttaggcttattttggtagaaatacagctgtcttaaacttgccctggctttgtgtgtatatttgtgtacatacttaacccacattctcattcagagtrttccagattctcttggctatcttccccttctataaatgtgaaatatgcatctctgttagctggagttgctagtgttgtgtgaaacaggctgccgtttaaagagctgtgtaggcttgctgagagccatgtgagcatgactatacatctttgcacctagcacagatactgtgtgccattgattgtttatatacgtgtgtgagttgtcatgattaccagaaatacaggaggaagaactagatgatagttagaatgcctctactgaggaattattttgaatacatgctatatatctgttacctt

SEQ ID NO: 30379 - DNA, 600 bp, Chicken  19866894250151_3
actatacatctttgcacctagcacagatactgtgtgccattgattgtttatatacgtgtgtgagttgtcatgattaccagaaatacaggaggaagaactagatgatagttagaatgcctctactgaggaattattttgaatacatgctatatatctgttacctttccataaatagaatcttataatacagttgctagggctcaaggagagtgctgtaatacctgaccatggtagcaggagcctgcaaacatgtggctgtttctggcttaggctcgttctgagggctaagcctgtgttgtktgaaggacgattggctttattgaggtctgtctgttttgtcccatcctagcattgaagaatgtcgcaacataatcatgcagtttggagtccgggaggtgacggctgcccaggttgccagggttctggggatgatggctcgaacgcattcggggttgacggatggtattccattacaggtgagtgctgtacaggatggcttgtttgtattttaataagtggaaattgggaaatgaaaacttaagaatgtaagcttttattatgcaatacttatacttctgaaggttctatcgtaaagttctg

SEQ ID NO: 30380 - DNA, 600 bp, Chicken  19866894250151_4
aagcttttattatgcaatacttatacttctgaaggttctatcgtaaagttctgtaataccttcttgagtgaaggattttttagcagcatgcaagtggtatcattactggtctgaacctctgctttccttcgtagtgagaagttctatggctggtgggctttgagagttctctatttctagccaatgcttgatttggtatgtttaacttgcagtctatttcggctcctggcagtggaatttggagtgatgggaaagataaaagtgatggagcacaagcccatacctggaatgtggaggtcytaattgatgttcttaaagagctggtaagttttctgagcaccttgatcttcagtgctgaacagttcaaagaaaggcatgaatataaagctttttgagttccagcagcctgaatggctttgaatctgaataatgtatttgtgctgctgtgcttcagtgatgggtttttcccattgaaggagagtattttgaagaactgtggtgaataaaaactacctgaatggctaacgtgggtgcggcttgtgattcattccatgctgctcattcccgtgtgttgttgtatgtctgaagggttttcagttt

SEQ ID NO: 30381 - DNA, 600 bp, Chicken  19866894250152_1
cactcctccaagttggctggggtttccctgacatgggaggacgctgggggtgcctggccatgcaggatacgcagaacagccctagcagagttttactgccatgtaacagaactgcatagcaactgccagcctgcttgctccccagatacagcaaagattttcagcatccctgctcccagtgggcaaaatgctccacctagtcccatcccacagccatagcagtgctccctgcatcaccaggagctgctgtgcagcctggaggtggcgtgaatccctcctctgccgcaggagccggacccracgctgccccgcccccagagcagccatgccagggtcccctacagcctgccaagcccaacgcctgctgatcaaagcgtgccagcccttccctgctgtgccattcccgctgctaggcagctagaaacctcccagttccccatcctttgtctgttcccagttctccatccacagctgtcccgctgccagcattgtcttcagccagagccccctgaggcattcccaggcagcaaacccatccccactcaacccgtgctgtggggccaggaagggcaagggctgcacagggcagtgggtaaggaa

SEQ ID NO: 30382 - DNA, 600 bp, Chicken  19866894250156_1
tttctcctgcagctccaattataatgcaatattaacgaccctacaacgtccctgttgtacctcagcctttatccactgacattttcttagcttgaaataagcagttaatgtgttgcacaacaaaataatggccacacacagccacagggactcgaaaaggagctccaggcgtctaaggacacctccacatgtgatgctcgccccctgtgacccaacgtagcccaactcttaatttaaatggaaatcaaatccagtcacatttcgacctgcctgatgccacagaagtgcactgcctgcttygtggcttctctgtaactctgtgtgcctcacagagagctagggctctgcagcaacctgtgatgctccataagttaagcttcactggaggtacacaaagtggcttgcactccagtgcccactagagggatttacttgacctcaatcacagcaaaaaacagtaaggaaacaaaggttctaaaatacccatttccctgtaaggttccccatgaacctcaagacacagctgtcttctggtggcaaggcagaagggcacattggggttggggtcacaacaaaagcacagggtgactcctatgggat

SEQ ID NO: 30383 - DNA, 600 bp, Chicken  19866894250157_1
aaacaccgtctcttttatgaaaatgccaggagatcgtatcatcctgactgtattgagatagcgcacatgatttaaatggagattttaaattaagaaaggcaatacgctgttccctggctcggcacagacggatagattacagaacgtgaaggggttgggcgggagagccccactcgccccctgcaagaaggcaaaaagaaggcagtgatctcagtgtacagacctgggctgtgttcctccccctgaggcccctaaccgtgcacacttctcagagccccacgcttcgtgggcttcccaggygtcctattgaggcaccgaggtccctctccccttgcgggaaagtttcacaggtgcttcaaagggacaatggagctcttcagacctaatccaggaagacttagacatgtataggaggcttgagggggatatgagatcttaatattaaaatgattagtcgaaaaggaggatcattctgtgtgtgcgtttcagctgtgagacgctctaaattaaaacggtatcctgagagcagtgccggtgggatctgatgagtaaatgcactctctgtcttgctgttctgctgcctcagcccataaaacattt

SEQ ID NO: 30384 - DNA, 600 bp, Chicken  19866894250157_2
gcctaccacgagacaaaggccccagagctgcactgcgcagcgaaaaactccggagtcagcaacttctattgattaaaaactaacctttaaagtaactctccgagtgtgtggttagcatttaaatttaaacatgtcatgagttgatttgtgttactgaataccgactcagaaggagttacattcacatcagattttttttttctaattcccttaagcagctaaagtatttcatgaaatgtcaatagggcaggggaggaaaaaaaaggtgttttggagggaggggacttgcacggggccgcrccgtttcttttcccatgcaaatagtcaccccaaaaagaaaagtgtggggagcgaaacacaataattaggcctttgtctaactttcccaagtgccagagaaagacagattaattaaatatacaacagtgttggtttttggagtgggggtctctctcgctgtgtaggtcataaattaggcagaataaatacttcaatgtgtgtgcagcagggctgctacgtcagagcggctggcgggcagtgggagggcgcagcgcggctcttgctaatgatagtcacgtctggggctgtctggttgctgct

SEQ ID NO: 30385 - DNA, 600 bp, Chicken  19866894250159_1
ttgcaattatttcatggctgtttcctctaaaaatatttttaaattgtttcatatcccttgatggctacacaaatgaaacaactatgaacactgaagtctttaccaccagaagatttagaagataaaaagatttctttacttttctaagtatgatatgagcaattaagaaaataagttggaaatgaatcgcagaacagttttaagtgaacatgagatctacatgggaacaacttatgcagatgagttgttccattcactttgagtctcatttgcatggatagctggaatgaaagaaagcawtgctaactcaaacttcgggacatgcaaatattagagatgatttggcatgttgttgtggaaaaggttgaatttgctgtctgttatggttcttcctcgacatgaaatacataaatataagtatttgacacatatctatgaatgtccaattgcatgtcccactcacagtgcatcccggagatacactgtcagcctcacgctgacatatcccacagtgtgtggctttcagccatggatctttgatactgtaatttaataaagtctgtaaaaaagaaaaaaagaaaataaaacaaaacctggaaa

SEQ ID NO: 30386 - DNA, 600 bp, Chicken  19866894250162_1
cacatcacctttctcccaaggtctcttgggccagaattacagaacaaggaaggacagagaaagagaggagattttcctctccttttttcttctccaaattcaagaacctcagaaatgctgaccccttccatcactactgctaggttaattataaatgagtatatctttagtgcaaatgaaatagatatgctgtcatctaacattattttatttcagaatactgaaaaacagaagcactcaccatcagctctggtacctaagatagtcactttcccacagttcaagaccttgaggggaagyaccaagtttgcagaattgcctgtacttcataaacaactcttaaaacaggaatgcatacaaacagtgtggaaggtgttggaagacacaacactcagtgcaaaacagtagtccctaaactcttctactacctgaataaatgcatttttaagacttaacagtttaactaagtggcagcctaatgattgattagaaagtgcttggtcaaacttcatgattacaacaataaagttttctaatcacgctgcaaaggcaacaaaaaacaccaaacaaaaattcatctacaatctagcttaactgcaa

SEQ ID NO: 30387 - DNA, 600 bp, Chicken  19866894250168_1
aaaatacagactggagatggatatcagggctgaatatgatggatgatgtgggaagccatggatgtaaaattataaggttgccattacagtaagcattattaatttaaaacgtttggcaatctcctcttttcttttgtttgtgagttttgtttattgttcctaccatgatgtatttgtgtggctttgtcttcaggttaattcccttcaaaataccttttcataattatcttaatgtttttagatgatattttaagacaattaatagaaatcattatgtcgctaccagagactttggcacgracaaggaagagcaatgggtcgatggtgtgtgtctgtagcataagaagagcccttcccagtttaatttctctttcgtagttcatgattactcttccagtcagtagctccactgcaaaccagtgtctctgtactcatgaagagaagatttttctacctacagagcttctccttcctcactctcttttcaaaagctttgtaatttctaaagccttctgcctgctcttccttttgcttcactgcagaattagttattattttcattagctgcatgaaaacatgccagacgctcatcactgtgca

SEQ ID NO: 30388 - DNA, 600 bp, Chicken  19866894250168_2
tttctacctacagagcttctccttcctcactctcttttcaaaagctttgtaatttctaaagccttctgcctgctcttccttttgcttcactgcagaattagttattattttcattagctgcatgaaaacatgccagacgctcatcactgtgcacgaggtaaacatattctgaatgcttttgacataattagtcacactatttggtaactgtgaacaaaacaaacaataaacaactctgtctatcataaatatgcaacccaccatttctcccaatgttaaaattcttacctctgcagacarcctcctctccgagtgscgcagacaattgatgggccttgcaaaacgtctgtgagggtttcataacattcctagcgtgttgcaaatgctctttccccctcaggcctgcggggctttgaaagagtgagtatggttacacaaacaagtcagggtgaggaaagccagggtgtggattcgcagtgcgtcagctgccccacggtaactgtccatcckcctgccctcaccctcctgtgtgcagcagtgaattggagcgagttccttggcatttaggctggaacatgagaatttacacgggcagttacc

SEQ ID NO: 30389 - DNA, 600 bp, Chicken  19866894250168_3
ttctccttcctcactctcttttcaaaagctttgtaatttctaaagccttctgcctgctcttccttttgcttcactgcagaattagttattattttcattagctgcatgaaaacatgccagacgctcatcactgtgcacgaggtaaacatattctgaatgcttttgacataattagtcacactatttggtaactgtgaacaaaacaaacaataaacaactctgtctatcataaatatgcaacccaccatttctcccaatgttaaaattcttacctctgcagacarcctcctctccgagtgscgcagacaattgatgggccttgcaaaacgtctgtgagggtttcataacattcctagcgtgttgcaaatgctctttccccctcaggcctgcggggctttgaaagagtgagtatggttacacaaacaagtcagggtgaggaaagccagggtgtggattcgcagtgcgtcagctgccccacggtaactgtccatcckcctgccctcaccctcctgtgtgcagcagtgaattggagcgagttccttggcatttaggctggaacatgagaatttacacgggcagttaccacagagttcacaccgt

SEQ ID NO: 30390 - DNA, 600 bp, Chicken  19866894250168_4
tgaacaaaacaaacaataaacaactctgtctatcataaatatgcaacccaccatttctcccaatgttaaaattcttacctctgcagacarcctcctctccgagtgscgcagacaattgatgggccttgcaaaacgtctgtgagggtttcataacattcctagcgtgttgcaaatgctctttccccctcaggcctgcggggctttgaaagagtgagtatggttacacaaacaagtcagggtgaggaaagccagggtgtggattcgcagtgcgtcagctgccccacggtaactgtccatcckcctgccctcaccctcctgtgtgcagcagtgaattggagcgagttccttggcatttaggctggaacatgagaatttacacgggcagttaccacagagttcacaccgtggcttgccccatggcagcttgcttgcgtgcccatgccttgaggcagaaagtgtactgctgcactgtgttggaaaactgcttgctgcctaaaattaaagcttctggcagagaatggggaactcagccatcagtagtttgctgggagaagaarcctgaaatcgtgtacrcttttaaacatctgctatcccatttaa

SEQ ID NO: 30391 - DNA, 600 bp, Chicken  19866894250168_5
ggattcgcagtgcgtcagctgccccacggtaactgtccatcckcctgccctcaccctcctgtgtgcagcagtgaattggagcgagttccttggcatttaggctggaacatgagaatttacacgggcagttaccacagagttcacaccgtggcttgccccatggcagcttgcttgcgtgcccatgccttgaggcagaaagtgtactgctgcactgtgttggaaaactgcttgctgcctaaaattaaagcttctggcagagaatggggaactcagccatcagtagtttgctgggagaagaarcctgaaatcgtgtacrcttttaaacatctgctatcccatttaaaaatctgaggtgccactgttggctatgcattattttcaagttgaagcctctcctgctgcttttgtctgctccagtttttggcctgaaacagtattctttaaaataaaggtgtccgaatgaaacaatatcactcctgaaaagtctgaaaagacactctgaaaagagcagctccctggctgcccagtggtggacttgtcagcaccctgaggtctaatgatgtattgggatctcatagcccctactctggccttgagctg

SEQ ID NO: 30392 - DNA, 600 bp, Chicken  19866894250168_6
agctgccccacggtaactgtccatcckcctgccctcaccctcctgtgtgcagcagtgaattggagcgagttccttggcatttaggctggaacatgagaatttacacgggcagttaccacagagttcacaccgtggcttgccccatggcagcttgcttgcgtgcccatgccttgaggcagaaagtgtactgctgcactgtgttggaaaactgcttgctgcctaaaattaaagcttctggcagagaatggggaactcagccatcagtagtttgctgggagaagaarcctgaaatcgtgtacrcttttaaacatctgctatcccatttaaaaatctgaggtgccactgttggctatgcattattttcaagttgaagcctctcctgctgcttttgtctgctccagtttttggcctgaaacagtattctttaaaataaaggtgtccgaatgaaacaatatcactcctgaaaagtctgaaaagacactctgaaaagagcagctccctggctgcccagtggtggacttgtcagcaccctgaggtctaatgatgtattgggatctcatagcccctactctggccttgagctgctcattttggccccac

SEQ ID NO: 30393 - DNA, 599 bp, Chicken  19866894250171_1
  misc_feature (1)..(122): n is any nucleotide
nnnnnnnnnnnnnnnnnnnnnnnnnnnnnnnnnnnnnnnnnnnnnnnnnnnnnnnnnnnnnnnnnnnnnnnnnnnnnnnnnnnnnnnnnnnnnnnnnnnnnnnnnnnnnnnnnnnnnnnnnncccagagctgtagaaaacctttcacacaaggggctgagagatgcggtgcgatccttcaccccatgctcaaacagccacagcacacagagaccgtttgtatgagcaaacactgcttattagaaacacagactgcagactggggcccaaaataattcactataattacaaggcagcattwtaaactggactactacagaaaggtgatgaacacagtaagtaccagaagtatgcaaagactttacctggaagaacraagcctcacgaactcctcagcccagcatcgcagtggtgctcgggataacacactccaygctcactttyttcctggaaggtaagttttggttctgagcacataaacagctccacgggctccaaggaatgtattttacagctcccaaagcctgataaccccctccctcaccacagtccaacatgcctggctatggtctaagtccaatttctgttgcaggtcctctg

SEQ ID NO: 30394 - DNA, 599 bp, Chicken  19866894250171_2
  misc_feature (1)..(47): n is any nucleotide
nnnnnnnnnnnnnnnnnnnnnnnnnnnnnnnnnnnnnnnnnnnnnnncccagagctgtagaaaacctttcacacaaggggctgagagatgcggtgcgatccttcaccccatgctcaaacagccacagcacacagagaccgtttgtatgagcaaacactgcttattagaaacacagactgcagactggggcccaaaataattcactataattacaaggcagcattwtaaactggactactacagaaaggtgatgaacacagtaagtaccagaagtatgcaaagactttacctggaagaacraagcctcacgaactcctcagcccagcatcgcagtggtgctcgggataacacactccaygctcactttyttcctggaaggtaagttttggttctgagcacataaacagctccacgggctccaaggaatgtattttacagctcccaaagcctgataaccccctccctcaccacagtccaacatgcctggctatggtctaagtccaatttctgttgcaggtcctctgccattttattgctgcaataaagtgaggggaacgcagagagacaccaacgtgccagygtgtggatggcaccccgtg

SEQ ID NO: 30395 - DNA, 600 bp, Chicken  19866894250171_3
agaaaacctttcacacaaggggctgagagatgcggtgcgatccttcaccccatgctcaaacagccacagcacacagagaccgtttgtatgagcaaacactgcttattagaaacacagactgcagactggggcccaaaataattcactataattacaaggcagcattwtaaactggactactacagaaaggtgatgaacacagtaagtaccagaagtatgcaaagactttacctggaagaacraagcctcacgaactcctcagcccagcatcgcagtggtgctcgggataacacactccaygctcactttyttcctggaaggtaagttttggttctgagcacataaacagctccacgggctccaaggaatgtattttacagctcccaaagcctgataaccccctccctcaccacagtccaacatgcctggctatggtctaagtccaatttctgttgcaggtcctctgccattttattgctgcaataaagtgaggggaacgcagagagacaccaacgtgccagygtgtggatggcaccccgtgtgcacaacaccrgagctgggccaagttttgcacacccgagattatctgattctcacgaa

SEQ ID NO: 30396 - DNA, 600 bp, Chicken  19866894250171_4
tcacacaaggggctgagagatgcggtgcgatccttcaccccatgctcaaacagccacagcacacagagaccgtttgtatgagcaaacactgcttattagaaacacagactgcagactggggcccaaaataattcactataattacaaggcagcattwtaaactggactactacagaaaggtgatgaacacagtaagtaccagaagtatgcaaagactttacctggaagaacraagcctcacgaactcctcagcccagcatcgcagtggtgctcgggataacacactccaygctcactttyttcctggaaggtaagttttggttctgagcacataaacagctccacgggctccaaggaatgtattttacagctcccaaagcctgataaccccctccctcaccacagtccaacatgcctggctatggtctaagtccaatttctgttgcaggtcctctgccattttattgctgcaataaagtgaggggaacgcagagagacaccaacgtgccagygtgtggatggcaccccgtgtgcacaacaccrgagctgggccaagttttgcacacccgagattatctgattctcacgaagtcccccaag

SEQ ID NO: 30397 - DNA, 600 bp, Chicken  19866894250171_5
agactttacctggaagaacraagcctcacgaactcctcagcccagcatcgcagtggtgctcgggataacacactccaygctcactttyttcctggaaggtaagttttggttctgagcacataaacagctccacgggctccaaggaatgtattttacagctcccaaagcctgataaccccctccctcaccacagtccaacatgcctggctatggtctaagtccaatttctgttgcaggtcctctgccattttattgctgcaataaagtgaggggaacgcagagagacaccaacgtgccagygtgtggatggcaccccgtgtgcacaacaccrgagctgggccaagttttgcacacccgagattatctgattctcacgaagtcccccaaggcagcactgcccagccttctgaccccgcagaggagcagcacaaagccccgcaccgcgcgggtcacactggggacaaaacgtttctgcccttcgcccgcgtgagcccccacatctccacacggggggctgcagcccggcacagaggagctcatctccccctcacagctcagccagcactaactgacgagctacctagctgacagagccttcct

SEQ ID NO: 30398 - DNA, 600 bp, Chicken  19866894250171_6
actcctcagcccagcatcgcagtggtgctcgggataacacactccaygctcactttyttcctggaaggtaagttttggttctgagcacataaacagctccacgggctccaaggaatgtattttacagctcccaaagcctgataaccccctccctcaccacagtccaacatgcctggctatggtctaagtccaatttctgttgcaggtcctctgccattttattgctgcaataaagtgaggggaacgcagagagacaccaacgtgccagygtgtggatggcaccccgtgtgcacaacaccrgagctgggccaagttttgcacacccgagattatctgattctcacgaagtcccccaaggcagcactgcccagccttctgaccccgcagaggagcagcacaaagccccgcaccgcgcgggtcacactggggacaaaacgtttctgcccttcgcccgcgtgagcccccacatctccacacggggggctgcagcccggcacagaggagctcatctccccctcacagctcagccagcactaactgacgagctacctagctgacagagccttcctgttacggccctaaggaaaggtttacctataa

SEQ ID NO: 30399 - DNA, 600 bp, Chicken  19866894250172_1
cctagagtcttatcacaataaatacctcaggaagcaggctttgagccagaaaacaaggaaggattcatacagagaggaaccttacaaggttcagcaaggccaagtgtagggtcctgtacatggagaatggatcatgaatcaatattcatgaatcaatacaggttggagtttgacctgctagaaaggagatctgcagaaaaggaccttgggatcctggttaacaacaggttggctgtgagccaacagcgtgcctttgtagctcagaaggtcaatgtatcctgggatgcattaaaaagatartgatcagcagggcaagggaggtgatcctccccctctattctgccctggtgaggccacatctggagtgctatgtccagttcttgtctccccacttcatgaaaatcaaggaaccaccagagagagtttagaggagagctgcaaagatgattaggggcctgaagtgtttctcttatgaggaaaggctgagagatctgggactggtcaagctggaaatgatagaactgaggaaggatcttatcaatccttataaatatctaaaaggttttctaaaggtcaaatgtatggggacagacacttctg

SEQ ID NO: 30400 - DNA, 600 bp, Chicken  19866894250174_1
aggagaagtcttctgctagtggtaaatgacttgcttcagtgggatttgctgtttactggcattaaatttaggcaaggagtgggtgatgaaggaagaaaataatcacactttcttctgttttggtggttacagggtcttcctttttctacagtgtgtttacaggcaagatcttacaagactccctcatcttgtctaaaaagatcaaagaaccatcattcattcagaggaatgagaagctactttgtgctccacaacacctttaagcctatggcttttctccaagggaggtaatactctggygtttctagtgaaacaccatggctgcctgttcacaggaaactgatttgtactgcttcccccccagtacttcmcaaatgcgatccacaccatacatgtaagaacaaatgactgtcaaggagagctgtgtggagaaaggtgaagatggattttgactctaactttatgatagatgtttaacggagatgcacagactttgcttcagttcagtggtattactgaagagaaagatgagaagtaaaaagaactgaaaagtgtggttaaaggtggagtcttttagtagggctgctttttccttctctg

SEQ ID NO: 30401 - DNA, 600 bp, Chicken  19866894250174_2
gcaaggagtgggtgatgaaggaagaaaataatcacactttcttctgttttggtggttacagggtcttcctttttctacagtgtgtttacaggcaagatcttacaagactccctcatcttgtctaaaaagatcaaagaaccatcattcattcagaggaatgagaagctactttgtgctccacaacacctttaagcctatggcttttctccaagggaggtaatactctggygtttctagtgaaacaccatggctgcctgttcacaggaaactgatttgtactgcttcccccccagtacttcmcaaatgcgatccacaccatacatgtaagaacaaatgactgtcaaggagagctgtgtggagaaaggtgaagatggattttgactctaactttatgatagatgtttaacggagatgcacagactttgcttcagttcagtggtattactgaagagaaagatgagaagtaaaaagaactgaaaagtgtggttaaaggtggagtcttttagtagggctgctttttccttctctggatttcccatgtgttctgtattttcttgcttctaacaccttcaagggaaaatgcaagctctcggtggaaca

SEQ ID NO: 30402 - DNA, 599 bp, Chicken  19866894250178_1
  misc_feature (1)..(6): n is any nucleotide
nnnnnncggttgggcttacattccttgtcttggaaggaggtagggctggacctgtagtaatctaagatttggactatcccaacggggaactggggtagactgacagaaatccaccattcctatccatccctggctttccctttagggcatccaaccccaagagactagtgagagaaggtcctaccaccatttctacttgaattggattgtcatccccccaggaaccagcagttgaccagtacagactaccagggctgtattttactaaaagcatctgctactcagaccctcttcctgatrgaatagatcccatacctctgtatttccttgcattacagagatttgagcatctttatccacagtgaatgtgactgggatctttctggtccaatatgacaagtyaatagtatatccttctccttcaagatagcaaggcataaggatagggagcagcagatatagctgctttaaaccattttggaacaccgaagaaaagtagaggactcaatccaataatgaagaaattgcttatccctttccagggaccaagacttgtcaaacactccaaaagaaatgatccccaagtaagagatactttc

SEQ ID NO: 30403 - DNA, 600 bp, Chicken  19866894250178_2
acagaaatccaccattcctatccatccctggctttccctttagggcatccaaccccaagagactagtgagagaaggtcctaccaccatttctacttgaattggattgtcatccccccaggaaccagcagttgaccagtacagactaccagggctgtattttactaaaagcatctgctactcagaccctcttcctgatrgaatagatcccatacctctgtatttccttgcattacagagatttgagcatctttatccacagtgaatgtgactgggatctttctggtccaatatgacaagtyaatagtatatccttctccttcaagatagcaaggcataaggatagggagcagcagatatagctgctttaaaccattttggaacaccgaagaaaagtagaggactcaatccaataatgaagaaattgcttatccctttccagggaccaagacttgtcaaacactccaaaagaaatgatccccaagtaagagatactttccttgcagcttccagcccttaaatgaggttagggaggaatggagccaggtaccacccccttccagtcacacaggtgaattgcttccacctgtgttcccagggct

SEQ ID NO: 30404 - DNA, 600 bp, Chicken  19866894250185_1
gacctttaaagttcatctaatccagctcccctgccttgcgtacagatatctttcgttagatgtgattactcaaaaatccccccaacctgaacttgaagacttccagtaaaggaatatcagtagcttctctgggcaacttgtttcaccatcatcacagtgaagatctttttcattatttctaatataaactcactcaggacttgtctctatgggctccccatctttctagtaggctacctttaagtactggaaggctgctgtaagatcatatcagaaccttctcttctccatggtaaacamctctcaactttttattcataagagatgctacagacgtttgataatttttgcagccctccactgtacctgctctattaagtccacatctttcttgcaccagaaccccagagctgaatgcaatactccaagtaggttcttgtgagataaaaatagaatgggataatcacttcccctgactttctttttgtgtcctttatataaataaagcacactgagaaatatgctttctatgtctccacttttaccctggaaatcattcaggaaaactcatcatttttacataagttttgacgtatcaca

SEQ ID NO: 30405 - DNA, 600 bp, Chicken  19866894250188_1
tagtttaaagccattacttcccctcctatcacttacatgccctggtaaagaactcctctccagctttcttgtaggatcccttcaggtccttttgtattttatgcacagatccctaacaatagtggtaaaacagaagaacgcactttccttcctatcacaatcaggccagaaaaagaccacctgttttacacagacttgtgcccaagcaggagaaggtgagctcacctcccagtaccccaccatttacacagtcaggttttggaatacttcagagctctcagcatggagcagggtgtgcayctgcagaaaacaatggcattgcctcacagagcttatagatgagggacaggacaaggaacaacaggaaggtactgagagcagacagcaaagtgtgtggcaatgctaatggatactaacaaacgtccaagctcaccrgtggcctatatgctgggagaggtttattcttctgaagccacaggtgaattttcagactgatgccaaattaaaggcaggcagtatgcaagaaacactgatctctgccatggatcttgaataaaggaacagaagagtctttctgttccgaagcgttattaaacacga

SEQ ID NO: 30406 - DNA, 600 bp, Chicken  19866894250188_2
gaacgcactttccttcctatcacaatcaggccagaaaaagaccacctgttttacacagacttgtgcccaagcaggagaaggtgagctcacctcccagtaccccaccatttacacagtcaggttttggaatacttcagagctctcagcatggagcagggtgtgcayctgcagaaaacaatggcattgcctcacagagcttatagatgagggacaggacaaggaacaacaggaaggtactgagagcagacagcaaagtgtgtggcaatgctaatggatactaacaaacgtccaagctcaccrgtggcctatatgctgggagaggtttattcttctgaagccacaggtgaattttcagactgatgccaaattaaaggcaggcagtatgcaagaaacactgatctctgccatggatcttgaataaaggaacagaagagtctttctgttccgaagcgttattaaacacgacatttgggttggactgacgtatgcatcactgtttgcctctaggggaagagacacaagaaatgaagtataaaaagcagctcttatccctccatccccaaaaagtacacggaattcatatgtattggtataagaaag

SEQ ID NO: 30407 - DNA, 600 bp, Chicken  19866894250189_1
tgtcctccagcatgccatcccctgacactttgccccccagcaccccagcacccgtacaccctgaccccctggcccccagaatcccatccccctacatctaagcatcccagcacccatgcaccccaagaccccataccccagcacccatgcacccttacaccctggcccccagcaccctacatgcaagcgccccagcacccatacaccctgacaacttgcaccccagcatcacagcacccacgcactgcaacatcctgcaccccaaaaccccactcccatgcaccctgcctcctgcacccrtgcaccctgacccacacgctccgttttgctgcaccccatgcactccatccccctacatcccatcaccccagcaccctgacaccccatccctctacatcccagcacccatacaccctgacaccccataccccagcaacccagcacctcagcacccatacacccatgcaccctggctcccagccctccagcaccctacatccaagcaccccagcacctatacaccccaacaccccatatcccagcatcccagcacccatacaccctgacaccccatagcccagcacccataacctccagctc

SEQ ID NO: 30408 - DNA, 600 bp, Chicken  19866894250190_1
cttgcaagtaaatctgaatgatccaagccaacaggtaacaaatttcagtaaaacaacaacaacaaaacctgttaaaactaccacctcacctttgctggcaactgtcagaaatgaccttacacaacacttagacagtgccctatattctcttctagctaccgaatgggaggaaattcctcgggagagccaccagagcaaggagtagacagaaaacgaaaacaaatcaatgagaaccttctgtggggcacataatgcaaaagcacaacaggaaaccatggaattgagaacctttatttctcrtttttcacttaaacatttagtttagagcatgggaattgcactgcattacagtgcccctcagcggcagtgagcacagcctgcattaggccaggagcgatgtgaaatagtggtaaaacacaactgatcagcaaaaactgcaccagtgttttcagagaaaaaaacactttcaagcaaacatgtgaagttgtgttaatgaagcccttctatctcctacagataagttgctactaattactccagtttccactagtcttccagttgaagaccaactttaaccatcaacacgtctgaaacaccatc

SEQ ID NO: 30409 - DNA, 599 bp, Chicken  19866894250191_1
  misc_feature (1)..(187): n is any nucleotide
nnnnnnnnnnnnnnnnnnnnnnnnnnnnnnnnnnnnnnnnnnnnnnnnnnnnnnnnnnnnnnnnnnnnnnnnnnnnnnnnnnnnnnnnnnnnnnnnnnnnnnnnnnnnnnnnnnnnnnnnnnnnnnnnnnnnnnnnnnnnnnnnnnnnnnnnnnnnnnnnnnnnnnnnnnnnnnnnnnnnnnnnnnnataaggcagcagtcagtgctaccagaaatgctcgtaacaccatttgtatggcagcacttctttctatactgcactctcctaatgccatgaaatcaaagcaggcaggtcagtgrcagacaccttcagtctgagcartcctgcgccgtgtcrtgtctctggtagcacttgcaagggcagcagctgtgtggtagcacttcttgggcaataaggatctctccaagtaccttgraaattggatgtataagtgattagaacaatgagaataacctcttgtccaatccatttcgcttcttatttatatccaataatggctgcaagccaytgctggctaagggaaatagaaaagacagagggaagtttttctagctcaaaatcatttcacctttcatcagcagcataggaaagccctgtg

SEQ ID NO: 30410 - DNA, 599 bp, Chicken  19866894250191_2
  misc_feature (1)..(165): n is any nucleotide
nnnnnnnnnnnnnnnnnnnnnnnnnnnnnnnnnnnnnnnnnnnnnnnnnnnnnnnnnnnnnnnnnnnnnnnnnnnnnnnnnnnnnnnnnnnnnnnnnnnnnnnnnnnnnnnnnnnnnnnnnnnnnnnnnnnnnnnnnnnnnnnnnnnnnnnnnnnnnnnnnnnnnataaggcagcagtcagtgctaccagaaatgctcgtaacaccatttgtatggcagcacttctttctatactgcactctcctaatgccatgaaatcaaagcaggcaggtcagtgrcagacaccttcagtctgagcartcctgcgccgtgtcrtgtctctggtagcacttgcaagggcagcagctgtgtggtagcacttcttgggcaataaggatctctccaagtaccttgraaattggatgtataagtgattagaacaatgagaataacctcttgtccaatccatttcgcttcttatttatatccaataatggctgcaagccaytgctggctaagggaaatagaaaagacagagggaagtttttctagctcaaaatcatttcacctttcatcagcagcataggaaagccctgtgctagctgcctggagtgctctgt

SEQ ID NO: 30411 - DNA, 599 bp, Chicken  19866894250191_3
  misc_feature (1)..(150): n is any nucleotide
nnnnnnnnnnnnnnnnnnnnnnnnnnnnnnnnnnnnnnnnnnnnnnnnnnnnnnnnnnnnnnnnnnnnnnnnnnnnnnnnnnnnnnnnnnnnnnnnnnnnnnnnnnnnnnnnnnnnnnnnnnnnnnnnnnnnnnnnnnnnnnnnnnnnnnataaggcagcagtcagtgctaccagaaatgctcgtaacaccatttgtatggcagcacttctttctatactgcactctcctaatgccatgaaatcaaagcaggcaggtcagtgrcagacaccttcagtctgagcartcctgcgccgtgtcrtgtctctggtagcacttgcaagggcagcagctgtgtggtagcacttcttgggcaataaggatctctccaagtaccttgraaattggatgtataagtgattagaacaatgagaataacctcttgtccaatccatttcgcttcttatttatatccaataatggctgcaagccaytgctggctaagggaaatagaaaagacagagggaagtttttctagctcaaaatcatttcacctttcatcagcagcataggaaagccctgtgctagctgcctggagtgctctgtaaaccccctgtccac

SEQ ID NO: 30412 - DNA, 599 bp, Chicken  19866894250191_4
  misc_feature (1)..(71): n is any nucleotide
nnnnnnnnnnnnnnnnnnnnnnnnnnnnnnnnnnnnnnnnnnnnnnnnnnnnnnnnnnnnnnnnnnnnnnnataaggcagcagtcagtgctaccagaaatgctcgtaacaccatttgtatggcagcacttctttctatactgcactctcctaatgccatgaaatcaaagcaggcaggtcagtgrcagacaccttcagtctgagcartcctgcgccgtgtcrtgtctctggtagcacttgcaagggcagcagctgtgtggtagcacttcttgggcaataaggatctctccaagtaccttgraaattggatgtataagtgattagaacaatgagaataacctcttgtccaatccatttcgcttcttatttatatccaataatggctgcaagccaytgctggctaagggaaatagaaaagacagagggaagtttttctagctcaaaatcatttcacctttcatcagcagcataggaaagccctgtgctagctgcctggagtgctctgtaaaccccctgtccactataaatgtctcatttgatttaaagtctccttatgcttttcattcttagaacagcttcatcgttaggcacgcagtttaa

SEQ ID NO: 30413 - DNA, 600 bp, Chicken  19866894250191_5
cagaaatgctcgtaacaccatttgtatggcagcacttctttctatactgcactctcctaatgccatgaaatcaaagcaggcaggtcagtgrcagacaccttcagtctgagcartcctgcgccgtgtcrtgtctctggtagcacttgcaagggcagcagctgtgtggtagcacttcttgggcaataaggatctctccaagtaccttgraaattggatgtataagtgattagaacaatgagaataacctcttgtccaatccatttcgcttcttatttatatccaataatggctgcaagccaytgctggctaagggaaatagaaaagacagagggaagtttttctagctcaaaatcatttcacctttcatcagcagcataggaaagccctgtgctagctgcctggagtgctctgtaaaccccctgtccactataaatgtctcatttgatttaaagtctccttatgcttttcattcttagaacagcttcatcgttaggcacgcagtttaatcatgtgcttaataatgaaagtttcttgttttcaggcttcacgctactaatattcctataaggtgaaaaatagagaattgctccatatttggga

SEQ ID NO: 30414 - DNA, 600 bp, Chicken  19866894250191_6
aggttgatgtgaacagtaggttgtctttgagccctgtgaaaaatctcttagatggacacggtggtaaagagctctcattgaattcatagtgccttttttaaaacaaatttctgttcttctttcacaggaaagatgataaagattacgctttgaagcaaatagaaggtactggaatttctatgtctgcatgcagagaaatagcagtaagtagcagttctttctactagctaacagacttattaaaagtattgattgagagcatgtttttgtttgctgaatcatgttattctactatgggtyctatatttttatcgtggaggtataaaacaaatacaaatgtcatagaaatgcgtgcacctgttttacttgctgttgatgaatggctgtttttcagttaaagtttactgcctgcctcagggcagattaaaagcagagtttaaagacgtgattggagtcagtggtttaaatgacttatgtgatctgacttttgcattactacttcaattatttcttaaagagattctaattcttattggctcagaacaattaaagcatgctagcttctatttaaatgaagatttcaaactaaataggccttgt

SEQ ID NO: 30415 - DNA, 599 bp, Chicken  19866894250193_1
  misc_feature (1)..(140): n is any nucleotide
nnnnnnnnnnnnnnnnnnnnnnnnnnnnnnnnnnnnnnnnnnnnnnnnnnnnnnnnnnnnnnnnnnnnnnnnnnnnnnnnnnnnnnnnnnnnnnnnnnnnnnnnnnnnnnnnnnnnnnnnnnnnnnnnnnnnnnnnnnnncttggagagttccttaagcagtgatttcttgccaaagaggctgtggatgccccgtctctggtgacattcaaggtcagactggatggagccctgggcaaactgattgaggggttggcaatcctgcccatggcagggtggctggatctagatgatctgtaakgtcccttcsaactgaagccactccatgattcttagtggaaactccagtaatagtaatattaaatacagatctaactacatccttccatgaactctaagagcaaaaggcagtgagcacaaattgagtagatcacattctgcagtctctggcacttgtctacttgcattgctattgaagttcaacttctaatttaaatctgcacgtgtgctcctctctccaacagcaagaggatttgtggggaagaagtttaaatacttgcaaaggaaggaggtatattaaggagtgacttcaagagttaa

SEQ ID NO: 30416 - DNA, 599 bp, Chicken  19866894250193_2
  misc_feature (1)..(131): n is any nucleotide
nnnnnnnnnnnnnnnnnnnnnnnnnnnnnnnnnnnnnnnnnnnnnnnnnnnnnnnnnnnnnnnnnnnnnnnnnnnnnnnnnnnnnnnnnnnnnnnnnnnnnnnnnnnnnnnnnnnnnnnnnnnnnnnnnnncttggagagttccttaagcagtgatttcttgccaaagaggctgtggatgccccgtctctggtgacattcaaggtcagactggatggagccctgggcaaactgattgaggggttggcaatcctgcccatggcagggtggctggatctagatgatctgtaakgtcccttcsaactgaagccactccatgattcttagtggaaactccagtaatagtaatattaaatacagatctaactacatccttccatgaactctaagagcaaaaggcagtgagcacaaattgagtagatcacattctgcagtctctggcacttgtctacttgcattgctattgaagttcaacttctaatttaaatctgcacgtgtgctcctctctccaacagcaagaggatttgtggggaagaagtttaaatacttgcaaaggaaggaggtatattaaggagtgacttcaagagttaagattaaaga

SEQ ID NO: 30417 - DNA, 600 bp, Chicken  19866894250198_1
atgtctgtatatataagaatgcagtaaacatcatcttaataatcttgattagcagggaaaattgaatacttggtcccatttctgttatgtgagatagtagactagcactaattacctcatcaagaaggctgaaggggaaattcctaagtacacctagcagcaggcttactgttttgatcctgtgaccaacgggaaggacttgatgataaaggcatgctataatatcatagcaagagaaatgagtaagaggaaataggaggggctgtatggtcaggattggctcatagtgtagtttgttakagcagatggagtactgtgttctgtttgttctcaggcttttatctgaaaaagagaagataagcagttgtttcaatgtgggtagtaaaagatttctttttttgacttagctgttcagtctaagagtttgctatagaatacttaatttctaactgtagaaatctggaaagcatgagataagagggtttcagcctgttctggttctgatttgaattggagttatggtgaatcctgcagcaggtaattcatttttcttctgaatagaaattgttgttattgattgtccgatttctaactggaaac

SEQ ID NO: 30418 - DNA, 600 bp, Chicken  19866894250201_1
agagctacaactggtattgaaatggttgcttcctttgtagtgtgtatgtggacatcttcaaactgggaaggggtcttggttcgctgggagctcctggagtgctcagggtgatgctgtgctggaggatgtggtcagtatccaggtgagagaacttactgttgcgtgctgaaggtagcattggcttgttaaaacctttatgggaaaaatagaacctggtttttaactccattattcagtccattgggtcatccactgctaaattattgccagtctatagaagatgaggctgaagcatggggrcacgtagaattttaatgaatgtaacaaattccaagcacaaccttacagttttccaatgagctttttcacttctggctccagcagtggctgtgacagctcagaatctgagctcacacctcagtgccacttctgaaagcattaacgaaagtgacttgtttaacttaccagagaatcagtggtgcagacagatctaaacctgggtatcttgactctcccaattagtttggctaattaggggaaacagtggtagtcattaattaagagtgaattgttgctcagtcagacaggatgcggtatgtt

SEQ ID NO: 30419 - DNA, 600 bp, Chicken  19866894250204_1
atcaggcaaaaacatgcttatctttttattccagatgcccaatgaaaaggtggtaagtactatcattcatgggttagcttgttttttccattccttttatgaaattttgtacatgaaaaattaaattattacatattgtactctggaaaaattagtttctcaattagggcagatcttgcttgcttgctatgctgttgctttaatgaatattgtgctagtgctcttctggaaaggatacatcaaaggaaaatgacaacagtttgaatttaatgatgttatctatgtggtgtaaattgaccrgtaggaagggacttcactagttgagtgtttggctgtgtttctaggaaactgttgatttttcattaacgcagttccatcaaagcccaggagtaaaaaatttgtgaagtcattcatacaattagagttttcataattacgttagcaggtcttgtaaagctttctcaagtagagaggtaagacagcagtttatgcagccacttttataacttcatttacgaagtaagatcagtgatttaagtttctaaccatagattttgactattgaactctatattcttggtatttaattttgggtacatc

SEQ ID NO: 30420 - DNA, 600 bp, Chicken  19866894250205_1
tgctgcaggccaggtttatctccccgtgcatcagacataatgatggtacagcagctccaagcaccaaagcatccattggggtggtgacacacctggcagcaagcacatccccccaggcatgacctgagaagacacctttagctgagcagggggaggaggcaccagcaggaaggcactgccacagcagcaccagcacttctgtcctgaaaaaggacacaaaaccactggggcaggaatgcgctctgagctgggtttcaggaagcactctcactccctgctgggctctcctccttgctttgkgtccagataatataaattccactgatggattagggaaggaacacactgagctcccagtgcttaaacacaccatgtgagaacttggagcaaaaaggtcacatcctacacagarctgggagctaacagggatgctttgtgagcacacattatccctgagcccactgtgttgaatgggaggagaggcagcagaggacccagggccattcagcacatgttttggggttcccgctgtgtagatyccagatgtccaccactgctcctccacacttctgcagctctgtctcttcactttacacacca

SEQ ID NO: 30421 - DNA, 600 bp, Chicken  19866894250205_2
ccaggcatgacctgagaagacacctttagctgagcagggggaggaggcaccagcaggaaggcactgccacagcagcaccagcacttctgtcctgaaaaaggacacaaaaccactggggcaggaatgcgctctgagctgggtttcaggaagcactctcactccctgctgggctctcctccttgctttgkgtccagataatataaattccactgatggattagggaaggaacacactgagctcccagtgcttaaacacaccatgtgagaacttggagcaaaaaggtcacatcctacacagarctgggagctaacagggatgctttgtgagcacacattatccctgagcccactgtgttgaatgggaggagaggcagcagaggacccagggccattcagcacatgttttggggttcccgctgtgtagatyccagatgtccaccactgctcctccacacttctgcagctctgtctcttcactttacacaccacacctggagataaaccctccttgcaacccactccacctgttgcagagacagcattcaagcagttcatccatctacctcatacccagaaccagggtgaccctgggccaagcat

SEQ ID NO: 30422 - DNA, 600 bp, Chicken  19866894250205_3
gctctgagctgggtttcaggaagcactctcactccctgctgggctctcctccttgctttgkgtccagataatataaattccactgatggattagggaaggaacacactgagctcccagtgcttaaacacaccatgtgagaacttggagcaaaaaggtcacatcctacacagarctgggagctaacagggatgctttgtgagcacacattatccctgagcccactgtgttgaatgggaggagaggcagcagaggacccagggccattcagcacatgttttggggttcccgctgtgtagatyccagatgtccaccactgctcctccacacttctgcagctctgtctcttcactttacacaccacacctggagataaaccctccttgcaacccactccacctgttgcagagacagcattcaagcagttcatccatctacctcatacccagaaccagggtgaccctgggccaagcatccaactcaaggctggaagatcagagccctccaaaccactgcagaacctcacacaagctgcagagcgtgacgacccccaccatcctgtcctgtatatgctctgcccacacatccatcaccaccattat

SEQ ID NO: 30423 - DNA, 600 bp, Chicken  19866894250208_1
aaccaagaaaggaagaggtaataatctaatcctgcagatcacaaacagtcagttggaagatctgtttttgtcagcaagtcacttcccattatttcatcctttttgtgctttctcattgctgctgctcacagtcccagatggttgttctgtgctcaccttcccttaggtgcccattacaaggatgctagaaaggctggcacttaggactgcttctctgtgccgttgtttagatttctgactgcgtacaccttatctgctcttcttgcctgcagcagtctcatttttgtgtcagactcttgyaacacaccagtgttctgtggctttcttagaggggcagggtacagtatgttgggggccacctgtgtatgtgtgcagaaatacacacaaawagatacataattaaataggtgtatatgtacatctctgctaagtaartctgctatacgtctatacacttytgcctgctttcacacaacgtgggttgcagggatagtctgtggaatgaatttgttgtcagtatggtgcaagagcagagttgtgtgaaagttggacaacacgctattattctttgataagatcaaaacagatttggggtaggct

SEQ ID NO: 30424 - DNA, 600 bp, Chicken  19866894250208_2
tatttcatcctttttgtgctttctcattgctgctgctcacagtcccagatggttgttctgtgctcaccttcccttaggtgcccattacaaggatgctagaaaggctggcacttaggactgcttctctgtgccgttgtttagatttctgactgcgtacaccttatctgctcttcttgcctgcagcagtctcatttttgtgtcagactcttgyaacacaccagtgttctgtggctttcttagaggggcagggtacagtatgttgggggccacctgtgtatgtgtgcagaaatacacacaaawagatacataattaaataggtgtatatgtacatctctgctaagtaartctgctatacgtctatacacttytgcctgctttcacacaacgtgggttgcagggatagtctgtggaatgaatttgttgtcagtatggtgcaagagcagagttgtgtgaaagttggacaacacgctattattctttgataagatcaaaacagatttggggtaggctgtaacattttgcagatatttttagggtgatgacgttwtaacatgacattttctttctcagtaagaacgctgaatttgggacttagcttg

SEQ ID NO: 30425 - DNA, 600 bp, Chicken  19866894250208_3
agatggttgttctgtgctcaccttcccttaggtgcccattacaaggatgctagaaaggctggcacttaggactgcttctctgtgccgttgtttagatttctgactgcgtacaccttatctgctcttcttgcctgcagcagtctcatttttgtgtcagactcttgyaacacaccagtgttctgtggctttcttagaggggcagggtacagtatgttgggggccacctgtgtatgtgtgcagaaatacacacaaawagatacataattaaataggtgtatatgtacatctctgctaagtaartctgctatacgtctatacacttytgcctgctttcacacaacgtgggttgcagggatagtctgtggaatgaatttgttgtcagtatggtgcaagagcagagttgtgtgaaagttggacaacacgctattattctttgataagatcaaaacagatttggggtaggctgtaacattttgcagatatttttagggtgatgacgttwtaacatgacattttctttctcagtaagaacgctgaatttgggacttagcttggaattggaaatatttttttttaaatcaagcaagttgctaacccaga

SEQ ID NO: 30426 - DNA, 589 bp, Chicken  19866894250208_4
tcccttaggtgcccattacaaggatgctagaaaggctggcacttaggactgcttctctgtgccgttgtttagatttctgactgcgtacaccttatctgctcttcttgcctgcagcagtctcatttttgtgtcagactcttgyaacacaccagtgttctgtggctttcttagaggggcagggtacagtatgttgggggccacctgtgtatgtgtgcagaaatacacacaaawagatacataattaaataggtgtatatgtacatctctgctaagtaartctgctatacgtctatacacttytgcctgctttcacacaacgtgggttgcagggatagtctgtggaatgaatttgttgtcagtatggtgcaagagcagagttgtgtgaaagttggacaacacgctattattctttgataagatcaaaacagatttggggtaggctgtaacattttgcagatatttttagggtgatgacgttwtaacatgacattttctttctcagtaagaacgctgaatttgggacttagcttggaattggaaatatttttttttaaatcaagcaagttgctaacccagatttgtgacattt

SEQ ID NO: 30427 - DNA, 410 bp, Chicken  19866894250208_5
ggtacagtatgttgggggccacctgtgtatgtgtgcagaaatacacacaaawagatacataattaaataggtgtatatgtacatctctgctaagtaartctgctatacgtctatacacttytgcctgctttcacacaacgtgggttgcagggatagtctgtggaatgaatttgttgtcagtatggtgcaagagcagagttgtgtgaaagttggacaacacgctattattctttgataagatcaaaacagatttggggtaggctgtaacattttgcagatatttttagggtgatgacgttwtaacatgacattttctttctcagtaagaacgctgaatttgggacttagcttggaattggaaatatttttttttaaatcaagcaagttgctaacccagatttgtgacattt

SEQ ID NO: 30428 - DNA, 600 bp, Chicken  19866894250209_1
aatgttgatctgtcaggggaaaaaaaaaaaaaaaaaaggttagatattacatctgatttagaaccaggtcgtggcaatattcctatcaaagacctttgttgtgtagcaactgaaatttgttttcagtgagacagatgcactgagatccagaagaagcagctgcagatacttgtgctgcagaccgtggtggatgtaattcctacagaaagggggtgggtgatattgtgcatggatcaggaggtgctgaaaacaattgtcttcagcattgaagctattatgtgaagatattatatgaaatakaatatatatgaaatatatataatactgaagatattatatgaaaacatataatacagccgtgatccatatgataccttacaaagcagctggtatcttcagtcacaggcatagacagttgcagctgaggtacttctgcaaaggtaggaatagaaatcacatcactatctccatgtcatacaggagttactgtgatttgtttctaccttcttccaccatctttctggcttagtctgtgtttcagatgtgtcatctatccgttgtttcctgaactgtgtcctgacacactggacgtgctggaat

SEQ ID NO: 30429 - DNA, 346 bp, Chicken  19866894250213_1
agtcccctatggcagtgccccatggcagcccccctagccccaacagagtcccctatggcagtgccccatagcagcccccccagccccaacagtgcccccctgtcagtgtctcacggcagtgccccatagcagtgccccatagcagtgccccatagcagctgccaacagcatcgccccccccccatcccggccgcgctgcagtaccgctctgcagtgctcccgcagcgctcactgcagacagcgctgcccgcacagcgcagcctcactgcagggcctcactttgagccccactgcagcccrcccctatagcgatggggcggctctggggaggggttgaggagggggg

SEQ ID NO: 30430 - DNA, 469 bp, Chicken  19866894250215_1
cccctcccaaagcattagcataaaaacctggctgccccccagcaggaaggggttgatcagcactaagaggttcataggaaagtggtttagctttgccatgtccttgtgctgcagtgtggtgggaagggtggttggttgtgtgatgtgctcctgatgagcagcttgggtaagactgaaatcaattacatcacctcccagagccctttttcctcatcttaatagccatcctgtgttgccttcctccctctgaccacataacagtccaacatcccaaagcttggctgtgaaaccaaatgccarcctcgtgctctgggccatttctggccagaagtgctggaaggaagcagcctgcaagcactgcgctcccccctcatcaggagagaggaattttggcctggaatgccatgaatgctgatgcacccaaaagttgagctgcttccaaaagatgctcttcagtacatggggagat

SEQ ID NO: 30431 - DNA, 600 bp, Chicken  19866894250219_1
caggaccgagttccttgctctgcacagcttgtcctcctcactgagcacttttctttgcctcacagcttcagagcaagtaaagattccactgaaaccccagacaggctgattcagtgttagaaaggtaggagctcaaatcaccatgctaggttttagtactgctataaattaagtcttttgctgctggcctgctaatagaacctacataatacagacaatcaatcttcattaatactgtctaagagaagaaaaagtaattttaattgtccaacaggacacttatggcagaaggacagttcyacctgctccaacttccccacgctttcccttctttttccagtttattttctattaataatccacttgaatttaattaaaaaaaaaaaaaaaaaaaggaactagcagtacatcagaattagctacttaaamaaatatttctcatttactctggaagtgttactgaacactgctccttgattgtaaaggcagctgcaggaaaatatgcagcaagctttgaggggaaaaagcttctcctgctgcagttccctctgcaactcacccagcacttagcaatgcccctagggcagctagtcaactaaa

SEQ ID NO: 30432 - DNA, 600 bp, Chicken  19866894250219_2
agctcaaatcaccatgctaggttttagtactgctataaattaagtcttttgctgctggcctgctaatagaacctacataatacagacaatcaatcttcattaatactgtctaagagaagaaaaagtaattttaattgtccaacaggacacttatggcagaaggacagttcyacctgctccaacttccccacgctttcccttctttttccagtttattttctattaataatccacttgaatttaattaaaaaaaaaaaaaaaaaaaggaactagcagtacatcagaattagctacttaaamaaatatttctcatttactctggaagtgttactgaacactgctccttgattgtaaaggcagctgcaggaaaatatgcagcaagctttgaggggaaaaagcttctcctgctgcagttccctctgcaactcacccagcacttagcaatgcccctagggcagctagtcaactaaactgcaaagctttcctgctaagccttcctcctgcctcaacatttatatatggcttctgcaataaatctgcttcagaagacaggtaactcaggatttagtggagtgaggcattagcaagcctaattatcca

SEQ ID NO: 30433 - DNA, 599 bp, Chicken  19866894250221_1
  misc_feature (1)..(47): n is any nucleotide
nnnnnnnnnnnnnnnnnnnnnnnnnnnnnnnnnnnnnnnnnnnnnnnaaaaacgttatcacgcaaactgcatctctaaatatttgcagaactcaaattctcatgcctgaaacaaatcattgcctagaatgtaatggattagaagaaccagaacagtaaaaccaaatcacctctcatcccctaagaaccccaacataaacagacgagattagtccataaggacaacctcagttcttccttcccaccctcacagagcccacagggtccctgggggaggctctgtgcccagcacttgcccttycttgggcccagcagcatgggctggggagatcctggcttaagaattaacaaatactagactggatccatgcaacagattcggaaaaaacaaaaaaagatggtaagacatgcttgcttttaactactatttacaaatggaatttaacagcagctccactcaattaaaaaaaaaaaaaaaaaaaagctgcatttccctttcataataacttgattaacaaaccaagttactttcaaggaagataaagagatcagaggtcccagaggttacaaaggtagcaccaaatgctttgattccttgac

SEQ ID NO: 30434 - DNA, 599 bp, Chicken  19866894250227_1
  misc_feature (1)..(101): n is any nucleotide
nnnnnnnnnnnnnnnnnnnnnnnnnnnnnnnnnnnnnnnnnnnnnnnnnnnnnnnnnnnnnnnnnnnnnnnnnnnnnnnnnnnnnnnnnnnnnnnnnnnnnacataacacagccaaccgagctgcctggaaggggatcaaacttgtgatgctttaatctgatttaaaatgtatgtatttgacgttgtaaatggcttcttcacgcggacgagttgcccaacatcaggcattcaagtcaggaagcattggcttgcccccctcggggcctcagtttcccctccagggaagcaaatgggagagyggttgggacttctaacctgcctgagtgcatctcccacccagtttatattgcagcacgggagcgccgagaggttttgttccctgatgtttgcaaaactctggaagatcttgaaagaaagagagccaggtcttattttaacattcctccaccgattcccagaggcagcgctgggtgactgccgtcacctggattacatccagtcctgggagagcagtgggagctgcagtcccacctggcactgatggctttcctctatgtttgtttgcccttcggtgctatctgaaccacccctccctcga

SEQ ID NO: 30435 - DNA, 600 bp, Chicken  19866894250227_2
tgcagcacgggagcgccgagaggttttgttccctgatgtttgcaaaactctggaagatcttgaaagaaagagagccaggtcttattttaacattcctccaccgattcccagaggcagcgctgggtgactgccgtcacctggattacatccagtcctgggagagcagtgggagctgcagtcccacctggcactgatggctttcctctatgtttgtttgcccttcggtgctatctgaaccacccctccctcgaatcacccctttctggcccaaatacagcttcatttgctctgatttgaacygtggytcgtcagtctaatttatatcaacgcagttcctgccttaagctgggagggtggaggctgagcgtcacccaatccatcagtcagagccggatgtcgccgtgcaattaatagatgstttgcacacactggagtggaaggaagcagaactctgtgctcaaatacttttgaggtttccctgtttgttttctcctaaaagattccttgcagagatgtgccccccccctccccagtcatgtcttcctggggaagagcagctgccttagctaacgtcatccagagggcagaatccacaccagc

SEQ ID NO: 30436 - DNA, 600 bp, Chicken  19866894250227_3
cacgggagcgccgagaggttttgttccctgatgtttgcaaaactctggaagatcttgaaagaaagagagccaggtcttattttaacattcctccaccgattcccagaggcagcgctgggtgactgccgtcacctggattacatccagtcctgggagagcagtgggagctgcagtcccacctggcactgatggctttcctctatgtttgtttgcccttcggtgctatctgaaccacccctccctcgaatcacccctttctggcccaaatacagcttcatttgctctgatttgaacygtggytcgtcagtctaatttatatcaacgcagttcctgccttaagctgggagggtggaggctgagcgtcacccaatccatcagtcagagccggatgtcgccgtgcaattaatagatgstttgcacacactggagtggaaggaagcagaactctgtgctcaaatacttttgaggtttccctgtttgttttctcctaaaagattccttgcagagatgtgccccccccctccccagtcatgtcttcctggggaagagcagctgccttagctaacgtcatccagagggcagaatccacaccagctggca

SEQ ID NO: 30437 - DNA, 600 bp, Chicken  19866894250227_4
gctgggtgactgccgtcacctggattacatccagtcctgggagagcagtgggagctgcagtcccacctggcactgatggctttcctctatgtttgtttgcccttcggtgctatctgaaccacccctccctcgaatcacccctttctggcccaaatacagcttcatttgctctgatttgaacygtggytcgtcagtctaatttatatcaacgcagttcctgccttaagctgggagggtggaggctgagcgtcacccaatccatcagtcagagccggatgtcgccgtgcaattaatagatgstttgcacacactggagtggaaggaagcagaactctgtgctcaaatacttttgaggtttccctgtttgttttctcctaaaagattccttgcagagatgtgccccccccctccccagtcatgtcttcctggggaagagcagctgccttagctaacgtcatccagagggcagaatccacaccagctggcaaatggttgggcagctttatccctcctcgaaggacctctccaagtccacatggagragggtctcagcaagcctaggagccttgtaaatgatgagggattctcagcagatgatgt

SEQ ID NO: 30438 - DNA, 600 bp, Chicken  19866894250227_5
ctgagcgtcacccaatccatcagtcagagccggatgtcgccgtgcaattaatagatgstttgcacacactggagtggaaggaagcagaactctgtgctcaaatacttttgaggtttccctgtttgttttctcctaaaagattccttgcagagatgtgccccccccctccccagtcatgtcttcctggggaagagcagctgccttagctaacgtcatccagagggcagaatccacaccagctggcaaatggttgggcagctttatccctcctcgaaggacctctccaagtccacatggagragggtctcagcaagcctaggagccttgtaaatgatgagggattctcagcagatgatgtttgctgggcrtgatggtggggaatgtaatgcagctgggatttggtgtttggggactgatggagggcaacctcctttcaagcatcgtcctgctgcgcctgcttagggggagggttgcataacccagcactgggaaatgcattagctgcctgagctctgcctgcacgaggtctctcgctccttttccagcagatgggaaataggagcagaagttttccagctggaagaggcagtggaatcgtgg

SEQ ID NO: 30439 - DNA, 600 bp, Chicken  19866894250227_6
ctggagtggaaggaagcagaactctgtgctcaaatacttttgaggtttccctgtttgttttctcctaaaagattccttgcagagatgtgccccccccctccccagtcatgtcttcctggggaagagcagctgccttagctaacgtcatccagagggcagaatccacaccagctggcaaatggttgggcagctttatccctcctcgaaggacctctccaagtccacatggagragggtctcagcaagcctaggagccttgtaaatgatgagggattctcagcagatgatgtttgctgggcrtgatggtggggaatgtaatgcagctgggatttggtgtttggggactgatggagggcaacctcctttcaagcatcgtcctgctgcgcctgcttagggggagggttgcataacccagcactgggaaatgcattagctgcctgagctctgcctgcacgaggtctctcgctccttttccagcagatgggaaataggagcagaagttttccagctggaagaggcagtggaatcgtggatctggggaacaggaaaggagcgagcgagctgtccttcccacacggcagtgatggcaaaagcctttct

SEQ ID NO: 30440 - DNA, 599 bp, Chicken  19866894250229_1
  misc_feature (1)..(42): n is any nucleotide
nnnnnnnnnnnnnnnnnnnnnnnnnnnnnnnnnnnnnnnnnntaaatttctagttttcctaattcctgtacattgctaaaagaaagtgtggacttttaggattaacagaaacaacatccaaacatacagaaagtactgttctcatgtccttcaactcacttcctacagcacttgccacttaaggctcaaaaaatatctgcaagttccaaaatagccccctctgcagatctgcatatacaaccacttatttagatggaagccaaagtaatcacaaaaagcagtgatttcctcagccacggyggtttctttgcagtctgttaccacttcaagttgtcctagttcaaataatctctttcatattttaactaatataaagtagtcctcaaggaaacaacgttaaaaaaatccattaatcttcccttgttgactcactagcttgagaaacaagtgcaagaataacaagctgtttattgataagagagaaaatataaataaaaatagaggaagaaacaaaggatgcagcagcaagaaagagaaatatagtataatccagtgatacaaaataaccataacagctgaaagattttgaacttgtgagg

SEQ ID NO: 30441 - DNA, 600 bp, Chicken  19866894250230_1
gtaccacagtcaataaagactgcttggctttggtgcccctgaagcccctgcaagtcccaaacaattactgtggaccttcagaactctgcaggacctgcagcatgggagctggacatgcatgcattgaagcagatgctgatcaatacccatcacttcctcactggtttcacctttattagaaaaaaaatgatatcaacagctgccaccggctgtcccacagagcctcaaaagaaagcaaagtgctgctggcatctcactgcctgctcctcccatgtgtctccatctcagctctgggccacmttcagtgcaaagttttacttctgacctttcctatatttctcttaacgcaggagaattttcatttatcactttttcactcttcccaatctatttcaggctaatcttctctaaaatttctggagccttcagagagacttcttgtattctggtttcggtccaagctgccttactctgaaatgccacagtgcagctgagcaactccaatgtcttcctgaataactggctctccaaaaacaagccttgattgctttggaatggttttcaaaccaaacttcttgagaggtaataagtagataaata

SEQ ID NO: 30442 - DNA, 600 bp, Chicken  19866894250231_1
aaagtaggtatttcagggaagacacagtgaatgaccctctacattttcccgtgtcatcctagtctgtgtgcgtcagctgttaacgagccttaagagcctcagtgcactcactcaaatacatttattctcttaatagaaccctgactgataaaaaagtaacacaatgtttgcaaacattcagatggttgttttgctattccattcagacttgcaatctaaacaaaaatgaaacatcctatgtttcacagtagaacagattgtagaagtcaccaattagccatgccactgattatccatacyatacatctgagttttaactttcycagcgaaaawtcaacatttaagttgcttatcaaaattcagcatttgctgcagcctctttggggtgaaaggcaagctgaagagaattgcattttcttccaagagatttgactatcatcatctgccctaatttatgtcccacgttcctctctctccctgccttgaggaaaggcctaaagaggtgtgcatagtcttttcctttcacatatccaactctctgctgtttgtttctcccaattttctttctctctccagccctctgcctaatatccttgtcag

SEQ ID NO: 30443 - DNA, 600 bp, Chicken  19866894250231_2
acagtgaatgaccctctacattttcccgtgtcatcctagtctgtgtgcgtcagctgttaacgagccttaagagcctcagtgcactcactcaaatacatttattctcttaatagaaccctgactgataaaaaagtaacacaatgtttgcaaacattcagatggttgttttgctattccattcagacttgcaatctaaacaaaaatgaaacatcctatgtttcacagtagaacagattgtagaagtcaccaattagccatgccactgattatccatacyatacatctgagttttaactttcycagcgaaaawtcaacatttaagttgcttatcaaaattcagcatttgctgcagcctctttggggtgaaaggcaagctgaagagaattgcattttcttccaagagatttgactatcatcatctgccctaatttatgtcccacgttcctctctctccctgccttgaggaaaggcctaaagaggtgtgcatagtcttttcctttcacatatccaactctctgctgtttgtttctcccaattttctttctctctccagccctctgcctaatatccttgtcagctctggtggtttcatttggagct

SEQ ID NO: 30444 - DNA, 600 bp, Chicken  19866894250231_3
accctctacattttcccgtgtcatcctagtctgtgtgcgtcagctgttaacgagccttaagagcctcagtgcactcactcaaatacatttattctcttaatagaaccctgactgataaaaaagtaacacaatgtttgcaaacattcagatggttgttttgctattccattcagacttgcaatctaaacaaaaatgaaacatcctatgtttcacagtagaacagattgtagaagtcaccaattagccatgccactgattatccatacyatacatctgagttttaactttcycagcgaaaawtcaacatttaagttgcttatcaaaattcagcatttgctgcagcctctttggggtgaaaggcaagctgaagagaattgcattttcttccaagagatttgactatcatcatctgccctaatttatgtcccacgttcctctctctccctgccttgaggaaaggcctaaagaggtgtgcatagtcttttcctttcacatatccaactctctgctgtttgtttctcccaattttctttctctctccagccctctgcctaatatccttgtcagctctggtggtttcatttggagcttggctctctt

SEQ ID NO: 30445 - DNA, 600 bp, Chicken  19866894250231_4
aaggcctaaagaggtgtgcatagtcttttcctttcacatatccaactctctgctgtttgtttctcccaattttctttctctctccagccctctgcctaatatccttgtcagctctggtggtttcatttggagcttggctctcttttagagtatttgttgctactgcatattctgaagataaatgattatggcaaagcctaatctttatttttctatgaggggaaaagtttacatatgagccctagggactgaaaaatcagatggcgactagaaagaacaaaaatgtcattttgctttgaratcttatgattctttgaggcctgactcatgacgctggtctgttgggatttggcagtgatgttattgctcatttttcttccttcctattctctatcctgtgtgcctcaggagtatttctaggaaaaagcttctatctttccactttctttttgtcagattaattttcctgcctcttctgaagtaacccctgtctttggtgattgcagtggtgattaggaaggccacaggaaatgactgtaagggcaaatgggccagacacaagcttcacagagtcccaggacctatttgttcagcacataa

SEQ ID NO: 30446 - DNA, 600 bp, Chicken  19866894250236_1
acactccagttttcaaaaagggcaagaaggaggatccagaaaactacaggccagtcagccttacttccatccctggaaaggtgatgtaacaagttgttctggatacccactccagcaattggaagagaagaaggttatcaggagtagtcaagatggatttaacaagggaaaatcatgcttgaacaacctggtagtcttctgtgatgccatcacaggctaggtaaatgctgggagagcagtggatgttgtctaccttgacttcagcaaggcatttgacaccatcacccacaatatccttgytatgaaaattagaaagtatgggatagatgaatgaatggtgaggtggattgagaactggctgactggcagagctcagagggttgtaatcagtggtacagagtgtagttggaggcctgtaattatcagtgtacctcgggggccggtgctgggtctgctcttgttcaacatcttcatcaactacatagactccaccctcagcaagtttgctgatgatagaaagtagggaggagttgctgacacactggaatgctgtgctaccatttgaaaagaatcagacagactggagagttgggcagggag

SEQ ID NO: 30447 - DNA, 600 bp, Chicken  19866894250244_1
ctgtagtgaggatttggggtcaagctttgttttggcaggtggctgaatgccaagctaaggaatagaactgctgtttaattcagtagcacaggaacagctcatcttggcacaccttgcttgtgcctcgtgctcctgggtgacctgggtaacccaccaaggctgctgtctgcctcagcccccctccctaagtgctggttctgggggcagaggaatgctgcaacctgtcctggtgctgctcctcagggcagtgctcccctctagctgaggttccatacgcaggcagtgaagcagtgctacatyctgtgcatcttatatctctgtgggtcttcctagccttaytcagcctttaattctgcctttccttatggcgcgtgcagcgtggtggtgggcatatttgtacaaacacagcagctctgaaatctgttgtgccctagggaaggctgggggcagggggttcatctgagggtggggcacggcttgttctttcctcctgtgtaattcatggtcagttgctcagttcttcctatagtattcaatgtcagatcatttgaaccttttcaggtgtctttcagctgttgagaactattgttgaaacctatt

SEQ ID NO: 30448 - DNA, 600 bp, Chicken  19866894250244_2
tggctgaatgccaagctaaggaatagaactgctgtttaattcagtagcacaggaacagctcatcttggcacaccttgcttgtgcctcgtgctcctgggtgacctgggtaacccaccaaggctgctgtctgcctcagcccccctccctaagtgctggttctgggggcagaggaatgctgcaacctgtcctggtgctgctcctcagggcagtgctcccctctagctgaggttccatacgcaggcagtgaagcagtgctacatyctgtgcatcttatatctctgtgggtcttcctagccttaytcagcctttaattctgcctttccttatggcgcgtgcagcgtggtggtgggcatatttgtacaaacacagcagctctgaaatctgttgtgccctagggaaggctgggggcagggggttcatctgagggtggggcacggcttgttctttcctcctgtgtaattcatggtcagttgctcagttcttcctatagtattcaatgtcagatcatttgaaccttttcaggtgtctttcagctgttgagaactattgttgaaacctatttatcattgtgcacttgctttgaggcttaactcttaaggg

SEQ ID NO: 30449 - DNA, 600 bp, Chicken  19866894250245_1
atagatgcctgtcactgacaagactaattgttacaaaacaaggcttgcagttactggccagacaagaaggctctacttgcagcctctctcatccagatgttttggtttcagagagcaaactgttgaaacatcagcaggtgctctatatgcttgccaaagggcagcacaaccagggttcttcttattgcagatccgataaagcctagagagagagaagctctcatacttcaggcaagagtctgaagtactcaagtagtataagtctcctttgttctcatccttcagtgagaaaagagatgyttcttgttcaaccactgcacattttcaagtttataaaaagtcagtattttcatgcaaatattcttgtaccatacagctttaactatgttgagccacatgctgaacagtggcttagctccagtcagccacctacttctgcaagtgtgactttctgtaggctgctgcatgttcttttcttcttctttttttccctaaatatctgcagaaacatccattttgaaattagagcagaatccttcagaacccctgggagttcctctgttggtcaactgttggtcacaaaacaaagcaatttgactc

SEQ ID NO: 30450 - DNA, 600 bp, Chicken  19866894250249_1
ttcttttgctgcttttccatccttacctgttgtaaacatggagctcgtgcagaactgcttctacttgaattatcgcagggtattaagagctgtattgtgatgtttacatccattcttccctgttttctgtagctagggacaggctagcagatccagcctccacctcatataaaacgttctcgtttctacattacagcagagaggaaaacagaactgaaaagccttaactgaggttttctgcaaacctccacctggacatggcctagaatcctgagcttgtacttgtatttgagataaackcatttcatgttttacacttaacatgtaatcctaagaaggagaaacctagctgaaaatgcacctgtaagttattttcttgtttactcaagggtgaggctgaggctaacattcagcctcagaagggtatgtggtgccagmgctccctcaccagcctgcagctgccctccagggaaagcaccttcagctgagctgttcccctgggtgaggtcttccatcaggacaagtgatgacagttcatgttttccactttatgagaaaaggaccttgcatcagacatctgcataccaagaaagctgttag

SEQ ID NO: 30451 - DNA, 600 bp, Chicken  19866894250249_2
acaggctagcagatccagcctccacctcatataaaacgttctcgtttctacattacagcagagaggaaaacagaactgaaaagccttaactgaggttttctgcaaacctccacctggacatggcctagaatcctgagcttgtacttgtatttgagataaackcatttcatgttttacacttaacatgtaatcctaagaaggagaaacctagctgaaaatgcacctgtaagttattttcttgtttactcaagggtgaggctgaggctaacattcagcctcagaagggtatgtggtgccagmgctccctcaccagcctgcagctgccctccagggaaagcaccttcagctgagctgttcccctgggtgaggtcttccatcaggacaagtgatgacagttcatgttttccactttatgagaaaaggaccttgcatcagacatctgcataccaagaaagctgttagcaaacctcacacatatccaggcctgcttggagtgatgttttaatttttcccctttaatactgaaccttttttttcttttttaaacaaaggtgtttattttgtaaatcattttttttatttatctaaaaatgcacaatt

SEQ ID NO: 30452 - DNA, 600 bp, Chicken  19866894250254_1
cccaccatcagcttaaccactgaggcttttggctgacctttaggtgtttttccacaatttggcaaatttccattgcttgttagaccataatgagcaacttggaaaacaatacatgtgaaatctgaggaaaacatccttgcacctggtaaaatgcaaaaataagtattctattatgactccagtgcttctcgtgaagcagaactaagagaaaataaagctgttcacacaccagttaaagttgaaatggaaagctttagaattagcactcactgattccttttgctaaactctaatatattkgtccttacactaatattactgatccctattgctaaacaaactaggctgmatcagttgttccagttgcaggagaactgggctaggtgacctttcagrgtcccttccaactgagacgagtctctgattccttgctgcaagtgggctacacagagaacctgatgagagagcaatgtgcttaggaggatttaaggagaagagcaagtaggttgccctgtggaggcacgtgggaggagacagtgcagatctgttcaagatattagaccattactggaaaggggtaggttttgggtgatgttttgg

SEQ ID NO: 30453 - DNA, 600 bp, Chicken  19866894250254_2
ttccacaatttggcaaatttccattgcttgttagaccataatgagcaacttggaaaacaatacatgtgaaatctgaggaaaacatccttgcacctggtaaaatgcaaaaataagtattctattatgactccagtgcttctcgtgaagcagaactaagagaaaataaagctgttcacacaccagttaaagttgaaatggaaagctttagaattagcactcactgattccttttgctaaactctaatatattkgtccttacactaatattactgatccctattgctaaacaaactaggctgmatcagttgttccagttgcaggagaactgggctaggtgacctttcagrgtcccttccaactgagacgagtctctgattccttgctgcaagtgggctacacagagaacctgatgagagagcaatgtgcttaggaggatttaaggagaagagcaagtaggttgccctgtggaggcacgtgggaggagacagtgcagatctgttcaagatattagaccattactggaaaggggtaggttttgggtgatgttttggaagtgctgtaagatctctggcctggaatgctgcagcatctgaataccag

SEQ ID NO: 30454 - DNA, 600 bp, Chicken  19866894250254_3
acttggaaaacaatacatgtgaaatctgaggaaaacatccttgcacctggtaaaatgcaaaaataagtattctattatgactccagtgcttctcgtgaagcagaactaagagaaaataaagctgttcacacaccagttaaagttgaaatggaaagctttagaattagcactcactgattccttttgctaaactctaatatattkgtccttacactaatattactgatccctattgctaaacaaactaggctgmatcagttgttccagttgcaggagaactgggctaggtgacctttcagrgtcccttccaactgagacgagtctctgattccttgctgcaagtgggctacacagagaacctgatgagagagcaatgtgcttaggaggatttaaggagaagagcaagtaggttgccctgtggaggcacgtgggaggagacagtgcagatctgttcaagatattagaccattactggaaaggggtaggttttgggtgatgttttggaagtgctgtaagatctctggcctggaatgctgcagcatctgaataccagaggagcagatggctgaatcattgctggcacctggagaggtaggtggc

SEQ ID NO: 30455 - DNA, 600 bp, Chicken  19866894250256_1
aaaacctttgttggaaaaagttgtttccactccacggtctgcaaggccttccaatgtagattttaacaatcctactgatttagccagaaagctataaatgtgatttgcaaggctttggtttgccgttctgaatagccagttgaccaatttcaggtgatctcaagctgaaaggggaagagtgactctgatagatgtatcagctctgtactgtacattacatagaagtaataaagttttaataatatcgtttgtgtctcatagtctgtccagagtacctctttgccacttaaaggctgtacygtgggaagggtggcatagaagtgatatggtgaggtgaagaggtctttctaaatcccagcagagtttgtagagaaattagaacaataaacctcctaaatattcagtttcctacacatttcctgtaaagtcaccataggggcttccttgctcatcttatataaaccaaaaaagcccaatgttcactttggtatgtctttatttacttttgtgcaagtccctacaattgctagctatgataagcagggatttggcattagctacaactataattcactggaactaaggttacaaaacagcagt

SEQ ID NO: 30456 - DNA, 600 bp, Chicken  19866894250262_1
aatgccttctttgcctcagtctttaataataagacttgttactccctgggcacacagcccccctgcgctggtagatagggatggggaacagaataagtcctgcatgatccatgattgagttagttttggacctgctccaaaagttggatgttcacaagcccatggggcccgatggattgcaccctagagtgctgagggagttggcagatgtggttgccaagccactctccatcattcttcggcaatcctggctaactggggatgtcctggcaaactggagactggcaaatatggcacccrtcttcaaaaagggctggaaagatgatcctggtagctacagacctatcagtctcacctcagtgcccgggaaagttatggaacggataatctcgggagccatcatggaccaattaaacatcaaccaggggatcaggcccaggcagcatgggtttacgaatggtagatmctgtctgacaaacctgatttaattctatgacaaggtgacccgcttagtggatgaaggtgaggctgtcaatgtggtctacctggacttcagaaaagcttttgacactgtcccccacagcaytctcatggagaagc

SEQ ID NO: 30457 - DNA, 506 bp, Chicken  19866894250262_2
gcccgatggattgcaccctagagtgctgagggagttggcagatgtggttgccaagccactctccatcattcttcggcaatcctggctaactggggatgtcctggcaaactggagactggcaaatatggcacccrtcttcaaaaagggctggaaagatgatcctggtagctacagacctatcagtctcacctcagtgcccgggaaagttatggaacggataatctcgggagccatcatggaccaattaaacatcaaccaggggatcaggcccaggcagcatgggtttacgaatggtagatmctgtctgacaaacctgatttaattctatgacaaggtgacccgcttagtggatgaaggtgaggctgtcaatgtggtctacctggacttcagaaaagcttttgacactgtcccccacagcaytctcatggagaagctggctgcccatggtttggattggcgtaagctctgctggggtgaagcactgactggatggccgggcccaaatt

SEQ ID NO: 30458 - DNA, 386 bp, Chicken  19866894250262_3
aaatatggcacccrtcttcaaaaagggctggaaagatgatcctggtagctacagacctatcagtctcacctcagtgcccgggaaagttatggaacggataatctcgggagccatcatggaccaattaaacatcaaccaggggatcaggcccaggcagcatgggtttacgaatggtagatmctgtctgacaaacctgatttaattctatgacaaggtgacccgcttagtggatgaaggtgaggctgtcaatgtggtctacctggacttcagaaaagcttttgacactgtcccccacagcaytctcatggagaagctggctgcccatggtttggattggcgtaagctctgctggggtgaagcactgactggatggccgggcccaaatt

SEQ ID NO: 30459 - DNA, 599 bp, Chicken  19866894250264_1
  misc_feature (1)..(8): n is any nucleotide
nnnnnnnnattttgcattactctacatatacattcattaaaatcttagcattttgtcttctctatttctgcctagaaatctcagaaaaatcacagaagttagtttcagtgaaagagaacatgaaatatgggactaggaatagaccccccaaattctcatgcagcagtcatgtaatgtagtcattttatttctgctacagacaaaagtcatgcaaccaaatttatccacactccagtgttgaggctttggtgagaatttatatatatatatgcatcaccattggttacattatcatgatgyatttacatctgaatctatttgctttamaaggaaatgtgcttgtgctgcatggatggaataatcatctgctttggttacaaaacaagatcgcaaatacataatattccaaaacactatgttatagcaataaaatggtgttaccaaacttgaatgtagatggttggaaaaaaatcaatttacctgagtgctaacaaagcacttggccataacgtattctcttactttccagtttgggaaatacagtttacaatttctagtgtaattttaatgaaaatggtattttaatacaatggttatgt

SEQ ID NO: 30460 - DNA, 600 bp, Chicken  19866894250264_2
atacattcattaaaatcttagcattttgtcttctctatttctgcctagaaatctcagaaaaatcacagaagttagtttcagtgaaagagaacatgaaatatgggactaggaatagaccccccaaattctcatgcagcagtcatgtaatgtagtcattttatttctgctacagacaaaagtcatgcaaccaaatttatccacactccagtgttgaggctttggtgagaatttatatatatatatgcatcaccattggttacattatcatgatgyatttacatctgaatctatttgctttamaaggaaatgtgcttgtgctgcatggatggaataatcatctgctttggttacaaaacaagatcgcaaatacataatattccaaaacactatgttatagcaataaaatggtgttaccaaacttgaatgtagatggttggaaaaaaatcaatttacctgagtgctaacaaagcacttggccataacgtattctcttactttccagtttgggaaatacagtttacaatttctagtgtaattttaatgaaaatggtattttaatacaatggttatgtgaaaactaatgtcggagtatgcatttta

SEQ ID NO: 30461 - DNA, 600 bp, Chicken  19866894250265_1
ctgtgcggaagccatcatgcacaggcgcggcccagagctgagggagctttgtaatttgatttggactggacactccactttgcagaagcagaagtggccacctcccttgacgctggccttggtgttgtagtggggtatgagctgctctgccagcacattgcacaatgctggctcttctggccaacccgcatcccaaaggagctggcaggattcacagattcgggtttgcccattactaagtattatttcccaatgcatttatgaagctatcctacctccaaattccaaactggataagtyagaaacgtttggaagcttcaaaagaaattttggagaggagaaatgagaagagatctcatggatctagttgttgtccttattttgaatgctcttcttccagctttctcatcctttatgatagcaggcatgaattaatctaatattaattttcattaaactctggccaactgaacgtgccagsaagattaaagagagaagtataggctgtcatcctgctcgtggctgtatccaaagcaaaactagttttaataaaactatgtgatagacagaaagcagtttgcagtggtgttgtgaggaaaa

SEQ ID NO: 30462 - DNA, 590 bp, Chicken  19866894250265_2
caacccgcatcccaaaggagctggcaggattcacagattcgggtttgcccattactaagtattatttcccaatgcatttatgaagctatcctacctccaaattccaaactggataagtyagaaacgtttggaagcttcaaaagaaattttggagaggagaaatgagaagagatctcatggatctagttgttgtccttattttgaatgctcttcttccagctttctcatcctttatgatagcaggcatgaattaatctaatattaattttcattaaactctggccaactgaacgtgccagsaagattaaagagagaagtataggctgtcatcctgctcgtggctgtatccaaagcaaaactagttttaataaaactatgtgatagacagaaagcagtttgcagtggtgttgtgaggaaaaggctcctctgatttatgttcttcattattatagcagagctttgtgaacttactgtgggaacttgtgtccttcactgtgtgggaagcaagccagactgctttaactgtgtgtatcatcgttgccttcctgatgcgtgctttccttctctttcccaaggaggaaaggaagagt

SEQ ID NO: 30463 - DNA, 599 bp, Chicken  19866894250271_1
  misc_feature (1)..(224): n is any nucleotide
nnnnnnnnnnnnnnnnnnnnnnnnnnnnnnnnnnnnnnnnnnnnnnnnnnnnnnnnnnnnnnnnnnnnnnnnnnnnnnnnnnnnnnnnnnnnnnnnnnnnnnnnnnnnnnnnnnnnnnnnnnnnnnnnnnnnnnnnnnnnnnnnnnnnnnnnnnnnnnnnnnnnnnnnnnnnnnnnnnnnnnnnnnnnnnnnnnnnnnnnnnnnnnnnnnnnnnnnnnnnnnnnaaatgattcacagtaaaagggggaggaatagaataatcaaggctgaggaataatttcagagtgtaactttgtaacragtccctggaggaaatacctgttccttttgttcccctctgcaaagttatgtaattgatgtctaactgctatgctaatgttccctgcttctgtcagaatccctctggaaactcactgaggtaaccagggttctctcctggtgctactccatcagcaagagaatatgggattctctgacacatatcacacttcaggcagtaggacacaatggaagctycagtgccaaagggctaataactgtaagtataagagaatgaaatatactaattaattttcagaatgtagagcaaaccaggaaac

SEQ ID NO: 30464 - DNA, 599 bp, Chicken  19866894250271_2
  misc_feature (1)..(8): n is any nucleotide
nnnnnnnnaaatgattcacagtaaaagggggaggaatagaataatcaaggctgaggaataatttcagagtgtaactttgtaacragtccctggaggaaatacctgttccttttgttcccctctgcaaagttatgtaattgatgtctaactgctatgctaatgttccctgcttctgtcagaatccctctggaaactcactgaggtaaccagggttctctcctggtgctactccatcagcaagagaatatgggattctctgacacatatcacacttcaggcagtaggacacaatggaagctycagtgccaaagggctaataactgtaagtataagagaatgaaatatactaattaattttcagaatgtagagcaaaccaggaaactgttaccttttataatgaaagactcttactggtactgttacattctattaataataataatgataattaaaaaaaataagcaaagcatatctgctatagcttggtttattaacttcttatatcagacagcaaaattttaagatggcagttaactgcaaccaaaaaaaggatttggtcctcatcagaaggcagagattgtttctctccctgaccttc

SEQ ID NO: 30465 - DNA, 600 bp, Chicken  19866894250271_3
gctaataactgtaagtataagagaatgaaatatactaattaattttcagaatgtagagcaaaccaggaaactgttaccttttataatgaaagactcttactggtactgttacattctattaataataataatgataattaaaaaaaataagcaaagcatatctgctatagcttggtttattaacttcttatatcagacagcaaaattttaagatggcagttaactgcaaccaaaaaaaggatttggtcctcatcagaaggcagagattgtttctctccctgaccttcctatccctttcastttacacacacacacatgcagtccccaatgaaaaaacaaagcagaaatgatttgtcccagctcctgaaccacacataccacagtgcctgttacagagccatgcatgacagctggtctgggcagaacggtgacctcaggtaactctcccactttgctgaagagtcgtaatttggaaaagatgtgattcactttttacctatggtgcctaattaactttaattaacgttaccttgtgggaccctaatcaacatgcataaggctgcatgtttgctttctgattgtttttagttttgtgaaagc

SEQ ID NO: 30466 - DNA, 600 bp, Chicken  19866894250273_1
aaacagagacagcattggtttaaatttgaactttaacagggatgaatttccttgacagtttcagtgaagttcattacagtatgactgttcattacatcatttcacatcaaatttattccccttgccaggcttcaaattcagctgattctaataggtgcattctggcatttttagtttacataaactgaataccttattttcccacacttattatagatatattccttactgtatttattctaagaatgttctacattctcccatgtgtggaaaacaagagcttatggctaagctcactgyggtgaagagactgacctrgcaaatctcacttgagcaaccatctcactgaataaagtcttaccttttaataattttgatttttttttcttttttttctttttttcccagctgctatacactccaaagtyttggtcaagmagcaattcaaatatagaaactttatatctgattactgcacactttacatatttcagtctcttcaattactctgtgatccagtcctctggattacagcctgtatgtgttcatggttgatgcaaaagttcctgtctgaaatctcttgcaagcagcaggggaaaa

SEQ ID NO: 30467 - DNA, 600 bp, Chicken  19866894250273_2
tttaaatttgaactttaacagggatgaatttccttgacagtttcagtgaagttcattacagtatgactgttcattacatcatttcacatcaaatttattccccttgccaggcttcaaattcagctgattctaataggtgcattctggcatttttagtttacataaactgaataccttattttcccacacttattatagatatattccttactgtatttattctaagaatgttctacattctcccatgtgtggaaaacaagagcttatggctaagctcactgyggtgaagagactgacctrgcaaatctcacttgagcaaccatctcactgaataaagtcttaccttttaataattttgatttttttttcttttttttctttttttcccagctgctatacactccaaagtyttggtcaagmagcaattcaaatatagaaactttatatctgattactgcacactttacatatttcagtctcttcaattactctgtgatccagtcctctggattacagcctgtatgtgttcatggttgatgcaaaagttcctgtctgaaatctcttgcaagcagcaggggaaaataaataaataaataattc

SEQ ID NO: 30468 - DNA, 600 bp, Chicken  19866894250273_3
gcttcaaattcagctgattctaataggtgcattctggcatttttagtttacataaactgaataccttattttcccacacttattatagatatattccttactgtatttattctaagaatgttctacattctcccatgtgtggaaaacaagagcttatggctaagctcactgyggtgaagagactgacctrgcaaatctcacttgagcaaccatctcactgaataaagtcttaccttttaataattttgatttttttttcttttttttctttttttcccagctgctatacactccaaagtyttggtcaagmagcaattcaaatatagaaactttatatctgattactgcacactttacatatttcagtctcttcaattactctgtgatccagtcctctggattacagcctgtatgtgttcatggttgatgcaaaagttcctgtctgaaatctcttgcaagcagcaggggaaaataaataaataaataattccaagcttcaatttattttttagctaatcagagtgatcttaaatctctttagttgaacaaaacaagatactactgctacatctctgattgtcttagtgttgaaattatcac

SEQ ID NO: 30469 - DNA, 600 bp, Chicken  19866894250273_4
cagctgattctaataggtgcattctggcatttttagtttacataaactgaataccttattttcccacacttattatagatatattccttactgtatttattctaagaatgttctacattctcccatgtgtggaaaacaagagcttatggctaagctcactgyggtgaagagactgacctrgcaaatctcacttgagcaaccatctcactgaataaagtcttaccttttaataattttgatttttttttcttttttttctttttttcccagctgctatacactccaaagtyttggtcaagmagcaattcaaatatagaaactttatatctgattactgcacactttacatatttcagtctcttcaattactctgtgatccagtcctctggattacagcctgtatgtgttcatggttgatgcaaaagttcctgtctgaaatctcttgcaagcagcaggggaaaataaataaataaataattccaagcttcaatttattttttagctaatcagagtgatcttaaatctctttagttgaacaaaacaagatactactgctacatctctgattgtcttagtgttgaaattatcacttcactccct

SEQ ID NO: 30470 - DNA, 600 bp, Chicken  19866894250281_1
gtccatggacgttctcttttggagtcaaatctacaggcattacatcttttggtgcaaacgtcacattttctggctggtattcatcctcttcatccttgtgcaaaataaaagtatgtaagaacaacaacaacaaagttctgtatatttggcttttacaacatctagttaacatgagactaggcaagttcaagtttcagtaactatatattaaaatatttatgaactacacctgctcagctaacaaaagaataaatgtacttacattcaacctttttcataataaacacagtaaatatttawgaasactttaacaagactttaaactgtgtgttaaagtactgcttaaaaacatcaaaaagtttttttttttttttttataaagggtgttaacacacgtaagttatttatacataagataacaaataacttctgcctgtataatacctcagaaccttctgacagtccaggcggtaatgcacaaccatatattttcacttcagggtctgtaacagatgcaacagcatcagtattaaattaaagttcactagcaaatttctctaagattaaataaacagattaaataaaaggaaagattaaaac

SEQ ID NO: 30471 - DNA, 600 bp, Chicken  19866894250281_2
atggacgttctcttttggagtcaaatctacaggcattacatcttttggtgcaaacgtcacattttctggctggtattcatcctcttcatccttgtgcaaaataaaagtatgtaagaacaacaacaacaaagttctgtatatttggcttttacaacatctagttaacatgagactaggcaagttcaagtttcagtaactatatattaaaatatttatgaactacacctgctcagctaacaaaagaataaatgtacttacattcaacctttttcataataaacacagtaaatatttawgaasactttaacaagactttaaactgtgtgttaaagtactgcttaaaaacatcaaaaagtttttttttttttttttataaagggtgttaacacacgtaagttatttatacataagataacaaataacttctgcctgtataatacctcagaaccttctgacagtccaggcggtaatgcacaaccatatattttcacttcagggtctgtaacagatgcaacagcatcagtattaaattaaagttcactagcaaatttctctaagattaaataaacagattaaataaaaggaaagattaaaacaaac

SEQ ID NO: 30472 - DNA, 600 bp, Chicken  19866894250281_3
tcacattttctggctggtattcatcctcttcatccttgtgcaaaataaaagtatgtaagaacaacaacaacaaagttctgtatatttggcttttacaacatctagttaacatgagactaggcaagttcaagtttcagtaactatatattaaaatatttatgaactacacctgctcagctaacaaaagaataaatgtacttacattcaacctttttcataataaacacagtaaatatttawgaasactttaacaagactttaaactgtgtgttaaagtactgcttaaaaacatcaaaaagsttttttttttttttttataaagggtgttaacacacgtaagttatttatacataagataacaaataacttctgcctgtataatacctcagaaccttctgacagtccaggcggtaatgcacaaccatatattttcacttcagggtctgtaacagatgcaacagcatcagtattaaattaaagttcactagcaaatttctctaagattaaataaacagattaaataaaaggaaagattaaaacaaacttctcaatgggtgtgtgaatgccagctttctacaacggagttcaggcacctcagtg

SEQ ID NO: 30473 - DNA, 599 bp, Chicken  19866894250282_1
  misc_feature (1)..(8): n is any nucleotide
nnnnnnnncatctgataaagcagtcctgggagcaaaacgctgcctctacatcagagagcccatgtggctgcagtgggacagagttgagatcccacatttgtactggttccagctcttctgccataagcagggctgtcagccaccagatcaggctgcccatagccccatccaaccttgcctcgaatacctccagagatggggcacccacaacctctctgggcaggctgtgccagtgcctcacctctctgtgagtgaacagtttcttcctaacatctaacctgaactccctttttttatttkaaagctttcgctcccttccctatcactattagaccatgtaaaaagtcagtccccctcctgcttgtaaggttcaagtactggaaggctgcaacgaggtctccccggagcctgcctttctccaagctaaggtctaaatgtcttcattctcgtgcaccagggtatactatttagtaccagaaaactacatctaaaataataattttaattcatttgtagagggtctgtctcatagataggtctatgctatattcacctttgtttkctttatttgtaaaacatccactatttttccatggtat

SEQ ID NO: 30474 - DNA, 600 bp, Chicken  19866894250282_2
cttcctaacatctaacctgaactccctttttttatttkaaagctttcgctcccttccctatcactattagaccatgtaaaaagtcagtccccctcctgcttgtaaggttcaagtactggaaggctgcaacgaggtctccccggagcctgcctttctccaagctaaggtctaaatgtcttcattctcgtgcaccagggtatactatttagtaccagaaaactacatctaaaataataattttaattcatttgtagagggtctgtctcatagataggtctatgctatattcacctttgtttkctttatttgtaaaacatccactatttttccatggtatggatgatcttgtttctgtcactttccctgcaacacagcgctatgttcattcttccttataaaatttctgacggagaagcgatttgtaagaatgacagagaaatggcttctcatttgtgtaccccacagcaatctgacacagagagaggctctggtgagatacacaagccccagttcttaccgagtttcaggcagcccagattaaaaaaaaatcacgtcaaccaattcgatcataaagattctaattcagcacaggttaattga

SEQ ID NO: 30475 - DNA, 599 bp, Chicken  19866894250285_1
  misc_feature (1)..(176): n is any nucleotide
nnnnnnnnnnnnnnnnnnnnnnnnnnnnnnnnnnnnnnnnnnnnnnnnnnnnnnnnnnnnnnnnnnnnnnnnnnnnnnnnnnnnnnnnnnnnnnnnnnnnnnnnnnnnnnnnnnnnnnnnnnnnnnnnnnnnnnnnnnnnnnnnnnnnnnnnnnnnnnnnnnnnnnnnnnnnnnnnacatggagtgttgtttcccattcacccatgagatgagagcatagatacggccgacaaccatggggcactgcttatgctggagatgttcagaggatgctgcaacaagatgctgtgcaagaaagcrgttttcctgggtagtaaggaacaaagctgaagtatttgggcagcacgaggcagctgaggtgctgctttcgagggtcagcaaaaagcccacaaaaatgcctctggccaagcagccacgttgtctgagctggaaaccaccagagaggagtgactgtgcataatggcctgggagcccccacacagccrggaaatggacgagttttacaggctgcattaagtgcccctgtgaggctgtgtcctttacagccttttsctgcatccctcccttgaaagctttgaattctgggggtgccagagaga

SEQ ID NO: 30476 - DNA, 600 bp, Chicken  19866894250285_2
gttgtttcccattcacccatgagatgagagcatagatacggccgacaaccatggggcactgcttatgctggagatgttcagaggatgctgcaacaagatgctgtgcaagaaagcrgttttcctgggtagtaaggaacaaagctgaagtatttgggcagcacgaggcagctgaggtgctgctttcgagggtcagcaaaaagcccacaaaaatgcctctggccaagcagccacgttgtctgagctggaaaccaccagagaggagtgactgtgcataatggcctgggagcccccacacagccrggaaatggacgagttttacaggctgcattaagtgcccctgtgaggctgtgtcctttacagccttttsctgcatccctcccttgaaagctttgaattctgggggtgccagagagatgatcacggccctctttgaacagaacccccaggatcygtgaggggtcccatcaaggtggcttgttttgctgcctctgggttgacctctctgccagtttgaaacctatgagatgtctctgggagatgggaaatgctgggccatttcacagctgggaacctgatggataacactaggggtttygaatt

SEQ ID NO: 30477 - DNA, 600 bp, Chicken  19866894250285_3
ctggagatgttcagaggatgctgcaacaagatgctgtgcaagaaagcrgttttcctgggtagtaaggaacaaagctgaagtatttgggcagcacgaggcagctgaggtgctgctttcgagggtcagcaaaaagcccacaaaaatgcctctggccaagcagccacgttgtctgagctggaaaccaccagagaggagtgactgtgcataatggcctgggagcccccacacagccrggaaatggacgagttttacaggctgcattaagtgcccctgtgaggctgtgtcctttacagccttttsctgcatccctcccttgaaagctttgaattctgggggtgccagagagatgatcacggccctctttgaacagaacccccaggatcygtgaggggtcccatcaaggtggcttgttttgctgcctctgggttgacctctctgccagtttgaaacctatgagatgtctctgggagatgggaaatgctgggccatttcacagctgggaacctgatggataacactaggggtttygaattaccctccctgcaacaaactgcatttaacttcttcctcctgccacctccgtccgtctgcctcctgcgc

SEQ ID NO: 30478 - DNA, 600 bp, Chicken  19866894250285_4
tgggcagcacgaggcagctgaggtgctgctttcgagggtcagcaaaaagcccacaaaaatgcctctggccaagcagccacgttgtctgagctggaaaccaccagagaggagtgactgtgcataatggcctgggagcccccacacagccrggaaatggacgagttttacaggctgcattaagtgcccctgtgaggctgtgtcctttacagccttttsctgcatccctcccttgaaagctttgaattctgggggtgccagagagatgatcacggccctctttgaacagaacccccaggatcygtgaggggtcccatcaaggtggcttgttttgctgcctctgggttgacctctctgccagtttgaaacctatgagatgtctctgggagatgggaaatgctgggccatttcacagctgggaacctgatggataacactaggggtttygaattaccctccctgcaacaaactgcatttaacttcttcctcctgccacctccgtccgtctgcctcctgcgccagtgcattggagccaacacacctcaggccactcacccatgagcgctgattaaaaggtgtgattaaagaacagggggacgtttg

SEQ ID NO: 30479 - DNA, 477 bp, Chicken  19866894250285_5
agccrggaaatggacgagttttacaggctgcattaagtgcccctgtgaggctgtgtcctttacagccttttsctgcatccctcccttgaaagctttgaattctgggggtgccagagagatgatcacggccctctttgaacagaacccccaggatcygtgaggggtcccatcaaggtggcttgttttgctgcctctgggttgacctctctgccagtttgaaacctatgagatgtctctgggagatgggaaatgctgggccatttcacagctgggaacctgatggataacactaggggtttygaattaccctccctgcaacaaactgcatttaacttcttcctcctgccacctccgtccgtctgcctcctgcgccagtgcattggagccaacacacctcaggccactcacccatgagcgctgattaaaaggtgtgattaaagaacagggggacgtttgcccagcacacagagtccccca

SEQ ID NO: 30480 - DNA, 599 bp, Chicken  19866894250291_1
  misc_feature (1)..(161): n is any nucleotide
nnnnnnnnnnnnnnnnnnnnnnnnnnnnnnnnnnnnnnnnnnnnnnnnnnnnnnnnnnnnnnnnnnnnnnnnnnnnnnnnnnnnnnnnnnnnnnnnnnnnnnnnnnnnnnnnnnnnnnnnnnnnnnnnnnnnnnnnnnnnnnnnnnnnnnnnnnnnnnnnncacaagagcttaacaggaaggataacatccgtgtccaagcgcctccccagcaaacgtgcctaaaccttaggcaaggaggctgtcagagccaaaagtacagatttggagtttcacagacttggtatcacagagagctgcrcttgtccctggtggccaaattgccctgtgcttcttcgatgtgacactgctaccaccaagaatgtgatctccaaatgtgtgggctttcctggcagctataaattaaattgctgtcttcaaggaacgagcagcttgctcattaagctcctctagcaaccaccttattgctaatgcatgtgggttgggcgtgggttttgttttgtttttcctggttcaggcaggagaggttacatgtcaatttgccttccttcagtctgcttgggtgcctgtgtgactcatcagctcctgagaagtgtccgg

SEQ ID NO: 30481 - DNA, 600 bp, Chicken  19866894250292_1
acaggagaatcctggtggagtgcctactggtagagcaattattcctcagcctgaaaggcaagacaggaatcacattccctaatgcctctcctaaagcataattcaataattaatagttgctctttggcacttgtatggtaaaataatggcatctgaggatggggagcgcagggcagcctgaggttcccctcagcggtgatcactcatatcagaagagcttttacccaagaaatgagaagtttctggatttcagttgggattcacagccacagcccaggtcaacgggccacaaaggcatcwcgcmgcctttctcgcagcctgggctccacctgtgtccaacagagagctcctggagacctgtaacaggagagagaacstcagaaaccgacacaggaggtggagcctcttcctcaggctgctgggtgctgcagggcagtgctgggctgcagcaggctgcagagagctgaggtcccattctgctgcccccacgttggccctgggatacttctccaaaagaatggtgatgcgttggcacagctgtgcaggggtgggcagtccccgtccatggaggcgttcagacccgcggggatgtggcactga

SEQ ID NO: 30482 - DNA, 600 bp, Chicken  19866894250292_2
gagaatcctggtggagtgcctactggtagagcaattattcctcagcctgaaaggcaagacaggaatcacattccctaatgcctctcctaaagcataattcaataattaatagttgctctttggcacttgtatggtaaaataatggcatctgaggatggggagcgcagggcagcctgaggttcccctcagcggtgatcactcatatcagaagagcttttacccaagaaatgagaagtttctggatttcagttgggattcacagccacagcccaggtcaacgggccacaaaggcatcwcgcmgcctttctcgcagcctgggctccacctgtgtccaacagagagctcctggagacctgtaacaggagagagaacstcagaaaccgacacaggaggtggagcctcttcctcaggctgctgggtgctgcagggcagtgctgggctgcagcaggctgcagagagctgaggtcccattctgctgcccccacgttggccctgggatacttctccaaaagaatggtgatgcgttggcacagctgtgcaggggtgggcagtccccgtccatggaggcgttcagacccgcggggatgtggcactgactca

SEQ ID NO: 30483 - DNA, 600 bp, Chicken  19866894250292_3
cctaatgcctctcctaaagcataattcaataattaatagttgctctttggcacttgtatggtaaaataatggcatctgaggatggggagcgcagggcagcctgaggttcccctcagcggtgatcactcatatcagaagagcttttacccaagaaatgagaagtttctggatttcagttgggattcacagccacagcccaggtcaacgggccacaaaggcatcwcgcmgcctttctcgcagcctgggctccacctgtgtccaacagagagctcctggagacctgtaacaggagagagaacstcagaaaccgacacaggaggtggagcctcttcctcaggctgctgggtgctgcagggcagtgctgggctgcagcaggctgcagagagctgaggtcccattctgctgcccccacgttggccctgggatacttctccaaaagaatggtgatgcgttggcacagctgtgcaggggtgggcagtccccgtccatggaggcgttcagacccgcggggatgtggcactgactcagcactgcattggctctttagaaacataaaccaaccctgagtgggggccatgcaaataaggagatacagacatt

SEQ ID NO: 30484 - DNA, 600 bp, Chicken  19866894250297_1
ctctggtggttggcgaccctgcacatagtaggggggttgaaactagatgatgatcattgtggtccttttcaacccaggccattctatgattctatgattatatgatgatatttcttagatagcacttttaccttcaaaaattctttccattacattgtgcagaacagaaagcaaaagatttggagacagaccactttggagtcctcaggaagttaagaagtgcatctgttgaaatagtgttattggcagcagtactagtaatacaagtaaatctttgaaataaatggaagtgatcaatcyatcactaagagacaaagtagggacaccgggagattcacaatttccccatacgttttagcataagattttgtttcaatttctcactttcatctacttttgtgctctttgatctgtaaaacagggatagaaatacccacttactgtattggactgtcatgagtctccagtgatttcacacttgaaattctctggcaataaagacctcagcagagaagtctgaatatctaaagagaggggccascactggtttttagtgcaggtatgatgctggacctgataaatcatactggaaagtaaatt

SEQ ID NO: 30485 - DNA, 600 bp, Chicken  19866894250297_2
attggcagcagtactagtaatacaagtaaatctttgaaataaatggaagtgatcaatcyatcactaagagacaaagtagggacaccgggagattcacaatttccccatacgttttagcataagattttgtttcaatttctcactttcatctacttttgtgctctttgatctgtaaaacagggatagaaatacccacttactgtattggactgtcatgagtctccagtgatttcacacttgaaattctctggcaataaagacctcagcagagaagtctgaatatctaaagagaggggccascactggtttttagtgcaggtatgatgctggacctgataaatcatactggaaagtaaattttcatccttgaaagcagcaggtactcctattaagaagtgttcaggtgatagaaatttggtcgtgctgagttcactgacatgcagctaaaaatgaaattaacaaaaagattattaagttgttagtcttaaaatcttagaataatcattgtcacacagcacagttatctcatttcactgtaactctttggatctaaacacgtgaagagmgtgatgtgccatatttgaaacagaacagccaatt

SEQ ID NO: 30486 - DNA, 600 bp, Chicken  19866894250297_3
cagagaagtctgaatatctaaagagaggggccascactggtttttagtgcaggtatgatgctggacctgataaatcatactggaaagtaaattttcatccttgaaagcagcaggtactcctattaagaagtgttcaggtgatagaaatttggtcgtgctgagttcactgacatgcagctaaaaatgaaattaacaaaaagattattaagttgttagtcttaaaatcttagaataatcattgtcacacagcacagttatctcatttcactgtaactctttggatctaaacacgtgaagagmgtgatgtgccatatttgaaacagaacagccaattaatgatggtagcagttgagaaaagcaaacagcatgactatttttcgttatgaatctgcaaaagtgaggcctggtgagttttgtttaaaagcagaaatacaaaaccaattttcarttcacttacaaaaatgaaccgcaccctcccttcagccagccagaaaatatgaaaaaatgctgagaaattctctacagatgatcaatacttgactccacttgataaatatgcccagacattggaaataattgcctaagctctacagtgctatt

SEQ ID NO: 30487 - DNA, 600 bp, Chicken  19866894250297_4
ttggtcgtgctgagttcactgacatgcagctaaaaatgaaattaacaaaaagattattaagttgttagtcttaaaatcttagaataatcattgtcacacagcacagttatctcatttcactgtaactctttggatctaaacacgtgaagagmgtgatgtgccatatttgaaacagaacagccaattaatgatggtagcagttgagaaaagcaaacagcatgactatttttcgttatgaatctgcaaaagtgaggcctggtgagttttgtttaaaagcagaaatacaaaaccaattttcarttcacttacaaaaatgaaccgcaccctcccttcagccagccagaaaatatgaaaaaatgctgagaaattctctacagatgatcaatacttgactccacttgataaatatgcccagacattggaaataattgcctaagctctacagtgctattatgtgtttgaaaacctagctatagaaaatgtaaactagtgggaaaacaaattagggagtacattatcattaagagcagtatgcttatgtagaaaaaagtaaagcactaagagcttggctgtacttccatgtgcagaagtcaggagaaa

SEQ ID NO: 30488 - DNA, 600 bp, Chicken  19866894250297_5
caccctcccttcagccagccagaaaatatgaaaaaatgctgagaaattctctacagatgatcaatacttgactccacttgataaatatgcccagacattggaaataattgcctaagctctacagtgctattatgtgtttgaaaacctagctatagaaaatgtaaactagtgggaaaacaaattagggagtacattatcattaagagcagtatgcttatgtagaaaaaagtaaagcactaagagcttggctgtacttccatgtgcagaagtcaggagaaatgactggtcagtgttatatamtctcattctacgtgtcgacttcctttatatagcaacaacttagtaatctaagtacccagtgctaaaaaaataaaaataaaaattttatgcatgtatttattgcacaaaatataaacttcaaacaaaacaaaacaaaacaaaaacaaacaaacaaacaaaagcctcttccattcctctatggccgtcatcaaaaaactgcatcagacaaccagtaagaaagcccaaatgagctatcccactccccttcacagtggaagcacatagttgcagggtaaagaaataagcaataaagcagtggat

SEQ ID NO: 30489 - DNA, 600 bp, Chicken  19866894250303_1
atgtttttccacctataggctgtgaacaacttcaaaaatgaaactggctacacaaaaaggctccgtaagattcagcagcaacagcagcagccaccaccaccacctccacctccaccaccactaatgagacagacgataacacgcaaccttcagcctctaatgaggccagcaatttccagacagcaggatccactaatgattccattagcttctctgtcttctcactctgctgctgccttggcccctggtcagtctgttgcagctgcattaccagtaaacccatcttctgtccttgtctcygatctccctccagcagtgtctctgtctctccgcggtgaaaagccagatggaccttttcggtaagttaatctgtagctcaacacaaatacagaagacaacaaaatgcttaagataggttattcctctgaagcttcggggtgatttatgtatggattgctaatggcaattcccagtagttgtataagttctgctttttgtttttttgctttggatgaggacactttacattggagttgtgtctcattcaagaacttctcctaagtttttcttgtttgattccctatcagtcatttagataca

SEQ ID NO: 30490 - DNA, 599 bp, Chicken  19866894250305_1
  misc_feature (1)..(136): n is any nucleotide
nnnnnnnnnnnnnnnnnnnnnnnnnnnnnnnnnnnnnnnnnnnnnnnnnnnnnnnnnnnnnnnnnnnnnnnnnnnnnnnnnnnnnnnnnnnnnnnnnnnnnnnnnnnnnnnnnnnnnnnnnnnnnnnnnnnnnnnntgtggagtctgagttttaccaaataaagtagtcaaacggagcggtgtgtgctggcgctgccctgctccgctgagcatcacccgcgtgtgggatccacggaaccacacacaatggcccgggttggaagggaccccgaggattacgaagctccaacctccccagcrcaggcagggccaccaacctccacagttaataccagcccaggctgcccagggccccatccaacctggccttgaacacygtcggggatggggcatccacagcctttctgggcagcctcttccagcacctcacccctcccgtagaaaagaaagwaaggattccttcaacytaaggaagggttcctgccttccytggcgcagcaggagcagggagtacagagctgggagctggaagggcacaatcgagtcaggctgcgtccaggctggggtcctgcctctcgttccctgtgtgtaaaacagag

SEQ ID NO: 30491 - DNA, 599 bp, Chicken  19866894250305_2
  misc_feature (1)..(59): n is any nucleotide
nnnnnnnnnnnnnnnnnnnnnnnnnnnnnnnnnnnnnnnnnnnnnnnnnnnnnnnnnnntgtggagtctgagttttaccaaataaagtagtcaaacggagcggtgtgtgctggcgctgccctgctccgctgagcatcacccgcgtgtgggatccacggaaccacacacaatggcccgggttggaagggaccccgaggattacgaagctccaacctccccagcrcaggcagggccaccaacctccacagttaataccagcccaggctgcccagggccccatccaacctggccttgaacacygtcggggatggggcatccacagcctttctgggcagcctcttccagcacctcacccctcccgtagaaaagaaagwaaggattccttcaacytaaggaagggttcctgccttccytggcgcagcaggagcagggagtacagagctgggagctggaagggcacaatcgagtcaggctgcgtccaggctggggtcctgcctctcgttccctgtgtgtaaaacagagattaatcattatcctcctggcctccatttggcttcgagctgcctgagccctggcttgctgctgtcctgattgctgag

SEQ ID NO: 30492 - DNA, 600 bp, Chicken  19866894250305_3
ttaccaaataaagtagtcaaacggagcggtgtgtgctggcgctgccctgctccgctgagcatcacccgcgtgtgggatccacggaaccacacacaatggcccgggttggaagggaccccgaggattacgaagctccaacctccccagcrcaggcagggccaccaacctccacagttaataccagcccaggctgcccagggccccatccaacctggccttgaacacygtcggggatggggcatccacagcctttctgggcagcctcttccagcacctcacccctcccgtagaaaagaaagwaaggattccttcaacytaaggaagggttcctgccttccytggcgcagcaggagcagggagtacagagctgggagctggaagggcacaatcgagtcaggctgcgtccaggctggggtcctgcctctcgttccctgtgtgtaaaacagagattaatcattatcctcctggcctccatttggcttcgagctgcctgagccctggcttgctgctgtcctgattgctgagcagttgccaaaatgcacgcgggggggctgggggagtccccagctgccatcttccccgtgggaacccgtgggctta

SEQ ID NO: 30493 - DNA, 600 bp, Chicken  19866894250305_4
tcaaacggagcggtgtgtgctggcgctgccctgctccgctgagcatcacccgcgtgtgggatccacggaaccacacacaatggcccgggttggaagggaccccgaggattacgaagctccaacctccccagcrcaggcagggccaccaacctccacagttaataccagcccaggctgcccagggccccatccaacctggccttgaacacygtcggggatggggcatccacagcctttctgggcagcctcttccagcacctcacccctcccgtagaaaagaaagwaaggattccttcaacytaaggaagggttcctgccttccytggcgcagcaggagcagggagtacagagctgggagctggaagggcacaatcgagtcaggctgcgtccaggctggggtcctgcctctcgttccctgtgtgtaaaacagagattaatcattatcctcctggcctccatttggcttcgagctgcctgagccctggcttgctgctgtcctgattgctgagcagttgccaaaatgcacgcgggggggctgggggagtccccagctgccatcttccccgtgggaacccgtgggcttaacagagcccccacggg

SEQ ID NO: 30494 - DNA, 594 bp, Chicken  19866894250305_5
cgctgccctgctccgctgagcatcacccgcgtgtgggatccacggaaccacacacaatggcccgggttggaagggaccccgaggattacgaagctccaacctccccagcrcaggcagggccaccaacctccacagttaataccagcccaggctgcccagggccccatccaacctggccttgaacacygtcggggatggggcatccacagcctttctgggcagcctcttccagcacctcacccctcccgtagaaaagaaagwaaggattccttcaacytaaggaagggttcctgccttccytggcgcagcaggagcagggagtacagagctgggagctggaagggcacaatcgagtcaggctgcgtccaggctggggtcctgcctctcgttccctgtgtgtaaaacagagattaatcattatcctcctggcctccatttggcttcgagctgcctgagccctggcttgctgctgtcctgattgctgagcagttgccaaaatgcacgcgggggggctgggggagtccccagctgccatcttccccgtgggaacccgtgggcttaacagagcccccacgggccccatcccatgcttag

SEQ ID NO: 30495 - DNA, 600 bp, Chicken  19866894250307_1
tgcagatcaaatgcctgcctctcatttgcagttttgcctgttttcagatggcatttgttccagtatttggactagcaggaaactgacacattgctacaaaggacagccttactgtctcagaccaaaggtccacttgaccatcctggaggtgaatctgtttaccacagaacccaatcgaaggcataaagccttctgcaaggacagaaaatttgagttcatgaagccatggccccaactagttacaatcagtgctaactcagtgctgtggtgcagaccttgaaaatgatgcagtagggctgyccttgtcaacagcacacctgtttggaaaagaattcagaccctgagaccctgagttaggcttagtcttccagtttactctcttcctaaaacacacccactctccttcccttcaacacaaaaggaaggcccaatgtccatgggctttagcaaggcttgcgagaagtcaaaggacacactgcttgggatttgctgctttgtgtaaccaaatagagctcataaagtgtacagctttcctaactgttatctccacacacttggttactatgcacatccactaagctcatcacctgagcagtagaa

SEQ ID NO: 30496 - DNA, 599 bp, Chicken  19866894250313_1
  misc_feature (1)..(8): n is any nucleotide
nnnnnnnnctgcaaatacttacttgcaatgcaaaattagcaatgaaaatggtatcattgagttagagaatgtagttgtctgagccctaccataactgtaaattatgattgcctaagtacagaggtctttactgttaataaaaaattgtaagggctgtctcatcattaaggtcaaaagcagaaaagggaaaaaaaaatctataactttgatataatgcctgtgtaaaaggacatggctttatttaattctgctttgttttgttttccaagcgattgcaacagcaacaggaactccattgcrtcgttcaccagcatttgtagcagtcagtgcagttcttactttcacagtgatgaaatggattcaggtatgtttagaaaagtcagctatcaatctgtcattggttccttttactcaggtttattcttttcatttacctggcagttttgtttgctgttttcattataaaaattgctgcctccttggtaatagaagtgtgttgttttgtttctgcctagctagagctgcacataaagagttcttytgtgagagacagcattccagcacctctatagatagattgaattagttagagctcttag

SEQ ID NO: 30497 - DNA, 600 bp, Chicken  19866894250313_2
ttaattctgctttgttttgttttccaagcgattgcaacagcaacaggaactccattgcrtcgttcaccagcatttgtagcagtcagtgcagttcttactttcacagtgatgaaatggattcaggtatgtttagaaaagtcagctatcaatctgtcattggttccttttactcaggtttattcttttcatttacctggcagttttgtttgctgttttcattataaaaattgctgcctccttggtaatagaagtgtgttgttttgtttctgcctagctagagctgcacataaagagttcttytgtgagagacagcattccagcacctctatagatagattgaattagttagagctcttagagtgactaatttttaccactttcatgccctgaccttgtcagggagttatgttgcacagagtaaggagcattttaggtgagtactgaatgcttgcccagcctgcgtcagcatccagaatgcaggatatggctgtgtatgtttgtggggaggaatgtgagaccacataggagcacatttttgtttatgccatgacaaattgaatttaaataaatgcagctgctaataggaatgagatgggattt

SEQ ID NO: 30498 - DNA, 600 bp, Chicken  19866894250314_1
ttcagaatagcagtagaggatggcagtgtcttactgctagttggtaccggggataacgtgtggcaagaaggtgagtgagaggtggaagcagtgactggtgaggaggaggaattgtctgtggccttggtctagggagaggtacctcacctggaagcctgagaataacacctgtctacaaataggaaatggaggagtcagtcatgttaatcgtagaatcatagaatggcctgggttgaaaaggaccacaatgatcaaagagcttcagccccccttctatgtgcagggtctccaaccagcagmccaggctgcccagagccacatccagcctggccttgaatgcctccagggatggggcatccacagcctccttgggcaacctgttccagtgcgtcaccaccctctgtgtgaaaaacttcctcctaacatctaacctcccctgtctcagtttagaaccattcccccttgtcctatcactatccacccttgtaaacaaccgttcccctttctgttaagcaatgtttgtggaggaaatgatgtatgagcaattgctggagcaaggcagaggagaggaggtaaaagagtagggtggttgcagcaggt

SEQ ID NO: 30499 - DNA, 600 bp, Chicken  19866894250317_1
aattcgttattgattctgactagcactgtaaaagcagagtagtccaaggtcttggatgggagttcaactgcctagaatgcaataaattacccaccttagtcatagctgaacttgtaatataaataatcgatggcaagagtcagatctttgtgtgatgttgcatttaggcattcatggtgtgtattttattaattaaatggaaaaaagttcaaagcatatgtgagtttagttggatgttgataccagtctttgagggaggaggacagaacaaagcacctacttgaatgttgttccagatcrgagttaccaatgaagaagataattaaaaagctgggatttaggattcaggagtggrcacaraagacacttcttattgcatcttgttataacttcataattttatgtaggtagatgttgactgactctggtttactcccttaggaaaatacatgaaactgaatatttctggtcagtaccaccgatttatcctttgcaccaacagatggtatggtaccttccctaatgcagagagcagatacagtgcttgtttctgcttttccgtactgtacaggtcgactctcccttaaatttatatgcttg

SEQ ID NO: 30500 - DNA, 600 bp, Chicken  19866894250317_2
atgggagttcaactgcctagaatgcaataaattacccaccttagtcatagctgaacttgtaatataaataatcgatggcaagagtcagatctttgtgtgatgttgcatttaggcattcatggtgtgtattttattaattaaatggaaaaaagttcaaagcatatgtgagtttagttggatgttgataccagtctttgagggaggaggacagaacaaagcacctacttgaatgttgttccagatcrgagttaccaatgaagaagataattaaaaagctgggatttaggattcaggagtggrcacaraagacacttcttattgcatcttgttataacttcataattttatgtaggtagatgttgactgactctggtttactcccttaggaaaatacatgaaactgaatatttctggtcagtaccaccgatttatcctttgcaccaacagatggtatggtaccttccctaatgcagagagcagatacagtgcttgtttctgcttttccgtactgtacaggtcgactctcccttaaatttatatgcttggctttcattgcaagttatattatctggagtagttgaagtgaattcattaaaaaag

SEQ ID NO: 30501 - DNA, 600 bp, Chicken  19866894250317_3
agttcaactgcctagaatgcaataaattacccaccttagtcatagctgaacttgtaatataaataatcgatggcaagagtcagatctttgtgtgatgttgcatttaggcattcatggtgtgtattttattaattaaatggaaaaaagttcaaagcatatgtgagtttagttggatgttgataccagtctttgagggaggaggacagaacaaagcacctacttgaatgttgttccagatcrgagttaccaatgaagaagataattaaaaagctgggatttaggattcaggagtggrcacaraagacacttcttattgcatcttgttataacttcataattttatgtaggtagatgttgactgactctggtttactcccttaggaaaatacatgaaactgaatatttctggtcagtaccaccgatttatcctttgcaccaacagatggtatggtaccttccctaatgcagagagcagatacagtgcttgtttctgcttttccgtactgtacaggtcgactctcccttaaatttatatgcttggctttcattgcaagttatattatctggagtagttgaagtgaattcattaaaaaagaacag

SEQ ID NO: 30502 - DNA, 600 bp, Chicken  19866894250317_4
agatgttgactgactctggtttactcccttaggaaaatacatgaaactgaatatttctggtcagtaccaccgatttatcctttgcaccaacagatggtatggtaccttccctaatgcagagagcagatacagtgcttgtttctgcttttccgtactgtacaggtcgactctcccttaaatttatatgcttggctttcattgcaagttatattatctggagtagttgaagtgaattcattaaaaaagaacagggagctaattagagctgaaatatttctgcatctttaagaaacaggtacrtagaatagagaagtagcaatatccagaaacatccacagactcgaawttgtgaygctatgctctgtgctggaactctccttgggcattattagtgtggaacatggacagcttgacttcatcttagtgaccgtgttaaataggagagatgtaggaggtcatggctttagaggttggggtttcacaggttagaatggagaatgcaggatgtcagctggaagctgaaccagaagctttcagtctgagctgtttgactactacgctgaacttgcaaaagataccaatctgctgtacttggctggt

SEQ ID NO: 30503 - DNA, 600 bp, Chicken  19866894250317_5
ctgaatatttctggtcagtaccaccgatttatcctttgcaccaacagatggtatggtaccttccctaatgcagagagcagatacagtgcttgtttctgcttttccgtactgtacaggtcgactctcccttaaatttatatgcttggctttcattgcaagttatattatctggagtagttgaagtgaattcattaaaaaagaacagggagctaattagagctgaaatatttctgcatctttaagaaacaggtacrtagaatagagaagtagcaatatccagaaacatccacagactcgaawttgtgaygctatgctctgtgctggaactctccttgggcattattagtgtggaacatggacagcttgacttcatcttagtgaccgtgttaaataggagagatgtaggaggtcatggctttagaggttggggtttcacaggttagaatggagaatgcaggatgtcagctggaagctgaaccagaagctttcagtctgagctgtttgactactacgctgaacttgcaaaagataccaatctgctgtacttggctggttgacatggaagactgaaaataaggacttccttcagcttttgatggt

SEQ ID NO: 30504 - DNA, 600 bp, Chicken  19866894250317_6
tttctggtcagtaccaccgatttatcctttgcaccaacagatggtatggtaccttccctaatgcagagagcagatacagtgcttgtttctgcttttccgtactgtacaggtcgactctcccttaaatttatatgcttggctttcattgcaagttatattatctggagtagttgaagtgaattcattaaaaaagaacagggagctaattagagctgaaatatttctgcatctttaagaaacaggtacrtagaatagagaagtagcaatatccagaaacatccacagactcgaawttgtgaygctatgctctgtgctggaactctccttgggcattattagtgtggaacatggacagcttgacttcatcttagtgaccgtgttaaataggagagatgtaggaggtcatggctttagaggttggggtttcacaggttagaatggagaatgcaggatgtcagctggaagctgaaccagaagctttcagtctgagctgtttgactactacgctgaacttgcaaaagataccaatctgctgtacttggctggttgacatggaagactgaaaataaggacttccttcagcttttgatggttcatttt

SEQ ID NO: 30505 - DNA, 586 bp, Chicken  19866894250321_1
aacctaactggatctgtgataggagtgctcatcaataaataaagatagcttttattttcttgtatagtactgagataccagaattaagtgtgtgacacctgaggacaaaaggatttcattaaaagggaatcaacggtagaataaacctcaagagaaatgtagatgaatttggtttgcccaccctaaggaaatgctggaagtcttttctgcttgataaaaattctcatcccaagctagaaatggcagccttgacagtaatggatgtttctgtagcattcagtattccagtctcatcaggarcaaaagctccaagagccgtttactgtaacctgaatacagaggagacccagcaactacctgaaggatgcattgcattaagatgcttcaccaatctcaactctgcatctgtctgtcttctgtgcacacccgttctcgtttttgctgaactaagctggtttctgcttgtgggcgttgaggcaggagggcttggagggaggagatagatctacatgagcctgaagccagcactgaatgctgagggacagactggcagccatgcataacacgcttaagggattttggcgag

SEQ ID NO: 30506 - DNA, 599 bp, Chicken  19866894250323_1
  misc_feature (1)..(97): n is any nucleotide
nnnnnnnnnnnnnnnnnnnnnnnnnnnnnnnnnnnnnnnnnnnnnnnnnnnnnnnnnnnnnnnnnnnnnnnnnnnnnnnnnnnnnnnnnnnnnnnnnctttgcgctctgccaaggaccacaaagcttaggatgtggtcctacaaaggtgaggcctgtgtttggggcagcagcgtggatgcaggtgtagtttaacaggttggcgttggcttatttccaaaccaactcagataggcaagtgggagcacccaaagggatgaggcagcacccgaaatgggtgttctgctgcttgagtggtaatscgacgtgactctttgtcaacaagaarttgttaaaagcctctgcttgctgcrtgccacttgctccagagctaatcagccagcacaggcactttcacggctcggctgtgctggaatgcgtgtctgctactggagggaggggaagctttgtgtgctggctgagagagcacagatgagctgggggagctaagctgcaaccagaatgcttacagtgcacgtacggatgctttgctggcatcctggagggaaggatttggccgtgctgctgctggggaaggcttgaaggcagctwtgcggtcctg

SEQ ID NO: 30507 - DNA, 599 bp, Chicken  19866894250323_2
  misc_feature (1)..(71): n is any nucleotide
nnnnnnnnnnnnnnnnnnnnnnnnnnnnnnnnnnnnnnnnnnnnnnnnnnnnnnnnnnnnnnnnnnnnnnnctttgcgctctgccaaggaccacaaagcttaggatgtggtcctacaaaggtgaggcctgtgtttggggcagcagcgtggatgcaggtgtagtttaacaggttggcgttggcttatttccaaaccaactcagataggcaagtgggagcacccaaagggatgaggcagcacccgaaatgggtgttctgctgcttgagtggtaatscgacgtgactctttgtcaacaagaarttgttaaaagcctctgcttgctgcrtgccacttgctccagagctaatcagccagcacaggcactttcacggctcggctgtgctggaatgcgtgtctgctactggagggaggggaagctttgtgtgctggctgagagagcacagatgagctgggggagctaagctgcaaccagaatgcttacagtgcacgtacggatgctttgctggcatcctggagggaaggatttggccgtgctgctgctggggaaggcttgaaggcagctwtgcggtcctgtttatttctcacgccgctttcctgtg

SEQ ID NO: 30508 - DNA, 599 bp, Chicken  19866894250323_3
  misc_feature (1)..(46): n is any nucleotide
nnnnnnnnnnnnnnnnnnnnnnnnnnnnnnnnnnnnnnnnnnnnnnctttgcgctctgccaaggaccacaaagcttaggatgtggtcctacaaaggtgaggcctgtgtttggggcagcagcgtggatgcaggtgtagtttaacaggttggcgttggcttatttccaaaccaactcagataggcaagtgggagcacccaaagggatgaggcagcacccgaaatgggtgttctgctgcttgagtggtaatscgacgtgactctttgtcaacaagaarttgttaaaagcctctgcttgctgcrtgccacttgctccagagctaatcagccagcacaggcactttcacggctcggctgtgctggaatgcgtgtctgctactggagggaggggaagctttgtgtgctggctgagagagcacagatgagctgggggagctaagctgcaaccagaatgcttacagtgcacgtacggatgctttgctggcatcctggagggaaggatttggccgtgctgctgctggggaaggcttgaaggcagctwtgcggtcctgtttatttctcacgccgctttcctgtgtctcctgcaggatcaaatgtgcctg

SEQ ID NO: 30509 - DNA, 600 bp, Chicken  19866894250323_4
gagtggtaatscgacgtgactctttgtcaacaagaarttgttaaaagcctctgcttgctgcrtgccacttgctccagagctaatcagccagcacaggcactttcacggctcggctgtgctggaatgcgtgtctgctactggagggaggggaagctttgtgtgctggctgagagagcacagatgagctgggggagctaagctgcaaccagaatgcttacagtgcacgtacggatgctttgctggcatcctggagggaaggatttggccgtgctgctgctggggaaggcttgaaggcagctwtgcggtcctgtttatttctcacgccgctttcctgtgtctcctgcaggatcaaatgtgcctgatggttgcagacctcctggagttcatgccggtcagcagggacctgcggctcgcagctggcaccggtcaccgcctgcgcctggcctcccagtccctggggctctacctcggcgtgtacatgcatgcacccaagcgggggcaggtagggagcagcagcagggctgccttgctataaacacgtttttcttggcccgtgcggaaaatacatcgttcctccttggagctgagtatgcgtaaggc

SEQ ID NO: 30510 - DNA, 600 bp, Chicken  19866894250323_5
gtgtgtttatgttgggctcctgggaacgtgcaagtgcatcacagtgcactgccaaatgttagcttctgtagaactccgtgtcgtgtggtaaataataaatccagaaggagggggctgacagcacaggacagcctcatctcctgcacagcttctccttgcagttctccaggggattaagctctgagtagaagcacacgctgtggcttctgctgtctctccagtgctagctcgcttgtgtaagaacacgcagagctttgtttgcagtagcttgcctgaggattccagtcttttccatctccrcttgcctgcatcgtgttgtcactagcaggaaccagcagtgttgttgtttttctggttcagcctttcagaagactgctagaaacctttcaagtccaggcagggatcaggctgtcctgctgacaaggctggctggagcctaggctgctggctcggtccagtctgtgctgcccttggcccagcagctgccgcaccaggagcctgtggatggtggcgaggagcaaggacaggcttccctgcagcatacaggttggcattcctctctaacaaacgacttacaggatgtgttggtagttctgtgtc

SEQ ID NO: 30511 - DNA, 451 bp, Chicken  19866894250331_1
gccctactgacagcacaccgttcacttccccacgctgcaaaaggctttggcaacgtagactgctcgatttcagacggtccctattaaaattcatcatattttcccctttttaatgaaaaagcgaatacctttaagggcagcacgctgctatactaagttactctgacctggtatcatgtgctaatttcagggaaaaaaaaggctcctttttctatttatttcaaagctacttgaaaagtttccagtataaacctcggtttctgtcaggaagcagacctggctgagatgcgggttcgtacwgcgctcccgtttgaacgctcacgccccacccggacgtaycgggcagctccgggccgttagcaccacccggcccgcgctcgctcacagcagcggctgcgccgcgcggcctgaccgggagaggcgggcgggcggaggcctcgggcacggcacg

SEQ ID NO: 30512 - DNA, 412 bp, Chicken  19866894250331_2
aaaggctttggcaacgtagactgctcgatttcagacggtccctattaaaattcatcatattttcccctttttaatgaaaaagcgaatacctttaagggcagcacgctgctatactaagttactctgacctggtatcatgtgctaatttcagggaaaaaaaaggctcctttttctatttatttcaaagctacttgaaaagtttccagtataaacctcggtttctgtcaggaagcagacctggctgagatgcgggttcgtacwgcgctcccgtttgaacgctcacgccccacccggacgtaycgggcagctccgggccgttagcaccacccggcccgcgctcgctcacagcagcggctgcgccgcgcggcctgaccgggagaggcgggcgggcggaggcctcgggcacggcacg

SEQ ID NO: 30513 - DNA, 600 bp, Chicken  19866894250333_1
tccaccactgatgtgaagttttgttgtactttttttgttctgtcaattatggcatctctccaaggaggcggcgggctctcatgtcacacatgcatatttatggtaaggtatattcggattttcctgttgtgcctgaaaccaggtgtttggacctttcggggcgggtctgcagcacggcctcctcagggcagcaaagctcttagggcactgtgttttctcaaaggctaaaagaacacttgctgggaaaatgacagcaggctgttgtaactttaggaaattaaacgattttttataactttragagcaggatttctagaatgtattatcttactccattgtgtctgctacctcagaagatggatttggtgtatctcttggccgttgctctcagcctttagagcggctttgcaggacaccagcccagttcttggggagacaagatgttggctgtcacaagacaaacttgccagcgagatttatttacttacttggaagtggagatgttgttttaataatgcagccagcrgggaatggaggtgttggcctgagcaggggctctgcagcatcctgtgctcttgctcagcgcaagggatgtgcaag

SEQ ID NO: 30514 - DNA, 600 bp, Chicken  19866894250333_2
aaaagaacacttgctgggaaaatgacagcaggctgttgtaactttaggaaattaaacgattttttataactttragagcaggatttctagaatgtattatcttactccattgtgtctgctacctcagaagatggatttggtgtatctcttggccgttgctctcagcctttagagcggctttgcaggacaccagcccagttcttggggagacaagatgttggctgtcacaagacaaacttgccagcgagatttatttacttacttggaagtggagatgttgttttaataatgcagccagcrgggaatggaggtgttggcctgagcaggggctctgcagcatcctgtgctcttgctcagcgcaagggatgtgcaagtgccccaggatgaggagcactgcaggaatcatccctcagaaaacccaaaccttgagaattcttagtcttgatatttgtacttagcaagagcatgtgaaatacactgttttggttctagaggttctaatgggtcggtgatgtctcaccatctgtatgtgcagggcacttcgtttagaaaagatgagtgcccgtaattaatttactagcacgaacaccaacttcccct

SEQ ID NO: 30515 - DNA, 600 bp, Chicken  19866894250340_1
tctacctaccaccttgtgtggggcctgacagttcctcccagactctatcactgtgactgaggcatccccaaggaaaggtcccaatagtttatttttgtttgctggaattgtttacagcagattaaaatggaatgttacaaggactattttaatacactacttcctgttttggaaaaatatcaaacaacatcatactacatgatatttgaagaaagtgcaataacttgccttagtcaagtccacctatatagagacaaaaaggatctaaaaatgttccctgcaggtttctcatttgttttwattgcattcatcatctaattctaactattattattagtcatacaaaatcaagacstatgtgcttcatggagataaacaggtgaaatagtgaaatccaaagtgctgtgcttttttcccttttctcttaagcatcttgtgctgacaggaagccatttgcagagcatggtgaggttgctagttcttaggtaggatcaaggctgagcattcttgagtgccatctactggcatttaattgacaatctacatacacaaactgaaagcacttctataatctctagctctgagcagagagacggagtg

SEQ ID NO: 30516 - DNA, 600 bp, Chicken  19866894250340_2
actgaggcatccccaaggaaaggtcccaatagtttatttttgtttgctggaattgtttacagcagattaaaatggaatgttacaaggactattttaatacactacttcctgttttggaaaaatatcaaacaacatcatactacatgatatttgaagaaagtgcaataacttgccttagtcaagtccacctatatagagacaaaaaggatctaaaaatgttccctgcaggtttctcatttgttttwattgcattcatcatctaattctaactattattattagtcatacaaaatcaagacstatgtgcttcatggagataaacaggtgaaatagtgaaatccaaagtgctgtgcttttttcccttttctcttaagcatcttgtgctgacaggaagccatttgcagagcatggtgaggttgctagttcttaggtaggatcaaggctgagcattcttgagtgccatctactggcatttaattgacaatctacatacacaaactgaaagcacttctataatctctagctctgagcagagagacggagtgacaaactttgtggtcccagctgtgacccagaaggatgtttcctatgtctgaaagt

SEQ ID NO: 30517 - DNA, 599 bp, Chicken  19866894250342_1
  misc_feature (1)..(160): n is any nucleotide
nnnnnnnnnnnnnnnnnnnnnnnnnnnnnnnnnnnnnnnnnnnnnnnnnnnnnnnnnnnnnnnnnnnnnnnnnnnnnnnnnnnnnnnnnnnnnnnnnnnnnnnnnnnnnnnnnnnnnnnnnnnnnnnnnnnnnnnnnnnnnnnnnnnnnnnnnnnnnnnngaatcctaaaatccccaaagccaaataagagtcgctaagccagccatttgtgttgtcaaatggagtagttttattgttcagtgcctgaagaaaagaatgccagatatatcttagtgttagcggttttagaatcaatatawaaaaaatatatcctttaaggtaactagaggataaatattacgcattaactatctgaaaaggattggatatttactttggctactgaaaaagcaagggtggcattatgtaggttctgtgtacctataattgtggtacttatctattgtagacctactgtaggacaggtatgcaattgtttgttgttgaataaggtcaggaactcaaaatatgtgcttatccctgttcgttgcagggcagttggattagatgacctgtaaaaatcctttccaatacaaactattatttgattctatgattc

SEQ ID NO: 30518 - DNA, 357 bp, Chicken  19866894250342_2
ttagatgacctgtaaaaatcctttccaatacaaactattatttgattctatgattcataaagttatatggagaaatagagaaatgtttctttaaattattttttatgtatttcttgattatttcattaatatgtaaactacctaggaggaagattgataccagaaattcccacagctcagcttaatatcaacaacctttggatttatccatggttaaaatgagcatagaaactaggaaaataacctcattaaaaagaacagtggactgtccacgtgaacttttaaagctcagcatccctrgtaatattagtaacagggcgagagggaaagaagacatagagcaaggaaaaaaattac

SEQ ID NO: 30519 - DNA, 600 bp, Chicken  19866894250352_1
tgctgataacagggttatcaggtaacatctataaacaaagatctataaaccggtggtgaaccttgctgacttctgttaaagcctgtcactgagtcaggttgaaaagctttccagatgtgtactagtttaaccagctcttgctgcttttgtcccaaggctctttttgcactgggcaacagcatttcaatgaaggctggcagaattatacatcactgccaaattcaaagatgtttccatgtccacacaacaatgttgttgcacttcttgttcagacctaccaatacgccatacacaacaccygaacaaaaggmtgcacagcatgacctacccactgcctcaaactgcggctgatgaagtattattggtaggttgctccaagagtaatgcttcttatttactttcatgggaaactacagcagatacaaagagcacagtaatggtatttgatacagcaaattctcagctacaaaacactatttttcatcatagtcaccaccatgagctgtgcattttccagcaatgagtaagagcctgcaagcagcactcatcaaaacctacaccagtggagatgccccactatctctgtcaccggtgctgaaa

SEQ ID NO: 30520 - DNA, 600 bp, Chicken  19866894250352_2
gggttatcaggtaacatctataaacaaagatctataaaccggtggtgaaccttgctgacttctgttaaagcctgtcactgagtcaggttgaaaagctttccagatgtgtactagtttaaccagctcttgctgcttttgtcccaaggctctttttgcactgggcaacagcatttcaatgaaggctggcagaattatacatcactgccaaattcaaagatgtttccatgtccacacaacaatgttgttgcacttcttgttcagacctaccaatacgccatacacaacaccygaacaaaaggmtgcacagcatgacctacccactgcctcaaactgcggctgatgaagtattattggtaggttgctccaagagtaatgcttcttatttactttcatgggaaactacagcagatacaaagagcacagtaatggtatttgatacagcaaattctcagctacaaaacactatttttcatcatagtcaccaccatgagctgtgcattttccagcaatgagtaagagcctgcaagcagcactcatcaaaacctacaccagtggagatgccccactatctctgtcaccggtgctgaaatgcaccaccca

SEQ ID NO: 30521 - DNA, 600 bp, Chicken  19866894250353_1
ggacaaagattcttgcataatactttctgttggatttttttccttgtctttttcataatatgtccactttgcccaccctgcaaatgtacacagtttgttcttctgtgtggcagtgtgtttgcccaagataagctgatagtctgactgtttgttctgttggtgcctttcacctcatttgatcttaacaaatgaaacaattgatgtggtgcaaatgtgctcttcaggaatgatgcaagaatttgtgcgtgtttaggtttgttttttaaaaaagaaaaataaaaccctgccagggactttaaktgaaggaggattatggcttctcgtgtctttacagctaatgagaaaaggttatctatccttcatgttgaatctacaggtaaattttatcccctagtttgtttatgtgtactatcccaacccctttagtggcagtagaccattaaagcaaaacccacataaagattttctgaggtcgactttgttgaacttccatacttctaacaagtgaaatggttgaaatagtaaattacttgcagaagtcagttggccatttcagttgcagtaagttataaggcataatgttacccctagaacaaccct

SEQ ID NO: 30522 - DNA, 600 bp, Chicken  19866894250359_1
ttactcaacctcgctgattttgaaacatccagtacaatcaactaccaccaactgtatcaaaataaaagcatataaacagagaataaactcttccaaagacaaacaaaatactgattcatagctatcagttacacagaaatggtactgaatggagatgttagtttaaaagcacataactgacgttcgaactttcttcagaaaagctctgcagctgggaagcctaattgtatttccagaaagcctaattgtgtttcctgactctaggggacaggaattcctctgacactgatgactgacagrgctagttctgctttcaatctgcaagtaagcaaaaatacccagttctgtgaaaccatgtgaaaaacatccactgcttccactgttatcagcagcagctggaagtgctcaatacctcataggggcactcagcactacctgtagyrctgtcatttgtagaagtcacttgcacaggtacaaagtactcaaagtatttgcattcagcagcaaacattcagatgcagagcttaaaccacacagctagcctttgtgaagtaccaaatatctttcagtaccacagaaaccaggtagagttagaaggca

SEQ ID NO: 30523 - DNA, 600 bp, Chicken  19866894250359_2
tactgaatggagatgttagtttaaaagcacataactgacgttcgaactttcttcagaaaagctctgcagctgggaagcctaattgtatttccagaaagcctaattgtgtttcctgactctaggggacaggaattcctctgacactgatgactgacagrgctagttctgctttcaatctgcaagtaagcaaaaatacccagttctgtgaaaccatgtgaaaaacatccactgcttccactgttatcagcagcagctggaagtgctcaatacctcataggggcactcagcactacctgtagyrctgtcatttgtagaagtcacttgcacaggtacaaagtactcaaagtatttgcattcagcagcaaacattcagatgcagagcttaaaccacacagctagcctttgtgaagtaccaaatatctttcagtaccacagaaaccaggtagagttagaaggcatccaacatttctagggttactgatgctaactactttaagctactttaaaataaaactaagtattttaaaacctacttcccggttctgaaattgtttatcagttcatgaatcagttttagaattytcattcaactttttgtgg

SEQ ID NO: 30524 - DNA, 600 bp, Chicken  19866894250359_3
actgaatggagatgttagtttaaaagcacataactgacgttcgaactttcttcagaaaagctctgcagctgggaagcctaattgtatttccagaaagcctaattgtgtttcctgactctaggggacaggaattcctctgacactgatgactgacagrgctagttctgctttcaatctgcaagtaagcaaaaatacccagttctgtgaaaccatgtgaaaaacatccactgcttccactgttatcagcagcagctggaagtgctcaatacctcataggggcactcagcactacctgtagyrctgtcatttgtagaagtcacttgcacaggtacaaagtactcaaagtatttgcattcagcagcaaacattcagatgcagagcttaaaccacacagctagcctttgtgaagtaccaaatatctttcagtaccacagaaaccaggtagagttagaaggcatccaacatttctagggttactgatgctaactactttaagctactttaaaataaaactaagtattttaaaacctacttcccggttctgaaattgtttatcagttcatgaatcagttttagaattytcattcaactttttgtggg

SEQ ID NO: 30525 - DNA, 600 bp, Chicken  19866894250359_4
ctcagcactacctgtagyrctgtcatttgtagaagtcacttgcacaggtacaaagtactcaaagtatttgcattcagcagcaaacattcagatgcagagcttaaaccacacagctagcctttgtgaagtaccaaatatctttcagtaccacagaaaccaggtagagttagaaggcatccaacatttctagggttactgatgctaactactttaagctactttaaaataaaactaagtattttaaaacctacttcccggttctgaaattgtttatcagttcatgaatcagttttagaattytcattcaactttttgtgggtagtttcatcattgcaatgttataattgattcagtcaagaccactaaatctctcctctcctaaatatttattcaacaacgttcattatgtgcttttcagatcataaaaaaaaaaaaaaaaaatcaacctcacataatacaaagacctactagagattatttgcttcacaacttttggtgccaaaagaaatgtttataattcttaacatctcaaatgttcgaacatcaccaaactgaacacctcactacaacaaacactgtacgctcagacttttccaaaac

SEQ ID NO: 30526 - DNA, 600 bp, Chicken  19866894250365_1
tgtgtatgtaaaacaaggcacgcaatcataagagaccaaaggggataaagaaggacagcaagttgtttagaagtagaccagacgcaatttttttaagcagaaataaacctactctgcctgtgctccaagccacccagatgtgagccctttcaccacagtaattttcattttgtacactttcttggctaagaggaaaatatcacatagaaagagcagaactgtagaatatcctgagttggaagtgacccataaggatcatcgcgtccaactcaatcaagtaaatcaaggtcaaaatagatyccatctaaaacaatggacacagaagctccatactcctcaactccagggatccttttctttmtataaaaattacttgmaactgcgatagaatcagtgttaattccttacattaaatacagctccatgtatctgtaagtcattggtcacycatttgaccctgtgcatgtacagcttattaatgatttcactccaataaaaagaaagactttaaaatactttaatgaacagttaagtatttaacttcttcaaatgtttgtgccagatttttcatcatcctctgcagcctgtaacacagacatc

SEQ ID NO: 30527 - DNA, 600 bp, Chicken  19866894250365_2
gttgtttagaagtagaccagacgcaatttttttaagcagaaataaacctactctgcctgtgctccaagccacccagatgtgagccctttcaccacagtaattttcattttgtacactttcttggctaagaggaaaatatcacatagaaagagcagaactgtagaatatcctgagttggaagtgacccataaggatcatcgcgtccaactcaatcaagtaaatcaaggtcaaaatagatyccatctaaaacaatggacacagaagctccatactcctcaactccagggatccttttctttmtataaaaattacttgmaactgcgatagaatcagtgttaattccttacattaaatacagctccatgtatctgtaagtcattggtcacycatttgaccctgtgcatgtacagcttattaatgatttcactccaataaaaagaaagactttaaaatactttaatgaacagttaagtatttaacttcttcaaatgtttgtgccagatttttcatcatcctctgcagcctgtaacacagacatctgttggaacaagtcaatgacctggatgaactgctgctctatagacactcctgcctgatgaa

SEQ ID NO: 30528 - DNA, 600 bp, Chicken  19866894250365_3
ccagacgcaatttttttaagcagaaataaacctactctgcctgtgctccaagccacccagatgtgagccctttcaccacagtaattttcattttgtacactttcttggctaagaggaaaatatcacatagaaagagcagaactgtagaatatcctgagttggaagtgacccataaggatcatcgcgtccaactcaatcaagtaaatcaaggtcaaaatagatyccatctaaaacaatggacacagaagctccatactcctcaactccagggatccttttctttmtataaaaattacttgmaactgcgatagaatcagtgttaattccttacattaaatacagctccatgtatctgtaagtcattggtcacycatttgaccctgtgcatgtacagcttattaatgatttcactccaataaaaagaaagactttaaaatactttaatgaacagttaagtatttaacttcttcaaatgtttgtgccagatttttcatcatcctctgcagcctgtaacacagacatctgttggaacaagtcaatgacctggatgaactgctgctctatagacactcctgcctgatgaatctgactccattttct

SEQ ID NO: 30529 - DNA, 600 bp, Chicken  19866894250365_4
ttcaccacagtaattttcattttgtacactttcttggctaagaggaaaatatcacatagaaagagcagaactgtagaatatcctgagttggaagtgacccataaggatcatcgcgtccaactcaatcaagtaaatcaaggtcaaaatagatyccatctaaaacaatggacacagaagctccatactcctcaactccagggatccttttctttmtataaaaattacttgmaactgcgatagaatcagtgttaattccttacattaaatacagctccatgtatctgtaagtcattggtcacycatttgaccctgtgcatgtacagcttattaatgatttcactccaataaaaagaaagactttaaaatactttaatgaacagttaagtatttaacttcttcaaatgtttgtgccagatttttcatcatcctctgcagcctgtaacacagacatctgttggaacaagtcaatgacctggatgaactgctgctctatagacactcctgcctgatgaatctgactccattttcttggctctgggcagtctggtcttggtggttggagaccctgcacgtagcaggggggttgaaactagatgatca

SEQ ID NO: 30530 - DNA, 600 bp, Chicken  19866894250372_1
ggtggctgagctcccttcggtccccatagaggagagatggtgtgtgatgggaatcccacagcccatccttcggggtgcatctcatcagtgtgttaattgaaaaactttgcttcgaaacctgtggtgattttcactgcccgcgatgttccccattccatccagcatggtcattctcccatcgtttcttggggttgctgtgtccttccattgttggtgtgtcctggaggtgaggatggagatggctgatggcagtgtctccttccacgcactgcttttctgtggatcccaggacctgcagtyccgattttacttctgggcagacttctgctttgggtctctcccagcattaaggcaatatcacctcatgccatcagaagctgccttgatgagctgaaaggaggactgatagatggagaatggatgatttcattcctgagcacaggaacacctcctctgttacatgccctacaggaatatggctgtaaaattagaaatgtagctggcactgacagtagcagagccaaatggtcatcactggcacttgggagacctttctccaatcagtgtctgatggagagtgcttgcactgatggacaagag

SEQ ID NO: 30531 - DNA, 600 bp, Chicken  19866894250373_1
cgggtttgggccaaagtgtgtcaggcagtggagaaatttaaaataccccttagctgtattataatggaagagcttcatttctcccaaagaagccccctaattaagccaagcagttggctgcaaagttatgcctggattttgttccaatcaatgggtcgatcgatgcttgttaaattgtaattgtaattacagatctgaggaaaaccagcaggaagagcttccaaaattacagaatatcctctcagatattttctcacatctccatctccacacgtgtgtgtattttgcacatggggcacygtcgctgtgtgctgtccctgttctcctgcagtgtgccgtcaccacctgagcacagggacagcccagcagtggtgacatgtgctgactcctcatgcccagacctcaccatccggtacatgtattccccctcaaactgatcctaattttgcaaatttacatgaggtgggatctgcaaggctgggccctacctgtacacacctggagacaaacatttggataccatcaaataccgtctactcttcagaacgcggcgtgtctatttctatagccgtagcaccactgagggtgggaaggacctct

SEQ ID NO: 30532 - DNA, 600 bp, Chicken  19866894250379_1
atggtggtcctatgggaagatttggacatgcagaattatctaaatgctgtgaactacttctaaatgaaatttaccttagtgctctaatcctctagtaacgtctttccagagccactgtgatggggcttcagggaaacctgtgggtctctgtgtctgttgactgctgatggatgtgtatgtacagtgaagcaatactgtacgtattgttctcactgcctgctaactgttgttttctcagtttcagaagagctgcttagtgagctcatccaaaatcttactcctgatgaagagagaatttaygtttacaggacagaaagtaagacatggccagtaattaaagagtatctgatagtttttctcttctttattactgcagacacatttgccctgcaataggcagggtactcttgaacaggcatattcttctgtagtttttcattgcatgtttagtaatttgaaactatataatttgtttattgccattttaccacttagcttgcagaatctctgtgagaaatactgcgggtcccttgaccttgctttttcaaatttttttttttaaacagcatgtctggaatgcgcttcatgtgttatatctcc

SEQ ID NO: 30533 - DNA, 496 bp, Chicken  19866894250387_1
aagctttatcgagggcctgcagagctgacctctgagcagctggctggaccgcagctgggatgggcgggagccagcagccgttgtgatgcccgagcccatgtgtgcggaaaggatttgctcgcacagctcggctgctttgcccatgggtggcagagcagagtgtagctaggggtgacttaaatcgttcggtttaactcacttaaattgttcctttcagcagaaatccatagcttgaagtgcactttgatggctctgtagctgcgtgtgcaggactggagctaaatgccagactgtgggccmcggggtcagcgcagtgcaagggcagtgctggggcgtacagtggcttgatggtgagctcaggcctgagaagctttgcttttctcaccagtcttgcactgaaggggacgatctaggctgttgcctactcgagcacctctctgtcctgcatctctgcaacagcacagacagacacggacaaatataaaatagttatagt

SEQ ID NO: 30534 - DNA, 600 bp, Chicken  19866894250395_1
ttttctttcctgaaagaaaaccatttcccaaagctaaattacaagccagacaatttgctgaggtggtgctgttcttgacctagctgaaagcagccttcccctcagccatcacgctctgtccaggggcagtgcaggtgacaaacagaagccggtggttgtcaacagagcaatatcacaacctctgatactgtaaattggccttacagaactaatccagccttacatattcaggcataattaatgtgaagtgacacaactgtgatctgataatgaggtaacagaactgtcagagtgctttcyggcgcactgataaatgatgtcatttctatttcaggaggtctgaggcagaagaaagctttaaccacacgtagtgcaagagagaaaagatattatatctatgaatagcaaaaaaacattaagttacagctatatcgcaaataacccatacaaacatttgggcttgtattcctgtgctatgctatgtcactgtgcatacactgtctatayctctatgctcttttccttgtgtggatcctgtctgagaccacaggtgattctcagtacccaggtatatgtgtatcccaactattatttcaccct

SEQ ID NO: 30535 - DNA, 600 bp, Chicken  19866894250395_2
actaatccagccttacatattcaggcataattaatgtgaagtgacacaactgtgatctgataatgaggtaacagaactgtcagagtgctttcyggcgcactgataaatgatgtcatttctatttcaggaggtctgaggcagaagaaagctttaaccacacgtagtgcaagagagaaaagatattatatctatgaatagcaaaaaaacattaagttacagctatatcgcaaataacccatacaaacatttgggcttgtattcctgtgctatgctatgtcactgtgcatacactgtctatayctctatgctcttttccttgtgtggatcctgtctgagaccacaggtgattctcagtacccaggtatatgtgtatcccaactattatttcaccctcaacatggttgtttcacaaagtatttacaagaaggctgggcactacaagacttggatagtccttcaacagcattcagggagttcaccgtatctggctcttctttcactccaatacatgctttcctatctgtcctctactatgcaagcatttggtagcttaaccaacagactgttacagactaccagcaaagattctagacctgcagc

SEQ ID NO: 30536 - DNA, 600 bp, Chicken  19866894250405_1
ttcattgtgttatcactacaggcttctgctaaatctaaaaacaaaacaaaaatgttcctgtgtgagaatcgttaggatactgaactgactgcagaactgttttacatcctgccatccacgatcttgcagaaaaggacagtaagtaataactccttacattgctatatcttgctgttatgttgcgcagtatagaagcaattttctcactggaattacttagaagatgttaatgaattcttggtcaggatagaaggaattttaaaagaataacacaaggagaagcaatttcgtctataaaaytgatgcaacaacagatattccccttgggaaaaaaaaagttaagatcatggaaaaaacgacgtggttggaatttgtcattagaaagctggctttggtgtctttgtgttggtggaaaagaaagcttaagaaagactttggcattgggtctttcctgaagtaacacaatcttgatagttatatgcctcagctttatgactgcactgatttgggttttttttgtttgtttgttttttgttttttttttcattttaagaaatagaaaataattagttaatggaaaaacggggaataatctacata

SEQ ID NO: 30537 - DNA, 600 bp, Chicken  19866894250405_2
atcttgatagttatatgcctcagctttatgactgcactgatttgggttttttttgtttgtttgttttttgttttttttttcattttaagaaatagaaaataattagttaatggaaaaacggggaataatctacataggataatctaaaggaatagttacactcattttatataatttctcagtttgacagttttgtgtatagaaaccgggtgcatcttctgaagtccagaacttcagcacaagcaaaaaggggtttcacatttcaagtgactgctgtttaaatctttaaacatgggaaartgtcagtttgctttgaatgttcctgctagccttataccttcaaaatattgcaagagtggcacacatttgacaaacgtttcttatttttactgttgttgcttatgttacagagagctaagagcccaagcgaggctatatgggagttcaaaaccaggttaagaaaggaagtcatagctgcttagacaggaaaaaggtgctggagaaaggaaagtgcaaaggaatggtgttcagttcagcccagagccagtcagaagctgccccactctttgaagtcaacctgcctatgttcagaaatggcat

SEQ ID NO: 30538 - DNA, 600 bp, Chicken  19866894250405_3
ctggcagtgaaaggctagaaatgtggagtgcgaatcctcctcatgctttcatgtctttgatatactttaaaatgaacaggcaggcacataaaaaagattttcataaaagtgaggctttgtgttgaatattctacaaagaggctatgaggcgagatcaaaagcttgtgaactagatgggaacgtttccactgatgttaatggtgtttagatcaggccatggattaactgaaacttctctgagaactggtggccacgtgtctaaagaataggacaatattacagggcagaaagaaggaaaartctcactaatatttgtgaaaatttttgccagtacttttacatatcttccttgactgagctcttgaaacagattcagtcttctgaaagtaatttgagttttaagggggctttctgaggatcaaacatatttttgctttagctgaaaggatgagtctatggtgattttttctttcagtgagcccagtcaattttaactttaattacttaattaagaggcttggttttgctaacacagaagccaggggaagtttttgtattgattatagaaggcaaagaggcagttcactgctaagagtacac

SEQ ID NO: 30539 - DNA, 600 bp, Chicken  19866894250407_1
caggctttgtttcctttgcctaactttgggagttaacacaggatatttaccattcccagctatcttgtttggctaacaagagagttaaacagtgtagatgtgggcaaatcatgtctacttcagtcttgtggccagaggataaatctgagcccatagagtgaatcctcagtataaatttaattcattagtgcttgaacttccatagatattcactataaatgcgcaacagttgtgtacatatactaattccaggtttgactgagaatatttgataaattgcaattttgaatgggggagctytgttttgacaaaacctgagaacatctgtgttgtaactgagtgacatagttttttacattgtgaaataaggctatgtgcaacaaagctcatgaatgcccttccctttgcatttctgagtcctaaatacactccggcatctcctgagctctgcatggtaacagtagagagttcccagtactcttaggatgacctgactacagaatcttgatatacaggatttatcttgaaagtggtaaccgatttcttctaatctgattgactctaaagattaaataacatcttggataatgagagtaaaat

SEQ ID NO: 30540 - DNA, 600 bp, Chicken  19866894250408_1
gtgtttttaaactgaagtttggggaaagtgatggctttttcttcttttcacaagttataaatgctcacaaacagcgagcactttaaaatttcaattgccaataattttcattgtaatattttgtttataaaccacaaagttcacagcatgtggatttaatgaataacggacagattagtaaagcagttgcttataacaaagcaaagcagaggttaccatatagaagtattctggagtaagttgtgaacaggttaaagaagaccaacacatttatcagagcaacatgccaaggtttccagygcaaatgcggcttctgatccagtacctactgtggatacatacatgaaattgcctttcaaagtagtgatatttttcttccttgaaacaagcatgtagctgatagaaattgatgagaaaggtaaacaacaatatggcatccttgcagtcttcatgagaaacaacaactgttatgaaaaaaaatatattcctagagcagtagagagaataatatttacaacagagaagaaaaaaagaccatttaccaagatctatataaggacaacaccaaatcactaaacttgccgtaacatagcaaggtat

SEQ ID NO: 30541 - DNA, 600 bp, Chicken  19866894250409_1
aacagggctggatccttccaggagctgtgctccgggacatggactgtggtgacagacctcaagtgtggaaaccttccaggttttccacatcccccttgaagtgaagatcccaaagcagggtgctgtgctgcagctgaggacataccagtgccaggggaggggaagtgcatggtgccagctccttgagccacagccatgcttagtaggccaatgcatggtgcccaccaccacgccaccgccgctggccatcagaggggttctaactggttgatataaactaggagaaacagggcggtgtcrgttacagctgaagcttgggtgtcaaagcaccrcagcactctctcctaaggacgtkcatgccattagccatacctgctcagtaaaccagagcagcacccaacttayattctcttgtttctcgagttcacgttacaatgtaagacttagcaaaacacagttttatatgctaatttccttacagtaaaacccttactgtatgtcgttcattgatatcaagcagcgtacatgcaagagtagactaatattatgtatatattaacaattttatgggttcaagaattacagcgtgcttgctttatt

SEQ ID NO: 30542 - DNA, 600 bp, Chicken  19866894250409_2
cgggacatggactgtggtgacagacctcaagtgtggaaaccttccaggttttccacatcccccttgaagtgaagatcccaaagcagggtgctgtgctgcagctgaggacataccagtgccaggggaggggaagtgcatggtgccagctccttgagccacagccatgcttagtaggccaatgcatggtgcccaccaccacgccaccgccgctggccatcagaggggttctaactggttgatataaactaggagaaacagggcggtgtcrgttacagctgaagcttgggtgtcaaagcaccrcagcactctctcctaaggacgtkcatgccattagccatacctgctcagtaaaccagagcagcacccaacttayattctcttgtttctcgagttcacgttacaatgtaagacttagcaaaacacagttttatatgctaatttccttacagtaaaacccttactgtatgtcgttcattgatatcaagcagcgtacatgcaagagtagactaatattatgtatatattaacaattttatgggttcaagaattacagcgtgcttgctttatttaggtggtaaacttttttaatgagtctggagg

SEQ ID NO: 30543 - DNA, 600 bp, Chicken  19866894250409_3
acctcaagtgtggaaaccttccaggttttccacatcccccttgaagtgaagatcccaaagcagggtgctgtgctgcagctgaggacataccagtgccaggggaggggaagtgcatggtgccagctccttgagccacagccatgcttagtaggccaatgcatggtgcccaccaccacgccaccgccgctggccatcagaggggttctaactggttgatataaactaggagaaacagggcggtgtcrgttacagctgaagcttgggtgtcaaagcaccrcagcactctctcctaaggacgtkcatgccattagccatacctgctcagtaaaccagagcagcacccaacttayattctcttgtttctcgagttcacgttacaatgtaagacttagcaaaacacagttttatatgctaatttccttacagtaaaacccttactgtatgtcgttcattgatatcaagcagcgtacatgcaagagtagactaatattatgtatatattaacaattttatgggttcaagaattacagcgtgcttgctttatttaggtggtaaacttttttaatgagtctggagggtgctttacataaaagtagtgac

SEQ ID NO: 30544 - DNA, 600 bp, Chicken  19866894250409_4
gatcccaaagcagggtgctgtgctgcagctgaggacataccagtgccaggggaggggaagtgcatggtgccagctccttgagccacagccatgcttagtaggccaatgcatggtgcccaccaccacgccaccgccgctggccatcagaggggttctaactggttgatataaactaggagaaacagggcggtgtcrgttacagctgaagcttgggtgtcaaagcaccrcagcactctctcctaaggacgtkcatgccattagccatacctgctcagtaaaccagagcagcacccaacttayattctcttgtttctcgagttcacgttacaatgtaagacttagcaaaacacagttttatatgctaatttccttacagtaaaacccttactgtatgtcgttcattgatatcaagcagcgtacatgcaagagtagactaatattatgtatatattaacaattttatgggttcaagaattacagcgtgcttgctttatttaggtggtaaacttttttaatgagtctggagggtgctttacataaaagtagtgactctatcttgaaatctccttccatgtttattagaaatgtgtttcactttac

SEQ ID NO: 30545 - DNA, 600 bp, Chicken  19866894250409_5
gaaaacatagcttgcactggcttgttcaagattattactttccacaggggtctcaggatagttgttgggtcgagcttgttgcctcttttctttcaaaactgaggctagatcgtcacgattcacacacattcgctctgatgctttccaagaataaaataaaatgtaaaaagtcagttatctagaatattaaaaattgtaacccagcctgtagcctctttgttctcaactcagataagatttgctttggagctgacactaatagagagctctttctcctggcgagaaaccctctgtcccccwgagatctcttttctgagctaattgtggagtgttacctgaagcagcagcctgagcctgactccagtctcacaccaataaaacctcggtaccagcctgggtcagagctcagccctgggaagagagaatttaaggaaggggaaaaacaaagaccrcagctccccacttttgttctctgccctccgcagttgctcatccgtccctcgcracacgcttagcacaagctctgccataatcagtcttacttgcaaaggagtctcaggcacaaagcctgctgtagggatgcagggcacctggcttgtc

SEQ ID NO: 30546 - DNA, 483 bp, Chicken  19866894250409_6
aaaataaaatgtaaaaagtcagttatctagaatattaaaaattgtaacccagcctgtagcctctttgttctcaactcagataagatttgctttggagctgacactaatagagagctctttctcctggcgagaaaccctctgtcccccwgagatctcttttctgagctaattgtggagtgttacctgaagcagcagcctgagcctgactccagtctcacaccaataaaacctcggtaccagcctgggtcagagctcagccctgggaagagagaatttaaggaaggggaaaaacaaagaccrcagctccccacttttgttctctgccctccgcagttgctcatccgtccctcgcracacgcttagcacaagctctgccataatcagtcttacttgcaaaggagtctcaggcacaaagcctgctgtagggatgcagggcacctggcttgtcctctgtctgcatcaagaggaagccaggtttccact

SEQ ID NO: 30547 - DNA, 430 bp, Chicken  19866894250409_7
ctgtagcctctttgttctcaactcagataagatttgctttggagctgacactaatagagagctctttctcctggcgagaaaccctctgtcccccwgagatctcttttctgagctaattgtggagtgttacctgaagcagcagcctgagcctgactccagtctcacaccaataaaacctcggtaccagcctgggtcagagctcagccctgggaagagagaatttaaggaaggggaaaaacaaagaccrcagctccccacttttgttctctgccctccgcagttgctcatccgtccctcgcracacgcttagcacaagctctgccataatcagtcttacttgcaaaggagtctcaggcacaaagcctgctgtagggatgcagggcacctggcttgtcctctgtctgcatcaagaggaagccaggtttccact

SEQ ID NO: 30548 - DNA, 600 bp, Chicken  19866894250413_1
ggaaaaaaaaaattaaaaaacagtagagaatggaaatgaaattgttcaaaaatgaatttgagaatatttttttgttcaaaagccacccagtattgtaactttgtgccaacttaatttacaaatatttaatacttaattatggaaactcatctcttctagaaaatacttgcagaaaataagtttgatttgagcatttttaccaacttagagaagttcaaattctccagttttcagttggattatttcttagacatgttgccacacactaattaattgaggaatttttgtttctgctgacayatgtccttcagtccagatgacttaaaaatcattcattgacatatgagaaaaatagaatactattatcagcctcattaagtatacaggaaatctcaggcataggaaaarcaagctacaatgagtttaaataaagtgaccaataatttttcatatggtttacacaaaatgtcttaagaagtagtttatctgtactagacgtgtataaactgtttcttttgtcttcctacagtctgtggatcgtttcaaagcattgcttagccagcatccagattagggatgggcggctctattgtgttactt

SEQ ID NO: 30549 - DNA, 581 bp, Chicken  19866894250413_2
acttaatttacaaatatttaatacttaattatggaaactcatctcttctagaaaatacttgcagaaaataagtttgatttgagcatttttaccaacttagagaagttcaaattctccagttttcagttggattatttcttagacatgttgccacacactaattaattgaggaatttttgtttctgctgacayatgtccttcagtccagatgacttaaaaatcattcattgacatatgagaaaaatagaatactattatcagcctcattaagtatacaggaaatctcaggcataggaaaarcaagctacaatgagtttaaataaagtgaccaataatttttcatatggtttacacaaaatgtcttaagaagtagtttatctgtactagacgtgtataaactgtttcttttgtcttcctacagtctgtggatcgtttcaaagcattgcttagccagcatccagattagggatgggcggctctattgtgttacttctgttttgtagttttgagttacttctctctgcatgcctgagtcagctggcctcacttctctaggtgtcaaaaagttcacaagacatttt

SEQ ID NO: 30550 - DNA, 600 bp, Chicken  19866894250414_1
ctttctagcactgggtccttatctgccctgcagcttccatgtgctgatttggagcacgaagcggggatcacagcctgcccatgcttcagtccagtcctatccaggtaacattcagggctccaaagttcttcacacaaaaactgttttcctatccagaaatctatcctatcccctttaaatttggatcacgttaaaatgacaactgcctacacttaaggaagtatatgcagcatcctgctctcctgaaacactttatttctaaaagccatcgtggctccttttagattaaacatctttcamacaattcagcctaaaatactggattgatgcctacaaaacgaacccctctttaaagttctacagaaatarcttttggatgagatgtcggcgtcagatacctgaaagcataaacattttctaaagcctattacaaaagagcttggatagaaaggttggaacaacaacagcttcatctggcccatgcctcacacctcccttctggagagggcacggctccactaattacagcctccaagagatgataattatgggagcagacaggtaccgcaggcagcactacgacatttcgttcagccgcgt

SEQ ID NO: 30551 - DNA, 600 bp, Chicken  19866894250414_2
acagcctgcccatgcttcagtccagtcctatccaggtaacattcagggctccaaagttcttcacacaaaaactgttttcctatccagaaatctatcctatcccctttaaatttggatcacgttaaaatgacaactgcctacacttaaggaagtatatgcagcatcctgctctcctgaaacactttatttctaaaagccatcgtggctccttttagattaaacatctttcamacaattcagcctaaaatactggattgatgcctacaaaacgaacccctctttaaagttctacagaaatarcttttggatgagatgtcggcgtcagatacctgaaagcataaacattttctaaagcctattacaaaagagcttggatagaaaggttggaacaacaacagcttcatctggcccatgcctcacacctcccttctggagagggcacggctccactaattacagcctccaagagatgataattatgggagcagacaggtaccgcaggcagcactacgacatttcgttcagccgcgtgctttccctggcggtcgtgccttggtggcaaccttcctccgacctccccagcagggagtgcagctcggc

SEQ ID NO: 30552 - DNA, 600 bp, Chicken  19866894250417_1
attctccaggatttttcctttatacatttcttgtcttttctcaaatcaggaaagtattcagtttcaggtggagtgtgggtcatgctgtaagggtatgctggaaatgttctttgttttgggtagtgctattaggctttgttattgagacatacctgactttgatgtgcacagatggaaggttagtatcaatctctgggcctactggctgtcaaaaatgaagaataaaagaagttccctatttcagtaagtctgctgtgctatgtggtgtcacagtgagcctcttaatttgagctgtgcagygttctaggaatagttatatttgtttcctatagcatcttgtactgttgcttcttgttactctgtgtactcaagctgcattgtttacaaggacatcaggagtgtgcttcatttttggggaaagcgatctattgattgaatcctaacaaacctatctcttaattttcagcatttgcacattctcatggagaggctgtactttctgattgttcgcacttgacctagcccatgcaaaattgcatttgtatgcaaacagtctgtgttatgtaaatgtgacctcttgcttttggttgatcgttttca

SEQ ID NO: 30553 - DNA, 600 bp, Chicken  19866894252196_1
cagcttcacgccaagcagcagcagtgaaatctctgaaggtaggtttaccaagacatcccagcccgccacggcagcaacatcatctggtcctccgtcctctgctggtacagtggatactgggactgtgcagcccaccatgtcgagtgggagtgctggctctggttctccactgcccacctcgacagcagccagtgactcctctttgcctgtgggctcctcagctgtgccatccggctttacgccaaacagcagcagtgaaatctctgaagctaggttgaccacggcatccctgctctccayagcatcaacttcatctggtccactgtcctctgctggtacagcgagtgttgggactgtgcatcccaccacgtcgagtgggagtgctggctctgggtctccactgcccagctcaacagcagccagtgactcctctttgcctgtgagctcctcagctgtgccatccagcttcacgccaagcagcagcagtgaaatcactgaagctgggttgaccaaaacatcccagcccgccacggcagcaacatcatctggtccaccgtcctctgctggtacaacgggtatttggactgtgcagcccaccac

SEQ ID NO: 30554 - DNA, 600 bp, Chicken  19866894252210_1
atcagtacaggttgggacatgacctgctggagctctgtggagaaggtcctggtggatgacaggttggcgatgagccagcagtgtgccctggtggccaagaaggccaatgggatcctggagtgcattaaaaggagcgtggccagcaggtcgaaggaagtgatcctccctctctactctgctctggtctggtcaggcctcacctggagatattgtatgcagttacagtatccagtacaagacagacaagaatttcctggagagagtccagtgaagggtcacaaagatgacatggccaatctyttttccactgtctgtgggaacaggactagrggaaactgccataaactggagcatagaaagttccacgtcaatatgcaaaggaacttcttcacagtaagggtgatggarcactggaacaggctgcctagagaggttgtggattctccttctctagagatattcaagacctgcctggacgcctacctgtgcagcctgctgtagggggcctggacttgatgatctctggaggtcccttccagcctctacaattctttgattctgtgaaaaatacaaaatgmtttactaaacctttggttcaca

SEQ ID NO: 30555 - DNA, 600 bp, Chicken  19866894252210_2
agctctgtggagaaggtcctggtggatgacaggttggcgatgagccagcagtgtgccctggtggccaagaaggccaatgggatcctggagtgcattaaaaggagcgtggccagcaggtcgaaggaagtgatcctccctctctactctgctctggtctggtcaggcctcacctggagatattgtatgcagttacagtatccagtacaagacagacaagaatttcctggagagagtccagtgaagggtcacaaagatgacatggccaatctyttttccactgtctgtgggaacaggactagrggaaactgccataaactggagcatagaaagttccacgtcaatatgcaaaggaacttcttcacagtaagggtgatggarcactggaacaggctgcctagagaggttgtggattctccttctctagagatattcaagacctgcctggacgcctacctgtgcagcctgctgtagggggcctggacttgatgatctctggaggtcccttccagcctctacaattctttgattctgtgaaaaatacaaaatgmtttactaaacctttggttcacacataagatagctaaccacccagaggaaagg

SEQ ID NO: 30556 - DNA, 600 bp, Chicken  19866894252210_3
gggatcctggagtgcattaaaaggagcgtggccagcaggtcgaaggaagtgatcctccctctctactctgctctggtctggtcaggcctcacctggagatattgtatgcagttacagtatccagtacaagacagacaagaatttcctggagagagtccagtgaagggtcacaaagatgacatggccaatctyttttccactgtctgtgggaacaggactagrggaaactgccataaactggagcatagaaagttccacgtcaatatgcaaaggaacttcttcacagtaagggtgatggarcactggaacaggctgcctagagaggttgtggattctccttctctagagatattcaagacctgcctggacgcctacctgtgcagcctgctgtagggggcctggacttgatgatctctggaggtcccttccagcctctacaattctttgattctgtgaaaaatacaaaatgmtttactaaacctttggttcacacataagatagctaaccacccagaggaaaggaaacatagttaactaagtaatcctkggtgatgttgaagcatttgtttcagtatcacatgtgaaattttatgatgtaca

SEQ ID NO: 30557 - DNA, 600 bp, Chicken  19866894252210_4
caaagatgacatggccaatctyttttccactgtctgtgggaacaggactagrggaaactgccataaactggagcatagaaagttccacgtcaatatgcaaaggaacttcttcacagtaagggtgatggarcactggaacaggctgcctagagaggttgtggattctccttctctagagatattcaagacctgcctggacgcctacctgtgcagcctgctgtagggggcctggacttgatgatctctggaggtcccttccagcctctacaattctttgattctgtgaaaaatacaaaatgmtttactaaacctttggttcacacataagatagctaaccacccagaggaaaggaaacatagttaactaagtaatcctkggtgatgttgaagcatttgtttcagtatcacatgtgaaattttatgatgtacaaggtatgaatgaatataataaatgtaataagaataaggaaccatccaaaagaaaaataatacaaactgcagaaaaggaggaactatgtgacaaactgggctaacagaggaratcttcatgagttcacattagcaacagtcttactaatatcttccttaaaatgccttggc

SEQ ID NO: 30558 - DNA, 600 bp, Chicken  19866894252210_5
gaaagttccacgtcaatatgcaaaggaacttcttcacagtaagggtgatggarcactggaacaggctgcctagagaggttgtggattctccttctctagagatattcaagacctgcctggacgcctacctgtgcagcctgctgtagggggcctggacttgatgatctctggaggtcccttccagcctctacaattctttgattctgtgaaaaatacaaaatgmtttactaaacctttggttcacacataagatagctaaccacccagaggaaaggaaacatagttaactaagtaatcctkggtgatgttgaagcatttgtttcagtatcacatgtgaaattttatgatgtacaaggtatgaatgaatataataaatgtaataagaataaggaaccatccaaaagaaaaataatacaaactgcagaaaaggaggaactatgtgacaaactgggctaacagaggaratcttcatgagttcacattagcaacagtcttactaatatcttccttaaaatgccttggctttagaagtgcactgcattggaaatgtggatgatataagggcaattatttgacacttgagaatttgggaaaaaatgt

SEQ ID NO: 30559 - DNA, 519 bp, Chicken  19866894252210_6
tctctggaggtcccttccagcctctacaattctttgattctgtgaaaaatacaaaatgmtttactaaacctttggttcacacataagatagctaaccacccagaggaaaggaaacatagttaactaagtaatcctkggtgatgttgaagcatttgtttcagtatcacatgtgaaattttatgatgtacaaggtatgaatgaatataataaatgtaataagaataaggaaccatccaaaagaaaaataatacaaactgcagaaaaggaggaactatgtgacaaactgggctaacagaggaratcttcatgagttcacattagcaacagtcttactaatatcttccttaaaatgccttggctttagaagtgcactgcattggaaatgtggatgatataagggcaattatttgacacttgagaatttgggaaaaaatgtaagagaataaagtgttcttgggagctggatacaaaatggctggcctcatattctgtactggtggcatctgactcacacataaa

SEQ ID NO: 30560 - DNA, 447 bp, Chicken  19866894252213_1
gaaccttgctagccattaagaattttccctgtttgctgtctacttggttcaggtgttggggattggatcatggtttcttgcactgtttgtgcagaacatcaatttgtgcacctgggaacaggattttcatgcatcagatgtctattcaagcccaagcagttgttgccaagagctcaatcattagaagtagtggttatacatccctgttacttcagaagaaatggcaggagaatcttcaagcgaccacactcagcctgatgtgagatattttcttacatacatacaagaaatgagatgcaygaaccatcctacccatcattctttctctactgtccttttaaaaattgcttcacctgtaaggatttacagaagagcactggctcagcatttccagtcaaatctattccttatttatttatttaagattaaagagcagatattccagta

SEQ ID NO: 30561 - DNA, 600 bp, Chicken  19866894252220_1
gagtggccaaaaataatccttgcgttgcttcaggcttcactcctgcgactgacaccaaaagctgcactagaacatctccagcatctgggcaagcagttaggacttccacttcattgcctgaacaaagcaactcagcaaagccccatgagccttgcagttagctattccaggcgtttggaatgctgatactcaaatgctgagaggctctcacgtgacaggtttttatatttctttatcttccttctagcaaagatctgaattatatactcaggtgctactggtgtatctgcaggacagacyggtgagtgggatgcttggcaaagcacgctgggagaaaggaagcaatctttcatgaagtaacgacgtgctgcctgtggtactggagaatgagaaataggagagatgccaatggcatctgctgactttcacatccatcaggatatcgcagtgttcttcattgagtcatgaaaattacttctagaagtgtaaaaacaagatcttgaaatctgtttttgcttagctgtccatcatgtaaaaggaaattgaaaggatgagatcccagatgaagcgtggcttttaaattgcatacatgacatgaaa

SEQ ID NO: 30562 - DNA, 508 bp, Chicken  19866894252221_1
ctcagatttccattacagtacacttcacatctctcatgttcttcattatcttgatttgcacagcagggtagcactttcatcattcttcaggagaaagaaggcatagagagcttgtacagcgtggccatggtgacccagaaacacccttgcagagcaaggtggtgtagatcctgtgtctctgaagtcctggactagcaatcagattgttaaaccaactgcagaacccttttcttgtacttttatactcaatgcacagacacaaaactagaaaaagcagttttcagagacttactttggacyttatgctacaggaaaaatcctaataacagtggtcatctgattcttttgcgtgagcctyaagcaaaaactcctactcaagcaggaaaaggattctgccagcagttccatggggaacaatgtcccaggcttagatttgattctatgttaaagagtgtgtacactactggctgattaaggggatgggatttcttacttacttccctaaatc

SEQ ID NO: 30563 - DNA, 450 bp, Chicken  19866894252221_2
cacagcagggtagcactttcatcattcttcaggagaaagaaggcatagagagcttgtacagcgtggccatggtgacccagaaacacccttgcagagcaaggtggtgtagatcctgtgtctctgaagtcctggactagcaatcagattgttaaaccaactgcagaacccttttcttgtacttttatactcaatgcacagacacaaaactagaaaaagcagttttcagagacttactttggacyttatgctacaggaaaaatcctaataacagtggtcatctgattcttttgcgtgagcctyaagcaaaaactcctactcaagcaggaaaaggattctgccagcagttccatggggaacaatgtcccaggcttagatttgattctatgttaaagagtgtgtacactactggctgattaaggggatgggatttcttacttacttccctaaatc

SEQ ID NO: 30564 - DNA, 600 bp, Chicken  19866894252226_1
tttggataagtttcaaatgggctttctctaaaaacaggtagaattgagtggaaaatcttgatctttttaaggacaaatttggctctctagacattaatggcaaagctactcctctgtcagaggcagaaaactataggctcatgtccacctgaatccagctccaggtcagcttagtaaaaacatcctcatgacacaaggtcctgcaagctctcagctggcttctgtgctgcctcccagggctctcagctattgtggaagccacaggggacgctggaacccaggctgccttggtggtgtgayatctgctgcaaatgtaaaggcataagatggacacagcccagcsacatgcaggctgtcaaggtgaagcagataactactgtgcctacaggagctcaccaaggtcagctagagctaactgccagtcccatcccctttttgatttaggctgctctccagctgagcagcactgctacaaagacagtaaccattccctaccttttttaatggctatcttccatgaaagacactcctggagagctttcagtctctcttcatctgtttcctgggttttctggtttcttcttcctcttcctttttcaa

SEQ ID NO: 30565 - DNA, 600 bp, Chicken  19866894252226_2
ttgagtggaaaatcttgatctttttaaggacaaatttggctctctagacattaatggcaaagctactcctctgtcagaggcagaaaactataggctcatgtccacctgaatccagctccaggtcagcttagtaaaaacatcctcatgacacaaggtcctgcaagctctcagctggcttctgtgctgcctcccagggctctcagctattgtggaagccacaggggacgctggaacccaggctgccttggtggtgtgayatctgctgcaaatgtaaaggcataagatggacacagcccagcsacatgcaggctgtcaaggtgaagcagataactactgtgcctacaggagctcaccaaggtcagctagagctaactgccagtcccatcccctttttgatttaggctgctctccagctgagcagcactgctacaaagacagtaaccattccctaccttttttaatggctatcttccatgaaagacactcctggagagctttcagtctctcttcatctgtttcctgggttttctggtttcttcttcctcttcctttttcaaagctttcctaagccctctttcctttgccttgtttttaacagag

SEQ ID NO: 30566 - DNA, 600 bp, Chicken  19866894252228_1
aatcctcaacagagctgacagggaagaccagttcttagaactggatcacttcacttcaaagacttggctagtcaaacagcgacaacagaagaaaagcagaaccgtagggatggaattaatcacatcattgcgcaaacgttcagcttgaggatgccatgaatggccagtccaatgcagagtcgggcctgaattttcagcagagaaactaacagacttgtcctgatgggggtgaactgcttaatgcttttcagagtaccacaaaaaatgggaaagctcagaatgcatagcttatttgaagaytgttttccaacagcacaaactcacctggtcattcataacaaccatagtgcgggtgaagagatcatgatgagtaatgatcccagtaaaccactgggtggcagaatcctgtctgtacactctcaccctataaccatttaaggagtacggaccttcgggaagggaagaaataagaaagccattaaggaaatcagaaaaagaaaaaaaaaacattaataggcttgccttgttttttaagcttcatagcaaaagtatgatgtgaatggcatggacagcaagctaccagcaattccagcacagcac

SEQ ID NO: 30567 - DNA, 600 bp, Chicken  19866894252229_1
acttgtgcaatgacaactgtgacaatgcaggtagaggtttcattgcatcaacattgctaactgggcagagcggtctctggttttctcaacaatgcaggcagaactgggttatgactacccataggagctaagtccctggcatggcccccgcatggcaaattgagacatgggctttcacctgatgggagtgatgtgacagtcaaagcagagacccatggaaggctgtactggttggctgtatgtaaatggaaaatttgcttgactgttcactgaagatgctcagcccattcctggtgacakctgtttccccagtarcctagtccctttctcaaaaaccattttaatttgcattatgtcctggaaatataaagcagatcaagcagatagcagggtcaggggagttgtgctgcttcttagcatctgactcttgacctaaggctaggaatagagtatgtacagtccatgctgaatttgtatctctcttttgccgtggatgtgctgtcactgcttgagatctgcacaaatactgaactcatatacaggccgtggaccctaatgcagatccagttaacaaacccatggcaggatccaggcattaaa

SEQ ID NO: 30568 - DNA, 600 bp, Chicken  19866894252229_2
actgtgacaatgcaggtagaggtttcattgcatcaacattgctaactgggcagagcggtctctggttttctcaacaatgcaggcagaactgggttatgactacccataggagctaagtccctggcatggcccccgcatggcaaattgagacatgggctttcacctgatgggagtgatgtgacagtcaaagcagagacccatggaaggctgtactggttggctgtatgtaaatggaaaatttgcttgactgttcactgaagatgctcagcccattcctggtgacakctgtttccccagtarcctagtccctttctcaaaaaccattttaatttgcattatgtcctggaaatataaagcagatcaagcagatagcagggtcaggggagttgtgctgcttcttagcatctgactcttgacctaaggctaggaatagagtatgtacagtccatgctgaatttgtatctctcttttgccgtggatgtgctgtcactgcttgagatctgcacaaatactgaactcatatacaggccgtggaccctaatgcagatccagttaacaaacccatggcaggatccaggcattaaaagctgccacagcacc

SEQ ID NO: 30569 - DNA, 599 bp, Chicken  19866894252235_1
  misc_feature (1)..(37): n is any nucleotide
nnnnnnnnnnnnnnnnnnnnnnnnnnnnnnnnnnnnnggtgtgagcagagcagcggtcagaccattgctcctacagcagtgagtgcttctgctgtttgtgcttcctcatcactctcccacaggttctatacaggtggaacaggcagagcagcgcatctgtgatcgaaaccaacaggacctcgggtggagctctccctgccctttgacgaggactatatcatcgagataaagcccttcagcgacggcggcgatggcagcagcagcgagcagatccggatcccaaagatctcgagtaaggcyggggagcaggtgtccctctgccctgtgtcaccacaggagcagccagtgggacttgggcttgggtgtcatcccttgggggagctgaaattcagcatccagcaccagcccagctcagggtcctggctccagactgagccaaggttaaacyatgagaaatgctgtcgtaagtgcttacggttgtgttaaagatttctacacactttctgctctcctacttccatactcatatatactgaatatattgtttcactgcagttcactataacaaaatataaaatgcggtgttcagagacttttaa

SEQ ID NO: 30570 - DNA, 600 bp, Chicken  19866894252235_2
cagcgcatctgtgatcgaaaccaacaggacctcgggtggagctctccctgccctttgacgaggactatatcatcgagataaagcccttcagcgacggcggcgatggcagcagcagcgagcagatccggatcccaaagatctcgagtaaggcyggggagcaggtgtccctctgccctgtgtcaccacaggagcagccagtgggacttgggcttgggtgtcatcccttgggggagctgaaattcagcatccagcaccagcccagctcagggtcctggctccagactgagccaaggttaaacyatgagaaatgctgtcgtaagtgcttacggttgtgttaaagatttctacacactttctgctctcctacttccatactcatatatactgaatatattgtttcactgcagttcactataacaaaatataaaatgcggtgttcagagacttttaaatttataaggctactatatagcaatattccattctgtgtcggatgcataaatatttatttagggaaatgaggttgtgcagaagaacaaacagaaaagagagtattttattactcaacattgcttttgcaaaatctccatgtcccatctt

SEQ ID NO: 30571 - DNA, 600 bp, Chicken  19866894252237_1
atttttctaactctatttcctgctaaaattattactatttagatagctgcgagggaagtaaagagagtaaaaggccctgtgatataattaatgcagatttgctgctctgtgaagaattctgtctgaaattcaagagataacaaactgattagattttagaagttgtaataatgctgtgaactggttgagaaaataaaatgaaacccatccaaattgcaacgtcgtcaagagccagatttgaaagtgggagaagctggaaggtgtgaggatgtgagctccatctctgctggtctctcagtrtgagttgcacggtgtgtcttgccctgggaacactgacagagcacagctgygtttgtggccaagaccgtggcttcttccctgggactgagctgagctggcagccccgtgccttgttccttttggagagctgggtggtggtggtggtacagctcttgtgcaggtggcagctggccttgggtgcacggagtcagcagcagagccaaggatggccacgaggtcccccactccgctccagtgctttgtacagccaaccatgctgcttaccacagccatacctgtcgggctagtggaagggttttc

SEQ ID NO: 30572 - DNA, 600 bp, Chicken  19866894252237_2
gagggaagtaaagagagtaaaaggccctgtgatataattaatgcagatttgctgctctgtgaagaattctgtctgaaattcaagagataacaaactgattagattttagaagttgtaataatgctgtgaactggttgagaaaataaaatgaaacccatccaaattgcaacgtcgtcaagagccagatttgaaagtgggagaagctggaaggtgtgaggatgtgagctccatctctgctggtctctcagtrtgagttgcacggtgtgtcttgccctgggaacactgacagagcacagctgygtttgtggccaagaccgtggcttcttccctgggactgagctgagctggcagccccgtgccttgttccttttggagagctgggtggtggtggtggtacagctcttgtgcaggtggcagctggccttgggtgcacggagtcagcagcagagccaaggatggccacgaggtcccccactccgctccagtgctttgtacagccaaccatgctgcttaccacagccatacctgtcgggctagtggaagggttttcagttttccctccaggtctcctgccttctttcagtctaagataagaactga

SEQ ID NO: 30573 - DNA, 600 bp, Chicken  19866894252239_1
gtgacttatctataaataaggggaatgtataaataaaaaacagtctccaaacctgagcctaaaactgatctcagtgttgctttccattgacagataacaaatatgctcctgcagtcactctcaatgggttcatctttattcttggaggagcttatgcacgagcaaccaccatctatgacccagagaaaggcaatattaaagcaggtcccaacatgaaccactccaggcagttctgcaggtgagaaaaacccttcaaattgaattaccagtgccttaattttttctgctgctaaataatcyaatactgcctaatagcgaaggggaaaggggaaaggtgagtaccgtctggggattttcctctttcttgtgtttagggtcgcagcattttccaaagtgctcttccagcaccctgctgtggttcttgcatctcctcgtattcaggcaccatggatcaagggagggcaatgccttgggcttctgcagcagaccacagtcaccttgattcgctcagtttgccatgcgtaaccggaggatgatcggtacacgctatattagactgccatcatgtgggattggttgtttgctaactagccaacagag

SEQ ID NO: 30574 - DNA, 600 bp, Chicken  19866894252241_1
tggaattgtgggtttgaaaaaaataaaaaaaaaaatctttcttctttgttgttcttagaagaaattaattttttaccttcttgaaaattataaggtttctacaagtacaaaacattaaaggagcattatagtagtcaatactctgataaaaagaatgtaatttagcagctttatcttacaaagagaatatatgcattcatacttatgaaaattagcagaaattgttattctgtgctctctcaaaactgttgttttgaatgacctgtacagacaccagtttgcaggaaaaaagcaagaagytcaaagcaaatctcttagtaattcaattacactgggccgaggtagaattcccatggtggcagtcagacatattaagttcaaggaataagtgttgaggcattggaataattcctttgattgtggccaggttggacttacaacttttttttaggcaattagtgttcagctttggatacagtaaagattacttgctattcttccagcaaactatctgtttgatggcaaaaaaagtaaaatttggtatatccaagggggggtgtgtgtttagaaagtctctacagagttcagggcacaagaaat

SEQ ID NO: 30575 - DNA, 600 bp, Chicken  19866894252242_1
agagctttgaagggaacatctctgagcacagcagttatcttcagccagccacagggctttcttcttggtgtgcatttaccactgatttgttttaaacatacaatttgctgcaggaacctgaacgttttttggagcactgtagcccatattaactgctacttcagcacacaaaattggaactagttaagcacataggtatttttgagaacttaagttcaagtgactgtactacatgccaaagatgagcaggcagaggaatgaacaagataagattaattgcatttaaacattttcctttartgataaaaggcttcctttcaattgcatcttccaaatagccaaataataatacaatcagtcgtcaactctgcgggtgtcctatttcctgttcctctgcacctttatcctttacaacactttctgtatttaattttaaggaacaggatgttctgagastgacaggcagctttcttaatgggctcatcagctcctcttcatgccatgacatcaattatgtacagttgtctttgacttggaatttgtaacccccatggtgactaattacagtacctaatgttagagtccctggtggcacgggct

SEQ ID NO: 30576 - DNA, 600 bp, Chicken  19866894252242_2
tacttcagcacacaaaattggaactagttaagcacataggtatttttgagaacttaagttcaagtgactgtactacatgccaaagatgagcaggcagaggaatgaacaagataagattaattgcatttaaacattttcctttartgataaaaggcttcctttcaattgcatcttccaaatagccaaataataatacaatcagtcgtcaactctgcgggtgtcctatttcctgttcctctgcacctttatcctttacaacactttctgtatttaattttaaggaacaggatgttctgagastgacaggcagctttcttaatgggctcatcagctcctcttcatgccatgacatcaattatgtacagttgtctttgacttggaatttgtaacccccatggtgactaattacagtacctaatgttagagtccctggtggcacgggctggagattaataaacgcagttcagcctgctgcctggggactgcaaacttcacagtccctggagagctcagggctcttggatttttgaggccactgtagttggaaaggaacggtgatgtgttaccatcctctttggagtaaaaatgaaaacatgagaa

SEQ ID NO: 30577 - DNA, 599 bp, Chicken  19866894252252_1
  misc_feature (1)..(107): n is any nucleotide
nnnnnnnnnnnnnnnnnnnnnnnnnnnnnnnnnnnnnnnnnnnnnnnnnnnnnnnnnnnnnnnnnnnnnnnnnnnnnnnnnnnnnnnnnnnnnnnnnnnnnnnnnnngccgggtgccccccaccccacctggccttgagcgcctccagcaatggggcacccccagctctgggcagcccgtgccagtgactcaccaccctaaatgccaaatccactgtgggtttgctgagctggcagaaacccaaggaaaccacccggatccccatcctcacagcagcccagagtgcagcctgcactgctrcaattggtgttttggaaatgtaacccccacagggctccaggcagtgaaggcygatggtgagatcagatggaacaggtgtgtaggtttggctgcacacttaaacaaccacagaaaaattgccaaggaggcaaggaaggtctcttatttgctataggcagaatttctttttttacagctaaacgaagtttcagctaattaaggggagagaggaacaggtaggctgcgtccatgtgggctgcgtgtagatctgcagcaggatgtatttcaaggctgtgcagaacatggtcaagcagaaaact

SEQ ID NO: 30578 - DNA, 599 bp, Chicken  19866894252252_2
  misc_feature (1)..(55): n is any nucleotide
nnnnnnnnnnnnnnnnnnnnnnnnnnnnnnnnnnnnnnnnnnnnnnnnnnnnnnngccgggtgccccccaccccacctggccttgagcgcctccagcaatggggcacccccagctctgggcagcccgtgccagtgactcaccaccctaaatgccaaatccactgtgggtttgctgagctggcagaaacccaaggaaaccacccggatccccatcctcacagcagcccagagtgcagcctgcactgctrcaattggtgttttggaaatgtaacccccacagggctccaggcagtgaaggcygatggtgagatcagatggaacaggtgtgtaggtttggctgcacacttaaacaaccacagaaaaattgccaaggaggcaaggaaggtctcttatttgctataggcagaatttctttttttacagctaaacgaagtttcagctaattaaggggagagaggaacaggtaggctgcgtccatgtgggctgcgtgtagatctgcagcaggatgtatttcaaggctgtgcagaacatggtcaagcagaaaacttgacagacacagggaaaggcagaacaataaccatgaattagaccctgcagaa

SEQ ID NO: 30579 - DNA, 600 bp, Chicken  19866894252252_3
cagaatttctttttttacagctaaacgaagtttcagctaattaaggggagagaggaacaggtaggctgcgtccatgtgggctgcgtgtagatctgcagcaggatgtatttcaaggctgtgcagaacatggtcaagcagaaaacttgacagacacagggaaaggcagaacaataaccatgaattagaccctgcagaaaaaatggagtgattcctgctggtgccagctgtcagtgtgggaggatgtaaggagccctgtggaaaacctcaagtaggaaattgtgctgtctggagccagctacytagtgagacttctgcattttctgcttttggtctatctgctcaggacaaaccaaacatcagtcctagacatattcatattagctcttagctttgctgtgtggttacagtaaagtatttgtagcacaggctttttccatctttgaaaaacagttttagatgtctctgtcttgtaacaaactttgctcagcgagttgtgcaagacctcctttggaaataattgctgcatatccattgcatgctgggctgcctggccgcaatctcaagccacacaaatttacctcattaacaaagttgtgttgt

SEQ ID NO: 30580 - DNA, 600 bp, Chicken  19866894252258_1
cttatttttctcaccagtctttcacatagcatttcattcttccaaatttattttggtatttgaatattgaggtatagggttgcatgggaaggttctgctttctctgtttaaattggcaatatggaaagttcgtaaaaatgtgtgcttctagaattcctcttcctgagctgaaagactcagataaactggataaagtgatgaacatgaaggaagctgccagacgtgtgcgtcttgggccagagtgcctgccttccatctgtttctacacgttccttaatgcttatcaggttggtaaaagargaatttgggcaatatgaaggagggaaagtgcaaagatgcaaagtgataaacttcactcttaataaagaaagaagacagaagagttaactttagttatcagagtacttggaacattgaaaattctatttatagacttccttaaactaatttgcatgttccttgggtctgctttgattttgccttaattctttctttcacttttccgatgtgaccctgagtgtattctacagaatacagtagatagtttgcaccaaaatactgggaagcagtgctgcattgtcatcattaactgtgcctcat

SEQ ID NO: 30581 - DNA, 600 bp, Chicken  19866894252267_1
atttattgcatatgactgtaacaaggctttcaattatactcaatctttagcaaaaacttatacttaagagtcaagcttaggcaaattattagaagacggacaagtagccaacctagctccatcaccccctcaaatgaagaattatattctcttaaattaactctctgttcaaatgatggctttttcacaatccacagtaatataaagaggcttttctataaacaagaattatgtccagagattttcatctcagttatacacgtatttgcaaataacacatttgttggacaatgaacatayaatgagaacattacaaatcagatgattggagagaaccttcatctgctgaaaagscastgaagtttcaaaggctaatctacagcataatgttttaaatcaaactaatagcagtcagtcagatctgctcagagaatctgtagagaagacaatcttataattatcgactgtagaattaacgtgcagcatttatttgtgtggttgtgctaacaatccaattgttggcccactggagacaagacctgatgagttcattctcttccatttgtaagttctcatcttgaaaaaaatatactctgtast

SEQ ID NO: 30582 - DNA, 600 bp, Chicken  19866894252267_2
aacttatacttaagagtcaagcttaggcaaattattagaagacggacaagtagccaacctagctccatcaccccctcaaatgaagaattatattctcttaaattaactctctgttcaaatgatggctttttcacaatccacagtaatataaagaggcttttctataaacaagaattatgtccagagattttcatctcagttatacacgtatttgcaaataacacatttgttggacaatgaacatayaatgagaacattacaaatcagatgattggagagaaccttcatctgctgaaaagscastgaagtttcaaaggctaatctacagcataatgttttaaatcaaactaatagcagtcagtcagatctgctcagagaatctgtagagaagacaatcttataattatcgactgtagaattaacgtgcagcatttatttgtgtggttgtgctaacaatccaattgttggcccactggagacaagacctgatgagttcattctcttccatttgtaagttctcatcttgaaaaaaatatactctgtastcatcatctcctgaagacactcagattttatttagctatagccctattgacactc

SEQ ID NO: 30583 - DNA, 600 bp, Chicken  19866894252267_3
ttatacttaagagtcaagcttaggcaaattattagaagacggacaagtagccaacctagctccatcaccccctcaaatgaagaattatattctcttaaattaactctctgttcaaatgatggctttttcacaatccacagtaatataaagaggcttttctataaacaagaattatgtccagagattttcatctcagttatacacgtatttgcaaataacacatttgttggacaatgaacatayaatgagaacattacaaatcagatgattggagagaaccttcatctgctgaaaagscastgaagtttcaaaggctaatctacagcataatgttttaaatcaaactaatagcagtcagtcagatctgctcagagaatctgtagagaagacaatcttataattatcgactgtagaattaacgtgcagcatttatttgtgtggttgtgctaacaatccaattgttggcccactggagacaagacctgatgagttcattctcttccatttgtaagttctcatcttgaaaaaaatatactctgtastcatcatctcctgaagacactcagattttatttagctatagccctattgacactcagt

SEQ ID NO: 30584 - DNA, 562 bp, Chicken  19866894252267_4
yaatgagaacattacaaatcagatgattggagagaaccttcatctgctgaaaagscastgaagtttcaaaggctaatctacagcataatgttttaaatcaaactaatagcagtcagtcagatctgctcagagaatctgtagagaagacaatcttataattatcgactgtagaattaacgtgcagcatttatttgtgtggttgtgctaacaatccaattgttggcccactggagacaagacctgatgagttcattctcttccatttgtaagttctcatcttgaaaaaaatatactctgtastcatcatctcctgaagacactcagattttatttagctatagccctattgacactcagttrtgtcctattccccatatgctttaacagcatcacaaccattttgtgcatttaatcctctaaaaatccacacagagatcttttttgtggcacacagtagcttttactatgagatatggtgtagctggggacatggtcgtaaaccaagaagaacctcatctctgcacagaccacgtgcttcaaacgtctcatcagtacatctcat

SEQ ID NO: 30585 - DNA, 502 bp, Chicken  19866894252267_5
aagtttcaaaggctaatctacagcataatgttttaaatcaaactaatagcagtcagtcagatctgctcagagaatctgtagagaagacaatcttataattatcgactgtagaattaacgtgcagcatttatttgtgtggttgtgctaacaatccaattgttggcccactggagacaagacctgatgagttcattctcttccatttgtaagttctcatcttgaaaaaaatatactctgtastcatcatctcctgaagacactcagattttatttagctatagccctattgacactcagttrtgtcctattccccatatgctttaacagcatcacaaccattttgtgcatttaatcctctaaaaatccacacagagatcttttttgtggcacacagtagcttttactatgagatatggtgtagctggggacatggtcgtaaaccaagaagaacctcatctctgcacagaccacgtgcttcaaacgtctcatcagtacatctcat

SEQ ID NO: 30586 - DNA, 600 bp, Chicken  19866894252268_1
aaacataccccatataatcatagctgaggaagcattgcaatggtcaaaattaccacttgcaaaatgtttacttcacatttgtcagagacatttcagcaataccagggcaggctgaagaatccttttggagaaacacagtataaaacagattaccatttcaacatttaaaataactcagtcctgaactatacctcagtggaagactttcacacagtgagaaacaataagcactcttgctctaaagagatgctgagaacattttgaaaaggattttttttctttgctttgagattctcaaaragattctctgggcagatctgactgaatttcagctatcttggcaatgaaatccctcttctgycttgccccaacacacacccctgtgtaatatgtacktgaatctcagaaacagatggagtacactttacccagaatctaatcctggtgaggtagaggggccagatggtctcactttccaaatgaaaactttcagatagtctttaaactaagcaaagattttattaacattgatggctggatatagtgtaatacacagagaagattaattaggaaccctaattaaatgtaacagtgtaaaag

SEQ ID NO: 30587 - DNA, 600 bp, Chicken  19866894252268_2
aaatgtttacttcacatttgtcagagacatttcagcaataccagggcaggctgaagaatccttttggagaaacacagtataaaacagattaccatttcaacatttaaaataactcagtcctgaactatacctcagtggaagactttcacacagtgagaaacaataagcactcttgctctaaagagatgctgagaacattttgaaaaggattttttttctttgctttgagattctcaaaragattctctgggcagatctgactgaatttcagctatcttggcaatgaaatccctcttctgycttgccccaacacacacccctgtgtaatatgtacktgaatctcagaaacagatggagtacactttacccagaatctaatcctggtgaggtagaggggccagatggtctcactttccaaatgaaaactttcagatagtctttaaactaagcaaagattttattaacattgatggctggatatagtgtaatacacagagaagattaattaggaaccctaattaaatgtaacagtgtaaaagaaccagagcactatttggcatcagacagctttttaagattcttgttgaaacctgcattctg

SEQ ID NO: 30588 - DNA, 600 bp, Chicken  19866894252268_3
caataccagggcaggctgaagaatccttttggagaaacacagtataaaacagattaccatttcaacatttaaaataactcagtcctgaactatacctcagtggaagactttcacacagtgagaaacaataagcactcttgctctaaagagatgctgagaacattttgaaaaggattttttttctttgctttgagattctcaaaragattctctgggcagatctgactgaatttcagctatcttggcaatgaaatccctcttctgycttgccccaacacacacccctgtgtaatatgtacktgaatctcagaaacagatggagtacactttacccagaatctaatcctggtgaggtagaggggccagatggtctcactttccaaatgaaaactttcagatagtctttaaactaagcaaagattttattaacattgatggctggatatagtgtaatacacagagaagattaattaggaaccctaattaaatgtaacagtgtaaaagaaccagagcactatttggcatcagacagctttttaagattcttgttgaaacctgcattctgcagcatggccgagctgcaaagtgaacaacagaaaa

SEQ ID NO: 30589 - DNA, 600 bp, Chicken  19866894252270_1
ccagtttgtcattgacatttcaatgggaattgctcttccttattccaaggatgaatttggcagcttctcctttagttaatccttttaacttaaaacatcagcagtactatttggccctgcatgcaagatttctgggcaacaactcaaaacttactaagcgataatctttgttgattaatcattcactgcaagcaggttacataaatggactgataacagagtcatgggactctttttttccacgagcattttaaaaatgacttcagaaagtttttgaaagctaagcagtgcaaaattaaktttttctgctgctgtgagaagcaaaaactgtttttgaactagtggagttagatctccctgagtctctgggrtgtctcttaccctttaagatcgaytgtagtttggtaactccttgggcactgaaggaatgatgcatggcactgckatgtgcactgctggctggcagagattcctgctgtttgttctggtgttgtgtacttagaaggtgcttaaggtttgtgtggttcttcctcttccttgttttagtttcctgtttgcctcttgcctcagacaatctggccagccygcgtcaccacttct

SEQ ID NO: 30590 - DNA, 600 bp, Chicken  19866894252270_2
ttagttaatccttttaacttaaaacatcagcagtactatttggccctgcatgcaagatttctgggcaacaactcaaaacttactaagcgataatctttgttgattaatcattcactgcaagcaggttacataaatggactgataacagagtcatgggactctttttttccacgagcattttaaaaatgacttcagaaagtttttgaaagctaagcagtgcaaaattaattttttctgctgctgtgagaagcaaaaactgtttttgaactagtggagttagatctccctgagtctctgggrtgtctcttaccctttaagatcgaytgtagtttggtaactccttgggcactgaaggaatgatgcatggcactgckatgtgcactgctggctggcagagattcctgctgtttgttctggtgttgtgtacttagaaggtgcttaaggtttgtgtggttcttcctcttccttgttttagtttcctgtttgcctcttgcctcagacaatctggccagccygcgtcaccacttctccctgtgagcgatctgctcatcagacctctggttcacttgccacaaacctttttgtgattgagcggcctgc

SEQ ID NO: 30591 - DNA, 600 bp, Chicken  19866894252270_3
catcagcagtactatttggccctgcatgcaagatttctgggcaacaactcaaaacttactaagcgataatctttgttgattaatcattcactgcaagcaggttacataaatggactgataacagagtcatgggactctttttttccacgagcattttaaaaatgacttcagaaagtttttgaaagctaagcagtgcaaaattaattttttctgctgctgtgagaagcaaaaactgtttttgaactagtggagttagatctccctgagtctctgggrtgtctcttaccctttaagatcgaytgtagtttggtaactccttgggcactgaaggaatgatgcatggcactgckatgtgcactgctggctggcagagattcctgctgtttgttctggtgttgtgtacttagaaggtgcttaaggtttgtgtggttcttcctcttccttgttttagtttcctgtttgcctcttgcctcagacaatctggccagccygcgtcaccacttctccctgtgagcgatctgctcatcagacctctggttcacttgccacaaacctttttgtgattgagcggcctgctgaaagccctgttcagcagggtct

SEQ ID NO: 30592 - DNA, 600 bp, Chicken  19866894252270_4
aaaacttactaagcgataatctttgttgattaatcattcactgcaagcaggttacataaatggactgataacagagtcatgggactctttttttccacgagcattttaaaaatgacttcagaaagtttttgaaagctaagcagtgcaaaattaattttttctgctgctgtgagaagcaaaaactgtttttgaactagtggagttagatctccctgagtctctgggrtgtctcttaccctttaagatcgaytgtagtttggtaactccttgggcactgaaggaatgatgcatggcactgckatgtgcactgctggctggcagagattcctgctgtttgttctggtgttgtgtacttagaaggtgcttaaggtttgtgtggttcttcctcttccttgttttagtttcctgtttgcctcttgcctcagacaatctggccagccygcgtcaccacttctccctgtgagcgatctgctcatcagacctctggttcacttgccacaaacctttttgtgattgagcggcctgctgaaagccctgttcagcagggtctggaactgtgtttgttctgtgaagacacattgcatgtgaagcagtattcat

SEQ ID NO: 30593 - DNA, 506 bp, Chicken  19866894252270_5
agtgcaaaattaattttttctgctgctgtgagaagcaaaaactgtttttgaactagtggagttagatctccctgagtctctgggrtgtctcttaccctttaagatcgaytgtagtttggtaactccttgggcactgaaggaatgatgcatggcactgckatgtgcactgctggctggcagagattcctgctgtttgttctggtgttgtgtacttagaaggtgcttaaggtttgtgtggttcttcctcttccttgttttagtttcctgtttgcctcttgcctcagacaatctggccagccygcgtcaccacttctccctgtgagcgatctgctcatcagacctctggttcacttgccacaaacctttttgtgattgagcggcctgctgaaagccctgttcagcagggtctggaactgtgtttgttctgtgaagacacattgcatgtgaagcagtattcatttagaggaggcaaaaaatagagtgatggaaaatgcaggtgcgccacg

SEQ ID NO: 30594 - DNA, 600 bp, Chicken  19866894252273_1
catgtctttcttgtagtgaggggcccaaaacagaatacagcacttgaggagaagttctgagtttccaccatcttcaggtcattcaccatctcaatccctacctcccaccggatcccttctctttcccctcattggcatcagccctatgaccacctctttccctccttacacttctgttttctttccagacatctcagtcttgggcagctgatgttgtgcacacacgttcctttgccaggattcattcaactcgaacagcagctccaagtgccaaaatcacttatgctgtgccctctaccygaggttgctccagcactgmaatttgtccatcctttctattcctcttgcaggatatgagggaaaactgccgactcagctaaaagcaggagcaaggggaaggtgtctctgaaggccagctgtcaggccaggcttagcggctgattgagctgaattaagttctctgcctcctgtttatttctttaaatgacagaaggcttccttgtacttcctggtcaggcttgttaagctcatgtctggcaatgatttgtattgatttgacaggcttgctcatgctcacagatttgctctgaccactgagag

SEQ ID NO: 30595 - DNA, 600 bp, Chicken  19866894252273_2
ggggcccaaaacagaatacagcacttgaggagaagttctgagtttccaccatcttcaggtcattcaccatctcaatccctacctcccaccggatcccttctctttcccctcattggcatcagccctatgaccacctctttccctccttacacttctgttttctttccagacatctcagtcttgggcagctgatgttgtgcacacacgttcctttgccaggattcattcaactcgaacagcagctccaagtgccaaaatcacttatgctgtgccctctaccygaggttgctccagcactgmaatttgtccatcctttctattcctcttgcaggatatgagggaaaactgccgactcagctaaaagcaggagcaaggggaaggtgtctctgaaggccagctgtcaggccaggcttagcggctgattgagctgaattaagttctctgcctcctgtttatttctttaaatgacagaaggcttccttgtacttcctggtcaggcttgttaagctcatgtctggcaatgatttgtattgatttgacaggcttgctcatgctcacagatttgctctgaccactgagagttgcttaattacaacaaag

SEQ ID NO: 30596 - DNA, 600 bp, Chicken  19866894252273_3
atttctttaaatgacagaaggcttccttgtacttcctggtcaggcttgttaagctcatgtctggcaatgatttgtattgatttgacaggcttgctcatgctcacagatttgctctgaccactgagagttgcttaattacaacaaagagatgaagaatttctgggaacctgaaagatccatcccagaggatctgtgaataagaattaatacagaaaaacagtgccattctgcagagttatgtcacaacttcctcacagagaaagcaactactccaaagagcagtaagcaaggggaaatggyttcaaactaagagagggggaaatttagattggatataaggaagaagtattttcaataagaggggtgaggcagtggaacaggttgcccagagaggtggtccctggggacacccaaggtcaggttggacatggctctgagcactgatggggtgttcattgcgggggtgttgggatagatgaccttttagggtcccttccaactcaaaygattctgtgattccrtgatyatacagaaaactttccactaggtcatctgatagagatgctgtttttccccaaataacaaagacagccacactac

SEQ ID NO: 30597 - DNA, 600 bp, Chicken  19866894252273_4
atacagaaaaacagtgccattctgcagagttatgtcacaacttcctcacagagaaagcaactactccaaagagcagtaagcaaggggaaatggyttcaaactaagagagggggaaatttagattggatataaggaagaagtattttcaataagaggggtgaggcagtggaacaggttgcccagagaggtggtccctggggacacccaaggtcaggttggacatggctctgagcactgatggggtgttcattgcgggggtgttgggatagatgaccttttagggtcccttccaactcaaaygattctgtgattccrtgatyatacagaaaactttccactaggtcatctgatagagatgctgtttttccccaaataacaaagacagccacactacctgcatgtcccagccatggtgcatccctgctggggcagctgacttgcagtgaggagctggattggccaggacaaggaggatgctatcccctctgcagtgtgcagcatccttctgctctcctctcctccccagatacaccagtgccagtcaccttatttgatccttgcttttattaggagatatcagactgagcactcaggaagtgg

SEQ ID NO: 30598 - DNA, 600 bp, Chicken  19866894252273_5
gccattctgcagagttatgtcacaacttcctcacagagaaagcaactactccaaagagcagtaagcaaggggaaatggyttcaaactaagagagggggaaatttagattggatataaggaagaagtattttcaataagaggggtgaggcagtggaacaggttgcccagagaggtggtccctggggacacccaaggtcaggttggacatggctctgagcactgatggggtgttcattgcgggggtgttgggatagatgaccttttagggtcccttccaactcaaaygattctgtgattccrtgatyatacagaaaactttccactaggtcatctgatagagatgctgtttttccccaaataacaaagacagccacactacctgcatgtcccagccatggtgcatccctgctggggcagctgacttgcagtgaggagctggattggccaggacaaggaggatgctatcccctctgcagtgtgcagcatccttctgctctcctctcctccccagatacaccagtgccagtcaccttatttgatccttgcttttattaggagatatcagactgagcactcaggaagtggcagctaaggactact

SEQ ID NO: 30599 - DNA, 600 bp, Chicken  19866894252273_6
tctgcagagttatgtcacaacttcctcacagagaaagcaactactccaaagagcagtaagcaaggggaaatggyttcaaactaagagagggggaaatttagattggatataaggaagaagtattttcaataagaggggtgaggcagtggaacaggttgcccagagaggtggtccctggggacacccaaggtcaggttggacatggctctgagcactgatggggtgttcattgcgggggtgttgggatagatgaccttttagggtcccttccaactcaaaygattctgtgattccrtgatyatacagaaaactttccactaggtcatctgatagagatgctgtttttccccaaataacaaagacagccacactacctgcatgtcccagccatggtgcatccctgctggggcagctgacttgcagtgaggagctggattggccaggacaaggaggatgctatcccctctgcagtgtgcagcatccttctgctctcctctcctccccagatacaccagtgccagtcaccttatttgatccttgcttttattaggagatatcagactgagcactcaggaagtggcagctaaggactactcaaga

SEQ ID NO: 30600 - DNA, 564 bp, Chicken  19866894252275_1
gaagaataattcaagaacgtaggtgaacatggctgtactcatggcttttccaggatgcagacaaccaacaaagcgtccagccagttggggccacacacacatagtaaagacagcaagaatattgcctgcaacagcagcactccaggtgtgtaagtaaaggagaccagctgaagatgctatacctgtgaaggggcagaagaaaaacaagtcagtcacaggcagctctgttatctgtcctcttctttagaacattcttactaggaggaaaaaaaaaaaaaaagcctgggaaatataactgtrctttgcagtcatgagaactgtatcactagaaggatggttatcgtctcagttttctcaacatctcattctcttacaggttgcttatggatctgaaagagggcagcaaaaaggctgcagagaaacatcaccaagcatctacccatgctgatccagtatggaaaaaaaaacacctctctatgagaaaattacagaacagttttgatctcctctatggccttctccacggcttttatggcacagctataatttctctctgaaaatgga

SEQ ID NO: 30601 - DNA, 599 bp, Chicken  19866894252277_1
  misc_feature (1)..(8): n is any nucleotide
nnnnnnnnccagaaaaatacttatgcagagcaactattgcttcaaggtcttaactttttgggatacagttttttttttttcctgcaatacaagaaattctacttaaaaacaatgaaagtcatcctcagctctcccactctcccagcaactgaacacattgagttagagctcccatacagtctttccatcctaccactgtggcttaagactgttgctctgctctgtttgcagtttccacacgctgaattgtgtcatgcttgtgtctgctgtactaggagaaatctgttgatactgttaatyctctagaaccaagacctacacaaggaggtygtcttctgtmtaagttaaaatttgccaagtcttttatttactgcttcagaccaatgctatactggtcatcataagatagcaacataaagtgtttagactgaatgaaaaaaaaagygattaaaaatgcctacttaccacagaatttctaagcttttcaggtagagggtctttcacttcagacagaggatcctcagggtttttgtcttcagaattaggaaaaaattttgattgcactaaagagcttgaagaaagacaaaaagaacccattg

SEQ ID NO: 30602 - DNA, 600 bp, Chicken  19866894252277_2
caactattgcttcaaggtcttaactttttgggatacagttttttttttttcctgcaatacaagaaattctacttaaaaacaatgaaagtcatcctcagctctcccactctcccagcaactgaacacattgagttagagctcccatacagtctttccatcctaccactgtggcttaagactgttgctctgctctgtttgcagtttccacacgctgaattgtgtcatgcttgtgtctgctgtactaggagaaatctgttgatactgttaatyctctagaaccaagacctacacaaggaggtygtcttctgtmtaagttaaaatttgccaagtcttttatttactgcttcagaccaatgctatactggtcatcataagatagcaacataaagtgtttagactgaatgaaaaaaaaagygattaaaaatgcctacttaccacagaatttctaagcttttcaggtagagggtctttcacttcagacagaggatcctcagggtttttgtcttcagaattaggaaaaaattttgattgcactaaagagcttgaagaaagacaaaaagaacccattgagaagcatgcactactctgcttttagaagag

SEQ ID NO: 30603 - DNA, 600 bp, Chicken  19866894252277_3
ttcaaggtcttaactttttgggatacagttttttttttttcctgcaatacaagaaattctacttaaaaacaatgaaagtcatcctcagctctcccactctcccagcaactgaacacattgagttagagctcccatacagtctttccatcctaccactgtggcttaagactgttgctctgctctgtttgcagtttccacacgctgaattgtgtcatgcttgtgtctgctgtactaggagaaatctgttgatactgttaatyctctagaaccaagacctacacaaggaggtygtcttctgtmtaagttaaaatttgccaagtcttttatttactgcttcagaccaatgctatactggtcatcataagatagcaacataaagtgtttagactgaatgaaaaaaaaagygattaaaaatgcctacttaccacagaatttctaagcttttcaggtagagggtctttcacttcagacagaggatcctcagggtttttgtcttcagaattaggaaaaaattttgattgcactaaagagcttgaagaaagacaaaaagaacccattgagaagcatgcactactctgcttttagaagagtaacaaagtc

SEQ ID NO: 30604 - DNA, 600 bp, Chicken  19866894252277_4
caactgaacacattgagttagagctcccatacagtctttccatcctaccactgtggcttaagactgttgctctgctctgtttgcagtttccacacgctgaattgtgtcatgcttgtgtctgctgtactaggagaaatctgttgatactgttaatyctctagaaccaagacctacacaaggaggtygtcttctgtmtaagttaaaatttgccaagtcttttatttactgcttcagaccaatgctatactggtcatcataagatagcaacataaagtgtttagactgaatgaaaaaaaaagygattaaaaatgcctacttaccacagaatttctaagcttttcaggtagagggtctttcacttcagacagaggatcctcagggtttttgtcttcagaattaggaaaaaattttgattgcactaaagagcttgaagaaagacaaaaagaacccattgagaagcatgcactactctgcttttagaagagtaacaaagtcagaaaatctatttactacaagtttattccaaaaaaagcaatcytagtatattagggcttccacattgaaaagcttatttataacaagatctcaattttatcatag

SEQ ID NO: 30605 - DNA, 546 bp, Chicken  19866894252277_5
atgctatactggtcatcataagatagcaacataaagtgtttagactgaatgaaaaaaaaagygattaaaaatgcctacttaccacagaatttctaagcttttcaggtagagggtctttcacttcagacagaggatcctcagggtttttgtcttcagaattaggaaaaaattttgattgcactaaagagcttgaagaaagacaaaaagaacccattgagaagcatgcactactctgcttttagaagagtaacaaagtcagaaaatctatttactacaagtttattccaaaaaaagcaatcytagtatattagggcttccacattgaaaagcttatttataacaagatctcaattttatcatagcaccagttctccagctacacaccagtgatcaccactaaagagagaacataaactgctgtttgaataaatctagctgcttatttacctaggaactgggaagcaaataactagacaaatgaaatattcataaactgtgatcaaactactcatgaaactaaactttagcatgtaacaaaacaaaact

SEQ ID NO: 30606 - DNA, 600 bp, Chicken  19866894252281_1
agagggtggtgatgcactggaacaggttgctcagagaggttgtggatgccccatctctggtagcatttgaggcaaggctggacgtggctctgggcagcatggtctagtggttggtgaccataaccatggcaggggggttgaaatgagatgatctttgaggttcttttcaacccaggccgttctgtgattctgtgaaacttaggcattttcttgctattcattcttgcattttcccagtgtctgaaactgctgtattagtaatgtttgatgtttggtatctgtttcatcggtctggtatcygtgtatgggcctgttgtccatgaatgtaaactcttctagaacccrccagtaccgactggctctgtggctgtaagtttccaatgtagattwaaaaaaaaaattattatcgtaaaagctttgcttctacattttcagtgcatctcctggtagatgtggcgggtgccctgaatcttgtctttgtgatattgggtgaacagcaactgcactgatgtattgcctttgtgattttgttaacctctgtcataccccctcaaccttcttccctctgaactgagaagtccstgcctcttaatcctctag

SEQ ID NO: 30607 - DNA, 600 bp, Chicken  19866894252281_2
atgccccatctctggtagcatttgaggcaaggctggacgtggctctgggcagcatggtctagtggttggtgaccataaccatggcaggggggttgaaatgagatgatctttgaggttcttttcaacccaggccgttctgtgattctgtgaaacttaggcattttcttgctattcattcttgcattttcccagtgtctgaaactgctgtattagtaatgtttgatgtttggtatctgtttcatcggtctggtatcygtgtatgggcctgttgtccatgaatgtaaactcttctagaacccrccagtaccgactggctctgtggctgtaagtttccaatgtagattwaaaaaaaaaattattatcgtaaaagctttgcttctacattttcagtgcatctcctggtagatgtggcgggtgccctgaatcttgtctttgtgatattgggtgaacagcaactgcactgatgtattgcctttgtgattttgttaacctctgtcataccccctcaaccttcttccctctgaactgagaagtccstgcctcttaatcctctagatcgtaatccttagaaaaggcagctgctgcgtccactggatcagt

SEQ ID NO: 30608 - DNA, 600 bp, Chicken  19866894252281_3
tgggcagcatggtctagtggttggtgaccataaccatggcaggggggttgaaatgagatgatctttgaggttcttttcaacccaggccgttctgtgattctgtgaaacttaggcattttcttgctattcattcttgcattttcccagtgtctgaaactgctgtattagtaatgtttgatgtttggtatctgtttcatcggtctggtatcygtgtatgggcctgttgtccatgaatgtaaactcttctagaacccrccagtaccgactggctctgtggctgtaagtttccaatgtagattwaaaaaaaaaattattatcgtaaaagctttgcttctacattttcagtgcatctcctggtagatgtggcgggtgccctgaatcttgtctttgtgatattgggtgaacagcaactgcactgatgtattgcctttgtgattttgttaacctctgtcataccccctcaaccttcttccctctgaactgagaagtccstgcctcttaatcctctagatcgtaatccttagaaaaggcagctgctgcgtccactggatcagtttgattgctcttctctgtattttgtgtaactgcactacatccttc

SEQ ID NO: 30609 - DNA, 600 bp, Chicken  19866894252281_4
ttcatcggtctggtatcygtgtatgggcctgttgtccatgaatgtaaactcttctagaacccrccagtaccgactggctctgtggctgtaagtttccaatgtagattwaaaaaaaaaattattatcgtaaaagctttgcttctacattttcagtgcatctcctggtagatgtggcgggtgccctgaatcttgtctttgtgatattgggtgaacagcaactgcactgatgtattgcctttgtgattttgttaacctctgtcataccccctcaaccttcttccctctgaactgagaagtccstgcctcttaatcctctagatcgtaatccttagaaaaggcagctgctgcgtccactggatcagtttgattgctcttctctgtattttgtgtaactgcactacatccttcttgggatgtgcaggttaatgaagatgtgggcacagcagtgttttctgtgtcagcagaattacatcctttctcatcacaatatcctgtccgtaaagcccagtgttttgtcagttatttacgtatttatttatttattttgttgttggctgctgcttgtacatgaacttaagatttcctaaagctgtcaacagt

SEQ ID NO: 30610 - DNA, 599 bp, Chicken  19866894252287_1
  misc_feature (1)..(105): n is any nucleotide
nnnnnnnnnnnnnnnnnnnnnnnnnnnnnnnnnnnnnnnnnnnnnnnnnnnnnnnnnnnnnnnnnnnnnnnnnnnnnnnnnnnnnnnnnnnnnnnnnnnnnnnnnttgcactttcgaaaagcataaagcagtcaaatctttcacgtggaactataaattaaagcttgtggagagaaacctaatctaagattccttacaacaagcattgttaagatcaccctcagtttacaaatcatttttgtattttgaagagctgcattttgaacacttcttttgagcttaaccacttaagaacacatrgcattgttcatcatgtcacacagccaagtcagagcctcaaaagagaaggtcccccagcgcacagaggtatagacttcctaggacgtaagcacgctctttctgccaccacaaagttytctctctgtttactcagatttacctgcctagttcacagtaaagwtcattgaagttrcwatacaggttaaaaaaaacatacagatgtctaacaatgcattgccatttacrgcacattgaatatatgtgacagaactagagcccactgtaagccgcattatacggtgcaccttgatcacagaggc

SEQ ID NO: 30611 - DNA, 600 bp, Chicken  19866894252287_2
aaaagcataaagcagtcaaatctttcacgtggaactataaattaaagcttgtggagagaaacctaatctaagattccttacaacaagcattgttaagatcaccctcagtttacaaatcatttttgtattttgaagagctgcattttgaacacttcttttgagcttaaccacttaagaacacatrgcattgttcatcatgtcacacagccaagtcagagcctcaaaagagaaggtcccccagcgcacagaggtatagacttcctaggacgtaagcacgctctttctgccaccacaaagttytctctctgtttactcagatttacctgcctagttcacagtaaagwtcattgaagttrcwatacaggttaaaaaaaacatacagatgtctaacaatgcattgccatttacrgcacattgaatatatgtgacagaactagagcccactgtaagccgcattatacggtgcaccttgatcacagaggcaaagatttctgagctaattataatgactaatcacagggagctctaagcccacacttggccaagtcacagaactaaccagggccraaaacaagagttttaagagcaactcattaagca

SEQ ID NO: 30612 - DNA, 600 bp, Chicken  19866894252287_3
aagcttgtggagagaaacctaatctaagattccttacaacaagcattgttaagatcaccctcagtttacaaatcatttttgtattttgaagagctgcattttgaacacttcttttgagcttaaccacttaagaacacatrgcattgttcatcatgtcacacagccaagtcagagcctcaaaagagaaggtcccccagcgcacagaggtatagacttcctaggacgtaagcacgctctttctgccaccacaaagttytctctctgtttactcagatttacctgcctagttcacagtaaagwtcattgaagttrcwatacaggttaaaaaaaacatacagatgtctaacaatgcattgccatttacrgcacattgaatatatgtgacagaactagagcccactgtaagccgcattatacggtgcaccttgatcacagaggcaaagatttctgagctaattataatgactaatcacagggagctctaagcccacacttggccaagtcacagaactaaccagggccraaaacaagagttttaagagcaactcattaagcagcaggaaccagctatgaagaacaaagcattccctctacctagta

SEQ ID NO: 30613 - DNA, 600 bp, Chicken  19866894252287_4
agaaacctaatctaagattccttacaacaagcattgttaagatcaccctcagtttacaaatcatttttgtattttgaagagctgcattttgaacacttcttttgagcttaaccacttaagaacacatrgcattgttcatcatgtcacacagccaagtcagagcctcaaaagagaaggtcccccagcgcacagaggtatagacttcctaggacgtaagcacgctctttctgccaccacaaagttytctctctgtttactcagatttacctgcctagttcacagtaaagwtcattgaagttrcwatacaggttaaaaaaaacatacagatgtctaacaatgcattgccatttacrgcacattgaatatatgtgacagaactagagcccactgtaagccgcattatacggtgcaccttgatcacagaggcaaagatttctgagctaattataatgactaatcacagggagctctaagcccacacttggccaagtcacagaactaaccagggccraaaacaagagttttaagagcaactcattaagcagcaggaaccagctatgaagaacaaagcattccctctacctagtattaattccagtc

SEQ ID NO: 30614 - DNA, 600 bp, Chicken  19866894252287_5
aaacctaatctaagattccttacaacaagcattgttaagatcaccctcagtttacaaatcatttttgtattttgaagagctgcattttgaacacttcttttgagcttaaccacttaagaacacatrgcattgttcatcatgtcacacagccaagtcagagcctcaaaagagaaggtcccccagcgcacagaggtatagacttcctaggacgtaagcacgctctttctgccaccacaaagttytctctctgtttactcagatttacctgcctagttcacagtaaagwtcattgaagttrcwatacaggttaaaaaaaacatacagatgtctaacaatgcattgccatttacrgcacattgaatatatgtgacagaactagagcccactgtaagccgcattatacggtgcaccttgatcacagaggcaaagatttctgagctaattataatgactaatcacagggagctctaagcccacacttggccaagtcacagaactaaccagggccraaaacaagagttttaagagcaactcattaagcagcaggaaccagctatgaagaacaaagcattccctctacctagtattaattccagtcca

SEQ ID NO: 30615 - DNA, 600 bp, Chicken  19866894252287_6
ttacaaatcatttttgtattttgaagagctgcattttgaacacttcttttgagcttaaccacttaagaacacatrgcattgttcatcatgtcacacagccaagtcagagcctcaaaagagaaggtcccccagcgcacagaggtatagacttcctaggacgtaagcacgctctttctgccaccacaaagttytctctctgtttactcagatttacctgcctagttcacagtaaagwtcattgaagttrcwatacaggttaaaaaaaacatacagatgtctaacaatgcattgccatttacrgcacattgaatatatgtgacagaactagagcccactgtaagccgcattatacggtgcaccttgatcacagaggcaaagatttctgagctaattataatgactaatcacagggagctctaagcccacacttggccaagtcacagaactaaccagggccraaaacaagagttttaagagcaactcattaagcagcaggaaccagctatgaagaacaaagcattccctctacctagtattaattccagtccagacattaatacatttgtcagtgcatgagacagctattacctctccatacaa

SEQ ID NO: 30616 - DNA, 600 bp, Chicken  19866894252287_7
cgtaagcacgctctttctgccaccacaaagttytctctctgtttactcagatttacctgcctagttcacagtaaagwtcattgaagttrcwatacaggttaaaaaaaacatacagatgtctaacaatgcattgccatttacrgcacattgaatatatgtgacagaactagagcccactgtaagccgcattatacggtgcaccttgatcacagaggcaaagatttctgagctaattataatgactaatcacagggagctctaagcccacacttggccaagtcacagaactaaccagggccraaaacaagagttttaagagcaactcattaagcagcaggaaccagctatgaagaacaaagcattccctctacctagtattaattccagtccagacattaatacatttgtcagtgcatgagacagctattacctctccatacaaacactgcatgtgccaggcagggaagaaagccacaggctttggccgcaccagagacttgtttgtttactacagcactcaggtttgagaagggacttcttgcactatttgaggaacaataaagctctgaaaccctgccttgggaatgaggtgggaaaggg

SEQ ID NO: 30617 - DNA, 600 bp, Chicken  19866894252287_8
ttaagcagcaggaaccagctatgaagaacaaagcattccctctacctagtattaattccagtccagacattaatacatttgtcagtgcatgagacagctattacctctccatacaaacactgcatgtgccaggcagggaagaaagccacaggctttggccgcaccagagacttgtttgtttactacagcactcaggtttgagaagggacttcttgcactatttgaggaacaataaagctctgaaaccctgccttgggaatgaggtgggaaaggggatctctgcaccctccacaggacagrcaggtgaggtgaaagctaattgtggagccatgcagactaagacatggtccccctggggcaagaagctcagaggtaagaggtacagcaccaaatctacagctgtgctcctgctagagtgccagatacagattaaaaatccttcaacttaagctctgctcccttttcctttatctccagcctggatttaagtaaataaattaaaaaaaaataaaacaaagataagctaaagtgtcagcatctacaagtgagctccactttcctcacatggaagtggtgaggcagctccccccccttcctgcc

SEQ ID NO: 30618 - DNA, 569 bp, Chicken  19866894252287_9
cagatacagattaaaaatccttcaacttaagctctgctcccttttcctttatctccagcctggatttaagtaaataaattaaaaaaaaataaaacaaagataagctaaagtgtcagcatctacaagtgagctccactttcctcacatggaagtggtgaggcagctccccccccttcctgccacgtaactgcatgagcctcatctactggtgaggaacaagactagcagaggcattcccccagccacaggcagggctaccagcaaagcaaggagaggcaggagccatctccccttccctgrggcagcagggaccagcctggccttaagaaccacttacacctagatggggctgagacagctgaaaaatcaagttctgtgcaatggcattcaacaggagctccttgcctgctctgcagtccagggggtacaaagaggctgtccttgtagcaaggcaagaccagtacagcccatgagggagaaaggggcaaagcaaactacaacaaggggaagcatctcccagcaggaagttgcaaagacaaccaacagtagctaaatctttacgggggggg

SEQ ID NO: 30619 - DNA, 600 bp, Chicken  19866894252293_1
ggcccttagtaacaaatttcttcatcctcttacaagaaatatcagctccacagtctggaactgaggttctgattatcttttactaccaaaactgcagataccctctcaaaattaactatctctcatattaatcacgtaaaatgcccagtgactttccccaataaaatgttataatctataaaatgggtatataaatatttatctgtcttagtcttattgtgaatattaacaagaaaatcttaaaatgtagacattctcactgttagcatgtctacattctcaaaacagcacttcaatacrtacgaatgaaacaatcaggcagggaagttaatggatccggtggtaaaatatatcatttactagactttttcatagacaggatgtcactatctagagcggttgtacctgttttcaaggcactgactttttgttttgagcctaagtaaatgcatckaaaaccattatcatttgttttgcttcatctctaatttgctatgtaactcaaatttaatctaccaaccaaatactgtcctttgctgccagcccttccagctagaattgcttgctcactcttttttttttgatcccttctgcraaagg

SEQ ID NO: 30620 - DNA, 600 bp, Chicken  19866894252293_2
tccccaataaaatgttataatctataaaatgggtatataaatatttatctgtcttagtcttattgtgaatattaacaagaaaatcttaaaatgtagacattctcactgttagcatgtctacattctcaaaacagcacttcaatacrtacgaatgaaacaatcaggcagggaagttaatggatccggtggtaaaatatatcatttactagactttttcatagacaggatgtcactatctagagcggttgtacctgttttcaaggcactgactttttgttttgagcctaagtaaatgcatckaaaaccattatcatttgttttgcttcatctctaatttgctatgtaactcaaatttaatctaccaaccaaatactgtcctttgctgccagcccttccagctagaattgcttgctcactcttttttttttgatcccttctgcraaaggtcagcatcattccttgtctgacttcacaaattcaacacagattagtaaaaaaaaaaaaaaaaaaaaaaacagacagttcctttccacacaattatacttcttttttattatttctttaacaaggaaacattcctagcatgtcattatgtctctc

SEQ ID NO: 30621 - DNA, 472 bp, Chicken  19866894252293_3
atacrtacgaatgaaacaatcaggcagggaagttaatggatccggtggtaaaatatatcatttactagactttttcatagacaggatgtcactatctagagcggttgtacctgttttcaaggcactgactttttgttttgagcctaagtaaatgcatckaaaaccattatcatttgttttgcttcatctctaatttgctatgtaactcaaatttaatctaccaaccaaatactgtcctttgctgccagcccttccagctagaattgcttgctcactcttttttttttgatcccttctgcraaaggtcagcatcattccttgtctgacttcacaaattcaacacagattagtaaaaaaaaaaaaaaaaaaaaaaacagacagttcctttccacacaattatacttcttttttattatttctttaacaaggaaacattcctagcatgtcattatgtctctccagaagagtacag

SEQ ID NO: 30622 - DNA, 600 bp, Chicken  19866894252294_1
ctccttgggcaaaccatcacctgctgtgctcccatctccacaggtccaagcccctctcccactatcatgctaatgccataaaggaggtggtgggagcggggaggcagggagaaccttttgttaagactgcggaaattttcagtaaaatgaaaacaaattgctctaagtaaaccatttgtcacagtctgattactctgctgccactctgggaacaccaatttgtcatgctagatcaggataacagcaggctgactgtacggaatggcacgctgcctcctgctctcgctgcttgcaatgagygaggacggtggggagctcccacagctccttcccagcaccttatccctcccagcagcacttctgacccatgtgtccctctccttggctatagctgagtctcaccagtttgtacacggagtaataagaataaacgtgcaggagaaagacaaaaagctgctgcacgatgcactaattagaggcagtgctagagcatgtatttaaagaaggaaggttaacgtgagggaccaagaggcaaagattagccaaaatgcacaaagcatgggaaagttgcagaaagaattccagtctgagarctgtaat

SEQ ID NO: 30623 - DNA, 560 bp, Chicken  19866894252294_2
aatgagygaggacggtggggagctcccacagctccttcccagcaccttatccctcccagcagcacttctgacccatgtgtccctctccttggctatagctgagtctcaccagtttgtacacggagtaataagaataaacgtgcaggagaaagacaaaaagctgctgcacgatgcactaattagaggcagtgctagagcatgtatttaaagaaggaaggttaacgtgagggaccaagaggcaaagattagccaaaatgcacaaagcatgggaaagttgcagaaagaattccagtctgagarctgtaatcccctcagcctcaccacccagagctaagaaacaattatcagagtctcccctgccaacgtctctctggaattaggcaacggtctgtaatgctgaaacaaracaatwcactccagcccacatcaaagcaaccttccactcatcatcaacaacaaaccctccaagcatcattttgggtaaaacactccattcagcccaacacaaaaatctttcatccatttcaaatgattgaccttttctcccaaccctggttggt

SEQ ID NO: 30624 - DNA, 454 bp, Chicken  19866894252294_3
caccagtttgtacacggagtaataagaataaacgtgcaggagaaagacaaaaagctgctgcacgatgcactaattagaggcagtgctagagcatgtatttaaagaaggaaggttaacgtgagggaccaagaggcaaagattagccaaaatgcacaaagcatgggaaagttgcagaaagaattccagtctgagarctgtaatcccctcagcctcaccacccagagctaagaaacaattatcagagtctcccctgccaacgtctctctggaattaggcaacggtctgtaatgctgaaacaaracaatwcactccagcccacatcaaagcaaccttccactcatcatcaacaacaaaccctccaagcatcattttgggtaaaacactccattcagcccaacacaaaaatctttcatccatttcaaatgattgaccttttctcccaaccctggttggt

SEQ ID NO: 30625 - DNA, 448 bp, Chicken  19866894252294_4
tttgtacacggagtaataagaataaacgtgcaggagaaagacaaaaagctgctgcacgatgcactaattagaggcagtgctagagcatgtatttaaagaaggaaggttaacgtgagggaccaagaggcaaagattagccaaaatgcacaaagcatgggaaagttgcagaaagaattccagtctgagarctgtaatcccctcagcctcaccacccagagctaagaaacaattatcagagtctcccctgccaacgtctctctggaattaggcaacggtctgtaatgctgaaacaaracaatwcactccagcccacatcaaagcaaccttccactcatcatcaacaacaaaccctccaagcatcattttgggtaaaacactccattcagcccaacacaaaaatctttcatccatttcaaatgattgaccttttctcccaaccctggttggt

SEQ ID NO: 30626 - DNA, 599 bp, Chicken  19866894252296_1
  misc_feature (1)..(85): n is any nucleotide
nnnnnnnnnnnnnnnnnnnnnnnnnnnnnnnnnnnnnnnnnnnnnnnnnnnnnnnnnnnnnnnnnnnnnnnnnnnnnnnnnnnnncaggctgcccagagccacatccagcctggccttgaatgcctccaggaatggggcatccacaacctccttgggcaacctgttgcagtgtgtcaccacatgtaaagaactcatcgaaagaatagaagtatctatagttgaatgtcctcctgtaagttccccactctcatcttgcaaaacagtttacagttcatctggaaaacagatttctattacaygctcatttgcctctaatgtggtgacagcaccycttcactgcatctctgtctctctctttgtcttttttttttccatgtagcaaattgagcagatatattttactgtgagcttttggggaaggatgctaatgagagttattgttgtaaatgcttatcttgtggtaacgttgagtggcctctgttgtatcaagacacggtacagcataaacaaaaagtttagagactcaagcactactattatctcttctcagmaatttatggtaattcaygagargaaataatctttaaaaagcacttta

SEQ ID NO: 30627 - DNA, 599 bp, Chicken  19866894252296_2
  misc_feature (1)..(53): n is any nucleotide
nnnnnnnnnnnnnnnnnnnnnnnnnnnnnnnnnnnnnnnnnnnnnnnnnnnnncaggctgcccagagccacatccagcctggccttgaatgcctccaggaatggggcatccacaacctccttgggcaacctgttgcagtgtgtcaccacatgtaaagaactcatcgaaagaatagaagtatctatagttgaatgtcctcctgtaagttccccactctcatcttgcaaaacagtttacagttcatctggaaaacagatttctattacaygctcatttgcctctaatgtggtgacagcaccycttcactgcatctctgtctctctctttgtcttttttttttccatgtagcaaattgagcagatatattttactgtgagcttttggggaaggatgctaatgagagttattgttgtaaatgcttatcttgtggtaacgttgagtggcctctgttgtatcaagacacggtacagcataaacaaaaagtttagagactcaagcactactattatctcttctcagmaatttatggtaattcaygagargaaataatctttaaaaagcactttaagagcagattcctattggccctgttagcaata

SEQ ID NO: 30628 - DNA, 600 bp, Chicken  19866894252296_3
cttgcaaaacagtttacagttcatctggaaaacagatttctattacaygctcatttgcctctaatgtggtgacagcaccycttcactgcatctctgtctctctctttgtcttttttttttccatgtagcaaattgagcagatatattttactgtgagcttttggggaaggatgctaatgagagttattgttgtaaatgcttatcttgtggtaacgttgagtggcctctgttgtatcaagacacggtacagcataaacaaaaagtttagagactcaagcactactattatctcttctcagmaatttatggtaattcaygagargaaataatctttaaaaagcactttaagagcagattcctattggccctgttagcaatatctggagaaagttgactgtgttcagagaatttcttttgtgttgagctaatatggctgagatgggaattgggattagcatcgagatacgggccccatgaagcctggtgactcaaagtgggctcagagcagccrgcatgtggttgggtgcactctgctggtgtcatgtggaggtggtagtggctgtgtgtctgtcctgcccttcttgcccccracagcacttt

SEQ ID NO: 30629 - DNA, 600 bp, Chicken  19866894252296_4
agttcatctggaaaacagatttctattacaygctcatttgcctctaatgtggtgacagcaccycttcactgcatctctgtctctctctttgtcttttttttttccatgtagcaaattgagcagatatattttactgtgagcttttggggaaggatgctaatgagagttattgttgtaaatgcttatcttgtggtaacgttgagtggcctctgttgtatcaagacacggtacagcataaacaaaaagtttagagactcaagcactactattatctcttctcagmaatttatggtaattcaygagargaaataatctttaaaaagcactttaagagcagattcctattggccctgttagcaatatctggagaaagttgactgtgttcagagaatttcttttgtgttgagctaatatggctgagatgggaattgggattagcatcgagatacgggccccatgaagcctggtgactcaaagtgggctcagagcagccrgcatgtggttgggtgcactctgctggtgtcatgtggaggtggtagtggctgtgtgtctgtcctgcccttcttgcccccracagcactttcatttggaggctctccg

SEQ ID NO: 30630 - DNA, 600 bp, Chicken  19866894252296_5
atctggaaaacagatttctattacaygctcatttgcctctaatgtggtgacagcaccycttcactgcatctctgtctctctctttgtcttttttttttccatgtagcaaattgagcagatatattttactgtgagcttttggggaaggatgctaatgagagttattgttgtaaatgcttatcttgtggtaacgttgagtggcctctgttgtatcaagacacggtacagcataaacaaaaagtttagagactcaagcactactattatctcttctcagmaatttatggtaattcaygagargaaataatctttaaaaagcactttaagagcagattcctattggccctgttagcaatatctggagaaagttgactgtgttcagagaatttcttttgtgttgagctaatatggctgagatgggaattgggattagcatcgagatacgggccccatgaagcctggtgactcaaagtgggctcagagcagccrgcatgtggttgggtgcactctgctggtgtcatgtggaggtggtagtggctgtgtgtctgtcctgcccttcttgcccccracagcactttcatttggaggctctccggtgca

SEQ ID NO: 30631 - DNA, 600 bp, Chicken  19866894252296_6
aacgttgagtggcctctgttgtatcaagacacggtacagcataaacaaaaagtttagagactcaagcactactattatctcttctcagmaatttatggtaattcaygagargaaataatctttaaaaagcactttaagagcagattcctattggccctgttagcaatatctggagaaagttgactgtgttcagagaatttcttttgtgttgagctaatatggctgagatgggaattgggattagcatcgagatacgggccccatgaagcctggtgactcaaagtgggctcagagcagccrgcatgtggttgggtgcactctgctggtgtcatgtggaggtggtagtggctgtgtgtctgtcctgcccttcttgcccccracagcactttcatttggaggctctccggtgcacatacttccaccaaagagtagcaaggctgggctaattcctgctctttcctgggagcagggtgtcataaaacaggctgtgcagtctgatccaagttgaggagaggggatgtaatctttatttaaatgtggcctctcgtccaggaatcagtgtgcagggcaaagttgtggctgttgttggttctccggagc

SEQ ID NO: 30632 - DNA, 600 bp, Chicken  19866894252296_7
tcttctcagmaatttatggtaattcaygagargaaataatctttaaaaagcactttaagagcagattcctattggccctgttagcaatatctggagaaagttgactgtgttcagagaatttcttttgtgttgagctaatatggctgagatgggaattgggattagcatcgagatacgggccccatgaagcctggtgactcaaagtgggctcagagcagccrgcatgtggttgggtgcactctgctggtgtcatgtggaggtggtagtggctgtgtgtctgtcctgcccttcttgcccccracagcactttcatttggaggctctccggtgcacatacttccaccaaagagtagcaaggctgggctaattcctgctctttcctgggagcagggtgtcataaaacaggctgtgcagtctgatccaagttgaggagaggggatgtaatctttatttaaatgtggcctctcgtccaggaatcagtgtgcagggcaaagttgtggctgttgttggttctccggagcagcagagacacaaacagcccagttggtttattgatgtcatttctaaacacaggcagtctaggctgttcttacgaagttt

SEQ ID NO: 30633 - DNA, 600 bp, Chicken  19866894252298_1
gtcagcttgtgttcccctgaagaatagcagaggcagaggaagggtaagccagacagaagcttgtcaggagcactatcgtaatggaaatgctcttgatgagagccaggagaaaagcagcagaacaaagtgctaatcaaagctgttgtttattgacatcagaaatgtgatatggagtagtcttgccagtgacttctagctgttcgcaattctaacacacccactcctttgcaaagcttgctgtcagtgttctcactacatactagccttcaaattattcaaaaaagaaaaagcacgtggaamagtagtctgttgtgaaggaaccaaaagatgtgtctgacacagctttgtggagtaaggagtgccagatccttgggttcaaagacatggctttctatttgtggctttaaccaaaattgcttatttagcttttcagcttgccaatgactcttgcttgtctgctcacagcagagtatgtgctgttgtgccaggacacatatgtactgaggacgtggattgtctcttgtgaaaaggacagatagatatgtcaaactctatgtttttcccctttctgcatcctatgatacagatgttttgaaagag

SEQ ID NO: 30634 - DNA, 600 bp, Chicken  19866894252304_1
ttgcccctgcaggcagcggctttgcaaacatacgtatccccagcggggtaaagaggcattccctatccccataccttcatcttggaggtgggctggatgagctctgtgatggagaccttgtcctgctggagccgcctcttgaccagcttagagcagcagatgttgacagagctgaggacgtgccaggagttgtactccacgaaggagcggctatcgatgaccagggtgccctccgctccattccgcaggaggctggccagcttcttcggatccatcactttgcgtgggagtctgtctccrgccataacgggcccgtccgctctagggcgagcggggcggaaggrcagggtgggctgccagcacccgtctctccacagggacgagcagtgaggcaaggtgtgagtggagcagcaccgtgctgggctcctcacactgctagcgcccaggctgcctactcatggtgctgaacctggggagagaggacagtagagagacaccggtcaggtggcaggacaacatagatgagaatgacagaatcatagaatcrttaagatcggaagagatctctgtggtcaccaagtccaaccgctgacccacccg

SEQ ID NO: 30635 - DNA, 600 bp, Chicken  19866894252304_2
ggggtaaagaggcattccctatccccataccttcatcttggaggtgggctggatgagctctgtgatggagaccttgtcctgctggagccgcctcttgaccagcttagagcagcagatgttgacagagctgaggacgtgccaggagttgtactccacgaaggagcggctatcgatgaccagggtgccctccgctccattccgcaggaggctggccagcttcttcggatccatcactttgcgtgggagtctgtctccrgccataacgggcccgtccgctctagggcgagcggggcggaaggrcagggtgggctgccagcacccgtctctccacagggacgagcagtgaggcaaggtgtgagtggagcagcaccgtgctgggctcctcacactgctagcgcccaggctgcctactcatggtgctgaacctggggagagaggacagtagagagacaccggtcaggtggcaggacaacatagatgagaatgacagaatcatagaatcrttaagatcggaagagatctctgtggtcaccaagtccaaccgctgacccacccgcaccatgctcaccgaatcacgtccctcagtgccacatccccata

SEQ ID NO: 30636 - DNA, 600 bp, Chicken  19866894252304_3
ggaggctggccagcttcttcggatccatcactttgcgtgggagtctgtctccrgccataacgggcccgtccgctctagggcgagcggggcggaaggrcagggtgggctgccagcacccgtctctccacagggacgagcagtgaggcaaggtgtgagtggagcagcaccgtgctgggctcctcacactgctagcgcccaggctgcctactcatggtgctgaacctggggagagaggacagtagagagacaccggtcaggtggcaggacaacatagatgagaatgacagaatcatagaatcrttaagatcggaagagatctctgtggtcaccaagtccaaccgctgacccacccgcaccatgctcaccgaatcacgtccctcagtgccacatccccatagttctggaacgcctccagggatggtcacatcaccacctccctgggcagcctggcccagtgcctcaacactctgagaattctttcctaacatccaacctgaaccttccctggcttaacttgaggaccatttcctctcaacttaactgggtgcttactctggggccgagggcttggccttcaaaagagtgggacaaggacatggg

SEQ ID NO: 30637 - DNA, 600 bp, Chicken  19866894252308_1
ctctgcattactacaatgcagaacagacacacagctgtgctgtgtaaagccctgcagggacacactacatccacctggcaaagcacactccttccaaacgcctgcatgtctcctggttttcaattcactaaggaaacaccttaattggaatggtcagctctgaccccacaggcagagctggagccagtcatgtgcaccgggaccagccagcaagaacaatgaaaatagctctccaagcagatctaaaagagcaagagaaatatatatttttatctactgatgtcatgtttaactgacaaratcacaaattttagctttatagctttttagctsttgtatacttcacactgtttgtcttttctgctgggggaacgtatgctgttattacactgctctcatttccacagtgtttgagtcagagcagtgtctcttcagccttgatcatacagtcacatgaatcccaaaatcccattgctgatgaaaaacactttttttctctttcgcttgtttttgttctggtaatctacagctagatctgagtgagtaagtgcagtaccaaggcacagtgtgagccactggaactcgatcacttattgctac

SEQ ID NO: 30638 - DNA, 600 bp, Chicken  19866894252308_2
gctgtgctgtgtaaagccctgcagggacacactacatccacctggcaaagcacactccttccaaacgcctgcatgtctcctggttttcaattcactaaggaaacaccttaattggaatggtcagctctgaccccacaggcagagctggagccagtcatgtgcaccgggaccagccagcaagaacaatgaaaatagctctccaagcagatctaaaagagcaagagaaatatatatttttatctactgatgtcatgtttaactgacaaratcacaaattttagctttatagctttttagctsttgtatacttcacactgtttgtcttttctgctgggggaacgtatgctgttattacactgctctcatttccacagtgtttgagtcagagcagtgtctcttcagccttgatcatacagtcacatgaatcccaaaatcccattgctgatgaaaaacactttttttctctttcgcttgtttttgttctggtaatctacagctagatctgagtgagtaagtgcagtaccaaggcacagtgtgagccactggaactcgatcacttattgctacactgttagaagtccctcacaaggtatcagcctg

SEQ ID NO: 30639 - DNA, 600 bp, Chicken  19866894252314_1
aatcaggacgtctgcctttgaagtgtgaaaaaccatgcaggcttattttgcaatgtaaacagcaacgttattgggctgagcaaatggcagtctgagctagcacctgggagtggatggccgcgtgctgccatctctatatgatctctcttcccttaagacatggtagctggtctcggggagcactgggaagaaagcagccgctgctggatctcctgcatgtcccctgacgtctgtgcttacgtttgggatggagtaagggccttgcttctgttttgtctggagcgtaccaaggataggagrgatgtcgatgtagaaaaaatctgttctgcttgaatcagagctgctgttataagctgtgatttgtagcttagggatggtggtattcagctcctgggatgctgagcacagagggttgttgcaccttatctcggatttcagataggtgcagcagtcacaccgctgggaagatgcttcagttttcactttctgcagcagctaactaatggagaagggtttctcggcgcttcttcctgagttaagtccttgtgtgtgagtgtttgctttgccccttatgggacgtggtgacctgaaggaactgat

SEQ ID NO: 30640 - DNA, 600 bp, Chicken  19866894252315_1
tgaaaaaattctgttaaactgaatggagatactccgatttatattcaagtaaatgacataaaattctagtcccaggttttctttccttcctgattaaattacattaatgtacactcaaaacaactactgctagtcacactatatttttaagcagaaaagcttaactgctaacaaaacatcacacgcacacatgcatgaagtcttcaacttccatacttctgaagcctcgcaacagtaaccaacgctgcagtatgtgagcaacaacgggttgtcctaaatgtggggcataaatttgctacycctaagaaaaagtcctacatgctgctgtctttccctaagataccttttattaacctcacatgtaaatgatatctcaaaaaaaccataacactcttttcctacacagaaagcagcagaaaaaggcccaaatactaactattgcatcttcacattgttaaaaggtttgacatagtatttattgctatattacccctaattagcagtttaagcttgttaacaagaagagttcttttcatttaagataaataggaattatctttccattgtataggtaaaacttgtaaataggacagctcataa

SEQ ID NO: 30641 - DNA, 600 bp, Chicken  19866894252320_1
atcaaaatgctaacaaatcccttttcatataatcacaggaaaagctcagcacattaagaaacacgaatgataagcaactgatactcaaaatgtccttttatacacatcagagcaatgctcaagaagacatctgtattctgaggttagcaattgcaaaatctccagacatgactgtaatcaagaaatcgctgcctaacccattgaagctggtgttagtatctccaatagcttgagagggtttttgatgaactgtcaatcaaccgctccttcatttccaattattctgagcaggctctacaytttyacaycaacaaatgctacacaaaggcaaatgctaacagcagctgatcacccaaattccatctaagtcagcaaaaactgaaaatgatcaatatcyaggaggataaggattgcaattataacagttggagacttctagaaacctgacaaacaatcttaaatgacaatggtgagagctccatcataggaaatatttaaaatgatggttcattagaaaatacgctgggtgctggaaagtcagatgtaaaagatcagaggagtacaatgttaggacttaaaaaaaaattctagttgaaaagt

SEQ ID NO: 30642 - DNA, 600 bp, Chicken  19866894252320_2
aaatgctaacaaatcccttttcatataatcacaggaaaagctcagcacattaagaaacacgaatgataagcaactgatactcaaaatgtccttttatacacatcagagcaatgctcaagaagacatctgtattctgaggttagcaattgcaaaatctccagacatgactgtaatcaagaaatcgctgcctaacccattgaagctggtgttagtatctccaatagcttgagagggtttttgatgaactgtcaatcaaccgctccttcatttccaattattctgagcaggctctacaytttyacaycaacaaatgctacacaaaggcaaatgctaacagcagctgatcacccaaattccatctaagtcagcaaaaactgaaaatgatcaatatcyaggaggataaggattgcaattataacagttggagacttctagaaacctgacaaacaatcttaaatgacaatggtgagagctccatcataggaaatatttaaaatgatggttcattagaaaatacgctgggtgctggaaagtcagatgtaaaagatcagaggagtacaatgttaggacttaaaaaaaaattctagttgaaaagtagct

SEQ ID NO: 30643 - DNA, 600 bp, Chicken  19866894252320_3
gctaacaaatcccttttcatataatcacaggaaaagctcagcacattaagaaacacgaatgataagcaactgatactcaaaatgtccttttatacacatcagagcaatgctcaagaagacatctgtattctgaggttagcaattgcaaaatctccagacatgactgtaatcaagaaatcgctgcctaacccattgaagctggtgttagtatctccaatagcttgagagggtttttgatgaactgtcaatcaaccgctccttcatttccaattattctgagcaggctctacaytttyacaycaacaaatgctacacaaaggcaaatgctaacagcagctgatcacccaaattccatctaagtcagcaaaaactgaaaatgatcaatatcyaggaggataaggattgcaattataacagttggagacttctagaaacctgacaaacaatcttaaatgacaatggtgagagctccatcataggaaatatttaaaatgatggttcattagaaaatacgctgggtgctggaaagtcagatgtaaaagatcagaggagtacaatgttaggacttaaaaaaaaattctagttgaaaagtagcttaat

SEQ ID NO: 30644 - DNA, 600 bp, Chicken  19866894252320_4
ttatacacatcagagcaatgctcaagaagacatctgtattctgaggttagcaattgcaaaatctccagacatgactgtaatcaagaaatcgctgcctaacccattgaagctggtgttagtatctccaatagcttgagagggtttttgatgaactgtcaatcaaccgctccttcatttccaattattctgagcaggctctacaytttyacaycaacaaatgctacacaaaggcaaatgctaacagcagctgatcacccaaattccatctaagtcagcaaaaactgaaaatgatcaatatcyaggaggataaggattgcaattataacagttggagacttctagaaacctgacaaacaatcttaaatgacaatggtgagagctccatcataggaaatatttaaaatgatggttcattagaaaatacgctgggtgctggaaagtcagatgtaaaagatcagaggagtacaatgttaggacttaaaaaaaaattctagttgaaaagtagcttaatatcctaatgcatatctcacatgcttgtattttaaagcactgtgcttataggcaaaaaaaatcagaggaatgaaagcactgtggcagtgt

SEQ ID NO: 30645 - DNA, 600 bp, Chicken  19866894252321_1
gctgatagttgcattttacaggcaggaaaattcaaaaagctaccaccatcaattcagatgcacggttcctgggaggatgcgctggagagtactctgggcgactgtcctgagctcctcagtgtgttatttgaactgatggtatctggatttttcttcagcagtttgggcaactgttgtcttatgaggtatgcatttttcattgaaagtggaatttaggtaaagaatgtaaaataagattttcttttgtggtggaattataaaaatagcactgtttggaagcaatttcaaaagtctacaacrtttatgatgccataaagactttgtgatttggaaactatttagtactccatcaggctaaactcctaggtaactgaagacatatagcagttgccatattagaaatgaagtggtctaacaatatatcactaagcagaaagtgaggtaaggaagtgatatagtcagagactgatcttctgaggagaaactgtaaatctaagtcctaaacacaaatttttattttactattaatatgcagtgtatttgtacacatgggatagaatgttaatacatatgtgcttcacactttctgtatgctttttt

SEQ ID NO: 30646 - DNA, 600 bp, Chicken  19866894252325_1
tatatgaaacaaagcacatgtgtaggttagaatttagttccatatatgagtctagattcatgcataaactaatttgcttcttgggcctgacattcagattaacataggttcctcactttccaaacttactaaaagctctctcagttctttgctttcttggtgggattctgggaaagaaatttcccactactgaaatggtagcttattaaattaacagaattgcataatgaagctgtgttatattttgaacaggtctttgataagatgattagctctgaatactaaaaagaatttggtttycccgtatgtctgattcaaatatttatcaaaggcacttattttttgcatgtgacatattgttaaatatgttaatttcctagaagcacagtgtaagaagtgcacgagcagctgtgtaggacagtaagcttaaaaataacaaggctgagctcttcttgggaattagtgtggtccagtgggtaggcaagaagcctacaattccagacacctgggttctgctccgaaatctgctactgacctactattttccattgggcaaatcattccacccttctctgttattgtctatacaatggtgagaag

SEQ ID NO: 30647 - DNA, 600 bp, Chicken  19866894252331_1
gatagctcacatctttttttgtggtgtaagtttgaggccagaaataaagatgtgctgatgtttctatctagattccaacttcttgcccaggtgtttgtatgctttgtgtcacatcttggtacttatttgctaggtgttacctttccatgtggtggtaagggcagtccatagtgaagagctgccttaattttgcatcatgtattctatgttgaccactccaattcttgatacactttttttctctgtagcactgtgatcacttcactggaacaggttgcccaaggaggttgtggatgcccyatccctggatgcattcaaggccaggctggatgtggctctgggcagcctgggctgatggttggcgaccctgcacatagcagggggttggaactggatgagcattgtggtccttttcaacccaggccattctatgactccttgtcttgatcaagttattgttaaaccctctaaagaagaggttttaaaagtatctttctgttgattgttggagtacctttctatgctgatactgggaggtggggggatcaagccctggaaacattactttcttgcatggggacagacaggggtgctgcatcc

SEQ ID NO: 30648 - DNA, 600 bp, Chicken  19866894252333_1
aaattaccctgtaatccattttggttgctaaagcattacaaaatttctttggggaaagctgagtcataatttaaagcatggccacgtgaggatagtttgctggctgttagaatggagcctgtctgcctgctgcacagctgtgcctcatctcccaccaaagctcagtctgacctgcccttgtcaggagtagcttttcaggtgttgcagcatccctagctcttcctggaagtaaaaggcagagagctggcaccagaagcgatcccagttttgtgtatgactctttaggaacagtagcagcascacagcaggaagattttaaggtaaagaggggcagaacgccttggggaggagctgaggaagctgaactgcagggttttctcttgaagagggaatggaagaacagtttttgaacaaaggatgtatttctgataaccaaactaataaaaataggttggggtgataagrgggtgatgctactttgcatctgcatatgttgttgggaagtttattgtgcctggttttataaggatcagtctttgcttttttaataatggaaatatgtagctttgaaacgtatttgtaattgtgtgtgtttctgct

SEQ ID NO: 30649 - DNA, 600 bp, Chicken  19866894252333_2
tctgacctgcccttgtcaggagtagcttttcaggtgttgcagcatccctagctcttcctggaagtaaaaggcagagagctggcaccagaagcgatcccagttttgtgtatgactctttaggaacagtagcagcascacagcaggaagattttaaggtaaagaggggcagaacgccttggggaggagctgaggaagctgaactgcagggttttctcttgaagagggaatggaagaacagtttttgaacaaaggatgtatttctgataaccaaactaataaaaataggttggggtgataagrgggtgatgctactttgcatctgcatatgttgttgggaagtttattgtgcctggttttataaggatcagtctttgcttttttaataatggaaatatgtagctttgaaacgtatttgtaattgtgtgtgtttctgctgcagaaggcacgatgtgaacgtgctgtgttggtctgagtgatttgttttgacaaatgctccatgcagtgataccacaaactgaactgcgcctgttaagaacactgcaaaaatagttgtaggaaggcaatgggtgttttatttgctatcatctgtaaccttgcctg

SEQ ID NO: 30650 - DNA, 507 bp, Chicken  19866894252334_1
cctgaggactccacttactccttctgtatacaggccaagagttcaaccttgggtctttagtccttgcctgagctatgctgtaggcatgatgttttccagctcttctccttgacacaaattcagtaggtaaacttatttccactccagcctctggtcttatctcctgctgttccaaaatggagactccacatgtaacatcaaccttataaattattttgccttgtctgaggctatcaacagagcctgttaccagcaccctgctctgcttgctatgcacagatcttgggggactgtgtcttygttctctgtcactgcttttgattataaaaagcattagtcattctttgcctttttcagagaaggatcctgagcaaacctttccattttccagagcaaattcctgccttctagacccatagcatgatgtcaaaacaatgactttatgatgctctggtttcaatgttttgaacattgtttctgcaagatgcttcactctgccaagcctaa

SEQ ID NO: 30651 - DNA, 600 bp, Chicken  19866894252336_1
aaagcatccagagcacttctcaggtgggcagtatcttcctaggtggagagtatctcaaccggcttgaaaacattgcttgtatttttctttgtcggtagtcctacccttttactttgggttgctatgtgatattgattaaggggagtaattgtgatattctcagttgttatatcaattcctctctgagttatcccagaagataatgttggatgcttgttctgctacatctgttcttatttgctgccttgttaggttaaaattttagctgtgcaagtaacgcaaactaaccagctagggtcraagtcattatgtatcataaataacagtggaaaagtttccatatgatgttttgttttttccttctttttcctgaggatattgaacctacaatgctgaatggaacttgaagatatttaagtaattagtttgaaatattttaaaacagataggctcaaaactgcagagttgcagtctgtttaggtgttgtgatgaatgttcaaaatgtgagctccctttacacaaatctggtgactgaacagcaaacctgcttcgaacaccgtgtttttaatgaccttgatgatttttgctgacattaggtga

SEQ ID NO: 30652 - DNA, 600 bp, Chicken  19866894252337_1
tccttgggagagggcattcagagctacactgttggcaggagccggtacatattgctagttttacctcaatgggcttcccgggctctcttgtccggtcttgttatctgccttaacttgtcctgttcaagaaggcaatgccaatccaggttcacagcccagagccaacactcaactgggaaaaaggcaaaaccctacatgtttctgccagtggattaatacctctgtatagaaacatcagcatctcttccttgcggaaaccaagctgaactgaagaagagctcctccttctgaaaacatcaygtggaaatgctttgcataaattcataaggcgccatgattccaggcacagcattaattttcactgtgagctaagcagctctggaaaacacacacagttgtactgtgattcacagatctctatttacacttgggctgcccaagggcaccaagcctcttcctttcaacagctggctacttccttggtgctttctaatcagaccggcaaaaagaagtagccacatagcttttactttggcaaaccctggtaatgtttccagttttatgctctgcagtgttccatttacctgcgctgcccctgct

SEQ ID NO: 30653 - DNA, 600 bp, Chicken  19866894252340_1
ttttgctcttcttcctgggagaggaatttgtatttgtttagctgaggtctcctctgattctctctctctgcatttagaccactcatgttcctgccccatttgctatggacataggaaacagctcaatgccttcctcttcccaatatccttcaaaatggggtctatctccccatctccttgcttagaatcatagaaagacctcccagagcatccagtccaactccaacccatcccattgtgcccaactgaccacttccccatgtgccacctctccacggttcctgaaccccttcggggatkgtgatcccaccacctccctgagcagcctrtgccaatgcatcaccactcttttggagaagaaacgattcctaacatccaacctgcacctcccctagcacaaattgaggccattccctctggtcctgtcgctgttacccaggagaagaggccgattccttctccccccacatccamcttggattggtcctactgtgttttaggccaaatcactgtttgccctattgctcagcccagtgttgaaatttggctgaatcatcagtcttttatcccatttacgttaatgacgggagcagatagcga

SEQ ID NO: 30654 - DNA, 600 bp, Chicken  19866894252340_2
gtatttgtttagctgaggtctcctctgattctctctctctgcatttagaccactcatgttcctgccccatttgctatggacataggaaacagctcaatgccttcctcttcccaatatccttcaaaatggggtctatctccccatctccttgcttagaatcatagaaagacctcccagagcatccagtccaactccaacccatcccattgtgcccaactgaccacttccccatgtgccacctctccacggttcctgaaccccttcggggatkgtgatcccaccacctccctgagcagcctrtgccaatgcatcaccactcttttggagaagaaacgattcctaacatccaacctgcacctcccctagcacaaattgaggccattccctctggtcctgtcgctgttacccaggagaagaggccgattccttctccccccacatccamcttggattggtcctactgtgttttaggccaaatcactgtttgccctattgctcagcccagtgttgaaatttggctgaatcatcagtcttttatcccatttacgttaatgacgggagcagatagcgatacctcgtataaatgctcacagccacctc

SEQ ID NO: 30655 - DNA, 572 bp, Chicken  19866894252340_3
tccttgcttagaatcatagaaagacctcccagagcatccagtccaactccaacccatcccattgtgcccaactgaccacttccccatgtgccacctctccacggttcctgaaccccttcggggatkgtgatcccaccacctccctgagcagcctrtgccaatgcatcaccactcttttggagaagaaacgattcctaacatccaacctgcacctcccctagcacaaattgaggccattccctctggtcctgtcgctgttacccaggagaagaggccgattccttctccccccacatccamcttggattggtcctactgtgttttaggccaaatcactgtttgccctattgctcagcccagtgttgaaatttggctgaatcatcagtcttttatcccatttacgttaatgacgggagcagatagcgatacctcgtataaatgctcacagccacctcactctttctatggcaatgctttgcttcaattacttctccacaatcactgccccacagcagagcttaagttaccccgaacaacaatgtgacatcttttcttgctgccaaaaaatgcat

SEQ ID NO: 30656 - DNA, 600 bp, Chicken  19866894252345_1
cctggttgtctccactttttgagttgacaaagaccaacaaaggacttgtgcaagaaggtgggcaagtagctttccagaaacctgagttaagaatgtgagggggagggaagaaaagatgaagtgacaaaacaaacaaacaacactccataccctagtttggaaaagttaatatgttccctgtgcttatggcactcattgggaacatgccaaatgtgcacagccctgaatccatcacgaaccatagctcatgctgccaaatgtcacacttgtcacctaacagcatgccaaattttgcagctyctccagccctcccaaaccacttctgcaattgagttggtcctttataaaygttaacagctgcagctcagcaaatagtgactttacagagcaataaactgaatgyaaaagcaaagcaaacagctctacaccatacttcagcaagatcttctagtctggaatttcagcagcaccaaaagcagaaatttaagtcaatagaatctgccattaacagcattaactggaaggactgtgactgagaggaagaaaaagaaggcactacttagtagtgatacttaccatctgaatcaatgctgttaagag

SEQ ID NO: 30657 - DNA, 600 bp, Chicken  19866894252345_2
gcaagaaggtgggcaagtagctttccagaaacctgagttaagaatgtgagggggagggaagaaaagatgaagtgacaaaacaaacaaacaacactccataccctagtttggaaaagttaatatgttccctgtgcttatggcactcattgggaacatgccaaatgtgcacagccctgaatccatcacgaaccatagctcatgctgccaaatgtcacacttgtcacctaacagcatgccaaattttgcagctyctccagccctcccaaaccacttctgcaattgagttggtcctttataaaygttaacagctgcagctcagcaaatagtgactttacagagcaataaactgaatgyaaaagcaaagcaaacagctctacaccatacttcagcaagatcttctagtctggaatttcagcagcaccaaaagcagaaatttaagtcaatagaatctgccattaacagcattaactggaaggactgtgactgagaggaagaaaaagaaggcactacttagtagtgatacttaccatctgaatcaatgctgttaagagcagtaggaggaatgacagatactttgcatagcccaagagggcacttgct

SEQ ID NO: 30658 - DNA, 600 bp, Chicken  19866894252345_3
agggaagaaaagatgaagtgacaaaacaaacaaacaacactccataccctagtttggaaaagttaatatgttccctgtgcttatggcactcattgggaacatgccaaatgtgcacagccctgaatccatcacgaaccatagctcatgctgccaaatgtcacacttgtcacctaacagcatgccaaattttgcagctyctccagccctcccaaaccacttctgcaattgagttggtcctttataaaygttaacagctgcagctcagcaaatagtgactttacagagcaataaactgaatgyaaaagcaaagcaaacagctctacaccatacttcagcaagatcttctagtctggaatttcagcagcaccaaaagcagaaatttaagtcaatagaatctgccattaacagcattaactggaaggactgtgactgagaggaagaaaaagaaggcactacttagtagtgatacttaccatctgaatcaatgctgttaagagcagtaggaggaatgacagatactttgcatagcccaagagggcacttgcttggcaacaactctttacatgctgtgtgtacctgaaacaaacaaattcatttcag

SEQ ID NO: 30659 - DNA, 527 bp, Chicken  19866894252345_4
agcaaagcaaacagctctacaccatacttcagcaagatcttctagtctggaatttcagcagcaccaaaagcagaaatttaagtcaatagaatctgccattaacagcattaactggaaggactgtgactgagaggaagaaaaagaaggcactacttagtagtgatacttaccatctgaatcaatgctgttaagagcagtaggaggaatgacagatactttgcatagcccaagagggcacttgcttggcaacaactctttacatgctgtgtgtacctgaaacaaacaaattcatttcagatmcttttgggaactgtcaygtaacaaagaatcatccaacaagaggttttaaagtgtaagaaggaaggaaagagggaaagatccctaggaaatgtcaatcagttaggttacattaaaggatgatctatcaggcttctattaactctcctctacattaatatgtacttttccaacatctgaattcacgagactagaattgtgagtttggagaggagcagataacaaattta

SEQ ID NO: 30660 - DNA, 510 bp, Chicken  19866894252345_5
tacaccatacttcagcaagatcttctagtctggaatttcagcagcaccaaaagcagaaatttaagtcaatagaatctgccattaacagcattaactggaaggactgtgactgagaggaagaaaaagaaggcactacttagtagtgatacttaccatctgaatcaatgctgttaagagcagtaggaggaatgacagatactttgcatagcccaagagggcacttgcttggcaacaactctttacatgctgtgtgtacctgaaacaaacaaattcatttcagatmcttttgggaactgtcaygtaacaaagaatcatccaacaagaggttttaaagtgtaagaaggaaggaaagagggaaagatccctaggaaatgtcaatcagttaggttacattaaaggatgatctatcaggcttctattaactctcctctacattaatatgtacttttccaacatctgaattcacgagactagaattgtgagtttggagaggagcagataacaaattta

SEQ ID NO: 30661 - DNA, 600 bp, Chicken  19866894252351_1
aattcagggcgttcttcattactgaaaacagccttgtatccccatttacagaaatgaactccagcttccctcggggttacagagccctgcaaacctgaccttacattggtgacttcatgtacccagacaagtacagccaacagaactcgtgcatgaaaataactgtacagctagcaggccaaaatcaaaaaccttgtaacgttttccatttgcagcgatggaagtgattaatgaacaagcaagacaaagctacgtacattttatgcaacacaaagtttccagagagcagaagcacatctyagaaataacggcagcagaattctacgtaagtgttcaatgacagcctgaacaacacaaacatccttgtgctttcccttttgctttcctacacgtcgccatttgcctgcacagctgcacaaggcctgagctgtgtccttgacccagaaccgatgtcctcacctggcacaacacgctccatgcccagctgagcctcctcctcctgctcattgcccatgctctggctgcagtcaccgagtcccagcaaggctctgggcttgcagcactttattgtgacaaccgctgtactatggccacagccag

SEQ ID NO: 30662 - DNA, 600 bp, Chicken  19866894252353_1
gggaaggatcacttctctaaacctgctggacacattttagttaatgcccccaggatatcactggccttcttggccacaaggtcacactgctggctcacggccaacctgttttctaccaggaaacccaggtccttctccacagagctcctctccagcaggttagcccctaacctgtactgatgcatgcagttattcctccctgggtgcaagactccacacctcctcttgtttaacttcatatggttcctccttgtccaactctccagtcagtccaggtcttgttgaatagcagcaaagaayaaatataggaacaaacattgaaactatttaagaagagaactttaaaaaaaagtctcatctatctcattactttttcaatgacaacatatttctcaatgaaaaatattgctattgtcactcatgctggtgcaacaaacttaactaactctgtttcctttatactctgcatccctgagtacaaagctatcatgtgctgatttaggaaagagatattgccagaattttttcaaatcaagttcttttttttcctttaacaagaagcagcacttcagcattaatgtttggtaaaagtctaaaact

SEQ ID NO: 30663 - DNA, 600 bp, Chicken  19866894252356_1
agggtaagtaacaataaaagagcagctaagcatgttttctccagttttgcatgttatacaacttgcgtaaaaacaaaccattaagctcagagtatgtcatcagaagaggaaaatttcaagaatactttagcaaacacagaagtcagaataacaaagcagaaaggagctagaatttaggctattaaaactaagataattttactgactatcggtagatttagtttaatgattatttaaaatgattttttattttcagaaaaatacaaaatttaacacaaaatagttataagttacaaaaastctgggcagtggatacgcgtgtaatttaggaggtgggaaggaggaggcagctgagaacatgacatttctgcagctattgaagttcatatagagctgatacgggctaccttctcagatgcatccttccagagacactcatagcacacagctggcctttccagaaacccgaycctttaaacatcttgtatttaagtaccatcagtcagtccatctagttccaaagacacataaggcagctacagaaggaggtccagagacagtaagaaagaaagagcaggccaagaagtttcagggatagca

SEQ ID NO: 30664 - DNA, 600 bp, Chicken  19866894252356_2
aatttaggctattaaaactaagataattttactgactatcggtagatttagtttaatgattatttaaaatgattttttattttcagaaaaatacaaaatttaacacaaaatagttataagttacaaaaastctgggcagtggatacgcgtgtaatttaggaggtgggaaggaggaggcagctgagaacatgacatttctgcagctattgaagttcatatagagctgatacgggctaccttctcagatgcatccttccagagacactcatagcacacagctggcctttccagaaacccgaycctttaaacatcttgtatttaagtaccatcagtcagtccatctagttccaaagacacataaggcagctacagaaggaggtccagagacagtaagaaagaaagagcaggccaagaagtttcagggatagcaataccacaatcatagcagatggcctttttaaggaaaacaaagaagaaactgaaaggctgtaagagaaggaagagttacagcgcttgaaaatgaatacagatttaaatctaagaatagttacaaaaaaacccacaaacgccctgattctagaactactacaaaaacaaatt

SEQ ID NO: 30665 - DNA, 600 bp, Chicken  19866894252368_1
ctgtgcactttggacacttatatctatttctctttactgtggctaacattgcttgtttaaacaagaatcacaatgcttgtatttgctgactccatttctgtgctggttgctgtggcacaatttcaagctgctttcagcgttacagtattttcaggattttactgctgtaattatgatatttgcccctcactgttcagtttatgtctgtttcctccttgagagttgtaattctagggttagattttttcatacgtgtccatttaaaaactgatagggatgggaggaaatcagtatcaaatwgtacaagaggraaaaaaaaaaaaaaaarggttttgccagagcaaagaaaaactgcacacagaagatgagaaagctctttgctgcatcacctatgtgccacaatacagcacttctatagttttcaactgtgtccccttttctctcccaaacttccacctctgttaagagcgctcaggcttattttttcccgttgactttgtaacaaacttggcaaaacacctgatgctggcagaggctggaatgagaccctggtaaagaaagagaaggtttcttcttttgaagtagagagctcttcaaaac

SEQ ID NO: 30666 - DNA, 600 bp, Chicken  19866894252368_2
ggacacttatatctatttctctttactgtggctaacattgcttgtttaaacaagaatcacaatgcttgtatttgctgactccatttctgtgctggttgctgtggcacaatttcaagctgctttcagcgttacagtattttcaggattttactgctgtaattatgatatttgcccctcactgttcagtttatgtctgtttcctccttgagagttgtaattctagggttagattttttcatacgtgtccatttaaaaactgatagggatgggaggaaatcagtatcaaatwgtacaagaggraaaaaaaaaaaaaaaarggttttgccagagcaaagaaaaactgcacacagaagatgagaaagctctttgctgcatcacctatgtgccacaatacagcacttctatagttttcaactgtgtccccttttctctcccaaacttccacctctgttaagagcgctcaggcttattttttcccgttgactttgtaacaaacttggcaaaacacctgatgctggcagaggctggaatgagaccctggtaaagaaagagaaggtttcttcttttgaagtagagagctcttcaaaactgaagctcttt

SEQ ID NO: 30667 - DNA, 600 bp, Chicken  19866894252368_3
tctctttactgtggctaacattgcttgtttaaacaagaatcacaatgcttgtatttgctgactccatttctgtgctggttgctgtggcacaatttcaagctgctttcagcgttacagtattttcaggattttactgctgtaattatgatatttgcccctcactgttcagtttatgtctgtttcctccttgagagttgtaattctagggttagattttttcatacgtgtccatttaaaaactgatagggatgggaggaaatcagtatcaaatwgtacaagaggraaaaaaaaaaaaaaaarggttttgccagagcaaagaaaaactgcacacagaagatgagaaagctctttgctgcatcacctatgtgccacaatacagcacttctatagttttcaactgtgtccccttttctctcccaaacttccacctctgttaagagcgctcaggcttattttttcccgttgactttgtaacaaacttggcaaaacacctgatgctggcagaggctggaatgagaccctggtaaagaaagagaaggtttcttcttttgaagtagagagctcttcaaaactgaagctctttgtgaacctgcagaggtt

SEQ ID NO: 30668 - DNA, 600 bp, Chicken  19866894252369_1
ttatgttgttaaatgcaatggcaataggtcactggattttttgcagtgcattttctggactgaatgccttctatcaggctagactaagagaattgggttctcttttccactgagcacctcaccatgcagcctgcagagaattctcatctttctactgcaggtaatttcatttttctggcaattctgttctttccagtccaactgagtgcaaggcaatctgatcaattaaaacaaaaagttgttggaatttcacgttttcaattcacttttttgaaccaagatttattaaagggaaaaaawtttttttttaaaaaaaagcacaacacctgaaaatattactgttattttaaagtaaatttcataataaatggtgttttgagtgcttttattttcttaagtcccatttctgttaatatctgacctcgtgacttactgttacgtgtgaaatgctaatatttccatatctaagtttatcctatgggtacttaaacaagcttgcaaagtgccatacaagactgactcgattaggttagttattaggttagttattaggttagttattaggttagttattaggttagttattaggttagttattag

SEQ ID NO: 30669 - DNA, 600 bp, Chicken  19866894252370_1
ctccactcccacatgtagtaaccacacaactgtaggaagaaaaacccataacttctttgattatagaagacagcgtctgtcaggactgcctactgcattgcacaagccaacttttctgaagctaagagtctgaggaagaggtagtttagagtcacaaaaaaccaaaacaacaacaacaacaaaaaaaaccacaacaaacctaaacaccacttaagatgcagcacaaccacctcccttccatccatcaacaaactcttaccctttggcagacaggaactgctacaggtgcaggattgatgyacacctgggcacyggtgctgcccacttggccatggtctgacctcatgcagtccagacaagccacctgctcaacatataataaatacccaattcatactcaaactctggactttgttttgctaagcctcaaatgtctcccaagatactgactgcataaccttcccacccttcccaggaacttgcttcaagagctctatgccacggtgcttctctcttctctatcagtttaggactccctacctagagatttggacyagagaacagagcaggagcccccactgcagatcccactaacccctc

SEQ ID NO: 30670 - DNA, 600 bp, Chicken  19866894252370_2
tgtagtaaccacacaactgtaggaagaaaaacccataacttctttgattatagaagacagcgtctgtcaggactgcctactgcattgcacaagccaacttttctgaagctaagagtctgaggaagaggtagtttagagtcacaaaaaaccaaaacaacaacaacaacaaaaaaaaccacaacaaacctaaacaccacttaagatgcagcacaaccacctcccttccatccatcaacaaactcttaccctttggcagacaggaactgctacaggtgcaggattgatgyacacctgggcacyggtgctgcccacttggccatggtctgacctcatgcagtccagacaagccacctgctcaacatataataaatacccaattcatactcaaactctggactttgttttgctaagcctcaaatgtctcccaagatactgactgcataaccttcccacccttcccaggaacttgcttcaagagctctatgccacggtgcttctctcttctctatcagtttaggactccctacctagagatttggacyagagaacagagcaggagcccccactgcagatcccactaacccctcctcctctgtgcca

SEQ ID NO: 30671 - DNA, 600 bp, Chicken  19866894252370_3
ttaccctttggcagacaggaactgctacaggtgcaggattgatgyacacctgggcacyggtgctgcccacttggccatggtctgacctcatgcagtccagacaagccacctgctcaacatataataaatacccaattcatactcaaactctggactttgttttgctaagcctcaaatgtctcccaagatactgactgcataaccttcccacccttcccaggaacttgcttcaagagctctatgccacggtgcttctctcttctctatcagtttaggactccctacctagagatttggacyagagaacagagcaggagcccccactgcagatcccactaacccctcctcctctgtgccacagggctccagctcttacctgtgagtagcaattcacaaaacctccaggaaaggcccacaatctccttgttcaccctacacagccctatcacatctgtctcctccagctacccattgccttggccattgcaggttcacagtcactccatgagagacacatagtgattgcctcagcacagcccaacccctctaacagcatctttaccccatggtgcaggagcagccaaactcattgagccaagc

SEQ ID NO: 30672 - DNA, 600 bp, Chicken  19866894252374_1
ttagtcttacctactttaatttaatgaattttaggaacagtcatccgcgctctctcccttgactgtaacaaaagcctgggtgagtaactttaattctcataaagttagatcagatggatctctctgactaagactgggaaattttctattgaaaaaagcacatttcatgccagaaatgtgttaagagattgtgtaacttggaaatggactgaaatcctgcgcaagtcaactgatggttctaactttcagtcgatttaagcctgtattcttaaataacatgattaccagggcagaatccgrtgtggacttaaaagtcgttttaggggctttccagtaagtaktmaggataccttaagcacttctgagataagcagctttctaaaggtaggcacactgtatatatgatttaatggaggtaacagyctcctgtcccttttaattctttaaatgttactggagtaacactgcactttcagactcagcctgaaaagactttcccctagtctctaacttaagcatccagactggctggtatcagtgccagcaaatggatgctttttggcctagaaatgatgtattttaccttaatccacaattttt

SEQ ID NO: 30673 - DNA, 600 bp, Chicken  19866894252374_2
catccgcgctctctcccttgactgtaacaaaagcctgggtgagtaactttaattctcataaagttagatcagatggatctctctgactaagactgggaaattttctattgaaaaaagcacatttcatgccagaaatgtgttaagagattgtgtaacttggaaatggactgaaatcctgcgcaagtcaactgatggttctaactttcagtcgatttaagcctgtattcttaaataacatgattaccagggcagaatccgrtgtggacttaaaagtcgttttaggggctttccagtaagtaktmaggataccttaagcacttctgagataagcagctttctaaaggtaggcacactgtatatatgatttaatggaggtaacagyctcctgtcccttttaattctttaaatgttactggagtaacactgcactttcagactcagcctgaaaagactttcccctagtctctaacttaagcatccagactggctggtatcagtgccagcaaatggatgctttttggcctagaaatgatgtattttaccttaatccacaatttttaagctgcggtcaggatataactgagaaggaataaatcctaa

SEQ ID NO: 30674 - DNA, 600 bp, Chicken  19866894252374_3
tccgcgctctctcccttgactgtaacaaaagcctgggtgagtaactttaattctcataaagttagatcagatggatctctctgactaagactgggaaattttctattgaaaaaagcacatttcatgccagaaatgtgttaagagattgtgtaacttggaaatggactgaaatcctgcgcaagtcaactgatggttctaactttcagtcgatttaagcctgtattcttaaataacatgattaccagggcagaatccgrtgtggacttaaaagtcgttttaggggctttccagtaagtaktmaggataccttaagcacttctgagataagcagctttctaaaggtaggcacactgtatatatgatttaatggaggtaacagyctcctgtcccttttaattctttaaatgttactggagtaacactgcactttcagactcagcctgaaaagactttcccctagtctctaacttaagcatccagactggctggtatcagtgccagcaaatggatgctttttggcctagaaatgatgtattttaccttaatccacaatttttaagctgcggtcaggatataactgagaaggaataaatcctaata

SEQ ID NO: 30675 - DNA, 600 bp, Chicken  19866894252374_4
ctgactaagactgggaaattttctattgaaaaaagcacatttcatgccagaaatgtgttaagagattgtgtaacttggaaatggactgaaatcctgcgcaagtcaactgatggttctaactttcagtcgatttaagcctgtattcttaaataacatgattaccagggcagaatccgrtgtggacttaaaagtcgttttaggggctttccagtaagtaktmaggataccttaagcacttctgagataagcagctttctaaaggtaggcacactgtatatatgatttaatggaggtaacagyctcctgtcccttttaattctttaaatgttactggagtaacactgcactttcagactcagcctgaaaagactttcccctagtctctaacttaagcatccagactggctggtatcagtgccagcaaatggatgctttttggcctagaaatgatgtattttaccttaatccacaatttttaagctgcggtcaggatataactgagaaggaataaatcctaataattgggatagatacaatttccgaagaaaaaataggcaacggcagaggtcaagctattgraaactgcttatgagtgattca

SEQ ID NO: 30676 - DNA, 600 bp, Chicken  19866894252374_5
tgatttaatggaggtaacagyctcctgtcccttttaattctttaaatgttactggagtaacactgcactttcagactcagcctgaaaagactttcccctagtctctaacttaagcatccagactggctggtatcagtgccagcaaatggatgctttttggcctagaaatgatgtattttaccttaatccacaatttttaagctgcggtcaggatataactgagaaggaataaatcctaataattgggatagatacaatttccgaagaaaaaataggcaacggcagaggtcaagctattgraaactgcttatgagtgattcagattcaactctgataatcagcactgattttgaaattctctgtgcatatcttgtcactaaaatgtggtcagtgccttcctttatcagcatttgttcagcaagcaaattaagctatttcctaatatgattttattatgatatttggaaaccctgatctgaagagatcttggaagacttcaggaatggtttgtgattctgctgcttcctctacaaatcacccaataatttcaaatttacggatatcacaggagaaaagctgtggtgactgaaacgaggcaaa

SEQ ID NO: 30677 - DNA, 600 bp, Chicken  19866894252377_1
ccaggcacacggcccctgttctttcacatcttggcacatcccccgtgtctatcagtaacaaatagcatgcctgtttcataacacagcttcgtgttagctaacatcatcaccactacgttgtaagaaaagcagttaattaaaaccctgcaatgctttcccttttcactaatattaacaaaagagtgaaaagattcaagttcatacagtaaggatgcatgttaattaattcctttatttatatatgggttatattgtctgtgatcattacaccttgcagaagtagtgctgaaggtcactagytgtatagcatctgctaatgtgtgcttttgtttcacgatgtgaaagtggaaagctctgaacacagttaaggggctgttgtttctgttcctctttcactcggagctgttgcagttaaggttacaactcaacaagcctataatggtaggaaacaagggatatgcctctgcataagtgaattccctagcayggttatcctgcctgcygttgctgaacagtcagaaatattaagtagttacttaaacctcttcctaaaataccctccaaagtaaccttgtgtttaaagagcactcaatttctgaa

SEQ ID NO: 30678 - DNA, 600 bp, Chicken  19866894252377_2
aagattcaagttcatacagtaaggatgcatgttaattaattcctttatttatatatgggttatattgtctgtgatcattacaccttgcagaagtagtgctgaaggtcactagytgtatagcatctgctaatgtgtgcttttgtttcacgatgtgaaagtggaaagctctgaacacagttaaggggctgttgtttctgttcctctttcactcggagctgttgcagttaaggttacaactcaacaagcctataatggtaggaaacaagggatatgcctctgcataagtgaattccctagcayggttatcctgcctgcygttgctgaacagtcagaaatattaagtagttacttaaacctcttcctaaaataccctccaaagtaaccttgtgtttaaagagcactcaatttctgaacatggagtgaacagttctccctgggaatgttgacaatctygtgtgtcatttcagtgtctcataataaaaagagaagtgctttggcttaccktacctctaccacgtgctacttttcagcaggtttctctagctcgtcatcttttcagacttatctgacttataagaatacaagtctgttcctatggga

SEQ ID NO: 30679 - DNA, 600 bp, Chicken  19866894252377_3
cagtaaggatgcatgttaattaattcctttatttatatatgggttatattgtctgtgatcattacaccttgcagaagtagtgctgaaggtcactagytgtatagcatctgctaatgtgtgcttttgtttcacgatgtgaaagtggaaagctctgaacacagttaaggggctgttgtttctgttcctctttcactcggagctgttgcagttaaggttacaactcaacaagcctataatggtaggaaacaagggatatgcctctgcataagtgaattccctagcayggttatcctgcctgcygttgctgaacagtcagaaatattaagtagttacttaaacctcttcctaaaataccctccaaagtaaccttgtgtttaaagagcactcaatttctgaacatggagtgaacagttctccctgggaatgttgacaatctygtgtgtcatttcagtgtctcataataaaaagagaagtgctttggcttaccktacctctaccacgtgctacttttcagcaggtttctctagctcgtcatcttttcagacttatctgacttataagaatacaagtctgttcctatgggaaaagggcgtacaactg

SEQ ID NO: 30680 - DNA, 600 bp, Chicken  19866894252377_4
gaaagtggaaagctctgaacacagttaaggggctgttgtttctgttcctctttcactcggagctgttgcagttaaggttacaactcaacaagcctataatggtaggaaacaagggatatgcctctgcataagtgaattccctagcayggttatcctgcctgcygttgctgaacagtcagaaatattaagtagttacttaaacctcttcctaaaataccctccaaagtaaccttgtgtttaaagagcactcaatttctgaacatggagtgaacagttctccctgggaatgttgacaatctygtgtgtcatttcagtgtctcataataaaaagagaagtgctttggcttaccktacctctaccacgtgctacttttcagcaggtttctctagctcgtcatcttttcagacttatctgacttataagaatacaagtctgttcctatgggaaaagggcgtacaactgtaaaaaactaccagcctcacgtttttttttatgcctgacatcactattttgaatgtattgcttttgttgcccctcccacctatgtctatatgactggtcacttgagtgcaggtaaatatttaattcacagagttctt

SEQ ID NO: 30681 - DNA, 600 bp, Chicken  19866894252377_5
ttcactcggagctgttgcagttaaggttacaactcaacaagcctataatggtaggaaacaagggatatgcctctgcataagtgaattccctagcayggttatcctgcctgcygttgctgaacagtcagaaatattaagtagttacttaaacctcttcctaaaataccctccaaagtaaccttgtgtttaaagagcactcaatttctgaacatggagtgaacagttctccctgggaatgttgacaatctygtgtgtcatttcagtgtctcataataaaaagagaagtgctttggcttaccktacctctaccacgtgctacttttcagcaggtttctctagctcgtcatcttttcagacttatctgacttataagaatacaagtctgttcctatgggaaaagggcgtacaactgtaaaaaactaccagcctcacgtttttttttatgcctgacatcactattttgaatgtattgcttttgttgcccctcccacctatgtctatatgactggtcacttgagtgcaggtaaatatttaattcacagagttcttccattactgtcaaagtagtggggaaccttaatgcattactacatctggatg

SEQ ID NO: 30682 - DNA, 600 bp, Chicken  19866894252380_1
taaaagattgaaaataaacagcgagcagctggcaaaatgataatttttcttaccccgactgtttttaaataattttcttaaaggttctgttgaagagtgatagatttttgaaatacagctaactcactattgaaaagatagagatgactctgattcattttgagtaatctaattccttgctgctatgcagcaatgctttatttaattaaacatttaatagcttcttttttagcttttttaaaggatgttttcaggaaattgatgtgaagatcatctatactttcaacactaataaaaacrgaatacacatttctgtaaattgtagaacatcagttctccgagtagtgtagcatttctctaagaatttaactgagtttgatacaaacgtatttaaatttaaactagggactgtaattgcttttggataggtgagaagctttcatcagtaagcatcttttccaaggtcagagagtaacactgagttaaaatgttgaactgaagccagatctratttctggcattactaatcaacagccattcttctttttcttgtaaagataagaatctattacatctcacttttaagtgtgtccttttgct

SEQ ID NO: 30683 - DNA, 600 bp, Chicken  19866894252380_2
catttaatagcttcttttttagcttttttaaaggatgttttcaggaaattgatgtgaagatcatctatactttcaacactaataaaaacrgaatacacatttctgtaaattgtagaacatcagttctccgagtagtgtagcatttctctaagaatttaactgagtttgatacaaacgtatttaaatttaaactagggactgtaattgcttttggataggtgagaagctttcatcagtaagcatcttttccaaggtcagagagtaacactgagttaaaatgttgaactgaagccagatctratttctggcattactaatcaacagccattcttctttttcttgtaaagataagaatctattacatctcacttttaagtgtgtccttttgctactgtgaaatcaaytacactgaaaggtttataactctatacaatgtcaatgtggattacaaaaaattagttgcacaaaagagagcctttcagcttataaaattgtataataygacacgttaccttgatgttattgatttaaataataaatatattatgtcagaatgtcacttaaccctgtcttgcctgagaagccagatgcagttatagc

SEQ ID NO: 30684 - DNA, 600 bp, Chicken  19866894252380_3
gtaaattgtagaacatcagttctccgagtagtgtagcatttctctaagaatttaactgagtttgatacaaacgtatttaaatttaaactagggactgtaattgcttttggataggtgagaagctttcatcagtaagcatcttttccaaggtcagagagtaacactgagttaaaatgttgaactgaagccagatctratttctggcattactaatcaacagccattcttctttttcttgtaaagataagaatctattacatctcacttttaagtgtgtccttttgctactgtgaaatcaaytacactgaaaggtttataactctatacaatgtcaatgtggattacaaaaaattagttgcacaaaagagagcctttcagcttataaaattgtataataygacacgttaccttgatgttattgatttaaataataaatatattatgtcagaatgtcacttaaccctgtcttgcctgagaagccagatgcagttatagcattttcccttgtttgcatatcttggacttttagagtcatgctgaaagtatattgtaaatgtgtaactttggatcattcattttgagagtttaattttttttttt

SEQ ID NO: 30685 - DNA, 600 bp, Chicken  19866894252380_4
aattgcttttggataggtgagaagctttcatcagtaagcatcttttccaaggtcagagagtaacactgagttaaaatgttgaactgaagccagatctratttctggcattactaatcaacagccattcttctttttcttgtaaagataagaatctattacatctcacttttaagtgtgtccttttgctactgtgaaatcaaytacactgaaaggtttataactctatacaatgtcaatgtggattacaaaaaattagttgcacaaaagagagcctttcagcttataaaattgtataataygacacgttaccttgatgttattgatttaaataataaatatattatgtcagaatgtcacttaaccctgtcttgcctgagaagccagatgcagttatagcattttcccttgtttgcatatcttggacttttagagtcatgctgaaagtatattgtaaatgtgtaactttggatcattcattttgagagtttaatttttttttttttcatatatcttggtgtaggtaatgcaaattcaattgacattatcaaagctaatgattacaaaaatgagtggaaaaaaggaaaaagcttaaaatagtt

SEQ ID NO: 30686 - DNA, 599 bp, Chicken  19866894252381_1
  misc_feature (1)..(64): n is any nucleotide
nnnnnnnnnnnnnnnnnnnnnnnnnnnnnnnnnnnnnnnnnnnnnnnnnnnnnnnnnnnnnnnnggaaattctggtaagaacaaccagaaaaatccatcttcccaacaacgcaaaagacaccaaacacttgtgttcctctttgcttggcctgaaagccaagtggctgtggctcacaaatgagcacaactcagtctgaggtggtgaatgagtttcctgccccagctgtttaccctattctcactctaccaatatctgagttggacagagattataagccacttcttcagagtaaactgtaygttaaaataccagtcagaaagctggggaggagtttggtagggcaaagactggcattaaaatgcttycctatgcagggaaacatcckgtgcrggcagctgagcgctcagctcccactgctcagaccttgaagaagtgctcawctcttcattctggggattgaagctttgctttgctttggaaatggctaaaacagactcaacaacatggaatcagcataagacaggatgtgaaatagtcactttccaatccaaaataccagtgtaggaggaaaaagaagaggaaaaggatgttgtgaagc

SEQ ID NO: 30687 - DNA, 600 bp, Chicken  19866894252381_2
aaattctggtaagaacaaccagaaaaatccatcttcccaacaacgcaaaagacaccaaacacttgtgttcctctttgcttggcctgaaagccaagtggctgtggctcacaaatgagcacaactcagtctgaggtggtgaatgagtttcctgccccagctgtttaccctattctcactctaccaatatctgagttggacagagattataagccacttcttcagagtaaactgtaygttaaaataccagtcagaaagctggggaggagtttggtagggcaaagactggcattaaaatgcttycctatgcagggaaacatcckgtgcrggcagctgagcgctcagctcccactgctcagaccttgaagaagtgctcawctcttcattctggggattgaagctttgctttgctttggaaatggctaaaacagactcaacaacatggaatcagcataagacaggatgtgaaatagtcactttccaatccaaaataccagtgtaggaggaaaaagaagaggaaaaggatgttgtgaagccactcctaggcatctttcatatcctagctttgaattcgttaattggcaaacttaggtatctggcttc

SEQ ID NO: 30688 - DNA, 600 bp, Chicken  19866894252381_3
agaaaaatccatcttcccaacaacgcaaaagacaccaaacacttgtgttcctctttgcttggcctgaaagccaagtggctgtggctcacaaatgagcacaactcagtctgaggtggtgaatgagtttcctgccccagctgtttaccctattctcactctaccaatatctgagttggacagagattataagccacttcttcagagtaaactgtaygttaaaataccagtcagaaagctggggaggagtttggtagggcaaagactggcattaaaatgcttycctatgcagggaaacatcckgtgcrggcagctgagcgctcagctcccactgctcagaccttgaagaagtgctcawctcttcattctggggattgaagctttgctttgctttggaaatggctaaaacagactcaacaacatggaatcagcataagacaggatgtgaaatagtcactttccaatccaaaataccagtgtaggaggaaaaagaagaggaaaaggatgttgtgaagccactcctaggcatctttcatatcctagctttgaattcgttaattggcaaacttaggtatctggcttcctaagttagtgtgctaaatg

SEQ ID NO: 30689 - DNA, 600 bp, Chicken  19866894252381_4
aatccatcttcccaacaacgcaaaagacaccaaacacttgtgttcctctttgcttggcctgaaagccaagtggctgtggctcacaaatgagcacaactcagtctgaggtggtgaatgagtttcctgccccagctgtttaccctattctcactctaccaatatctgagttggacagagattataagccacttcttcagagtaaactgtaygttaaaataccagtcagaaagctggggaggagtttggtagggcaaagactggcattaaaatgcttycctatgcagggaaacatcckgtgcrggcagctgagcgctcagctcccactgctcagaccttgaagaagtgctcawctcttcattctggggattgaagctttgctttgctttggaaatggctaaaacagactcaacaacatggaatcagcataagacaggatgtgaaatagtcactttccaatccaaaataccagtgtaggaggaaaaagaagaggaaaaggatgttgtgaagccactcctaggcatctttcatatcctagctttgaattcgttaattggcaaacttaggtatctggcttcctaagttagtgtgctaaatgctacg

SEQ ID NO: 30690 - DNA, 600 bp, Chicken  19866894252381_5
tgcttggcctgaaagccaagtggctgtggctcacaaatgagcacaactcagtctgaggtggtgaatgagtttcctgccccagctgtttaccctattctcactctaccaatatctgagttggacagagattataagccacttcttcagagtaaactgtaygttaaaataccagtcagaaagctggggaggagtttggtagggcaaagactggcattaaaatgcttycctatgcagggaaacatcckgtgcrggcagctgagcgctcagctcccactgctcagaccttgaagaagtgctcawctcttcattctggggattgaagctttgctttgctttggaaatggctaaaacagactcaacaacatggaatcagcataagacaggatgtgaaatagtcactttccaatccaaaataccagtgtaggaggaaaaagaagaggaaaaggatgttgtgaagccactcctaggcatctttcatatcctagctttgaattcgttaattggcaaacttaggtatctggcttcctaagttagtgtgctaaatgctacgtttgtatgccagatgtgagtggctaaccaccattggccatcacagtatta

SEQ ID NO: 30691 - DNA, 557 bp, Chicken  19866894252383_1
taattcttcgcttgaggaagctctgaaattcacagctgagcattacaccatctagaaatgtgcattatactaatcgaagagcagttaatgctaagttattgctgacagctggttttacccgttcatatgaatgcagatgaataacactgaagcaatttgtgtcttgtgagagcaaagactgaggaagatatttcacatttatagtctctaccttgcagtacaaccatccaaactctgacagaacacgaattttaagatacttcccttgagatactttgactgaagatttcaacgtcttargggttttgtatgtttacttatatctgcttgcaacaacttttcattaaaaacagcaatagccaaaacactttcagaatctagagaattgcccaagagtgtcagagaagaatggtgttttttttatgagctcttgttctcatgctgtttcctgtgcaacaggagtacacagattgtctcagtgagaaggaagtaaggtggtggcgcattgggttcctctgtgttgtttttttaaagattacgtcattttcaaaactact

SEQ ID NO: 30692 - DNA, 599 bp, Chicken  19866894252387_1
  misc_feature (1)..(139): n is any nucleotide
nnnnnnnnnnnnnnnnnnnnnnnnnnnnnnnnnnnnnnnnnnnnnnnnnnnnnnnnnnnnnnnnnnnnnnnnnnnnnnnnnnnnnnnnnnnnnnnnnnnnnnnnnnnnnnnnnnnnnnnnnnnnnnnnnnnnnnnnnnnactggtttttttccccattaaaaaaaaataggaaaatttagttttcatctggttttgagggagatgtgtagctcaaggtggtgaaccacacggcagatgtcctccttgcagccaagtgcactggcagaacaaaaggccaagaaatactactgtccctcctktgagatgtgtgtttgcagccactctgttctctctgcacggttcctgtggcttcattgctgaccgtagctgtcttctctgactgtcagtgtgacagcagtcattgtttaacactgagcaccccagctcagctccctttcctctgctctgagcaacaagcactgtaggaggtcattgtgtgccagtccytggacctctgttgtgctgtggttgtgcaaaaggagagccagctgctctctgtctgtcctccmagcaaagggaaggggaggggcagactcccatggttccctgccagggtgtg

SEQ ID NO: 30693 - DNA, 600 bp, Chicken  19866894252387_10
caggcttgcatgcatttagcgtatgcagggaatctagaggattgtcatcaagcctgcagatcaaggacagttgtgaaggtggaagcctcatgatgggggcttaaagctcatgctgtgattgcagtgtaacagctgaagggcttggtcttagctagagcctgagagaaggttagaacagcctcaatatagaatggcagttactgagctacactgtgaaatgctgagcatcaaagcatggcatgaaactcatcatggatatcagtgactccagrggaatccatggttgcacgtttctctttkcatcgaagcagggtggagtgcagtgctctgggaaaygaggcagagagagaaatagggaaggaataaactaactggtgagaatcaaagcatgtcttaggttggagtaaatcttgaagatcatctagttccaaacaccctgccatgggcagggttgccacccaccagctcaggctgcccaggatcccacccaacctgtcctggaatgcctccagagatggggcatccgcagcctctctgggcaagctgttgcagtgcctgaccaacctcaaaaaactaaataaaaaacaggaggttggagga

SEQ ID NO: 30694 - DNA, 600 bp, Chicken  19866894252387_11
gaggattgtcatcaagcctgcagatcaaggacagttgtgaaggtggaagcctcatgatgggggcttaaagctcatgctgtgattgcagtgtaacagctgaagggcttggtcttagctagagcctgagagaaggttagaacagcctcaatatagaatggcagttactgagctacactgtgaaatgctgagcatcaaagcatggcatgaaactcatcatggatatcagtgactccagrggaatccatggttgcacgtttctctttkcatcgaagcagggtggagtgcagtgctctgggaaaygaggcagagagagaaatagggaaggaataaactaactggtgagaatcaaagcatgtcttaggttggagtaaatcttgaagatcatctagttccaaacaccctgccatgggcagggttgccacccaccagctcaggctgcccaggatcccacccaacctgtcctggaatgcctccagagatggggcatccgcagcctctctgggcaagctgttgcagtgcctgaccaacctcaaaaaactaaataaaaaacaggaggttggaggacaggttaagttttatgtaataagttagtggcaaaac

SEQ ID NO: 30695 - DNA, 600 bp, Chicken  19866894252387_2
ctggttttgagggagatgtgtagctcaaggtggtgaaccacacggcagatgtcctccttgcagccaagtgcactggcagaacaaaaggccaagaaatactactgtccctcctktgagatgtgtgtttgcagccactctgttctctctgcacggttcctgtggcttcattgctgaccgtagctgtcttctctgactgtcagtgtgacagcagtcattgtttaacactgagcaccccagctcagctccctttcctctgctctgagcaacaagcactgtaggaggtcattgtgtgccagtccytggacctctgttgtgctgtggttgtgcaaaaggagagccagctgctctctgtctgtcctccmagcaaagggaaggggaggggcagactcccatggttccctgccagggtgtgagaaggctttgaggaggaggaagggctgtctctagctggtgcataagtattattatccccttctgcagagttttgcttttaaagcattgcaatttgagtttagagatgagaattgtttgttgcttcagctgttctgctttgtgggttgtctccgttttttacaactcctagtattttatttctgttct

SEQ ID NO: 30696 - DNA, 600 bp, Chicken  19866894252387_3
gccaagtgcactggcagaacaaaaggccaagaaatactactgtccctcctktgagatgtgtgtttgcagccactctgttctctctgcacggttcctgtggcttcattgctgaccgtagctgtcttctctgactgtcagtgtgacagcagtcattgtttaacactgagcaccccagctcagctccctttcctctgctctgagcaacaagcactgtaggaggtcattgtgtgccagtccytggacctctgttgtgctgtggttgtgcaaaaggagagccagctgctctctgtctgtcctccmagcaaagggaaggggaggggcagactcccatggttccctgccagggtgtgagaaggctttgaggaggaggaagggctgtctctagctggtgcataagtattattatccccttctgcagagttttgcttttaaagcattgcaatttgagtttagagatgagaattgtttgttgcttcagctgttctgctttgtgggttgtctccgttttttacaactcctagtattttatttctgttctgaggggagcatcccaaaagcaatttttaactgtagcactgcactgaactactctgattggca

SEQ ID NO: 30697 - DNA, 600 bp, Chicken  19866894252387_4
ttctgtctcagagctgatggccttggctggtgtgtgtctgctctaacaccaggcctgttttttggactagcactttgtaagcggctggatctgttgtatgaagaggaaaattaaagagtggtttgcactgaaactgggttttgttgtgttttcacctgttgttaagtgtcctgaagtgcaggttgagcagctgctggttgtggggatgcctgctgcagcaggagctcttgcagctggaacgtgctgagtgctgtgcaggggagcagtgcagtgctgtgtaactctgagtttgtattcaaygtttgctttttctccactgcagtgctgtggtggtccttgcctttctgtgacgttgaacagcctcaattgtgctttctcatcatttctcatcatccctctrcagaygtkggggaggctgcattccttctggccatttttgccccatagattccctgcttgtggccataccactgaaatggttgtcctgcagctactgcaatttcctgaggcatgctaaataaataccataagctggataagatcaaggaagcaagttaaawgcaacaggcttgcatgcatttagcgtatgcagggaatcta

SEQ ID NO: 30698 - DNA, 600 bp, Chicken  19866894252387_5
aagaggaaaattaaagagtggtttgcactgaaactgggttttgttgtgttttcacctgttgttaagtgtcctgaagtgcaggttgagcagctgctggttgtggggatgcctgctgcagcaggagctcttgcagctggaacgtgctgagtgctgtgcaggggagcagtgcagtgctgtgtaactctgagtttgtattcaaygtttgctttttctccactgcagtgctgtggtggtccttgcctttctgtgacgttgaacagcctcaattgtgctttctcatcatttctcatcatccctctrcagaygtkggggaggctgcattccttctggccatttttgccccatagattccctgcttgtggccataccactgaaatggttgtcctgcagctactgcaatttcctgaggcatgctaaataaataccataagctggataagatcaaggaagcaagttaaawgcaacaggcttgcatgcatttagcgtatgcagggaatctagaggattgtcatcaagcctgcagatcaaggacagttgtgaaggtggaagcctcatgatgggggcttaaagctcatgctgtgattgcagtgtaacagctga

SEQ ID NO: 30699 - DNA, 600 bp, Chicken  19866894252387_6
gaaaattaaagagtggtttgcactgaaactgggttttgttgtgttttcacctgttgttaagtgtcctgaagtgcaggttgagcagctgctggttgtggggatgcctgctgcagcaggagctcttgcagctggaacgtgctgagtgctgtgcaggggagcagtgcagtgctgtgtaactctgagtttgtattcaaygtttgctttttctccactgcagtgctgtggtggtccttgcctttctgtgacgttgaacagcctcaattgtgctttctcatcatttctcatcatccctctrcagaygtkggggaggctgcattccttctggccatttttgccccatagattccctgcttgtggccataccactgaaatggttgtcctgcagctactgcaatttcctgaggcatgctaaataaataccataagctggataagatcaaggaagcaagttaaawgcaacaggcttgcatgcatttagcgtatgcagggaatctagaggattgtcatcaagcctgcagatcaaggacagttgtgaaggtggaagcctcatgatgggggcttaaagctcatgctgtgattgcagtgtaacagctgaagggc

SEQ ID NO: 30700 - DNA, 600 bp, Chicken  19866894252387_7
aattaaagagtggtttgcactgaaactgggttttgttgtgttttcacctgttgttaagtgtcctgaagtgcaggttgagcagctgctggttgtggggatgcctgctgcagcaggagctcttgcagctggaacgtgctgagtgctgtgcaggggagcagtgcagtgctgtgtaactctgagtttgtattcaaygtttgctttttctccactgcagtgctgtggtggtccttgcctttctgtgacgttgaacagcctcaattgtgctttctcatcatttctcatcatccctctrcagaygtkggggaggctgcattccttctggccatttttgccccatagattccctgcttgtggccataccactgaaatggttgtcctgcagctactgcaatttcctgaggcatgctaaataaataccataagctggataagatcaaggaagcaagttaaawgcaacaggcttgcatgcatttagcgtatgcagggaatctagaggattgtcatcaagcctgcagatcaaggacagttgtgaaggtggaagcctcatgatgggggcttaaagctcatgctgtgattgcagtgtaacagctgaagggcttg

SEQ ID NO: 30701 - DNA, 600 bp, Chicken  19866894252387_8
gagcagtgcagtgctgtgtaactctgagtttgtattcaaygtttgctttttctccactgcagtgctgtggtggtccttgcctttctgtgacgttgaacagcctcaattgtgctttctcatcatttctcatcatccctctrcagaygtkggggaggctgcattccttctggccatttttgccccatagattccctgcttgtggccataccactgaaatggttgtcctgcagctactgcaatttcctgaggcatgctaaataaataccataagctggataagatcaaggaagcaagttaaawgcaacaggcttgcatgcatttagcgtatgcagggaatctagaggattgtcatcaagcctgcagatcaaggacagttgtgaaggtggaagcctcatgatgggggcttaaagctcatgctgtgattgcagtgtaacagctgaagggcttggtcttagctagagcctgagagaaggttagaacagcctcaatatagaatggcagttactgagctacactgtgaaatgctgagcatcaaagcatggcatgaaactcatcatggatatcagtgactccagrggaatccatggttgcacgtttctc

SEQ ID NO: 30702 - DNA, 600 bp, Chicken  19866894252387_9
taagatcaaggaagcaagttaaawgcaacaggcttgcatgcatttagcgtatgcagggaatctagaggattgtcatcaagcctgcagatcaaggacagttgtgaaggtggaagcctcatgatgggggcttaaagctcatgctgtgattgcagtgtaacagctgaagggcttggtcttagctagagcctgagagaaggttagaacagcctcaatatagaatggcagttactgagctacactgtgaaatgctgagcatcaaagcatggcatgaaactcatcatggatatcagtgactccagrggaatccatggttgcacgtttctctttkcatcgaagcagggtggagtgcagtgctctgggaaaygaggcagagagagaaatagggaaggaataaactaactggtgagaatcaaagcatgtcttaggttggagtaaatcttgaagatcatctagttccaaacaccctgccatgggcagggttgccacccaccagctcaggctgcccaggatcccacccaacctgtcctggaatgcctccagagatggggcatccgcagcctctctgggcaagctgttgcagtgcctgaccaacctcaaaaa

SEQ ID NO: 30703 - DNA, 600 bp, Chicken  19866894252389_1
tggcatgttctttggctccatttatgctgctgcaatgaggattacaagccatttttggccacttaataatttacagtcactgcagtaatgtttagagctccttacacaccaatatagatgtgagagtaggagtaagatgaggagagacaggttttttatgtccatggagagaatcgatttgggtgtgaccataagccttcttggcaatgtcagccttcatggttctcttatcccaaagagctgttttcttgttgatcagacaataggtcagccaagcctggatttcactacaaaagtgaygttttagtccagttgacagctagtgaggaggtgtaccctaaatgtcatttctggaagcataatccatgattatctatttgaggaaaaggtagagtgaaaatacccaggacttagtttgtcaggatcttgctttctgaaaaggtggcagtttcaaagctgcaagtcttggcaaaacttcaatagatgaatgactcacagcattgcaccacccagattcagtatcaccaaggcatacctgttgattgccatctcatctcatctgtagggtctgcactgtggcaagtcgtactttgacgctta

SEQ ID NO: 30704 - DNA, 600 bp, Chicken  19866894252394_1
aagacattacaagtgaaagttgctggaaaaaaatgaaatggacttatgtatcttacaaactacaaagccagtattaacaaccacttctgtactcacagtaccaatttaggcttatagcctgttatttatagccttgtcccacataagaaatcttgataaatactgtggacaacaccaaaacctgaagtttcatttctcctaaatcaaggaagttcagaactgttatcctaacatttactggtgttcaaatacagtcttcaattaaaaaaacaaaaacaaaaacaaagctacaaagctgcrttyggattagcagttaccacatcctgcaaaaattcatacaayctctctcatcstgtattactgaggaaaaacaggagaaaaaggatacctcttctctcaaccaaactggcacaaggctagaagcaactttaaggatgcaatcaattttaaacatgtatttttagaaaaattagtaaaactcttctgtcagaatgttgctgacttgtaccattgattagtctcaatgggaacataataaaagtaaaatacaaaatcttaacactagtcagctagtaattcttgttagaaatactgtacagg

SEQ ID NO: 30705 - DNA, 600 bp, Chicken  19866894252394_2
acattacaagtgaaagttgctggaaaaaaatgaaatggacttatgtatcttacaaactacaaagccagtattaacaaccacttctgtactcacagtaccaatttaggcttatagcctgttatttatagccttgtcccacataagaaatcttgataaatactgtggacaacaccaaaacctgaagtttcatttctcctaaatcaaggaagttcagaactgttatcctaacatttactggtgttcaaatacagtcttcaattaaaaaaacaaaaacaaaaacaaagctacaaagctgcrttyggattagcagttaccacatcctgcaaaaattcatacaayctctctcatcstgtattactgaggaaaaacaggagaaaaaggatacctcttctctcaaccaaactggcacaaggctagaagcaactttaaggatgcaatcaattttaaacatgtatttttagaaaaattagtaaaactcttctgtcagaatgttgctgacttgtaccattgattagtctcaatgggaacataataaaagtaaaatacaaaatcttaacactagtcagctagtaattcttgttagaaatactgtacaggacc

SEQ ID NO: 30706 - DNA, 600 bp, Chicken  19866894252394_3
cttatgtatcttacaaactacaaagccagtattaacaaccacttctgtactcacagtaccaatttaggcttatagcctgttatttatagccttgtcccacataagaaatcttgataaatactgtggacaacaccaaaacctgaagtttcatttctcctaaatcaaggaagttcagaactgttatcctaacatttactggtgttcaaatacagtcttcaattaaaaaaacaaaaacaaaaacaaagctacaaagctgcrttyggattagcagttaccacatcctgcaaaaattcatacaayctctctcatcstgtattactgaggaaaaacaggagaaaaaggatacctcttctctcaaccaaactggcacaaggctagaagcaactttaaggatgcaatcaattttaaacatgtatttttagaaaaattagtaaaactcttctgtcagaatgttgctgacttgtaccattgattagtctcaatgggaacataataaaagtaaaatacaaaatcttaacactagtcagctagtaattcttgttagaaatactgtacaggaccggattataaattaatgccaataattcactgaagcagggg

SEQ ID NO: 30707 - DNA, 600 bp, Chicken  19866894252394_4
tacaaactacaaagccagtattaacaaccacttctgtactcacagtaccaatttaggcttatagcctgttatttatagccttgtcccacataagaaatcttgataaatactgtggacaacaccaaaacctgaagtttcatttctcctaaatcaaggaagttcagaactgttatcctaacatttactggtgttcaaatacagtcttcaattaaaaaaacaaaaacaaaaacaaagctacaaagctgcrttyggattagcagttaccacatcctgcaaaaattcatacaayctctctcatcstgtattactgaggaaaaacaggagaaaaaggatacctcttctctcaaccaaactggcacaaggctagaagcaactttaaggatgcaatcaattttaaacatgtatttttagaaaaattagtaaaactcttctgtcagaatgttgctgacttgtaccattgattagtctcaatgggaacataataaaagtaaaatacaaaatcttaacactagtcagctagtaattcttgttagaaatactgtacaggaccggattataaattaatgccaataattcactgaagcaggggttcctttctct

SEQ ID NO: 30708 - DNA, 600 bp, Chicken  19866894252395_1
atctgctcctgctgtgagtccagagctcttctgaaaatactggccttaataactcagtgtccccaaactccctctgtacaataggaataatacttctttcagtcttctttgggcttgcctaggactctttccaaacacatctgtacatactgtcatcaccattggataacaatttctgtgtgccacagtcattgtaaataagaaagaacatcagttttgaatataaacagaggtgagaggtattgtatacaacaaacctggatctcccaactgcttggctggataccctatttgttttaytggggacaacggagtttgtgcacgccccatggtttgctggtatcagccatctcccatccccgaggcatgacagcagtggcatggatccaattcaccataaagaagaccttacctgtccctgctctgactggcagccagctggtcaccacataactcaaacagagaaaaggtcaggcaataaaagagacatcatacccagaccaaagtgacagttaaactcctgcgcagattccagcagtttcgctggggctttaaatcactaaaagctgctgtcagcaactacatgtgatttctgcaagc

SEQ ID NO: 30709 - DNA, 600 bp, Chicken  19866894252399_1
gtacttgctgtctgcttgtagctgggtggttgatggaactccagctgacttcagtgggaactccatgcatggggtgatggatttctcaggtttttgaaaacaaaagatcttgcctcctcctagctacccgttctatacatggaatctttgttcaaaaagctttccaacaaatctcaaagattcctcttaaatcaatatcaaattctaaattgtcaataatactaatgatacaaccctttcaaatgcacagcttaggaaaatttaagagttcttgcacaagctacatatggaattcagttytgcatagtgaattacgcattctcaaactcctcatttttatgtattacatttctgtatgaattcaaagaaattcatgagaaagagcacttatagaaaatcttgctctggcagtccttccagcctccttgatcccatccctgtgctcctgaaagcactgtgggggtctcagaatggacttcaacgcacacccaggaaaaagctgcatgtttggtgcttggatcagtcatttcatgcatgaaagtataactctcaatcaaacacctcaaagccaggatatgtgggccccaactgaagctcaga

SEQ ID NO: 30710 - DNA, 600 bp, Chicken  19866894252411_1
tcctctcatttccagcagaacttggcttctatcacctcatccaaatactttcatatttttttttccttgtcagtggtctttgagagccattgttgaggaaacagtttatgtggaaaatctctggatcatgtatgttttataattcctcaaactgacttaatgaaacttggatcttgttatattttgaatctattatcaagttttgaatgcataccacttaaatgttgatttctgaagtggtcgttaaatataatgtgacctttgggctccacatgacttctatatgacttccacatatayagtgctttcaatgcattctctgatttatctagtctcacagtcctaattctttaattcagtgcaaagttaatatttgaaaccttactgtaaggtatgaagagtctgcaagtcaaaacaaatcaacacctgttgaatacacccagctcttgctgaccgttttgctggtgctgaacttgtcatagtatgaatataaatgtgtgaatagatatggtaagtctgaaattacttttttttttttttttttttttttttttgttcataaagaatattcctctggggctttcatgcttgtctggtttc

SEQ ID NO: 30711 - DNA, 600 bp, Chicken  19866894252413_1
gggaaatcatacagtctagctgtaagctttcatcttgtcaaacacagaggggaggaattacctgcagataggcacagctctttatttatttatttgtaatgaggagcaaatcaatactgatgaagaaaagagagaccaacttgttaacactaaggtaggtaagagcacattctgaacttatgaaatatatttctattgtgccaagtgagagattttgtgaagtatctctttgagtgctgacacactgctcatggaagggctgtttcaccctgcaccgtgccaaactcactcaggaataawggtgggaaatgcttacagagagccctgtcctcccttcaggcacttgcaggcttaatatgagggtgtcaaagctgttgaacagagcttgtaattggctttgtctgttccagagagcaactcaagggagcttttcaaggcactcttaaatggctcaaggcccaagttaatgaggaaggaaaggcatggccaggatagttggatgaagcaaaagttacatatgtatagtaatggagagcttataaatacctttccataataactttctctatcacaaaagcacccgtcataaggatctgctga

SEQ ID NO: 30712 - DNA, 600 bp, Chicken  19866894252414_1
acatctacgtctgctatggtctgggggctgacagtaggacccttttctggaggtttccaagtcgtttggtctccaaggaaagatcccaggcattgtgctcagtgcactctatgatagggaagaattgtctgctgaaacacagaactgcctgaactagccatcctcatggagaaaggcaggggtggtaaaaacaactcacccaaaggcagatatctaaaatacctcagatgaaagtcctgtttctctcctacagggaaccagtaaccctatctactgcaagtacctgcattgtaaagttargcaagaggaatttcagtctttgtgaccagctgggctcacacaccattttctgggtcatcacccgcagaaatgactcaaagtttatcttccctgacccattctgatcaacttcagagataattctcttcatctccgctttcctcacttcacagcccagagctctcatggttatctgccaaatgagaaaacagaccaacgtcattgtacaaatcaaacagaaacaaagcggaaaagatgtttgaagcaagtaagtgcatgtaagggggggggaggggaggaacaactttttgccacagtgga

SEQ ID NO: 30713 - DNA, 600 bp, Chicken  19866894252429_1
ggactcatgtaaactaagtgctggaagactttcacatgaatggctacaaaggggcaaactgggactgaagtatttttcctttgtatggagctgcagagcttctcttaggtggattcctttatgcctggcattatacctgctgccactgctgcacttcttttggttggaacaccgtcatggtctctgcaaaacctgctcatggctttatggaaaatctgcaggaactttgtgcgtccccatccctttgtgagaacgagcaaagatgtcccatgcttagggcagggacgggctgcagaagtyttgctgctctaggaagcaaagctaaaaatgggcagccaggagaacttgaagatcctactgtcaacagcaagtgaggacagtctgtgtgatcctcagttatccttccatccaagcaaygattgagtttgaaacagctgcacgccacagccaaagctttgcctgtcatagtcaaagacagtgcaaaaccaactgcatttctgccatccacgcttacacttgacttgttccatgcacaaacggctttcagcttctccaggcattaaccaagaactctgcacaaacaccacagatatatcaagt

SEQ ID NO: 30714 - DNA, 600 bp, Chicken  19866894252429_2
tttatgcctggcattatacctgctgccactgctgcacttcttttggttggaacaccgtcatggtctctgcaaaacctgctcatggctttatggaaaatctgcaggaactttgtgcgtccccatccctttgtgagaacgagcaaagatgtcccatgcttagggcagggacgggctgcagaagtyttgctgctctaggaagcaaagctaaaaatgggcagccaggagaacttgaagatcctactgtcaacagcaagtgaggacagtctgtgtgatcctcagttatccttccatccaagcaaygattgagtttgaaacagctgcacgccacagccaaagctttgcctgtcatagtcaaagacagtgcaaaaccaactgcatttctgccatccacgcttacacttgacttgttccatgcacaaacggctttcagcttctccaggcattaaccaagaactctgcacaaacaccacagatatatcaagtgactttcttgtcaccataagaagttgcttcagagggccaaaaacaccattcatgtaacagtttcttgtgaaaggctaccgttatatcaggaatgtggacacaaaagcacaaatgtaa

SEQ ID NO: 30715 - DNA, 600 bp, Chicken  19866894252429_3
gcctgtcatagtcaaagacagtgcaaaaccaactgcatttctgccatccacgcttacacttgacttgttccatgcacaaacggctttcagcttctccaggcattaaccaagaactctgcacaaacaccacagatatatcaagtgactttcttgtcaccataagaagttgcttcagagggccaaaaacaccattcatgtaacagtttcttgtgaaaggctaccgttatatcaggaatgtggacacaaaagcacaaatgtaaagtttcacatgcacctctgcaaactctgcaagcattcaartaaaaccagagaacgacttattttgctcagtgaattaatcttcctcccagagacaaatgcaagatgataggtcaccttgaaaaatgagcatgttgtatcattaatgwagaagactttcaagtcagaagaaaaaaagacaccacaaggctcaaggcataagaacaaacaggaaccgaagagcagaacctccttgaaaggggagatttaattgcatattctttgtagcagaggagagagaatctgaaacaggacacagagctaccatcgcacgggcatttgctaagcaggtctgtgtattct

SEQ ID NO: 30716 - DNA, 600 bp, Chicken  19866894252429_4
caagaactctgcacaaacaccacagatatatcaagtgactttcttgtcaccataagaagttgcttcagagggccaaaaacaccattcatgtaacagtttcttgtgaaaggctaccgttatatcaggaatgtggacacaaaagcacaaatgtaaagtttcacatgcacctctgcaaactctgcaagcattcaartaaaaccagagaacgacttattttgctcagtgaattaatcttcctcccagagacaaatgcaagatgataggtcaccttgaaaaatgagcatgttgtatcattaatgwagaagactttcaagtcagaagaaaaaaagacaccacaaggctcaaggcataagaacaaacaggaaccgaagagcagaacctccttgaaaggggagatttaattgcatattctttgtagcagaggagagagaatctgaaacaggacacagagctaccatcgcacgggcatttgctaagcaggtctgtgtattctgctgtgcagaataataaagaagaatgcaagagataagcactccagactgcataatgcttggacgctgtcccagaattcaggtcataagcaaagaagggtgccagagc

SEQ ID NO: 30717 - DNA, 600 bp, Chicken  19866894252429_5
ttcagtcattacttccatgaagaaagagatgtaaagaaacacatagaataataaagactgattgagttgagctcaaagccaactcagtcagtcctgagatgaatgaaaacaaaacaggcaggaaaggaaaaatgaccataaataaatacaagcaacaacaacaacaaaaaaccaacaaacaccttttctcatatgtaagctgctctcttttaagtgctgctgtgtgtacagcagagattcacggctcctacccaccatccagctttccagcactgcttcagagctcccaccaccccatcmcctgcaatgctgccctacaccacctcctccagacaccaaccttgctgaggggtcagctgtccaagagcctcctgttgccatgcaagcctctgctccagttccaagcagcagctctccgagccatccttctccttgctcttcagctccctggcctcccctcaccagggaggcagggccccataccttgccatctcagccctccatgtcacaaaccagagcacagccaacacttggcttacagtactgatgacatcctccacctgtccaggctctcacagattccttgttttcctaaccaac

SEQ ID NO: 30718 - DNA, 600 bp, Chicken  19866894252433_1
agagaactgaaataacagaaatgtgagaatagagtggaatttagcaaaagggtgttgaatttgagaggagaagtgagaaaagatgaaggtagcattggatccccaactttgtggagagacaaggaggagctatcaggagggacagcgaggaaaagcaaggaggaagatgggtactgttttaaagaaccaggttgaactaaagccatggcaaacagtaggaaataacaaacagaagatgagctgaaaactgagatggtagatagggagctgagatcagaaaactggaggtgataaaacacrtttggattttgaaggctgttgtgcttctgtttggatgtgataatactagcctagtatagtcttttttttttttaatttaaacattatttccacctgatgaaaaacgtatttttaatttttagcatgaactcttcacatatctgttggtagaaagtgattaagtggagaaaaaaaaaaaattccagtgtattgtaatggaaaaaaagcaagtaataatgctttctaatggtggaaaaaatgctgcaaatcacttacatgatgttagatgtgtttttaacataaattttctgctccgttctc

SEQ ID NO: 30719 - DNA, 599 bp, Chicken  19866894252435_1
  misc_feature (1)..(153): n is any nucleotide
nnnnnnnnnnnnnnnnnnnnnnnnnnnnnnnnnnnnnnnnnnnnnnnnnnnnnnnnnnnnnnnnnnnnnnnnnnnnnnnnnnnnnnnnnnnnnnnnnnnnnnnnnnnnnnnnnnnnnnnnnnnnnnnnnnnnnnnnnnnnnnnnnnnnnnnnnacaaggttaagaccaagcccacccgactggaagatccactcgctgaaatgctggcacaagggattaatgagattctcccagtcctcaccgtttgctgaggacagtgatgagcagcaacacgcttacacagcccagagggtcggataygtcctgccagccagctggagctcagcacatgcacacgctccccagagctgccatattcagggatatcttttcaatgccttcccgatggattctttagaagttttatcacgtgcagcaatccatgccacgcttaaataacgatcactgagccacctaactctacagactgcaccagcaacactcagctcctttcaaagtcaaacacatacttcagaacagcatttttcctctcttcccatgatacacaataacatttattagctgccttctataaagcttcacccttaagatttcagtgc

SEQ ID NO: 30720 - DNA, 599 bp, Chicken  19866894252438_1
  misc_feature (1)..(4): n is any nucleotide
nnnntacttattaaaaatttgcagccttgcttggattatgcatgctgaacaaataattttggctttctgaaatggatcattaaaaaatagatttgcatgaaatttcctttccatgatttcactacagtgttaacatactgaagtgtgcggaattttttttccaacagccctagctttcccaagttgaacatacatttgcttcaaaaatgtttgtgatataaatgaagcacatttccttcaagaattatccaagagtactctttactagggctagaaagggttccttatccactgacgctmccatacagctgtgcagaaggtgggtgcagttacaaatctctcataggaaaggacctgggcatggtagactttctactaatctcaaaaaagcctgcaaccagcttccacctagaccaacaaagtgagcatttgtgatcagctgtagtgagttactctttgctaaatgaatactacacactgtgaaataagaccagagacgtactgaatagaaaattcactaataaggataatggttacaggaccttagtgaacaattaattatatcaacactgtgtttctgtaatctgtagattacattt

SEQ ID NO: 30721 - DNA, 600 bp, Chicken  19866894252442_1
cacaacaactctgtcactgtgcctgatggaacatcctgaagtgcagaagcaacatatgttgaaagatttaagaatagtggtagaagcttttccttccttcagaagactagtaactcaatacgggtttgtggtgtgtgagcctggactcagggcttttgttcatagagcaatgttctttaaggaactacaatcttcagtgacattttgatgtgtgtttctggtctcagaatttcagttgtgactaacctatttttcatctcctgcatgttttcttctttttctttccctctctttctccartgaagtgctggaatatttggaaacatacctcttttgccatgaattcataaaatcataaacaggtttgggttagaagggacctttaacrtcatctagtttaaatccccctgatataggtaaggtgctcagagacccatcaagccyggtcttgtacacctccagggatggggcatacagaacctgtatgaacaatcagtatctcaccatcctcataataaataatttcttcctaatatgtagtctatatctacacccttccagtttaaagccatttccccttgtcctgttgctacrtgccct

SEQ ID NO: 30722 - DNA, 600 bp, Chicken  19866894252442_2
tttccttccttcagaagactagtaactcaatacgggtttgtggtgtgtgagcctggactcagggcttttgttcatagagcaatgttctttaaggaactacaatcttcagtgacattttgatgtgtgtttctggtctcagaatttcagttgtgactaacctatttttcatctcctgcatgttttcttctttttctttccctctctttctccartgaagtgctggaatatttggaaacatacctcttttgccatgaattcataaaatcataaacaggtttgggttagaagggacctttaacrtcatctagtttaaatccccctgatataggtaaggtgctcagagacccatcaagccyggtcttgtacacctccagggatggggcatacagaacctgtatgaacaatcagtatctcaccatcctcataataaataatttcttcctaatatgtagtctatatctacacccttccagtttaaagccatttccccttgtcctgttgctacrtgcccttataaaaagtccctccctagctttcctgtaggcccccttcaggtactggaaggccactatgaggccccctcagagtcttctccaggct

SEQ ID NO: 30723 - DNA, 600 bp, Chicken  19866894252442_3
actcagggcttttgttcatagagcaatgttctttaaggaactacaatcttcagtgacattttgatgtgtgtttctggtctcagaatttcagttgtgactaacctatttttcatctcctgcatgttttcttctttttctttccctctctttctccartgaagtgctggaatatttggaaacatacctcttttgccatgaattcataaaatcataaacaggtttgggttagaagggacctttaacrtcatctagtttaaatccccctgatataggtaaggtgctcagagacccatcaagccyggtcttgtacacctccagggatggggcatacagaacctgtatgaacaatcagtatctcaccatcctcataataaataatttcttcctaatatgtagtctatatctacacccttccagtttaaagccatttccccttgtcctgttgctacrtgcccttataaaaagtccctccctagctttcctgtaggcccccttcaggtactggaaggccactatgaggccccctcagagtcttctccaggctgaaaagccccatctgtttcagcttgtccccaaaagggatgcactccagccctcgta

SEQ ID NO: 30724 - DNA, 600 bp, Chicken  19866894252442_4
ctccartgaagtgctggaatatttggaaacatacctcttttgccatgaattcataaaatcataaacaggtttgggttagaagggacctttaacrtcatctagtttaaatccccctgatataggtaaggtgctcagagacccatcaagccyggtcttgtacacctccagggatggggcatacagaacctgtatgaacaatcagtatctcaccatcctcataataaataatttcttcctaatatgtagtctatatctacacccttccagtttaaagccatttccccttgtcctgttgctacrtgcccttataaaaagtccctccctagctttcctgtaggcccccttcaggtactggaaggccactatgaggccccctcagagtcttctccaggctgaaaagccccatctgtttcagcttgtccccaaaagggatgcactccagccctcgtagtatcttcatggccctcctctggacccacttcaacttgttgttcttcttgtgttggggccccagaactggatgcagtactcctggtggtgtctcacaagagcagaggggcagaataacctccctcaacctgctggtcatgttctgtattg

SEQ ID NO: 30725 - DNA, 599 bp, Chicken  19866894252443_1
  misc_feature (1)..(5): n is any nucleotide
nnnnnccctcatgcaggattttcccatctctgcagaacacttcactgacagagaaaggagattaagatgtgagagacaagttcaaaaccatgtgtgcctgtatcagctaacacagatttagtctaatgtgtcttcatgtggtcatcctggagagaagaggaactgcctgagctatgccccatgggtcgtgatatctttcatagggacataaaagcgagcagtgttttctcagaatttgctcagtgaagcctgcaggaagcagtgtcagtctttgtctcaaggcagtccactctccctccytgttccctggattaacaactgcctcaagacacccacgagggtccttgaagccaagcggttcagctcagagcacaggctatgaagctgcaaggctcaaagcttycagtgaatccaggagaacgcatttggattcctaatggtcagagcacttggaagtagacaggtccctgtctagctccctcatcagcaatcatggatgtgattgatgctgtgggcctgccagaaggaagtacaggagtacaggctggtacatcccatttacattacaaaccaacttgcagctggcaggaaaagactaa

SEQ ID NO: 30726 - DNA, 600 bp, Chicken  19866894252443_2
cagctaacacagatttagtctaatgtgtcttcatgtggtcatcctggagagaagaggaactgcctgagctatgccccatgggtcgtgatatctttcatagggacataaaagcgagcagtgttttctcagaatttgctcagtgaagcctgcaggaagcagtgtcagtctttgtctcaaggcagtccactctccctccytgttccctggattaacaactgcctcaagacacccacgagggtccttgaagccaagcggttcagctcagagcacaggctatgaagctgcaaggctcaaagcttycagtgaatccaggagaacgcatttggattcctaatggtcagagcacttggaagtagacaggtccctgtctagctccctcatcagcaatcatggatgtgattgatgctgtgggcctgccagaaggaagtacaggagtacaggctggtacatcccatttacattacaaaccaacttgcagctggcaggaaaagactaagcatgatctcaagtagagctggacatagacaccatgggactgcaagaggaagcgcatttaaaacccttcgtgctcatagtcattgccagaagtggatgatcaga

SEQ ID NO: 30727 - DNA, 600 bp, Chicken  19866894252443_3
agcatgatctcaagtagagctggacatagacaccatgggactgcaagaggaagcgcatttaaaacccttcgtgctcatagtcattgccagaagtggatgatcagaggcattgctctgggaaggctgactgcagaggaagagatgacccagaaacccacaccctgacagcaggtgggatattcagggagaggaacatgccctgcaattgcccaaaacataggtaagattagcttagggtgctcagagcatgaggacagcccggggattcagacaaacactgccatcacatttatcccacarcgtacttcagctccatctctgttcaaacagctttttctacgcaactgctctacctaccatagtgaaggattgctttcaattgactgttgctttgatttcatggctgatgcaaggcctttcccaatagggaatccttctcttgccaacttgacactgggcagaaacaagtccttccatggtagtttgccatgacgtttgtgtgccagttcatagccacggatttctcctggaacagcaatggaaagtcctcctggagcagagaagaaawgtataagtcttcagtagcaagaaaaaaaagaa

SEQ ID NO: 30728 - DNA, 600 bp, Chicken  19866894252443_4
agacaaacactgccatcacatttatcccacarcgtacttcagctccatctctgttcaaacagctttttctacgcaactgctctacctaccatagtgaaggattgctttcaattgactgttgctttgatttcatggctgatgcaaggcctttcccaatagggaatccttctcttgccaacttgacactgggcagaaacaagtccttccatggtagtttgccatgacgtttgtgtgccagttcatagccacggatttctcctggaacagcaatggaaagtcctcctggagcagagaagaaawgtataagtcttcagtagcaagaaaaaaaagaaaacaaaaagyaatcattgcagtagtaagcagaggagggcttatcyattggccttggttttaagcaggggttgtscatactattactggctcagcccatgcatacaatgctaacaggattgttgacacctctatcctcttgctggtaactcaagtgtttgggtcatttttctcatttttctgtatcacagcaaagctactcagaacacagaaggcatcatacctgcctgcagctcccagtccttcagagttgaacacactacagtaaga

SEQ ID NO: 30729 - DNA, 600 bp, Chicken  19866894252443_5
ctccatctctgttcaaacagctttttctacgcaactgctctacctaccatagtgaaggattgctttcaattgactgttgctttgatttcatggctgatgcaaggcctttcccaatagggaatccttctcttgccaacttgacactgggcagaaacaagtccttccatggtagtttgccatgacgtttgtgtgccagttcatagccacggatttctcctggaacagcaatggaaagtcctcctggagcagagaagaaawgtataagtcttcagtagcaagaaaaaaaagaaaacaaaaagyaatcattgcagtagtaagcagaggagggcttatcyattggccttggttttaagcaggggttgtscatactattactggctcagcccatgcatacaatgctaacaggattgttgacacctctatcctcttgctggtaactcaagtgtttgggtcatttttctcatttttctgtatcacagcaaagctactcagaacacagaaggcatcatacctgcctgcagctcccagtccttcagagttgaacacactacagtaagagggcacagactatatatatgtggcagcatccatacataaaca

SEQ ID NO: 30730 - DNA, 600 bp, Chicken  19866894252443_6
tgctctacctaccatagtgaaggattgctttcaattgactgttgctttgatttcatggctgatgcaaggcctttcccaatagggaatccttctcttgccaacttgacactgggcagaaacaagtccttccatggtagtttgccatgacgtttgtgtgccagttcatagccacggatttctcctggaacagcaatggaaagtcctcctggagcagagaagaaawgtataagtcttcagtagcaagaaaaaaaagaaaacaaaaagyaatcattgcagtagtaagcagaggagggcttatcyattggccttggttttaagcaggggttgtscatactattactggctcagcccatgcatacaatgctaacaggattgttgacacctctatcctcttgctggtaactcaagtgtttgggtcatttttctcatttttctgtatcacagcaaagctactcagaacacagaaggcatcatacctgcctgcagctcccagtccttcagagttgaacacactacagtaagagggcacagactatatatatgtggcagcatccatacataaacacaccaacatttctttcatcacattgcagcagcaat

SEQ ID NO: 30731 - DNA, 600 bp, Chicken  19866894252443_7
ttcaattgactgttgctttgatttcatggctgatgcaaggcctttcccaatagggaatccttctcttgccaacttgacactgggcagaaacaagtccttccatggtagtttgccatgacgtttgtgtgccagttcatagccacggatttctcctggaacagcaatggaaagtcctcctggagcagagaagaaawgtataagtcttcagtagcaagaaaaaaaagaaaacaaaaagyaatcattgcagtagtaagcagaggagggcttatcyattggccttggttttaagcaggggttgtscatactattactggctcagcccatgcatacaatgctaacaggattgttgacacctctatcctcttgctggtaactcaagtgtttgggtcatttttctcatttttctgtatcacagcaaagctactcagaacacagaaggcatcatacctgcctgcagctcccagtccttcagagttgaacacactacagtaagagggcacagactatatatatgtggcagcatccatacataaacacaccaacatttctttcatcacattgcagcagcaattgcaatagactgactacactgcacaatga

SEQ ID NO: 30732 - DNA, 599 bp, Chicken  19866894252449_1
  misc_feature (1)..(49): n is any nucleotide
nnnnnnnnnnnnnnnnnnnnnnnnnnnnnnnnnnnnnnnnnnnnnnnnntgagctttaaagctattgcaattatggatgctgagttagagataacagaatataccttctttaagagggaattgttcacagtctttcattttaatagtcactcttcttaatgtttaaagatttttcatcctatgaatgcaaaaaatctttcagataaattagaaataggagcataaatgcgctatgactgctacatacttcgttacatagtagtcacaatgaagacatgttccattcctgaaacttgactrcatcctaagctggtatcccataaaggggaaaagacaaaacatagggataaaatgtgggaggactaactgtataatacatgtgccaaatgtgtttaccaaaccagtgaaaaagaatatgataaactgtgaaggttaattattaatgagaaataaacattaaaaagggggaagaaatgaaagaaaggagaactctggcatttgcaatgattgaatgtagcatgcttaggggactatcaccacacatctgttttgtgacaagtacagtaaaattagttatggatcatcaaagagattcctag

SEQ ID NO: 30733 - DNA, 582 bp, Chicken  19866894252458_1
  misc_feature (1)..(24): n is any nucleotide
nnnnnnnnnnnnnnnnnnnnnnnnaatgtcagtttggtcctgttcctgttacctgcaaagatttcccaatacctatgccccacctgtactgatgaggccagaactggcctttacagcagtttatgcataccaggggctcctaaccatcaacagaagggagggatactgctcactgtgcttctcacatccatcctcactttccctactggacctcccaacgccacacccgtgccaagcattcacaaacactttctacattttggcacagcaaagctactgtgaaacagcagccttcaataygctttttgcaagtctccaactcctatctggacaaggagaccaacaaacccaagcagcaaagaagtagcagtatatatcacaggggttgtttacaagccagcacccttcagccaccagggagcacaaaggatgcttgcatcttctgtctaaagggattctgatgaatggaagacaggtaggtaatgcagagatgggtaaatatcaagagaaccaacactcgtctcttgacagaacaaattcacatttgtgggtgtggcagcaaacagcgtatgttctagtcga

SEQ ID NO: 30734 - DNA, 600 bp, Chicken  19866894252459_1
caactgccagagcacgcacagtgatgggctccacccagcctgcactgcccacatagtgctgcttggacaggggcagcaggctcctcctgccacgtggagcacagcgagggacaagcactgcaggatgcaggtttgtgataatccttcctccccaccctcctccaacctcaagcataccttgccttctgactgctgaagctctgagtcaggacttcaggtttgactcgcactggatgatggaatggactagcatttacaggctggttttgatcaaagtgaatcaacgctgcacatcccaaytataattccgcagctgagatcacctcactctgtgctgatgtctctctggatgactgtttacatttaacaaacattttacagaggacagacaagactgtctgggactccttcccagtytcagtgactttccaaacaaatcttctctgtctcattctatctttttgcctggaaggaaatcccctccatagctacgcaaatatcaccttttcccttaaattgagcaccttcctcctcttgcatttaaaagggaaaaggcaggaactctcactccaaattaatacagtgaggcttaagcaaagc

SEQ ID NO: 30735 - DNA, 600 bp, Chicken  19866894252459_2
ctgcaggatgcaggtttgtgataatccttcctccccaccctcctccaacctcaagcataccttgccttctgactgctgaagctctgagtcaggacttcaggtttgactcgcactggatgatggaatggactagcatttacaggctggttttgatcaaagtgaatcaacgctgcacatcccaaytataattccgcagctgagatcacctcactctgtgctgatgtctctctggatgactgtttacatttaacaaacattttacagaggacagacaagactgtctgggactccttcccagtytcagtgactttccaaacaaatcttctctgtctcattctatctttttgcctggaaggaaatcccctccatagctacgcaaatatcaccttttcccttaaattgagcaccttcctcctcttgcatttaaaagggaaaaggcaggaactctcactccaaattaatacagtgaggcttaagcaaagcacgtgtgctaatgcgtttaaaacacgagatgagaaacgactcctgaacaaagtcattttccaccactacagccaccacatcacataattcttcctataaaataggctgcactatgtc

SEQ ID NO: 30736 - DNA, 599 bp, Chicken  19866894252465_1
  misc_feature (1)..(104): n is any nucleotide
nnnnnnnnnnnnnnnnnnnnnnnnnnnnnnnnnnnnnnnnnnnnnnnnnnnnnnnnnnnnnnnnnnnnnnnnnnnnnnnnnnnnnnnnnnnnnnnnnnnnnnnnatctcccctcttttagttgaaaccatttcttcttttcctgtcgcaacagacctggctaaagtgtctgtccctttctttcttacagcacccctgtataaatcacatctcattttgcagcatagtgcagaggggctgttctactggtaggaatgtcctaacctcaacacttcaaactgttgcagaagaaagggtttayggttctgaggttgagccccatgtagactagttggctgcattttgggaacaggcttctcttgtggtgggcctgcagaagtccttgtcatgaccgtgggttttatccatagttttagtcttgggygcctctaaaatagtaataccagtagctaaacagcacgttcatatgaagarcatgaggatgagctgtgccaygaacacctcctgcagaggagttctgcatttgcccatcagaaagataactgttggtgtcactgatctctctttccaaggctcttccaattccaaacgaagaccgga

SEQ ID NO: 30737 - DNA, 583 bp, Chicken  19866894252465_2
aaaccatttcttcttttcctgtcgcaacagacctggctaaagtgtctgtccctttctttcttacagcacccctgtataaatcacatctcattttgcagcatagtgcagaggggctgttctactggtaggaatgtcctaacctcaacacttcaaactgttgcagaagaaagggtttayggttctgaggttgagccccatgtagactagttggctgcattttgggaacaggcttctcttgtggtgggcctgcagaagtccttgtcatgaccgtgggttttatccatagttttagtcttgggygcctctaaaatagtaataccagtagctaaacagcacgttcatatgaagarcatgaggatgagctgtgccaygaacacctcctgcagaggagttctgcatttgcccatcagaaagataactgttggtgtcactgatctctctttccaaggctcttccaattccaaacgaagaccggattaaacatctcttggggcagaatgcttggacttcccagaagaatgagctggcctgcttctacccacgcctggcctccaaatcagagacaggggaagatcggcttaat

SEQ ID NO: 30738 - DNA, 533 bp, Chicken  19866894252465_3
cctttctttcttacagcacccctgtataaatcacatctcattttgcagcatagtgcagaggggctgttctactggtaggaatgtcctaacctcaacacttcaaactgttgcagaagaaagggtttayggttctgaggttgagccccatgtagactagttggctgcattttgggaacaggcttctcttgtggtgggcctgcagaagtccttgtcatgaccgtgggttttatccatagttttagtcttgggygcctctaaaatagtaataccagtagctaaacagcacgttcatatgaagarcatgaggatgagctgtgccaygaacacctcctgcagaggagttctgcatttgcccatcagaaagataactgttggtgtcactgatctctctttccaaggctcttccaattccaaacgaagaccggattaaacatctcttggggcagaatgcttggacttcccagaagaatgagctggcctgcttctacccacgcctggcctccaaatcagagacaggggaagatcggcttaat

SEQ ID NO: 30739 - DNA, 512 bp, Chicken  19866894252465_4
ctgtataaatcacatctcattttgcagcatagtgcagaggggctgttctactggtaggaatgtcctaacctcaacacttcaaactgttgcagaagaaagggtttayggttctgaggttgagccccatgtagactagttggctgcattttgggaacaggcttctcttgtggtgggcctgcagaagtccttgtcatgaccgtgggttttatccatagttttagtcttgggygcctctaaaatagtaataccagtagctaaacagcacgttcatatgaagarcatgaggatgagctgtgccaygaacacctcctgcagaggagttctgcatttgcccatcagaaagataactgttggtgtcactgatctctctttccaaggctcttccaattccaaacgaagaccggattaaacatctcttggggcagaatgcttggacttcccagaagaatgagctggcctgcttctacccacgcctggcctccaaatcagagacaggggaagatcggcttaat

SEQ ID NO: 30740 - DNA, 600 bp, Chicken  19866894252472_1
aaatataatgtcaaaatcatctagttctgtggaaagatatggtctcatagtctgcattccataagaaattttgcagctgaattttacctctgctgttgctgtagtgcactacagaataaatggcaactctaaatctatagctatgaatctattaggaatctaaagaaaagaaagctactcaaataaaagaaaaaacattcttgacagctaaaacttttcaaggaggaaccagaaattgagcaattaagtagtacataaacaaacaaacaaacaaaaaactgatgaaaatgtagtgttcgraaatctgcattttaagtcaaagaaattctgatatatattcagacaagcaaatgaacatgaagtattttcaaagtacaaagaaaatgagacaatgtaaatgtaacttaagaaataatatctttctcatgatctcttcaaatagcatttatctcattttctcattagtttctacaaaaaatatttagttcagtgcctctgctgaaccatttaactctttcagcatgttagcagaacacctaagcaatgtagcttagatatgaatataactgatgtgaaatccacacatttataatcatttac

SEQ ID NO: 30741 - DNA, 600 bp, Chicken  19866894252476_1
cacaacttgatgtgttctccagtctcaacacgcacagcttttatggcgttttcaaggggaatttcttccttttaatccccttcttcatccagatgctcctgccaccccctaagagcccctgcagctgcctgctgccttcccagctccttgcccaaggagctgagctctttgggaagctgtttacttctcacgttacacttactggcagcaggcagcccataaacgctccttttatcgtttttatgccatttactgggaaattattcacggtgttttatccatttgtgggctaagccactygggggacggcgacaggaggttgatcccaagcatggtgccatggggcaggaagctcccagccctgccacagcctccctggggcggcagctgagcgtgaaatagggccacgagctgcaagaggccccagcatccaacggtgagctgcccaaagtgggtggctcctctctgtcccgaaatcacagcctggggacaggtaccttcacctgccagctgcacaaggctgcgatgctcagctgtgccctatctacaggccagggcagggcagggctcacctccagcttcccgtttttgctcagaagg

SEQ ID NO: 30742 - DNA, 600 bp, Chicken  19866894252481_1
gtcaattttggaacaacactgccctctgccagaatccagagtaaagaggaaaaaatggatataagatctcttctacctgtaatttgaaagggatgtgatgccattgattcccttgagttgggctagggctgtactgttctatctgaataaaaacgacttaggtgaaaattaacaatcaatactggaaagagtaagtgcaacaacaagaaccatctgatactgaaaagaaagaaatgcatgaaaaactgtgatgatgtagaaaaatggacaaaaaaagcactaagggtgctacagcatttwctgacatgagaaggtgaccagaagtgaggatagagctttccttatgctagtctgacatgcacataagatgttcattagcttacatttatttaaaaggctttcattctgaataaatagacttacraaaccaaacaggtcagtgattaggaatggataggtcacactaagattatatcatgaataaattgcttcagtgaacttgctgcaagctaattatgaacacatggaaaatttccatkgattagttgatgaatctaattcttaaatttggttttctttgaataaatctgcaactttctg

SEQ ID NO: 30743 - DNA, 600 bp, Chicken  19866894252481_2
agggctgtactgttctatctgaataaaaacgacttaggtgaaaattaacaatcaatactggaaagagtaagtgcaacaacaagaaccatctgatactgaaaagaaagaaatgcatgaaaaactgtgatgatgtagaaaaatggacaaaaaaagcactaagggtgctacagcatttwctgacatgagaaggtgaccagaagtgaggatagagctttccttatgctagtctgacatgcacataagatgttcattagcttacatttatttaaaaggctttcattctgaataaatagacttacraaaccaaacaggtcagtgattaggaatggataggtcacactaagattatatcatgaataaattgcttcagtgaacttgctgcaagctaattatgaacacatggaaaatttccatkgattagttgatgaatctaattcttaaatttggttttctttgaataaatctgcaactttctgagaagagttctctccytcttcctccagatcagcaaaggcagcatcttgcaaactctacaaggtatatgcagggcaaccaaataaggatgagattttttaagcaaacgttctattactcagtctt

SEQ ID NO: 30744 - DNA, 600 bp, Chicken  19866894252481_3
gaaaaactgtgatgatgtagaaaaatggacaaaaaaagcactaagggtgctacagcatttwctgacatgagaaggtgaccagaagtgaggatagagctttccttatgctagtctgacatgcacataagatgttcattagcttacatttatttaaaaggctttcattctgaataaatagacttacraaaccaaacaggtcagtgattaggaatggataggtcacactaagattatatcatgaataaattgcttcagtgaacttgctgcaagctaattatgaacacatggaaaatttccatkgattagttgatgaatctaattcttaaatttggttttctttgaataaatctgcaactttctgagaagagttctctccytcttcctccagatcagcaaaggcagcatcttgcaaactctacaaggtatatgcagggcaaccaaataaggatgagattttttaagcaaacgttctattactcagtcttgaataaaacactgaagcaggaacttagcagtatcagtcactggcaccatgtgatacaggatgaaatacctattgcatggaagtatttttcctagctgtaaagctgttgaatcaat

SEQ ID NO: 30745 - DNA, 600 bp, Chicken  19866894252481_4
accagaagtgaggatagagctttccttatgctagtctgacatgcacataagatgttcattagcttacatttatttaaaaggctttcattctgaataaatagacttacraaaccaaacaggtcagtgattaggaatggataggtcacactaagattatatcatgaataaattgcttcagtgaacttgctgcaagctaattatgaacacatggaaaatttccatkgattagttgatgaatctaattcttaaatttggttttctttgaataaatctgcaactttctgagaagagttctctccytcttcctccagatcagcaaaggcagcatcttgcaaactctacaaggtatatgcagggcaaccaaataaggatgagattttttaagcaaacgttctattactcagtcttgaataaaacactgaagcaggaacttagcagtatcagtcactggcaccatgtgatacaggatgaaatacctattgcatggaagtatttttcctagctgtaaagctgttgaatcaatgttatgcatcttagaaagaagtcaaggaacaaacagggatctccgtgagtctggcctggtgatcctcatgttcagcc

SEQ ID NO: 30746 - DNA, 600 bp, Chicken  19866894252482_1
aaagaagaaatgtcattaatgtctcaacatctggacagtagtttggaagggaagccaaccatccacatcacagatgcagcactttacgagcctcttcctttgtcctctcctctatatgaattgagcgcagaaatgtgaactgcaggagggaaaatacaagacttatggcaattttttccttctctaagaattttgttgcagcctgcctcccttcactggccgagctggattaaatatccatgataggaagtcaggaatgtagatttattcagacttgttaaaacagtggcacatgtcccrgggaagacaaatagccttttgtgagataatttgctaacgcagttccaccctaacatgtatctctcctgttatcgaatgagtaatatggacataaccctgtgcacttttatcagacgtgtatgtatgtcagcctgatttgtgtctcacttggttgggtgaagaagccaacagtcttgtgcccaggcaaaacttgttgcactgagatcaaaatctgctgtatatttttaacttgctgatcatgcctgtttacagtaagtggcttcagttcagatgagcatttgtagtaaatctgcttttttt

SEQ ID NO: 30747 - DNA, 599 bp, Chicken  19866894252485_1
  misc_feature (1)..(60): n is any nucleotide
nnnnnnnnnnnnnnnnnnnnnnnnnnnnnnnnnnnnnnnnnnnnnnnnnnnnnnnnnnnnccttggaccctctgttaatagttacatcttgtgtttgtttagccataataacaagatgaaaaaagatattgaatatctatttttatcccagcatgcctcctcagtatgatttgaaagtcaaatattttgacatttctgaaactctaaaatacctattgttgctaagttattgcaagttatctcattgcttcattccatataactagttatttgtacaattgcatgtaagcatctaaatcyagattcttaaataacaagattatatgcatgccagtgaaatgctgtatgtatcctgctattgtgccatgtaaccctttgggcattttcctttagattcatagtcagattttattgtagaggtgaattgcatatatgattcaaatgggctccaggcagatgctcagaattttcctgaaaacatataaagccttcagggaaacatcttcccttggtgatcataaaagcaccacttgcatgtttcaatacrgaacatccttagaactttgttcacaagcacagagagaattgagaagcaaagc

SEQ ID NO: 30748 - DNA, 492 bp, Chicken  19866894252485_2
cttcattccatataactagttatttgtacaattgcatgtaagcatctaaatcyagattcttaaataacaagattatatgcatgccagtgaaatgctgtatgtatcctgctattgtgccatgtaaccctttgggcattttcctttagattcatagtcagattttattgtagaggtgaattgcatatatgattcaaatgggctccaggcagatgctcagaattttcctgaaaacatataaagccttcagggaaacatcttcccttggtgatcataaaagcaccacttgcatgtttcaatacrgaacatccttagaactttgttcacaagcacagagagaattgagaagcaaagctgagtgtttctggtgccctaaggatttttgagataataaccataaggaaaaggttcttacgcacatagcattgtgttacaaatgattgaagataccttacctttcttaaattcttggctgtgctctgatctgggtttctt

SEQ ID NO: 30749 - DNA, 599 bp, Chicken  19866894252486_1
  misc_feature (1)..(158): n is any nucleotide
nnnnnnnnnnnnnnnnnnnnnnnnnnnnnnnnnnnnnnnnnnnnnnnnnnnnnnnnnnnnnnnnnnnnnnnnnnnnnnnnnnnnnnnnnnnnnnnnnnnnnnnnnnnnnnnnnnnnnnnnnnnnnnnnnnnnnnnnnnnnnnnnnnnnnnnnnnnnnncaggctgtagatcagtgacttcatgaggaaacagtcggaggaaaagtttgtatcctctcacctgtaacacaaagtttcaaaattcagtaagccatctgtcatcatgaagtaatgaagaaaaagacccactgatgagttattwtacaaaccctgtgtaataagaacagaattaaccttaagattatggcttactaaacttactaagaattaatgaaagcatatttatttaaaacaagggacctccaaaggctgtctagtttagcttctttgctcaagcaaggtcacagagtcacaggggttggaaaggacctctggagatcacctagttcaatccccatgtaaaaacaggttccctagagtcggttacacagaaaagcatccacatgggttttgaatgtctccagaggacgagagcccacagactctctgggcagcctgttc

SEQ ID NO: 30750 - DNA, 526 bp, Chicken  19866894252486_2
cacacgttttcaagttatttaaacagcaaagaaagataccgtaaatctacatactttcagttatagaatgttgaattttggttgtggggtttttgtacctttgtaatgatgtaaagaaatttaaaagccaagtgaaaaagcacaggaggagatccactgtctcgtattatatccagcaacatattcatcatccactctaatgaaaggagagggaaaaaaaaagtgagaaggcatagagtttgatgacagttcctcatacttctaatagttgggagagaggtagtagtcatacaatatatmcaatattaaccacagcaatcttgcaatacgtttgaactctttagtttaagagattttcaagaatatacacaaaaattactgtgtaaaagatgacattcctacctaagtggcgatccartaagtgaggctgctcctggtacttgtccattataactgaaaagaaagagatatctgtgattaataattcaaattaaaggcccttaaagccattaactgggagacactc

SEQ ID NO: 30751 - DNA, 408 bp, Chicken  19866894252486_3
atttaaaagccaagtgaaaaagcacaggaggagatccactgtctcgtattatatccagcaacatattcatcatccactctaatgaaaggagagggaaaaaaaaagtgagaaggcatagagtttgatgacagttcctcatacttctaatagttgggagagaggtagtagtcatacaatatatmcaatattaaccacagcaatcttgcaatacgtttgaactctttagtttaagagattttcaagaatatacacaaaaattactgtgtaaaagatgacattcctacctaagtggcgatccartaagtgaggctgctcctggtacttgtccattataactgaaaagaaagagatatctgtgattaataattcaaattaaaggcccttaaagccattaactgggagacactc

SEQ ID NO: 30752 - DNA, 600 bp, Chicken  19866894252488_1
ctctgcagcatacactgggctgagcttgggagcaggatctgttccaacacattcaaacagaagttgggttaaaggatgtgtcagaagtctgctggttactcagagaatgcacgaagagccacagctatctttatgtgaatcagtgaagctctctgtcagctcctgggtggccatgaggagcactccaactgcagctctgcagagagaagtcaatcaagccagaaaaaataacattaactgcattatgtaatagaggtactattcaaatggggggaaaaaaaagacattttaaagagcagrgtaccaatgagayggcaatcagtgtcatctatcactgttctgggagatctggtggtgacagcagagaggcacagtactatgagccgccaggagccsagggcacagcctgcagccaaggggagagctgcaggaagggaacctccatcccgagttatctccacctgagggttaatgtggccagactagcttgggattttttttcttctctttgtaaaaatggccatttctgacaggggggacaaacctgacaggcacgtcttgtggcaaaaccttctggttgtcagtgtgttttctcttatt

SEQ ID NO: 30753 - DNA, 600 bp, Chicken  19866894252488_2
actgggctgagcttgggagcaggatctgttccaacacattcaaacagaagttgggttaaaggatgtgtcagaagtctgctggttactcagagaatgcacgaagagccacagctatctttatgtgaatcagtgaagctctctgtcagctcctgggtggccatgaggagcactccaactgcagctctgcagagagaagtcaatcaagccagaaaaaataacattaactgcattatgtaatagaggtactattcaaatggggggaaaaaaaagacattttaaagagcagrgtaccaatgagayggcaatcagtgtcatctatcactgttctgggagatctggtggtgacagcagagaggcacagtactatgagccgccaggagccsagggcacagcctgcagccaaggggagagctgcaggaagggaacctccatcccgagttatctccacctgagggttaatgtggccagactagcttgggattttttttcttctctttgtaaaaatggccatttctgacaggggggacaaacctgacaggcacgtcttgtggcaaaaccttctggttgtcagtgtgttttctcttattgcttctcatggaa

SEQ ID NO: 30754 - DNA, 600 bp, Chicken  19866894252488_3
tactcagagaatgcacgaagagccacagctatctttatgtgaatcagtgaagctctctgtcagctcctgggtggccatgaggagcactccaactgcagctctgcagagagaagtcaatcaagccagaaaaaataacattaactgcattatgtaatagaggtactattcaaatggggggaaaaaaaagacattttaaagagcagrgtaccaatgagayggcaatcagtgtcatctatcactgttctgggagatctggtggtgacagcagagaggcacagtactatgagccgccaggagccsagggcacagcctgcagccaaggggagagctgcaggaagggaacctccatcccgagttatctccacctgagggttaatgtggccagactagcttgggattttttttcttctctttgtaaaaatggccatttctgacaggggggacaaacctgacaggcacgtcttgtggcaaaaccttctggttgtcagtgtgttttctcttattgcttctcatggaattggaagatayaaaggttgctggtatgaaccagggcaaagtgatcccactggggtaatgtcctttgggaggaatcacactgaa

SEQ ID NO: 30755 - DNA, 600 bp, Chicken  19866894252488_4
tcatctatcactgttctgggagatctggtggtgacagcagagaggcacagtactatgagccgccaggagccsagggcacagcctgcagccaaggggagagctgcaggaagggaacctccatcccgagttatctccacctgagggttaatgtggccagactagcttgggattttttttcttctctttgtaaaaatggccatttctgacaggggggacaaacctgacaggcacgtcttgtggcaaaaccttctggttgtcagtgtgttttctcttattgcttctcatggaattggaagatayaaaggttgctggtatgaaccagggcaaagtgatcccactggggtaatgtcctttgggaggaatcacactgaagctgctgcagttcctctgcaaagaagccaggaaacgtctaaaattctgtgctggggattatgygctcctgtttgcaacagatattgcacatcctataatctgttcgagtggcagtaaccaaaaatactgatttttgctctttaaaatctagcaggaagaacaatttcaattgggtaagcagtgggagaccaggccattcctgtagcagcaagaactggaaatgcagct

SEQ ID NO: 30756 - DNA, 600 bp, Chicken  19866894252488_5
acctgagggttaatgtggccagactagcttgggattttttttcttctctttgtaaaaatggccatttctgacaggggggacaaacctgacaggcacgtcttgtggcaaaaccttctggttgtcagtgtgttttctcttattgcttctcatggaattggaagatayaaaggttgctggtatgaaccagggcaaagtgatcccactggggtaatgtcctttgggaggaatcacactgaagctgctgcagttcctctgcaaagaagccaggaaacgtctaaaattctgtgctggggattatgygctcctgtttgcaacagatattgcacatcctataatctgttcgagtggcagtaaccaaaaatactgatttttgctctttaaaatctagcaggaagaacaatttcaattgggtaagcagtgggagaccaggccattcctgtagcagcaagaactggaaatgcagctctgcaaagctccaagccaccctggcagcgctacgtcttccataggacggttggaatgaaagggaggagaggggccattcagttcctaccccaggcagggacaccccactagctcaggacacccaggccacccctg

SEQ ID NO: 30757 - DNA, 600 bp, Chicken  19866894252488_6
aactcgacggatatggtataaccagttaacaaaaccagcatggaacgtgtcggccaaagaataacaacaaaaaaagatgtttttcatattaaattagattaaattttatatgaaaacaagggtaagggatcgaggcttcgtttcctttaattttgagaacaccatcagaaaacaacgctccatccacagggttctacaaaagcgccgctgcgttcagcccatctttcaactgcttcaatatgagaatgccaacttttccaaccgctttcaaaggaaagagataaataccgcagagttccyaaacactggaactgaaggacagaagcatggggtcggtacatttttgcaactctttctaagatacgttttttacatacgtactctcaaaataacacaatgggattccacttcgtttcagacatttggaaagcagtgtcatactttatttaaaataaacccatgtaaaaacaaagcgtaaatgaaaatggtacctgaaaaataaattatttgatataaaacaaaccaataacttaaaaacacactaaatatacaaaatgtttaaccgtgtactgtacagaacggaaaacaatcggtaaaacc

SEQ ID NO: 30758 - DNA, 600 bp, Chicken  19866894252493_1
tagctgtagaacaaaatctttgtcctcagattaatccccaaagactcactgataagtggttccttttttttttccaggtagcggtggggttgatttgagagttggttgtaatggatggaatgagaatgagtgagtggacattctgttctgtctcgtgatagaaaactggtgcctcttaccaagagagaaagagaactgtccttgaggtgatcatatcacgctttgctatttttgaaagttacatgcagcttttcaggaaatgtcatttcagaattgaatgttttgatgaggaagaagatsaggaagttttttgagagcctggagtaaggtgtgaggttacagagctttcttagccatatggctgcagagcttagaagagaagtatgtgtgtttttgtacaggtcagccttggtgggggaagtcacccagctgtgcccaaagtcaccgagcacctgctgtcccagccagaaccagtaatacccaacacagccttgctggtgaagaaccctctggcatccacccatgtcttcaaacaagcctgtcacatctgctaccctaaaacaggtgatgtgtttcctctgtcacccacagcattggcca

SEQ ID NO: 30759 - DNA, 449 bp, Chicken  19866894252501_1
catgaaaatgcccctgcaataatccgtgaggttttactggaacgtggttggactgaatttgaccaaaaggagcaagatgacacagactggaacttgtactggcggaactcaccttttcctatgacagaccaccacagtattaaaccatggcagagactcaaccactacccagaagctgtcaggatcaccagaaaagactatttggcaaggcatctgaaacgtatgaaaggagcatatggatcagcactgtatgaatttagtccagtggcattcatcatgcccaacgactatgtcaaattyatagcagaatacagcaaagagagacagtcagtaggcagacctagttactggatttgcaaacctgtgcacctctcccgcggaaggggcatactcattttccaagacgttaaagatttggtgtatcactgtacagtcattgtgcagaagta

SEQ ID NO: 30760 - DNA, 599 bp, Chicken  19866894252502_1
  misc_feature (1)..(203): n is any nucleotide
nnnnnnnnnnnnnnnnnnnnnnnnnnnnnnnnnnnnnnnnnnnnnnnnnnnnnnnnnnnnnnnnnnnnnnnnnnnnnnnnnnnnnnnnnnnnnnnnnnnnnnnnnnnnnnnnnnnnnnnnnnnnnnnnnnnnnnnnnnnnnnnnnnnnnnnnnnnnnnnnnnnnnnnnnnnnnnnnnnnnnnnnnnnnnnnnnnnnnnnnnnntgttctgaggactggcattcaataatactgaatccttcacaaagcacaagactcagttttggggatgtatgtggctcctttcatcagctatatctcrcccactgtctttatgcctaaaatattgttagatctcatatattttcactagagagattgttttggctgcagtcttgttgcaggggccagatgtttccatctccttctctaaatcggcatgtgagcagtgagacttctgtgatgttcttggctttgtctgtagtctaattgaataactagtatctccctgaaacatttgcttttaaaagcatttggctcagtcagagctgtctctgttatgaagcactcatttgatcagtgctgctgttctatggcaggaccagtggctgtgctccccag

SEQ ID NO: 30761 - DNA, 600 bp, Chicken  19866894252509_1
aacagaagaggaccagggaggacagcctggggttggtcatgtctagcacttgcctcaaacccattagagctctaaagctgtaatagagctaaaaatctcatacttgcaagcattgcttttcttttcatttccatgcacagtaaaacacataagaattatagcccataatagcaagcgtacttttctctcaaacagttaataaataaacccacaaagagtcacctgaaagcccttccagggctgcagcatgtttgtgctgccaaagccatgtgagcagggctgttccctgggcaagggagycaggaggtgacagcataggagcaccctcagtgatcaaacagagccccatatcatgggcaggaagtcctaatagcacaccgtctccaaggtcagccaaggaaagccagggcaccagsccgggaatacatctgaggcaggttcacctctaacatagcacaggcaacagctgagggctgcaggatggagtttaaatggagtgcctttggagggacccaggtgaggcttttcagggtaattaaggctcattagtgcatcctctagccctggcatacacagtttttgttactggtgatccatttg

SEQ ID NO: 30762 - DNA, 600 bp, Chicken  19866894252509_2
ttttcttttcatttccatgcacagtaaaacacataagaattatagcccataatagcaagcgtacttttctctcaaacagttaataaataaacccacaaagagtcacctgaaagcccttccagggctgcagcatgtttgtgctgccaaagccatgtgagcagggctgttccctgggcaagggagycaggaggtgacagcataggagcaccctcagtgatcaaacagagccccatatcatgggcaggaagtcctaatagcacaccgtctccaaggtcagccaaggaaagccagggcaccagsccgggaatacatctgaggcaggttcacctctaacatagcacaggcaacagctgagggctgcaggatggagtttaaatggagtgcctttggagggacccaggtgaggcttttcagggtaattaaggctcattagtgcatcctctagccctggcatacacagtttttgttactggtgatccatttggaataacaaaggtcatttgagtttcagatgctaaacagagtttgcaaggcttatcaatagcaagtgcatttcttaatccaaaaactaatcagaatttgctctggaacagcattaat

SEQ ID NO: 30763 - DNA, 600 bp, Chicken  19866894252515_1
agagattaaacttctcttttcctttataagttaaacaggttcgtgataaagctttttcttttacctttttgttctggtaacgcaggaggtatggaggagtgagggctgtcactgatggcattttaggcataggtttgtcagtgatagagtaccacaagccttggtcctacactgtctcagtctagtggtaccacaagtcattattctttaggaaacccataacagcctcctgtcaccaaccttcagactgtgaaagcattgttttccaccagagaatatctctattcctgttctcaaaaygtaatgacttctgcttagatattccacaaggaaaagaacacatcaaattattattgtgttttatgcactgaccttagcagcagtgkctttaacaggaaaaatattgctgtctagtaaatattctttcctacagaaatgctttattctgcatagcaggctcaaaccttcccctgatcagataagggagaggagaagctagcagcaggagagctgcaattcagctactttmcagatttcctaggccaaatctccctttgcttcacatttttaaacgctaaataattattattcatactaact

SEQ ID NO: 30764 - DNA, 568 bp, Chicken  19866894252515_2
aggtatggaggagtgagggctgtcactgatggcattttaggcataggtttgtcagtgatagagtaccacaagccttggtcctacactgtctcagtctagtggtaccacaagtcattattctttaggaaacccataacagcctcctgtcaccaaccttcagactgtgaaagcattgttttccaccagagaatatctctattcctgttctcaaaaygtaatgacttctgcttagatattccacaaggaaaagaacacatcaaattattattgtgttttatgcactgaccttagcagcagtgkctttaacaggaaaaatattgctgtctagtaaatattctttcctacagaaatgctttattctgcatagcaggctcaaaccttcccctgatcagataagggagaggagaagctagcagcaggagagctgcaattcagctactttmcagatttcctaggccaaatctccctttgcttcacatttttaaacgctaaataattattattcatactaactggaaactccttattcttcaggaattctgacattttcatcaaaatgaaaagccta

SEQ ID NO: 30765 - DNA, 425 bp, Chicken  19866894252515_3
ctgtcaccaaccttcagactgtgaaagcattgttttccaccagagaatatctctattcctgttctcaaaaygtaatgacttctgcttagatattccacaaggaaaagaacacatcaaattattattgtgttttatgcactgaccttagcagcagtgkctttaacaggaaaaatattgctgtctagtaaatattctttcctacagaaatgctttattctgcatagcaggctcaaaccttcccctgatcagataagggagaggagaagctagcagcaggagagctgcaattcagctactttmcagatttcctaggccaaatctccctttgcttcacatttttaaacgctaaataattattattcatactaactggaaactccttattcttcaggaattctgacattttcatcaaaatgaaaagccta

SEQ ID NO: 30766 - DNA, 600 bp, Chicken  19866894252517_1
aaaatctcacacaaacaagtagttattgtcatttatagtggtgctcattctagaatttctttcagtggataactatttggctgaaaaaatcctacaacaatgaggaaatatagcttttgaagacattttctcctggacacagtctggatgttttgtatttgttccgaagtttcaatgcaaggcagtaacatgaaaaaacaaaaccaaaagcagcatctgcatgtaaaatcagactgactttgtggaatataaacaatactaaccttacactcttgctgtaggcagagatttaaaatagtwagtgcctccatgtgttttgcaagaccagaaatatttttgtgaagtataggctgtaaaagaagaaaacagcacacaagaataattagtgtttgaaaaaaattcttactgatagctgaaaataaaacaagaactgctgtatacactgtttgaacattcatagtaaagcataccaaactcctaagctcagcccttcgttccttgatatttaataaatgattcattgttatgattgataaaggtcacagcctacccatctctaaaattgcagccttcacttagtctgtgaagctttgtaacagt

SEQ ID NO: 30767 - DNA, 599 bp, Chicken  19866894252519_1
  misc_feature (1)..(210): n is any nucleotide
nnnnnnnnnnnnnnnnnnnnnnnnnnnnnnnnnnnnnnnnnnnnnnnnnnnnnnnnnnnnnnnnnnnnnnnnnnnnnnnnnnnnnnnnnnnnnnnnnnnnnnnnnnnnnnnnnnnnnnnnnnnnnnnnnnnnnnnnnnnnnnnnnnnnnnnnnnnnnnnnnnnnnnnnnnnnnnnnnnnnnnnnnnnnnnnnnnnnnnnnnnnnnnnnnnagggactcgagaatcccatacctgccttcacgcttaaatgcaggtgtctcccaccaggctgatagccccatgctattcagtatggagagwcctggatgcagccccatcccttygcatctaagcatttcagttcaaatcagcattattttgatgaaaaaattctggtctggaagcatcatttcctccatgccatacctttctgctgctgattgcagcctctcagcaagctcaggatgcagcactgcagcccccatccatgcggcagcgaggagaacaacacracaagtctgatttcctttcctgctgctggtaaatagtgtttgctgtgttcttggtgcacaggcccgtcagctgatcctgcagaatggcttaacactaagtgacctgga

SEQ ID NO: 30768 - DNA, 599 bp, Chicken  19866894252519_2
  misc_feature (1)..(187): n is any nucleotide
nnnnnnnnnnnnnnnnnnnnnnnnnnnnnnnnnnnnnnnnnnnnnnnnnnnnnnnnnnnnnnnnnnnnnnnnnnnnnnnnnnnnnnnnnnnnnnnnnnnnnnnnnnnnnnnnnnnnnnnnnnnnnnnnnnnnnnnnnnnnnnnnnnnnnnnnnnnnnnnnnnnnnnnnnnnnnnnnnnnnnnnnnnnagggactcgagaatcccatacctgccttcacgcttaaatgcaggtgtctcccaccaggctgatagccccatgctattcagtatggagagwcctggatgcagccccatcccttygcatctaagcatttcagttcaaatcagcattattttgatgaaaaaattctggtctggaagcatcatttcctccatgccatacctttctgctgctgattgcagcctctcagcaagctcaggatgcagcactgcagcccccatccatgcggcagcgaggagaacaacacracaagtctgatttcctttcctgctgctggtaaatagtgtttgctgtgttcttggtgcacaggcccgtcagctgatcctgcagaatggcttaacactaagtgacctggaccgacatccagaggtaagtgaga

SEQ ID NO: 30769 - DNA, 599 bp, Chicken  19866894252519_3
  misc_feature (1)..(19): n is any nucleotide
nnnnnnnnnnnnnnnnnnnagggactcgagaatcccatacctgccttcacgcttaaatgcaggtgtctcccaccaggctgatagccccatgctattcagtatggagagwcctggatgcagccccatcccttygcatctaagcatttcagttcaaatcagcattattttgatgaaaaaattctggtctggaagcatcatttcctccatgccatacctttctgctgctgattgcagcctctcagcaagctcaggatgcagcactgcagcccccatccatgcggcagcgaggagaacaacacracaagtctgatttcctttcctgctgctggtaaatagtgtttgctgtgttcttggtgcacaggcccgtcagctgatcctgcagaatggcttaacactaagtgacctggaccgacatccagaggtaagtgagactgcaggattgagaccttactgacctccctctaacccggtccttcataaagctccaggctcatctgtccttgctgaggataaaaactgcagaatgtgagagaactggctttgtttcttttttccctgaatgtagtttgctcaaagctgtggtctggctgaaagactgg

SEQ ID NO: 30770 - DNA, 600 bp, Chicken  19866894252524_1
aagtaaatatactgtgagagctactagtgctgactgaagagcagagcatccttggaaaatcttaaaagcctttcttagccctctatgtgtaacgttttcaagctcaccgagccgttatcaaataatgtattcagtttcaaattgttctcttagatgaaagtaaccacttgtttgtccagctctgcttttctcatgggcattgatatttgcttagcaggttcactaactggatgcatcatttttcttatttcatttgcagtgagcgtgaagatggaagatcttacaattattttgtaaacygtcagcttctctgcatcccaacttccttctggagaaggcagagggggcttagcattttgcagggccagatctgcacacaagtggaataatttagcatgaaaaatacaactgtagtcagcaaaatatttccctctaggattagcaaatgtaacaggaaagcaaagaaagttaatgtttgccagaagggaaataagaaagctccctggtatggggctcagtggagtaatcaatcttgatcttcaagctcagcatgcccagagccaaacaccctattccttccccccagtaggaatttattag

SEQ ID NO: 30771 - DNA, 600 bp, Chicken  19866894252547_1
gttcaaggaatgtcagcagcagttttaccccaatttcatagaattattatagctataaaaaagatcgctgagttgtaacttgacagtcaagatctaaatgtggcagattttgtttttgaattttgcttcaagctgtttgaacagatttgactaatgggagcttaaaaataatatgtagatttttgttgtcatccttattattcatttctttatctatttctttatctgtctatctgctctttgaaattcaaagactgctcatatgttccaaatgagcagatctccacatttgaaagatayacyttttcatatttcttcttttcaaaactgcacagggatttaggaagagaatggcagaacaagggaaattattttttcttatgcataaggaatgctacgggtttttttctttcttcttgtgttcatagccctttgctggcttcctatattgcatggctaacctacttgtcagtacaatcattttgtgtcattattgaacatgttagcagtgtaaattcaactcatagatcacatattctrcttgtatgttcctgtgctgatgaacccaaagatcccgctgttgaggatgatccmtctcag

SEQ ID NO: 30772 - DNA, 600 bp, Chicken  19866894252547_2
caaggaatgtcagcagcagttttaccccaatttcatagaattattatagctataaaaaagatcgctgagttgtaacttgacagtcaagatctaaatgtggcagattttgtttttgaattttgcttcaagctgtttgaacagatttgactaatgggagcttaaaaataatatgtagatttttgttgtcatccttattattcatttctttatctatttctttatctgtctatctgctctttgaaattcaaagactgctcatatgttccaaatgagcagatctccacatttgaaagatayacyttttcatatttcttcttttcaaaactgcacagggatttaggaagagaatggcagaacaagggaaattattttttcttatgcataaggaatgctacgggtttttttctttcttcttgtgttcatagccctttgctggcttcctatattgcatggctaacctacttgtcagtacaatcattttgtgtcattattgaacatgttagcagtgtaaattcaactcatagatcacatattctrcttgtatgttcctgtgctgatgaacccaaagatcccgctgttgaggatgatccmtctcagagt

SEQ ID NO: 30773 - DNA, 600 bp, Chicken  19866894252547_3
ttgaaattcaaagactgctcatatgttccaaatgagcagatctccacatttgaaagatayacyttttcatatttcttcttttcaaaactgcacagggatttaggaagagaatggcagaacaagggaaattattttttcttatgcataaggaatgctacgggtttttttctttcttcttgtgttcatagccctttgctggcttcctatattgcatggctaacctacttgtcagtacaatcattttgtgtcattattgaacatgttagcagtgtaaattcaactcatagatcacatattctrcttgtatgttcctgtgctgatgaacccaaagatcccgctgttgaggatgatccmtctcagagtagaggcacctcagaggcccaaggtactttcaacttcagtaatacttgaagattcccagcagcattttcaatgaattaagttcagacttaaaaggcaataatcttttatcaaggcctacctgtgaatacataacgatgatgatgatcttcttttaattatcatggcctgaacagagctctacaattaacctggctattctgaactcagtcaggtactttgacattgactttagctgat

SEQ ID NO: 30774 - DNA, 600 bp, Chicken  19866894252547_4
agatayacyttttcatatttcttcttttcaaaactgcacagggatttaggaagagaatggcagaacaagggaaattattttttcttatgcataaggaatgctacgggtttttttctttcttcttgtgttcatagccctttgctggcttcctatattgcatggctaacctacttgtcagtacaatcattttgtgtcattattgaacatgttagcagtgtaaattcaactcatagatcacatattctrcttgtatgttcctgtgctgatgaacccaaagatcccgctgttgaggatgatccmtctcagagtagaggcacctcagaggcccaaggtactttcaacttcagtaatacttgaagattcccagcagcattttcaatgaattaagttcagacttaaaaggcaataatcttttatcaaggcctacctgtgaatacataacgatgatgatgatcttcttttaattatcatggcctgaacagagctctacaattaacctggctattctgaactcagtcaggtactttgacattgactttagctgattttcactratgtcatataaaaaggtataatcatttcaattaacattttagctaa

SEQ ID NO: 30775 - DNA, 541 bp, Chicken  19866894252547_5
ttcctgtgctgatgaacccaaagatcccgctgttgaggatgatccmtctcagagtagaggcacctcagaggcccaaggtactttcaacttcagtaatacttgaagattcccagcagcattttcaatgaattaagttcagacttaaaaggcaataatcttttatcaaggcctacctgtgaatacataacgatgatgatgatcttcttttaattatcatggcctgaacagagctctacaattaacctggctattctgaactcagtcaggtactttgacattgactttagctgattttcactratgtcatataaaaaggtataatcatttcaattaacattttagctaaaaatacgagagaagaaaatataccaaaattatccataaaatgatatttagctatttctattcaactaatgttatgtgttttatttaatttcaaggatttattttcagtccagaacaaatttaagctatgataggaaagcataaccttacacgttaatacttcaagtgacaataccactgcatagaatcacagaat

SEQ ID NO: 30776 - DNA, 599 bp, Chicken  19866894252554_1
  misc_feature (1)..(63): n is any nucleotide
nnnnnnnnnnnnnnnnnnnnnnnnnnnnnnnnnnnnnnnnnnnnnnnnnnnnnnnnnnnnnnnccttattccctctaagatggcggtgacctgtcaggaggtgctgtgttagatcaccggtgtgactttctagtttgactctgctttccactgctgtgcctgacgttgagacgagggctgtgcttttacccttacaatcactaaggttggaaaagacccctcaggtccccaaccccccaccccaccgtgcccatatccacgtccccacgtgccacatccccacggttctgagcacctccmgggatggtgacccctctgctcccygggcagctgtcccagcgccctaccagatgtgttgctccaaatgatggtttacaaatagtctcatttgtgccgtttttgtgctctctgccctcctgcgacmgactgcacgtggcatcctgctgggaacacaggggatgtttcctttagctttggctcaaagcaaagcaygaggcgttagggccaagcaatgggaatattcctgtatcagctgcatcaaaaaatgaaagcaagttctttaaaacaggaaagcccgtgtgctttttattacgtagtat

SEQ ID NO: 30777 - DNA, 599 bp, Chicken  19866894252554_2
  misc_feature (1)..(39): n is any nucleotide
nnnnnnnnnnnnnnnnnnnnnnnnnnnnnnnnnnnnnnnccttattccctctaagatggcggtgacctgtcaggaggtgctgtgttagatcaccggtgtgactttctagtttgactctgctttccactgctgtgcctgacgttgagacgagggctgtgcttttacccttacaatcactaaggttggaaaagacccctcaggtccccaaccccccaccccaccgtgcccatatccacgtccccacgtgccacatccccacggttctgagcacctccmgggatggtgacccctctgctcccygggcagctgtcccagcgccctaccagatgtgttgctccaaatgatggtttacaaatagtctcatttgtgccgtttttgtgctctctgccctcctgcgacmgactgcacgtggcatcctgctgggaacacaggggatgtttcctttagctttggctcaaagcaaagcaygaggcgttagggccaagcaatgggaatattcctgtatcagctgcatcaaaaaatgaaagcaagttctttaaaacaggaaagcccgtgtgctttttattacgtagtatktcttagtctcagatgctgatctc

SEQ ID NO: 30778 - DNA, 600 bp, Chicken  19866894252554_3
actttctagtttgactctgctttccactgctgtgcctgacgttgagacgagggctgtgcttttacccttacaatcactaaggttggaaaagacccctcaggtccccaaccccccaccccaccgtgcccatatccacgtccccacgtgccacatccccacggttctgagcacctccmgggatggtgacccctctgctcccygggcagctgtcccagcgccctaccagatgtgttgctccaaatgatggtttacaaatagtctcatttgtgccgtttttgtgctctctgccctcctgcgacmgactgcacgtggcatcctgctgggaacacaggggatgtttcctttagctttggctcaaagcaaagcaygaggcgttagggccaagcaatgggaatattcctgtatcagctgcatcaaaaaatgaaagcaagttctttaaaacaggaaagcccgtgtgctttttattacgtagtatktcttagtctcagatgctgatctcatcaggcagaggaaggattattgaggtgcgacgatgcttgtcctattaaagcagtgcagggctatctcctctatgcacttaagcagttctactatgccgtt

SEQ ID NO: 30779 - DNA, 600 bp, Chicken  19866894252554_4
tacaatcactaaggttggaaaagacccctcaggtccccaaccccccaccccaccgtgcccatatccacgtccccacgtgccacatccccacggttctgagcacctccmgggatggtgacccctctgctcccygggcagctgtcccagcgccctaccagatgtgttgctccaaatgatggtttacaaatagtctcatttgtgccgtttttgtgctctctgccctcctgcgacmgactgcacgtggcatcctgctgggaacacaggggatgtttcctttagctttggctcaaagcaaagcaygaggcgttagggccaagcaatgggaatattcctgtatcagctgcatcaaaaaatgaaagcaagttctttaaaacaggaaagcccgtgtgctttttattacgtagtatktcttagtctcagatgctgatctcatcaggcagaggaaggattattgaggtgcgacgatgcttgtcctattaaagcagtgcagggctatctcctctatgcacttaagcagttctactatgccgttctgggtctgtagctctgcaatggggttgcagtggaggcaactggggtggtgctcttcctctgtggttc

SEQ ID NO: 30780 - DNA, 600 bp, Chicken  19866894252554_5
gggatggtgacccctctgctcccygggcagctgtcccagcgccctaccagatgtgttgctccaaatgatggtttacaaatagtctcatttgtgccgtttttgtgctctctgccctcctgcgacmgactgcacgtggcatcctgctgggaacacaggggatgtttcctttagctttggctcaaagcaaagcaygaggcgttagggccaagcaatgggaatattcctgtatcagctgcatcaaaaaatgaaagcaagttctttaaaacaggaaagcccgtgtgctttttattacgtagtatktcttagtctcagatgctgatctcatcaggcagaggaaggattattgaggtgcgacgatgcttgtcctattaaagcagtgcagggctatctcctctatgcacttaagcagttctactatgccgttctgggtctgtagctctgcaatggggttgcagtggaggcaactggggtggtgctcttcctctgtggttccagcagcagtgggatggcagtggcactgacgctcagtggccgtgctggcttgctctctcccttcctacaaaccaaatcccagagccctgtatgggaggttgtgctgca

SEQ ID NO: 30781 - DNA, 600 bp, Chicken  19866894252557_1
tcttctccaaatacttatgctgcatctttcctgtactaggatgtaccaccaatgtaacatatacctcaagtattctcaaaaacaaaagagtatctttccaaagttatcatggcaaaacatattggttcctttgaaatatcaggctgctctgaagtaaaagcacttcttgtatattctccggtctaaactcccagtaaattgggaatctaaatgtgccatcagacataagagtacaatacaaacattatgcatgttatgcatcacactgaagctctgaaaggaaatattttatagcctctrtggctcttacagacctcttcaagttctctcatctacactgtatgtcacatttcacatccaaatggcaaagttggggagacgtatgacataaattgcccacaatggtactatttctaacattattcctttttcattgtcaaagtactgaatgaatattgaacaaacacatctagaatattatacaaaccaagactaaaatgtcagtggctgctggttattaacttttggccatcttagaagatttcttgaaaagctagatatccaggaattgtcagttattgtaattaatggcaaaacaat

SEQ ID NO: 30782 - DNA, 600 bp, Chicken  19866894252561_1
tcagatatctccacaagcaaagttctgtcactttaaaggagacatgcaagagaacttctcaatccagtgggattttactctcgcattgttttcaatgtggaaggtgcatcaaagtttactttgggaatcaagaagatatgtcatttcttcttactcctggaggaattttgaagcttctactgtattgttacttctaatttaaaaccagtgtgacagggaaattttggtggagcctccacttttggactgtttaatgtgtgaagttctcataatgcctgtataatttaaaattacttttawtgatccatttgatcaacgttcctctttgaaaagggatcagctaatcaaaactgttgctcttattctcacaacagcagctgagggcccaaatcatgatacctgttgtaatcaaaatatggaaaattcagagacaccactttgttctttctaactgtgctatttcagtgactgagaatcccatgtttggctccattatggcaattcagaacgctgtaaataagcatctagactcactacacagtcaataaaatactctgagagtctccaaggagtaattcacaatgactggtaagaaacagg

SEQ ID NO: 30783 - DNA, 600 bp, Chicken  19866894252567_1
ttcatgacaaatttgcacttggccaccgtcagatcccaagtcaggacaaccttttgtctgatctagtatagtcttgtaatctagaggtaattccatagaaagaagggcatgtagtgaaatcagcatattgaaaatacaactacttatgcctatttatcgtattatgaggtatgggcatacatcaacatcaaaaatagttcaatctttcaaagtgattattcagagacacagaatgactgtgttactcaaatccaaagaattcttcatttatctgtgtttacctctgaataccccgtttaytgaaactatgatctatgggaaatctggtttcatgccagcttgagacttcctctactatagatttttcaggatctgttcagccccctcctgtctctgtaggacactgcaaaagcagaaattgattggttgagagactgccctatgacggttcaygcagagatgatataaaactagctatgctgccttgctctgtcagggatgcccttgcttgggctggaagaattatgtgagatgctgtgtggattaaacttcaatggaaagattgttttctggatgtccccccacttgcagtcctgaaaa

SEQ ID NO: 30784 - DNA, 600 bp, Chicken  19866894252567_2
ttatcgtattatgaggtatgggcatacatcaacatcaaaaatagttcaatctttcaaagtgattattcagagacacagaatgactgtgttactcaaatccaaagaattcttcatttatctgtgtttacctctgaataccccgtttaytgaaactatgatctatgggaaatctggtttcatgccagcttgagacttcctctactatagatttttcaggatctgttcagccccctcctgtctctgtaggacactgcaaaagcagaaattgattggttgagagactgccctatgacggttcaygcagagatgatataaaactagctatgctgccttgctctgtcagggatgcccttgcttgggctggaagaattatgtgagatgctgtgtggattaaacttcaatggaaagattgttttctggatgtccccccacttgcagtcctgaaaattacctcccacyccctgcctacctgtgcaagtgtcattgtggcagctacaaatccttacayaatcagwaaggcagaaccagtatagcaataatttccatagaaaatattgcaagtatatttttcagaggtgcctagtgaaatttaaaagttga

SEQ ID NO: 30785 - DNA, 600 bp, Chicken  19866894252567_3
ctatgggaaatctggtttcatgccagcttgagacttcctctactatagatttttcaggatctgttcagccccctcctgtctctgtaggacactgcaaaagcagaaattgattggttgagagactgccctatgacggttcaygcagagatgatataaaactagctatgctgccttgctctgtcagggatgcccttgcttgggctggaagaattatgtgagatgctgtgtggattaaacttcaatggaaagattgttttctggatgtccccccacttgcagtcctgaaaattacctcccacyccctgcctacctgtgcaagtgtcattgtggcagctacaaatccttacayaatcagwaaggcagaaccagtatagcaataatttccatagaaaatattgcaagtatatttttcagaggtgcctagtgaaatttaaaagttgacaaaaaggagagaagatccaaagttgccacaagccactaactataaattattagccaacgacaataaggtagagttagaaatgacaatctagttaatcacagctccagtgcttgtgtttgtattttgctttagacaatcaattattccttctttctcat

SEQ ID NO: 30786 - DNA, 600 bp, Chicken  19866894252567_4
tttttcaggatctgttcagccccctcctgtctctgtaggacactgcaaaagcagaaattgattggttgagagactgccctatgacggttcaygcagagatgatataaaactagctatgctgccttgctctgtcagggatgcccttgcttgggctggaagaattatgtgagatgctgtgtggattaaacttcaatggaaagattgttttctggatgtccccccacttgcagtcctgaaaattacctcccacyccctgcctacctgtgcaagtgtcattgtggcagctacaaatccttacayaatcagwaaggcagaaccagtatagcaataatttccatagaaaatattgcaagtatatttttcagaggtgcctagtgaaatttaaaagttgacaaaaaggagagaagatccaaagttgccacaagccactaactataaattattagccaacgacaataaggtagagttagaaatgacaatctagttaatcacagctccagtgcttgtgtttgtattttgctttagacaatcaattattccttctttctcatctaccttgtctggaaaatgggataatggattactcacaaaaagtctggg

SEQ ID NO: 30787 - DNA, 600 bp, Chicken  19866894252567_5
ggatctgttcagccccctcctgtctctgtaggacactgcaaaagcagaaattgattggttgagagactgccctatgacggttcaygcagagatgatataaaactagctatgctgccttgctctgtcagggatgcccttgcttgggctggaagaattatgtgagatgctgtgtggattaaacttcaatggaaagattgttttctggatgtccccccacttgcagtcctgaaaattacctcccacyccctgcctacctgtgcaagtgtcattgtggcagctacaaatccttacayaatcagwaaggcagaaccagtatagcaataatttccatagaaaatattgcaagtatatttttcagaggtgcctagtgaaatttaaaagttgacaaaaaggagagaagatccaaagttgccacaagccactaactataaattattagccaacgacaataaggtagagttagaaatgacaatctagttaatcacagctccagtgcttgtgtttgtattttgctttagacaatcaattattccttctttctcatctaccttgtctggaaaatgggataatggattactcacaaaaagtctgggatagtga

SEQ ID NO: 30788 - DNA, 600 bp, Chicken  19866894252567_6
aagttgccacaagccactaactataaattattagccaacgacaataaggtagagttagaaatgacaatctagttaatcacagctccagtgcttgtgtttgtattttgctttagacaatcaattattccttctttctcatctaccttgtctggaaaatgggataatggattactcacaaaaagtctgggatagtgaattagtatgctgcttattgcatggatagccacaacacactgtagaagtattaggaacggctattatgtgagaggactacttaggaaatggtttcctcactctgarttgtctcttaacatcactcaggacaacccagggcccacattatcaagcactccaccattgttatcagtagaatcaggtatgacacaaaattcttcaagctgctaatgagacattttttcttctgcaggattcctaagaggtcaactggaagtgttggaagatttctttatacatcactttaccwtcaaacagaaagttagctaaaggagcaacaagagaagaagccagtggaaaggagcctgtgacaaacacactcaactatgtaccagtcacatacatgagtcaatggcacaggaatgc

SEQ ID NO: 30789 - DNA, 600 bp, Chicken  19866894252567_7
tgggatagtgaattagtatgctgcttattgcatggatagccacaacacactgtagaagtattaggaacggctattatgtgagaggactacttaggaaatggtttcctcactctgarttgtctcttaacatcactcaggacaacccagggcccacattatcaagcactccaccattgttatcagtagaatcaggtatgacacaaaattcttcaagctgctaatgagacattttttcttctgcaggattcctaagaggtcaactggaagtgttggaagatttctttatacatcactttaccwtcaaacagaaagttagctaaaggagcaacaagagaagaagccagtggaaaggagcctgtgacaaacacactcaactatgtaccagtcacatacatgagtcaatggcacaggaatgcaagtggaagtttagaggtagtctgacctagttgttgctgccattagactgacagactagttttggctgatacaaaactcctgcttgggaggcaagtggctggcaagcttgagacaggtcagaagagcacatcagagacctgtttgttattaccactccattgaactcgaccagcttgaccaacc

SEQ ID NO: 30790 - DNA, 600 bp, Chicken  19866894252567_8
agcaacaagagaagaagccagtggaaaggagcctgtgacaaacacactcaactatgtaccagtcacatacatgagtcaatggcacaggaatgcaagtggaagtttagaggtagtctgacctagttgttgctgccattagactgacagactagttttggctgatacaaaactcctgcttgggaggcaagtggctggcaagcttgagacaggtcagaagagcacatcagagacctgtttgttattaccactccattgaactcgaccagcttgaccaacctaccagaaaaaaatctacagtgraagtacccttttcctgctttataagaaaacagttcattgttgctgaaagtactcttggaagcaatttaattaacttggctacctttgtactgaagctgatgaggacagctgtaagcccctgctgtgctagttcaggcactggacaagaaaccctgaacaccagacagcaaataacatctcaacccacgacagacacttctgcagtgactgttcaacagctggctgttttaccaagctgcaatttctgtgatgtatctaagatggatggggcacatgagatagctaaatcaataaggggct

SEQ ID NO: 30791 - DNA, 599 bp, Chicken  19866894252570_1
  misc_feature (1)..(53): n is any nucleotide
nnnnnnnnnnnnnnnnnnnnnnnnnnnnnnnnnnnnnnnnnnnnnnnnnnnnntgcaaaagcttaatgtaacaataactctggtgctggtttctacttgtatagccgctcagtgctgctgaagatttaacaaatgatgtagcaattatttgattgctccttaacaccagctttaaaataaaaggaaaaaaaaaaacaaaaaccacttctatatgcatcagaaaaacaaacaaacaaaaagccttaaaatatattttccttcgagcaagctgtaaattgtcaggcttcaaaacagacagakgaatctaacataatttgtctggtttctaattgttaagataattcataattgaaagctggatggggcagaattaggtgctagggaaagatatttgggcatacatcaaccatctgaatggactgagaccagatgaaaaagagagaacagatctgctattaaacttctgcctgggcttcactggggctgttgttataaacttcgagtacagctgcacttaatgagtttgtgtaaaagcagacatcatacaaatgggagaaagtaggaacttcatccaattagataagagaattggccagcag

SEQ ID NO: 30792 - DNA, 600 bp, Chicken  19866894252572_1
atcactttcattgaaccagattgatgcattagtttcagaataacaacgtcaaatatcctgcttgctctatgtttttgtgctcattttttaatgttttaataaaaatattaaaagtttgattaagttgtgttacttacatacattaactatttgatatatcttatgagggttgatccaaaagtaatgcctcctgttttactatgttagcccacaatgtcagaggtagatgttggtggtacggcagtagaggctgaaacttcccaccaatatcccgttctgtgttgctgctgtgtgacagayggcagcagaggggaagtctgaaggtgtgtcatggaattcctccacgcagaaaaagtagcacccattgacattcatcaatgcttgctgaaagtcaggctgtgggtggtgcacttcagcagcggtgatagtgactgttggttaccgcagcatgcaggctcttgttcaccgctggtgaaaacgcacagctaatggtggtgaatttgttccaaaaaagtccatgttctgtagctgacgatttgctctatcaaacaaaactactgcgctcttagtatctgtcacagattccatgaaaataaatgg

SEQ ID NO: 30793 - DNA, 600 bp, Chicken  19866894252572_2
atgggaggcatcacttttggaatggcctaaatatacatgacccaaaactattcctcttcactccgtgaggcctagggaagctcaaagattggacacccatgacttacggttttttatgcagttctcaactagccaaaagagctcttttgtttccactttggactctctaaaaaattaaactcttaaaagcgtaatgagaaagactggctcaaaataggcataaagaaagagagaagatgatctatctgacatacgtttgaatttttaaaatggtttaggactgcacagaaattacgtgcygagagacaagattacacagaattgttcaagacaaaaaaaaacaattatgttraaagtacaaatcagctgaagcacccacggacaaatccagattatggttagagacacacctgcaacaaaaccaatctcatttgctaagacaggctgagttttaaagccacaattataatattgcaggtcagacagaagtgtttggctggagaagcagtgagctatctaaccttgccaaaatcaagctgtcagctgcacctgaccgctgaaactaggctgcagcagtgcttagtgaaaatgcaactcaaa

SEQ ID NO: 30794 - DNA, 600 bp, Chicken  19866894252572_3
cctcttcactccgtgaggcctagggaagctcaaagattggacacccatgacttacggttttttatgcagttctcaactagccaaaagagctcttttgtttccactttggactctctaaaaaattaaactcttaaaagcgtaatgagaaagactggctcaaaataggcataaagaaagagagaagatgatctatctgacatacgtttgaatttttaaaatggtttaggactgcacagaaattacgtgcygagagacaagattacacagaattgttcaagacaaaaaaaaacaattatgttraaagtacaaatcagctgaagcacccacggacaaatccagattatggttagagacacacctgcaacaaaaccaatctcatttgctaagacaggctgagttttaaagccacaattataatattgcaggtcagacagaagtgtttggctggagaagcagtgagctatctaaccttgccaaaatcaagctgtcagctgcacctgaccgctgaaactaggctgcagcagtgcttagtgaaaatgcaactcaaagagcaaggacacaggctttgctttactttccaattcgaggagaagctcacga

SEQ ID NO: 30795 - DNA, 425 bp, Chicken  19866894252572_4
atctcatttgctaagacaggctgagttttaaagccacaattataatattgcaggtcagacagaagtgtttggctggagaagcagtgagctatctaaccttgccaaaatcaagctgtcagctgcacctgaccgctgaaactaggctgcagcagtgcttagtgaaaatgcaactcaaagagcaaggacacaggctttgctttactttccaattcgaggagaagctcacgattagcattcagaaaaaaaacacatttgaaatataacagattctacttgaacaaagggcaatttatcccataytgccaccgttacactattttgttactattccaaacaaaagcaattgatagaagagaaccaagtcgtataagagaacaaagaatgaaagttgaaatccatcacctttttcttccatgcaacaagta

SEQ ID NO: 30796 - DNA, 600 bp, Chicken  19866894252573_1
gccagggcacagagagctccgtgtggggtgagggaggcacccagacaccaagaggtgcacgacattgctggcaggatgctgtgtagggacacagtatgatgtgggatgctgtgcaggaatgcaggatgctgtgtatggacatgggatgctctgtagggatgtgggatgctatacaaggacactgggtgctatgtagggatgtgggatactatacaaggacactggatgctatgcagggatgcaagatgctgtgcagggatgcaggatgctatacaaagacttaggatgctgtgtagggaygtgagatgctgtgtagggatgcaggatgctgtgtatgggcacaggatgctacacaggaatgcaggatgctgtgtagggatgcaggatgctatcagtgcccgctgctgcccggctccggccctgcaggacagacagacgctgcgtgccgccaggcgccgctgcacggccrctgttgccaaccagcacagcgcaggagggagcgttcatatcccagcastgcccccatcctggatcgtgccccctctcccagagcaccatccgcaggcgatgctctcyctctgctccgcagcacagcgaggc

SEQ ID NO: 30797 - DNA, 600 bp, Chicken  19866894252573_2
tatacaaggacactgggtgctatgtagggatgtgggatactatacaaggacactggatgctatgcagggatgcaagatgctgtgcagggatgcaggatgctatacaaagacttaggatgctgtgtagggaygtgagatgctgtgtagggatgcaggatgctgtgtatgggcacaggatgctacacaggaatgcaggatgctgtgtagggatgcaggatgctatcagtgcccgctgctgcccggctccggccctgcaggacagacagacgctgcgtgccgccaggcgccgctgcacggccrctgttgccaaccagcacagcgcaggagggagcgttcatatcccagcastgcccccatcctggatcgtgccccctctcccagagcaccatccgcaggcgatgctctcyctctgctccgcagcacagcgaggctgaggccctccttctgcctttccaagggcagcaaaaccctttcagtgtgcagtgcagtgagcagcgcacagcgcacggctgcttatcccattgagttctgacccccaaccattcgctttgaggcatcgcccactttaattcaaccacggcagagtgcttcacaaacttt

SEQ ID NO: 30798 - DNA, 600 bp, Chicken  19866894252573_3
gacactggatgctatgcagggatgcaagatgctgtgcagggatgcaggatgctatacaaagacttaggatgctgtgtagggaygtgagatgctgtgtagggatgcaggatgctgtgtatgggcacaggatgctacacaggaatgcaggatgctgtgtagggatgcaggatgctatcagtgcccgctgctgcccggctccggccctgcaggacagacagacgctgcgtgccgccaggcgccgctgcacggccrctgttgccaaccagcacagcgcaggagggagcgttcatatcccagcastgcccccatcctggatcgtgccccctctcccagagcaccatccgcaggcgatgctctcyctctgctccgcagcacagcgaggctgaggccctccttctgcctttccaagggcagcaaaaccctttcagtgtgcagtgcagtgagcagcgcacagcgcacggctgcttatcccattgagttctgacccccaaccattcgctttgaggcatcgcccactttaattcaaccacggcagagtgcttcacaaacttttaagtgaagctctcagcyccctgggagcccaaaatgagagaaagtgag

SEQ ID NO: 30799 - DNA, 600 bp, Chicken  19866894252573_4
agacttaggatgctgtgtagggaygtgagatgctgtgtagggatgcaggatgctgtgtatgggcacaggatgctacacaggaatgcaggatgctgtgtagggatgcaggatgctatcagtgcccgctgctgcccggctccggccctgcaggacagacagacgctgcgtgccgccaggcgccgctgcacggccrctgttgccaaccagcacagcgcaggagggagcgttcatatcccagcastgcccccatcctggatcgtgccccctctcccagagcaccatccgcaggcgatgctctcyctctgctccgcagcacagcgaggctgaggccctccttctgcctttccaagggcagcaaaaccctttcagtgtgcagtgcagtgagcagcgcacagcgcacggctgcttatcccattgagttctgacccccaaccattcgctttgaggcatcgcccactttaattcaaccacggcagagtgcttcacaaacttttaagtgaagctctcagcyccctgggagcccaaaatgagagaaagtgaggcagaaagcaatgaggacgcacggctgggtctttgggaaygggagctgagtgtgagcag

SEQ ID NO: 30800 - DNA, 600 bp, Chicken  19866894252573_5
gcgcaggagggagcgttcatatcccagcastgcccccatcctggatcgtgccccctctcccagagcaccatccgcaggcgatgctctcyctctgctccgcagcacagcgaggctgaggccctccttctgcctttccaagggcagcaaaaccctttcagtgtgcagtgcagtgagcagcgcacagcgcacggctgcttatcccattgagttctgacccccaaccattcgctttgaggcatcgcccactttaattcaaccacggcagagtgcttcacaaacttttaagtgaagctctcagcyccctgggagcccaaaatgagagaaagtgaggcagaaagcaatgaggacgcacggctgggtctttgggaaygggagctgagtgtgagcagcgcggcgtcctccawgcacagctcagctctgaggagctcaccccaatgtgactgcagcccccagascygcactggtaagggcagtaacctgccctgggagccatacatttaaaccccaagcatgggttttgttccttcccgaaacaatgttaaccactgtggtgccgaacgtctgtgctgccctgtgggttcccagctgtcctggtaccag

SEQ ID NO: 30801 - DNA, 600 bp, Chicken  19866894252573_6
tccgcaggcgatgctctcyctctgctccgcagcacagcgaggctgaggccctccttctgcctttccaagggcagcaaaaccctttcagtgtgcagtgcagtgagcagcgcacagcgcacggctgcttatcccattgagttctgacccccaaccattcgctttgaggcatcgcccactttaattcaaccacggcagagtgcttcacaaacttttaagtgaagctctcagcyccctgggagcccaaaatgagagaaagtgaggcagaaagcaatgaggacgcacggctgggtctttgggaaygggagctgagtgtgagcagcgcggcgtcctccawgcacagctcagctctgaggagctcaccccaatgtgactgcagcccccagascygcactggtaagggcagtaacctgccctgggagccatacatttaaaccccaagcatgggttttgttccttcccgaaacaatgttaaccactgtggtgccgaacgtctgtgctgccctgtgggttcccagctgtcctggtaccagatgggcaccatctcctggtggctccttcatcccgttctcagcccttggcagctgctctgcacacacacac

SEQ ID NO: 30802 - DNA, 600 bp, Chicken  19866894252573_7
cagcgaggctgaggccctccttctgcctttccaagggcagcaaaaccctttcagtgtgcagtgcagtgagcagcgcacagcgcacggctgcttatcccattgagttctgacccccaaccattcgctttgaggcatcgcccactttaattcaaccacggcagagtgcttcacaaacttttaagtgaagctctcagcyccctgggagcccaaaatgagagaaagtgaggcagaaagcaatgaggacgcacggctgggtctttgggaaygggagctgagtgtgagcagcgcggcgtcctccawgcacagctcagctctgaggagctcaccccaatgtgactgcagcccccagascygcactggtaagggcagtaacctgccctgggagccatacatttaaaccccaagcatgggttttgttccttcccgaaacaatgttaaccactgtggtgccgaacgtctgtgctgccctgtgggttcccagctgtcctggtaccagatgggcaccatctcctggtggctccttcatcccgttctcagcccttggcagctgctctgcacacacacacaacgctctcctgcacctaacgccatcggggcaac

SEQ ID NO: 30803 - DNA, 562 bp, Chicken  19866894252573_8
cagtgtgcagtgcagtgagcagcgcacagcgcacggctgcttatcccattgagttctgacccccaaccattcgctttgaggcatcgcccactttaattcaaccacggcagagtgcttcacaaacttttaagtgaagctctcagcyccctgggagcccaaaatgagagaaagtgaggcagaaagcaatgaggacgcacggctgggtctttgggaaygggagctgagtgtgagcagcgcggcgtcctccawgcacagctcagctctgaggagctcaccccaatgtgactgcagcccccagascygcactggtaagggcagtaacctgccctgggagccatacatttaaaccccaagcatgggttttgttccttcccgaaacaatgttaaccactgtggtgccgaacgtctgtgctgccctgtgggttcccagctgtcctggtaccagatgggcaccatctcctggtggctccttcatcccgttctcagcccttggcagctgctctgcacacacacacaacgctctcctgcacctaacgccatcggggcaacgacagcaatccca

SEQ ID NO: 30804 - DNA, 560 bp, Chicken  19866894252573_9
gtgtgcagtgcagtgagcagcgcacagcgcacggctgcttatcccattgagttctgacccccaaccattcgctttgaggcatcgcccactttaattcaaccacggcagagtgcttcacaaacttttaagtgaagctctcagcyccctgggagcccaaaatgagagaaagtgaggcagaaagcaatgaggacgcacggctgggtctttgggaaygggagctgagtgtgagcagcgcggcgtcctccawgcacagctcagctctgaggagctcaccccaatgtgactgcagcccccagascygcactggtaagggcagtaacctgccctgggagccatacatttaaaccccaagcatgggttttgttccttcccgaaacaatgttaaccactgtggtgccgaacgtctgtgctgccctgtgggttcccagctgtcctggtaccagatgggcaccatctcctggtggctccttcatcccgttctcagcccttggcagctgctctgcacacacacacaacgctctcctgcacctaacgccatcggggcaacgacagcaatccca

SEQ ID NO: 30805 - DNA, 600 bp, Chicken  19866894252576_1
gctaggacatacagacaaaataataataataataataatacatgttacctactcagaatattgatttgagtcatatctaaagggatataatggacatcagaaaatgcctacttgtgactgacttagctactgccaaaaaagttgaacatgtttcaaacaatgtttaattgaatttattatatgcactatatacatatactaaaatgtcttgcagtcatgccccatgaacgcttcaaatttgtgtaggcaggtgagtccatgtaaagcaaataaattacaagaacagaaattactcaaaamaaaaaaaaatccctaatctttgtgatcccaaaaaagcagtagaagggcaggacaaatttgtttcaaatgaagcactattatctaaatttgcagaatcagtttagctattcagcatgattttaccactgaaacatggcactgctgtcaaggtaccatttaaaacataataaagcaaggcaaaacaaaaacttcagtggattgacagttgttttttttccaccaaatccaagcacacaagaaactattctacaaagacttctgtttgtatttcctagggcatatgtctcaaaaacaagttgc

SEQ ID NO: 30806 - DNA, 578 bp, Chicken  19866894252577_1
gtgagctttaagttttaatttttgcaaggctattgtagattagttgaaagacacacaaaaatatatacagtattgtactcatgctaagtagctaccatatcactgtacgttgttttgaaactgcactgattattctgctcttatttattctctttattactgaggctgaatactctgccagcaaaatcactgtttgtgcctacaaacatgcagtgcaggcagacagaaccttaaatgtctaataaagagcaaaggaacattttgcattttcccccgttagaaagtttaatgttatcttgraaaagttcaaggtagcaatattaatatttttagtggagtctttcatatctcattaacaatatcttatctgattaacatgttagtagtcttcctttgtatttcattaacattcatatcatctcagaatacattgttgttagtatgtttcagtcatatcatattagtgacttatcagattacagagagaggatactaataaaacattccaattcaattaataaggtaaaaaattccattttttccaagttacttccaactttgctcccagatataagtca

SEQ ID NO: 30807 - DNA, 600 bp, Chicken  19866894252579_1
ttaggggtatgcagtgggactgttaatagaatcatagagtcatagaatcatggaatcatagaatggcctgggttgaaaaggatcacaatgatcattgagtttcaaccccctgctatgtgcagggtctccaaccaccagaccaggctgcccagagccacatccagcctgggttcagccatcaaaggtgatctcatatttgattttgagataatatcaatttggattcaaaggcttgccatgctctgactgcactaagctccatgcaatgattctgaaacacctctacttgggatattcagygcagtaagggaataagaaataataataagaatcaactcgttaggctccaaattaacttctgccagtggaccagaacagtgcaaagaaaggataaagatgtaaattgcaatataaaccttgtcaacattttgttctgagttttcatatctaacaacacagctactggggaaaaaaaaacaacaagttttcttaccctygcttaagaaacagaacagtgcagctgttccctctcactgtaatcacagccctgtggccttggagaccccaatgcagtaacaaattaggagggaaagaaatatt

SEQ ID NO: 30808 - DNA, 600 bp, Chicken  19866894252579_2
tgattttgagataatatcaatttggattcaaaggcttgccatgctctgactgcactaagctccatgcaatgattctgaaacacctctacttgggatattcagygcagtaagggaataagaaataataataagaatcaactcgttaggctccaaattaacttctgccagtggaccagaacagtgcaaagaaaggataaagatgtaaattgcaatataaaccttgtcaacattttgttctgagttttcatatctaacaacacagctactggggaaaaaaaaacaacaagttttcttaccctygcttaagaaacagaacagtgcagctgttccctctcactgtaatcacagccctgtggccttggagaccccaatgcagtaacaaattaggagggaaagaaatatttccaggggcaaggaagagtcagctgaaaaaattactaacacattggtgttgtaagaaagtttcagagaggaaaataaggaccagaaacaattcagtaccatrcactacttgctgcaatctcagagatgcttcaaggtgatgmgggctgcgtgtacctcatgcaaggctgtgcaggactgtgtgcctctgcagcaaag

SEQ ID NO: 30809 - DNA, 512 bp, Chicken  19866894252579_3
attgcaatataaaccttgtcaacattttgttctgagttttcatatctaacaacacagctactggggaaaaaaaaacaacaagttttcttaccctygcttaagaaacagaacagtgcagctgttccctctcactgtaatcacagccctgtggccttggagaccccaatgcagtaacaaattaggagggaaagaaatatttccaggggcaaggaagagtcagctgaaaaaattactaacacattggtgttgtaagaaagtttcagagaggaaaataaggaccagaaacaattcagtaccatrcactacttgctgcaatctcagagatgcttcaaggtgatgmgggctgcgtgtacctcatgcaaggctgtgcaggactgtgtgcctctgcagcaaaggccaatgtgggcttcactgtgtcgctttgtgtatttgagtttcctatgaaagaagccctacttaagccacagatgggttttatgagggatttaattacagtcttcgttttacttctt

SEQ ID NO: 30810 - DNA, 472 bp, Chicken  19866894252579_4
catatctaacaacacagctactggggaaaaaaaaacaacaagttttcttaccctygcttaagaaacagaacagtgcagctgttccctctcactgtaatcacagccctgtggccttggagaccccaatgcagtaacaaattaggagggaaagaaatatttccaggggcaaggaagagtcagctgaaaaaattactaacacattggtgttgtaagaaagtttcagagaggaaaataaggaccagaaacaattcagtaccatrcactacttgctgcaatctcagagatgcttcaaggtgatgmgggctgcgtgtacctcatgcaaggctgtgcaggactgtgtgcctctgcagcaaaggccaatgtgggcttcactgtgtcgctttgtgtatttgagtttcctatgaaagaagccctacttaagccacagatgggttttatgagggatttaattacagtcttcgttttacttctt

SEQ ID NO: 30811 - DNA, 486 bp, Chicken  19866894252580_1
agttttgagcttccccgatcacatctcctcacgcccacctaaccatgactggactaagggaattcccatgtgttactccgctgctggaggaaggatcacttccccataagataccagaagaagagcagctgatctgaacagaaagtagaactggcacagcaagacagttccaacccaacttcattactcagatgagagggactgtcattcatcaagtatgctggaagttattcctgctgtgataatgctcttcccttgcagaaatggagtacagcttgctgccagttgaatcccattgtsccaggcccttccagccacagccaaaagaacctctcatctaggaaaaaaaagaacacctacctggagcgtttcatagtcagatttaggtaattcctgtctcttgtaactttccagcaattcatccattcgtttaacattctcagaaacttcgctgattgtattcactcgtctggacaccttagcaga

SEQ ID NO: 30812 - DNA, 600 bp, Chicken  19866894252581_1
agcgctcccttttagtggggatttctttcctctgctaatggacattgccaccatcccttccctctggttctttttttctgatgcagagtaagttattaaataaacacagtatttcttacttctgtatccaagtatgtagatgtgtgtgtaggctgcaaatctgtgtagggctcaagcaaattcagcaaggccaggtaaaagatattaggatggataaagtacaggtgggcccaatgtaataaacactgacaatgtttttttgcttgtaggtagaaatagctgcttcctcaaatattttcwaacatctagggatttctttaccacaggaatttcttaaaggtagaacagtgtattttcttatgcagggcagtaatatagaamaggaaaagcactgtaaaattcttcaaaatgtttatacataggtttagtgtatttgtttttactaacatttgtgatacttgaaaagctggtttggaaagctcagccaggaggataagatatgtgggtgcacagtgaaaagactgaccgtctgcttcccttttgtcaagaaaaatccatataaacccctcccattacatttgagagttattagataccgat

SEQ ID NO: 30813 - DNA, 600 bp, Chicken  19866894252581_2
tgcagagtaagttattaaataaacacagtatttcttacttctgtatccaagtatgtagatgtgtgtgtaggctgcaaatctgtgtagggctcaagcaaattcagcaaggccaggtaaaagatattaggatggataaagtacaggtgggcccaatgtaataaacactgacaatgtttttttgcttgtaggtagaaatagctgcttcctcaaatattttcwaacatctagggatttctttaccacaggaatttcttaaaggtagaacagtgtattttcttatgcagggcagtaatatagaamaggaaaagcactgtaaaattcttcaaaatgtttatacataggtttagtgtatttgtttttactaacatttgtgatacttgaaaagctggtttggaaagctcagccaggaggataagatatgtgggtgcacagtgaaaagactgaccgtctgcttcccttttgtcaagaaaaatccatataaacccctcccattacatttgagagttattagataccgataattctacgtggatttggggtctttagatcacaaattagatctttgcraaaggaatggtgcrgaatctcggttctaacaga

SEQ ID NO: 30814 - DNA, 600 bp, Chicken  19866894252581_3
tgtattttcttatgcagggcagtaatatagaamaggaaaagcactgtaaaattcttcaaaatgtttatacataggtttagtgtatttgtttttactaacatttgtgatacttgaaaagctggtttggaaagctcagccaggaggataagatatgtgggtgcacagtgaaaagactgaccgtctgcttcccttttgtcaagaaaaatccatataaacccctcccattacatttgagagttattagataccgataattctacgtggatttggggtctttagatcacaaattagatctttgcraaaggaatggtgcrgaatctcggttctaacagaaatcttgtccagaaatacttatgggaagattattaaaatactataggtattgacattggctacaaagatctacttgtgcatatttctttaaaggaggggaaaaaccccttaatactctgtattaccatagctagtcccccattatactattgtaatcatagctgaagcaagaacagtgattaacgatggcaatttattgtatctgacgaggggagaaaataggagatgttgtcgttatcataaatcatatcataaataaccaaagag

SEQ ID NO: 30815 - DNA, 600 bp, Chicken  19866894252581_4
cagggcagtaatatagaamaggaaaagcactgtaaaattcttcaaaatgtttatacataggtttagtgtatttgtttttactaacatttgtgatacttgaaaagctggtttggaaagctcagccaggaggataagatatgtgggtgcacagtgaaaagactgaccgtctgcttcccttttgtcaagaaaaatccatataaacccctcccattacatttgagagttattagataccgataattctacgtggatttggggtctttagatcacaaattagatctttgcraaaggaatggtgcrgaatctcggttctaacagaaatcttgtccagaaatacttatgggaagattattaaaatactataggtattgacattggctacaaagatctacttgtgcatatttctttaaaggaggggaaaaaccccttaatactctgtattaccatagctagtcccccattatactattgtaatcatagctgaagcaagaacagtgattaacgatggcaatttattgtatctgacgaggggagaaaataggagatgttgtcgttatcataaatcatatcataaataaccaaagagaagcactcggaaag

SEQ ID NO: 30816 - DNA, 600 bp, Chicken  19866894252584_1
tctgtcatttaaaactgaatgaaatcattctttctaatctttgtaattctgtgttctctaatgtaaatctcattgattgccttattcatggcttaaaatactttttttcagttgttctgacattctgaccttagaagactttctctggactcagtacttacccaagaagattcacttacaagaaaaaaaaagggtggtacagggatctgttccatatcccctgtgttctccagctccatcttcttcctgaacataaacaccgaccttaaagcagcagtgtagctctttgccctcttcccktcctgaaaaggaaactgtcacttccaactatttcagaatgttaattctgtaaaacagccgtgctacaaccctgcaacaatgcacagtttattctgggtggctttggaattgcctctgactcctgctcatttcccaataattactgataattacaccactcaaaacaaaatgaaacacaacagactcttttaaagctgtggaaacaaagtttgtccagaagctgaccttcccgtttggaggtgagaggaagtgtgcatggaattatataggcctgatgagttgctttctaactcattttga

SEQ ID NO: 30817 - DNA, 599 bp, Chicken  19866894252586_1
  misc_feature (1)..(90): n is any nucleotide
nnnnnnnnnnnnnnnnnnnnnnnnnnnnnnnnnnnnnnnnnnnnnnnnnnnnnnnnnnnnnnnnnnnnnnnnnnnnnnnnnnnnnnnnnngctgctctgcttcttatacctctcccgagttaagaatctggtagaagttcccatttctgcttgcatttgcctttccataaaacttactccctctgatatcctgaagcttacctgaagtcttctcctacttctcactccatctcccctcttcgtagctcagagcttacagccactttttgtaagtacatccagtctatgtatttcttatcytttctacggtcagttatcactttcctttctcctttgctgccttaatgctgctgcatttatgttgtctttgccatatcagtttgaaagaggcaaatgatgttatttttttactccttacaatccatcacacgctatctcttctgcccagattcaggtaagtcaacaaataaatactttttgtgagatttccatcttttgttcagctgtaaattaaaacaaaagaagtaataccctcaactttaagattaagaaggagaacgtgtgaacatgaatgaagactaagaactcttttctggtga

SEQ ID NO: 30818 - DNA, 600 bp, Chicken  19866894252588_1
ggagccataggtgtgtagctggcactgagctaccagggagaaacacgtgctcagaagtgggggttctcacccacgcctgccaacatcactgtgatctgcatggatgatcagcttgtgcggaagacctcttgtgtgcacacaccatgcagagctgcagctcagcagaaggaaacagctgaaaatactgggaaaaaattgggaatcaacaacagattgggcaatctgggcacaaagatccagtgggacgtcacactttgtgataatgtgagtgggcaaaggaaatgtggcagcaacatgtcytaccatgagcactctggtaagaaatgtcatgctcctagagtagaagatgcccctgcctgcagctgtgcagccttgatggggtacagctttgctgcagtcacaggggcagaggctgtgctcaggctgtgctgagctcaccttttgtttgctgggctctgctggctgagaacagctctggagcaagaggagttgtgcaggttctgcctgctcccatcgccctgctcctgcttctcgggtcaccccaccagggactgcagctgtcctccctgcccaagctggggcagtgtgtgcccagcagca

SEQ ID NO: 30819 - DNA, 580 bp, Chicken  19866894252588_2
tgggctctgctggctgagaacagctctggagcaagaggagttgtgcaggttctgcctgctcccatcgccctgctcctgcttctcgggtcaccccaccagggactgcagctgtcctccctgcccaagctggggcagtgtgtgcccagcagcacctgcctcctggctgcccgtaggaccctgtgccgcggtgtcagttctgcagtacctttcactaatataaattcctccagaaacagagagaaaacgacccagaaatgctgttacatataaacccctcaattatataaaattctgcaaacmtcagataagaccataacagagaaaaggtcacagcaacaccagctatgtcacgaatagcagcaacaagtagcagccagcgcctgagtcaggctaaggctagaaagatgaaaagatagaaatgttgttggcttcagtccttttgtagtgagttccagatagctgtcaactgctgaacattcgaacaaccagggcctcccaaagggaaataacatcttcggaatgaccatgctgaagaaaacaccatatcttaaatgatgcattgatgggggaaaaataaatt

SEQ ID NO: 30820 - DNA, 600 bp, Chicken  19866894252598_1
tgtaagagcagacctgagccgccttgactcagctgtttgctggttctctgcctccacagggaagagcacaagatgttgattaatgtgactactaacagtatgtgaaagaagtataatgcaagctggtcctgaatgtgctatgggcagacaaatgctcactagactcataattaaatctgagacctctgcagtgggttccttttaccctaatatgtaaacatgagcctaccaaaatactctttgaaacagatcctgaacagattaagctgcaaggtagttgtgttccagttcccttttctkcttttctgatttccttgtattgactgaggctttgaaaacttcacattgctctaagatgtgctctaccttttcccaaaatatgagtttcaagccaaccatctgtgtgatatgcagactagcgctcagatttaaactaaacttcttaaataatacaagcaacattgattacctttgttttgcttctatgatgacattaagagctgagattgatcagcattaaaattagctaataactcttccttcaccatttgggcatatttgaccacacacaaatatcaggtggacccttctgattgtgac

SEQ ID NO: 30821 - DNA, 600 bp, Chicken  19866894252599_1
cttacagctttttcaggtctctggagtctctctcatacgtatgctgtcttatcatgctggttcctcatcctctctctttgccctttgtcttgcagaagcttcatttctctcactctgtgtcttacagttattaactttgctatatgtagatccacattcatgtaaaacctagaggttcagtgtgaggtttaggcagaatctcaatacctatgtccagtaaaactccttgtccacttgcatcttttttttatgggtctgtctgctgacactggggttttaatgactggattccccagagcyaggaaaagtatccataactgttccagtcttagcagtattgagcagtgtggtgctcatcttatggataaaatgggaaatacagaaagcctgcaggaaacttgaacataaaatgactgcagtatcgtactgcatcttcacgcatacatctgcttctgcagtttcccacaggtcccatttgtcatggccatctgcatgaggatgctgccatccttgaatccaaacacacaaatagtcaagaattttctagaatttccagcgaagatgacttagtcccagatttcttgtctttaaaggggagga

SEQ ID NO: 30822 - DNA, 600 bp, Chicken  19866894252600_1
cccaaaggtgtgaaagtagccctgcaagcactgacttaaaccttgcaaagaaggcagcaattttaacagacatcagagcactgggttcagaagttgccataagtagctgaggagattatatcccactgcaatttttagcctttgccactttgcaagcaccactatcaccacccagagctgttgattgcaagtcagcatcggctggcctgtcctcagggctatcgcagcttcactcacaacctccaagctctccagaagagacaaaatcccagtgtgatcagctgcaccgagtggacaacwscttgtctttcaaccagaacctatatagcagtaggatcactgggatgttccagtcacctccccctttttttttccccctgggtatatgataatgatccacatcaygtaagagtaaggattttgagcaccctgctatgaaaataacgtaccctgcccttaaacagcaactgcaaatactaaccaaaggttttaagtcgagcaggcatgacacaggaagctaaggaaagraaaggatccttaattcttggagcagccaaaggcgatctgaaaagtggcaaaaaggaaccaacaagactaggg

SEQ ID NO: 30823 - DNA, 600 bp, Chicken  19866894252600_2
ccaaaggtgtgaaagtagccctgcaagcactgacttaaaccttgcaaagaaggcagcaattttaacagacatcagagcactgggttcagaagttgccataagtagctgaggagattatatcccactgcaatttttagcctttgccactttgcaagcaccactatcaccacccagagctgttgattgcaagtcagcatcggctggcctgtcctcagggctatcgcagcttcactcacaacctccaagctctccagaagagacaaaatcccagtgtgatcagctgcaccgagtggacaacwscttgtctttcaaccagaacctatatagcagtaggatcactgggatgttccagtcacctccccctttttttttccccctgggtatatgataatgatccacatcaygtaagagtaaggattttgagcaccctgctatgaaaataacgtaccctgcccttaaacagcaactgcaaatactaaccaaaggttttaagtcgagcaggcatgacacaggaagctaaggaaagraaaggatccttaattcttggagcagccaaaggcgatctgaaaagtggcaaaaaggaaccaacaagactaggga

SEQ ID NO: 30824 - DNA, 600 bp, Chicken  19866894252600_3
gctgaggagattatatcccactgcaatttttagcctttgccactttgcaagcaccactatcaccacccagagctgttgattgcaagtcagcatcggctggcctgtcctcagggctatcgcagcttcactcacaacctccaagctctccagaagagacaaaatcccagtgtgatcagctgcaccgagtggacaacwscttgtctttcaaccagaacctatatagcagtaggatcactgggatgttccagtcacctccccctttttttttccccctgggtatatgataatgatccacatcaygtaagagtaaggattttgagcaccctgctatgaaaataacgtaccctgcccttaaacagcaactgcaaatactaaccaaaggttttaagtcgagcaggcatgacacaggaagctaaggaaagraaaggatccttaattcttggagcagccaaaggcgatctgaaaagtggcaaaaaggaaccaacaagactagggatgtactgagttagaccaggaggttttctcttgataacagtgtccagcagtcccaaggctgtttccagttcattatcaagctgtaagagaaacaatgcggatggt

SEQ ID NO: 30825 - DNA, 600 bp, Chicken  19866894252600_4
ttcactcacaacctccaagctctccagaagagacaaaatcccagtgtgatcagctgcaccgagtggacaacwscttgtctttcaaccagaacctatatagcagtaggatcactgggatgttccagtcacctccccctttttttttccccctgggtatatgataatgatccacatcaygtaagagtaaggattttgagcaccctgctatgaaaataacgtaccctgcccttaaacagcaactgcaaatactaaccaaaggttttaagtcgagcaggcatgacacaggaagctaaggaaagraaaggatccttaattcttggagcagccaaaggcgatctgaaaagtggcaaaaaggaaccaacaagactagggatgtactgagttagaccaggaggttttctcttgataacagtgtccagcagtcccaaggctgtttccagttcattatcaagctgtaagagaaacaatgcggatggttaccataaattactctggtagctgccgagctggcaaaaaaaatatcatcaacgcttacctccttgagtcgttttcttatctgagattccttttccagctgtgcatgcatcagctctttctgct

SEQ ID NO: 30826 - DNA, 600 bp, Chicken  19866894252600_5
cgatctgaaaagtggcaaaaaggaaccaacaagactagggatgtactgagttagaccaggaggttttctcttgataacagtgtccagcagtcccaaggctgtttccagttcattatcaagctgtaagagaaacaatgcggatggttaccataaattactctggtagctgccgagctggcaaaaaaaatatcatcaacgcttacctccttgagtcgttttcttatctgagattccttttccagctgtgcatgcatcagctctttctgcttgctagtcagctgcacctcatcctttatcccyttcttcttctttatctcctgcaaagagcacatcatggacattattaactgggaactcttaacactataccctcacatargaaaaggaacaagttggacacattatttttcacaatttacttttaaacattatgaaaatatttttccaagcataccactctgaggacacaaaatggaaatgaggaggttagcaatacttcagtgttctactaacagcataacgttagtttttcccagctttcaattggtcaaaaattattttctgtcatcagagagctgtctacttcttcctacagtggac

SEQ ID NO: 30827 - DNA, 600 bp, Chicken  19866894252600_6
gtgtccagcagtcccaaggctgtttccagttcattatcaagctgtaagagaaacaatgcggatggttaccataaattactctggtagctgccgagctggcaaaaaaaatatcatcaacgcttacctccttgagtcgttttcttatctgagattccttttccagctgtgcatgcatcagctctttctgcttgctagtcagctgcacctcatcctttatcccyttcttcttctttatctcctgcaaagagcacatcatggacattattaactgggaactcttaacactataccctcacatargaaaaggaacaagttggacacattatttttcacaatttacttttaaacattatgaaaatatttttccaagcataccactctgaggacacaaaatggaaatgaggaggttagcaatacttcagtgttctactaacagcataacgttagtttttcccagctttcaattggtcaaaaattattttctgtcatcagagagctgtctacttcttcctacagtggacggacacatcattctcctcaggacaaagaagttaatccttgaaaaggaatactccaatcaacccggtatgttcccttctt

SEQ ID NO: 30828 - DNA, 600 bp, Chicken  19866894252604_1
aaaatagtctccttttagcctgcttatctcttccctgacatttcttactgagcatcagtgagcaggcagctttgtactgacatctgaaagctactctacagcagcagtgtgtaaaaggctatggaacaagaagtcacatggtttctatattttgtctgtttactgggctcataatgccaaacggcaagttaaaagaatgccctaatcccaaagagtaacgcatgatatttctcctttctgcgtgtgattatccttgtggaaggaaggcattttatacttattcttttaatattcagtttyagtcttctctctgggagcggcagtaattactgaaatgtgtaatacaaacactacataaggtataaattagattatttttatgaaatgtctgataaaatttgaaaagattaacagatgtgaatcctaaaacatttgaatgttggagaaaaargagtatgtctttttagaamggtgttgggaagattggtgttaccttgctacttctggtaagaatggcagggaaagcattctaaccactgtcatgtggttattttcatctttcactgctgctgctttgattatggaatccagttctgaata

SEQ ID NO: 30829 - DNA, 600 bp, Chicken  19866894252604_2
ttgtctgtttactgggctcataatgccaaacggcaagttaaaagaatgccctaatcccaaagagtaacgcatgatatttctcctttctgcgtgtgattatccttgtggaaggaaggcattttatacttattcttttaatattcagtttyagtcttctctctgggagcggcagtaattactgaaatgtgtaatacaaacactacataaggtataaattagattatttttatgaaatgtctgataaaatttgaaaagattaacagatgtgaatcctaaaacatttgaatgttggagaaaaargagtatgtctttttagaamggtgttgggaagattggtgttaccttgctacttctggtaagaatggcagggaaagcattctaaccactgtcatgtggttattttcatctttcactgctgctgctttgattatggaatccagttctgaatactcacctttatcttctgcaattccygagttctaaacatgtttttttaatacacgcgatggcactgcagctgtaggaaagcatctcttaattgtttctaataaagggcatctgatgcttggatttgctatttaaaatgcaagtggaaaatat

SEQ ID NO: 30830 - DNA, 600 bp, Chicken  19866894252604_3
ataatgccaaacggcaagttaaaagaatgccctaatcccaaagagtaacgcatgatatttctcctttctgcgtgtgattatccttgtggaaggaaggcattttatacttattcttttaatattcagtttyagtcttctctctgggagcggcagtaattactgaaatgtgtaatacaaacactacataaggtataaattagattatttttatgaaatgtctgataaaatttgaaaagattaacagatgtgaatcctaaaacatttgaatgttggagaaaaargagtatgtctttttagaamggtgttgggaagattggtgttaccttgctacttctggtaagaatggcagggaaagcattctaaccactgtcatgtggttattttcatctttcactgctgctgctttgattatggaatccagttctgaatactcacctttatcttctgcaattccygagttctaaacatgtttttttaatacacgcgatggcactgcagctgtaggaaagcatctcttaattgtttctaataaagggcatctgatgcttggatttgctatttaaaatgcaagtggaaaatataaagtgaggtgtggaaata

SEQ ID NO: 30831 - DNA, 600 bp, Chicken  19866894252604_4
attactgaaatgtgtaatacaaacactacataaggtataaattagattatttttatgaaatgtctgataaaatttgaaaagattaacagatgtgaatcctaaaacatttgaatgttggagaaaaargagtatgtctttttagaamggtgttgggaagattggtgttaccttgctacttctggtaagaatggcagggaaagcattctaaccactgtcatgtggttattttcatctttcactgctgctgctttgattatggaatccagttctgaatactcacctttatcttctgcaattccygagttctaaacatgtttttttaatacacgcgatggcactgcagctgtaggaaagcatctcttaattgtttctaataaagggcatctgatgcttggatttgctatttaaaatgcaagtggaaaatataaagtgaggtgtggaaataagcttcccctgtcgctcctattctctgtarcccaaatgtggcatgaattagtattggggaaggagtcttactcagtaggattacccacagatgttcagtccagttatggaatagatcataaaatgtgattgtgttgtgaaaagtgctcagcattt

SEQ ID NO: 30832 - DNA, 600 bp, Chicken  19866894252604_5
cttctggtaagaatggcagggaaagcattctaaccactgtcatgtggttattttcatctttcactgctgctgctttgattatggaatccagttctgaatactcacctttatcttctgcaattccygagttctaaacatgtttttttaatacacgcgatggcactgcagctgtaggaaagcatctcttaattgtttctaataaagggcatctgatgcttggatttgctatttaaaatgcaagtggaaaatataaagtgaggtgtggaaataagcttcccctgtcgctcctattctctgtarcccaaatgtggcatgaattagtattggggaaggagtcttactcagtaggattacccacagatgttcagtccagttatggaatagatcataaaatgtgattgtgttgtgaaaagtgctcagcattttaaaaagttgtcattgtgaggtaggtaaacccccatgttttcttttccaatactgtaatgagccatcaagtacaagtatttatcacaccgaagaaggtaggaagtaatgacttaaatcttacagaaagtggcttcttggccacgagctctaagtaacccttattctttaatttgc

SEQ ID NO: 30833 - DNA, 600 bp, Chicken  19866894252607_1
aaaatatacagtatctaaaagacgtaggcaataacagcaggaattcagagttctaaaagtacacacatacaaagcattttggctaaatctggctaaacacctacaaagcaaatcattactcagttaaaaacagaggatgaatgccttgaaagtccaaagtaggaaacagttccacaaggtgacaatgtcatatgagacaatggcttccgcacatttgcaaagagcaggaaaatcatatgagtcaaataacaaaaaattgtaaaatgtcaaatatccttgaataacatttaagtgcactgsggaagggctgtgagctatgtacacctgcaaaaatattaatgtgaatcaaatattgtgaatgaaggtgaaaataaagacagggagtaagagggaaggctgatgatgaaggaaaagagcatctgagagataatataatggaaataggaattcratatccaagtaggtatttcactataattggcgcttgaataaaaaagaaagaaacaaaaacaaatggatgaaagcagtatttaaagaattacaaacacttcttgacatatgcagctattcgtgcaaggaaataagcagaagaatactttg

SEQ ID NO: 30834 - DNA, 600 bp, Chicken  19866894252607_2
gtccaaagtaggaaacagttccacaaggtgacaatgtcatatgagacaatggcttccgcacatttgcaaagagcaggaaaatcatatgagtcaaataacaaaaaattgtaaaatgtcaaatatccttgaataacatttaagtgcactgsggaagggctgtgagctatgtacacctgcaaaaatattaatgtgaatcaaatattgtgaatgaaggtgaaaataaagacagggagtaagagggaaggctgatgatgaaggaaaagagcatctgagagataatataatggaaataggaattcratatccaagtaggtatttcactataattggcgcttgaataaaaaagaaagaaacaaaaacaaatggatgaaagcagtatttaaagaattacaaacacttcttgacatatgcagctattcgtgcaaggaaataagcagaagaatactttgtcactggaattgccagttttactgaaaaaaaatccaaaccaaaaccagataattactactcgtttgattttttaaattgcagcattctgaaccattcctattgtggtttatcaacgtacaacaaagcaaattcaggtttgcttttgtaaaa

SEQ ID NO: 30835 - DNA, 600 bp, Chicken  19866894252613_1
gcaccatgatgaagtcccttccaacccaagccattctgtgattctatgattctgcagattgtacaatctgttcactactgagccattaaacaactgtttccagcggcggaaccattaatgagcttgtttcaagttgattactcggtgctcggcgtcatcttaattgctactttaaatttgcatactgctatttaaccgtgtggtgcactgatgtttacagaggtgaacggattttctcctctccttttataggtcagacacagtgtccttctggggtcaggtgccaagagtgaagccacrcaagccctgaagcartctgggtctcctgcttgtcctgcagggtggcatttttctgtgcaactgagagaacgctcgggtgggcattgaaaaacctggaacaaaataatttcttattattaagtattacttaactgaccgatagtaccctgtttaatctattcattaaattttgttgccaagaccacagaaaggctccatatctgtggaagtgcaatggggaatttaaaaatgtacctttgataggaaaatgaccaaagtaattgaagcaatttctcaggatacaaattaaattctaatagg

SEQ ID NO: 30836 - DNA, 600 bp, Chicken  19866894252613_2
cccttccaacccaagccattctgtgattctatgattctgcagattgtacaatctgttcactactgagccattaaacaactgtttccagcggcggaaccattaatgagcttgtttcaagttgattactcggtgctcggcgtcatcttaattgctactttaaatttgcatactgctatttaaccgtgtggtgcactgatgtttacagaggtgaacggattttctcctctccttttataggtcagacacagtgtccttctggggtcaggtgccaagagtgaagccacrcaagccctgaagcartctgggtctcctgcttgtcctgcagggtggcatttttctgtgcaactgagagaacgctcgggtgggcattgaaaaacctggaacaaaataatttcttattattaagtattacttaactgaccgatagtaccctgtttaatctattcattaaattttgttgccaagaccacagaaaggctccatatctgtggaagtgcaatggggaatttaaaaatgtacctttgataggaaaatgaccaaagtaattgaagcaatttctcaggatacaaattaaattctaataggaaacagcgttgttcc

SEQ ID NO: 30837 - DNA, 600 bp, Chicken  19866894252613_3
gctgtttcccatctgtgtgctctgcttactcgtgtgtatgcataatgttttgctgtgtgttaataaggctgaaggttgactaagagttgggtgtgtgcttgcccacttttgtagctcctaaagaaaactgctggcatggaaacctgccccaaaagactgacatttaaaataacaagctaaacaagctgtcctaaacatgaagtcagctgaagtgtctctttgccatgcctccattcttgttgtgaaataacacattaacatggccagatttaccgatttacatagcaagaaggccttccrtgtttctgggattacaaatggcacacagatagaacccaggcctgcaagcattcttcttcttgcttttgtctcccaaggggtctctgcagagccgcgtaccttctatcaattcagatgttcagctccctggtctgctttctccttcctggtggactgatgagacacccgagcagttggaaaatcagaaggatatctccatgctttgttacagatacttcactacaataaataaacaacctgttctcttggttccttccagaggtggacaatgtaaaatactccatggtctgacttaaggtc

SEQ ID NO: 30838 - DNA, 600 bp, Chicken  19866894252617_1
aacaaaaatacaagaaaatgtgctattgactctaatagagctgcacgcctgaataatgcgggacaccaaagtggtaattaaatcatcaaactgttttatttgatagaattaacagaacgtaagcaacctgccatcaagatacagtttatagacaggacagagttggcttctcatggactggttggtatgatggcaataaaacagggggcactcagcgtgtaaggctgatgttaaagaaaggatatgtctgacttttactgggagatgcaaaggaaattttgcatacttgctttactttgragacaggattcaattcagaagtttggctttttaaacgaagtgcaggttttctacaggcatagctcccccattcatttttgaagcttctgcactgaaaattaacgttcgtggtattctgatgaaatgctaagatagcaacatttaagaaattgtgatacacattcttcccgaggccatgtgaaccacagactgcacgaagcattcagctgcttcacctctgcaggttctgtgcgaaactgagaagttggggcaagaagcagcacctggaatgcattcatcctacacgtcctgggaacgcta

SEQ ID NO: 30839 - DNA, 599 bp, Chicken  19866894252627_1
  misc_feature (1)..(7): n is any nucleotide
nnnnnnntttaaaacaatgcaaatgctgaaggagaaagtttctataaaggtgaactataacaggaaaaattatcagcatctctgctttggtttctgatatagattgatggttttttggaggtagggtggggcaggtttggttgctttgtataggaaaaggatgcatgcctccaaaattatcaggaatacataacagagttttcctcccctgcaaacacctgtggagtaagtactaagatatattactatgcaattatcatacattcacagaccttccttgttcactgactttcagctttsctagcacaacaagtgccattcaaggcatgctatgttccctatatttaaatagttagagatgatttctgaggctgcaagcataagttacacttcagagagcctgaaataaatgagaagtcaacatttttttcgttgctgaccaatactacaaagaataaaaggtcaataatatttgaaccttataatcttaattagctagttacagttcacatttttttcaagaatakatccataaaaaaggcaaaacaggacaatatgaaataagatgctattgtgatattgtgggatttatttcttta

SEQ ID NO: 30840 - DNA, 600 bp, Chicken  19866894252627_2
aagtactaagatatattactatgcaattatcatacattcacagaccttccttgttcactgactttcagctttsctagcacaacaagtgccattcaaggcatgctatgttccctatatttaaatagttagagatgatttctgaggctgcaagcataagttacacttcagagagcctgaaataaatgagaagtcaacatttttttcgttgctgaccaatactacaaagaataaaaggtcaataatatttgaaccttataatcttaattagctagttacagttcacatttttttcaagaatakatccataaaaaaggcaaaacaggacaatatgaaataagatgctattgtgatattgtgggatttatttctttattatttcttcaactgtacttcttgacatgtttttgaaaatctgcttctgaactcagtgacatttgtttaaataatttaaaagaaaatctaatattttagtgtcacagtcattaaaccttaatattaaacaaawtaaaaacaaaaaatcatgcttttgtattaaaaaaacataaatgagagattttctaagtgctaaagtatggttgctgatgtgcactttactatttg

SEQ ID NO: 30841 - DNA, 600 bp, Chicken  19866894252627_3
ttgctgaccaatactacaaagaataaaaggtcaataatatttgaaccttataatcttaattagctagttacagttcacatttttttcaagaatakatccataaaaaaggcaaaacaggacaatatgaaataagatgctattgtgatattgtgggatttatttctttattatttcttcaactgtacttcttgacatgtttttgaaaatctgcttctgaactcagtgacatttgtttaaataatttaaaagaaaatctaatattttagtgtcacagtcattaaaccttaatattaaacaaawtaaaaacaaaaaatcatgcttttgtattaaaaaaacataaatgagagattttctaagtgctaaagtatggttgctgatgtgcactttactatttgctgtacattacctggaggactactctctagtttttattcatattcacaactgtttaaggatgtacagagggatattagtacctacaacaattcactgaagcattctgactaagaggaaacttgtagctttttcagccctctgtatcaacgtatagtaaattatgaagtatttattaaagaaattctgatactggagattattcct

SEQ ID NO: 30842 - DNA, 600 bp, Chicken  19866894252629_1
tctcatttcccaatcaatttcctgatatatttacagtatccgatatgtatttggggaaaggtaataatttttagtagacctgaagacaagagtgaatactgaagaaaatacaatagcaagaagagtacacaaaaagtattacacctatcctgaggcttagcacaaactttaggaaaaaggatttattttactatttcatgaatgaagggtttctttatgcttgtaaaagcatgagcaaacattattaatctagatagatctacactgtatgctattttcttcagttttcaacaccgacarcaaaaaatcttggtgaacaaagcaagaaaagtttgtttgtttctttgttttaaggacaatagtacagtattgtaatcctatgttttaactcttgaaaagcaagtagatgaggcaataatgatcatgtgcatcaaaatctgagtcaccaaattatattagacacatagtaaactagacttatggacaaaataagttttgaaaagctggggaaaaaatttgtttttaatctggcaaaatatctctgcaatataatgcaaattaggaaaaaatataattcttattgcatatttaaatatattt

SEQ ID NO: 30843 - DNA, 600 bp, Chicken  19866894252632_1
tggtgcagtattctcctctttttgtcttctgctggaactcctttacattcacttcttcctgcctttctcaccttactcctcttttctaattgcttttctctttggaccttttgattattggctttgcatctcttaactcagaagtcaccctaagttttggctaaatcctctgtctgtctgtgtaattcagagtgactgctggcctcggcagagtgatggttgttgttctcagaaaaagaccagtcctttttttattgtctttcccttgaaggatatatctgtctctcagcttactcacaycattactaacctttaattygggacaaatatgtctagcatcctgaggaaatagaaaatcctaatctgttcactggttataagatgcttggagaatatcacagctggaaaatatctgttttccttatttatttgccatttcattaatctagctttgggctactaccaacttcgctggtgagggcccaggttttagctactcagttgttatatttattgaattcttttagcttgaatgtttagctgtcatttcagcattttcagatacactaaaaatatcctttctcttctgactcctgataa

SEQ ID NO: 30844 - DNA, 600 bp, Chicken  19866894252632_2
ttttgtcttctgctggaactcctttacattcacttcttcctgcctttctcaccttactcctcttttctaattgcttttctctttggaccttttgattattggctttgcatctcttaactcagaagtcaccctaagttttggctaaatcctctgtctgtctgtgtaattcagagtgactgctggcctcggcagagtgatggttgttgttctcagaaaaagaccagtcctttttttattgtctttcccttgaaggatatatctgtctctcagcttactcacaycattactaacctttaattygggacaaatatgtctagcatcctgaggaaatagaaaatcctaatctgttcactggttataagatgcttggagaatatcacagctggaaaatatctgttttccttatttatttgccatttcattaatctagctttgggctactaccaacttcgctggtgagggcccaggttttagctactcagttgttatatttattgaattcttttagcttgaatgtttagctgtcatttcagcattttcagatacactaaaaatatcctttctcttctgactcctgataacactctttgcctatagttg

SEQ ID NO: 30845 - DNA, 479 bp, Chicken  19866894252633_1
agagattgtttcttttccttcccagtcataaaagctgtgtggatctacccagaacatattgataacttctaaatagttatgcaagcaaatctgtaagcagaacagacagcccgggctgtatttatttctgtgcactgacatggagcagaccttggcgataaagatatctccagcagaatggggcagaggacaaagactgaggagaagggccggcaattgagctgtcacccttcagtgatacaaggtcacgaggttatatccatccagaggaggacagatggggcaaagcttcagtaaaartayaggaataacgtcatacacagctgctgagcacacagagcagccctcccttgctgcttgttacatgtagctcccacccccaagcacaaatgttaaccacatggaggtgcggcagcaaatctcacctgtgcaatacccaaaacacttctccaatatattcttggcccccagaaaacttg

SEQ ID NO: 30846 - DNA, 476 bp, Chicken  19866894252633_2
gattgtttcttttccttcccagtcataaaagctgtgtggatctacccagaacatattgataacttctaaatagttatgcaagcaaatctgtaagcagaacagacagcccgggctgtatttatttctgtgcactgacatggagcagaccttggcgataaagatatctccagcagaatggggcagaggacaaagactgaggagaagggccggcaattgagctgtcacccttcagtgatacaaggtcacgaggttatatccatccagaggaggacagatggggcaaagcttcagtaaaartayaggaataacgtcatacacagctgctgagcacacagagcagccctcccttgctgcttgttacatgtagctcccacccccaagcacaaatgttaaccacatggaggtgcggcagcaaatctcacctgtgcaatacccaaaacacttctccaatatattcttggcccccagaaaacttg

SEQ ID NO: 30847 - DNA, 599 bp, Chicken  19866894252635_1
  misc_feature (1)..(65): n is any nucleotide
nnnnnnnnnnnnnnnnnnnnnnnnnnnnnnnnnnnnnnnnnnnnnnnnnnnnnnnnnnnnnnnnntggaaggaaagccctcattattggtgctcctaactttaagtgtttcactgctgttcagtcaaagtaaaacggggcagtttgggaatgctgttggagctgaaagatgttggattgcagttggccaggccatgaggtcgtgcagtggaataaataccaaacattaaacctaaagaattcctatcagtttgcaaaagtggtgtgagtaaatgatttgcttcttgatttgttcagctgrgcacacgtggatctgttgttggaagggagaaagctgtatacacttcaagtttctcacctccgatgaattcaggtttgaatccaaaagaaagtgatggatacgtggagagaagagcttcacaaaatactgagttttctgctttatttttggccatggctttcatttgtcccaaatttcagagcttttgaggctggcgctttttgtattcagtatctttggatttaaaaawtgcatttctttgctgcaggttagaagtgttagaatgaaggaacttgggaggtcagctgaagtacaggaga

SEQ ID NO: 30848 - DNA, 600 bp, Chicken  19866894252635_2
acctaaagaattcctatcagtttgcaaaagtggtgtgagtaaatgatttgcttcttgatttgttcagctgrgcacacgtggatctgttgttggaagggagaaagctgtatacacttcaagtttctcacctccgatgaattcaggtttgaatccaaaagaaagtgatggatacgtggagagaagagcttcacaaaatactgagttttctgctttatttttggccatggctttcatttgtcccaaatttcagagcttttgaggctggcgctttttgtattcagtatctttggatttaaaaawtgcatttctttgctgcaggttagaagtgttagaatgaaggaacttgggaggtcagctgaagtacaggagagttggcacaaaaatacaaagctcgttagtcttttggatgggttcattggaagccacacgaccttacttggatccctttggaatgaaggaatcgttctcctctccttcagatcatgccctcagattctatgraacagcttcctgtggttaggagttaattttcccatgttgtttgataactgctctgcttttatgattaggaaaaagcacgcaggatgattgatgtgttag

SEQ ID NO: 30849 - DNA, 600 bp, Chicken  19866894252635_3
gttttctgctttatttttggccatggctttcatttgtcccaaatttcagagcttttgaggctggcgctttttgtattcagtatctttggatttaaaaawtgcatttctttgctgcaggttagaagtgttagaatgaaggaacttgggaggtcagctgaagtacaggagagttggcacaaaaatacaaagctcgttagtcttttggatgggttcattggaagccacacgaccttacttggatccctttggaatgaaggaatcgttctcctctccttcagatcatgccctcagattctatgraacagcttcctgtggttaggagttaattttcccatgttgtttgataactgctctgcttttatgattaggaaaaagcacgcaggatgattgatgtgttaggattacaggaaacgtgtcactgtgtgaccctagcatggctgggatatcaaaatgctgtcccttgctcttggtaaaatacaccacatcgatttttccatggcattcctcacccatttgctctggcagagcttgctgtgctccagctgctctggctgacacacctgatgttggcatgaagttctgggatgatgtgaattaaca

SEQ ID NO: 30850 - DNA, 599 bp, Chicken  19866894252637_1
  misc_feature (1)..(106): n is any nucleotide
nnnnnnnnnnnnnnnnnnnnnnnnnnnnnnnnnnnnnnnnnnnnnnnnnnnnnnnnnnnnnnnnnnnnnnnnnnnnnnnnnnnnnnnnnnnnnnnnnnnnnnnnnnttctttgtcttaaaagctggatctctgcccagtatgttcttcttggctcagaaagtaagctgaagaaaacggccaccactctgaactactccaaatcaacctgacccacagaaaaaaaccatcatttgcaagtcagcgataaacaaggccctgcttctctgtgtagagtcgcttgggctccctccctcatctcygaatttcactttcttacaacacgtgaagaaacccgtgtgtactgtagagtttcttcttgacatccagcctttgtttttcattaagatctctcatacacataccatacaatcaagagccatgccagccagccacaggtgtgcaccacatgaacagatgaagacccgattgtgagtcgagtaatgacagtcctgtgtctgtaatgcactcgtccccaagaaccctattacatctgttctatgttagaagggggaattattacttcaatcggactcttcaagatgtgtaagtatgcaaacaa

SEQ ID NO: 30851 - DNA, 479 bp, Chicken  19866894252637_2
agccacaggtgtgcaccacatgaacagatgaagacccgattgtgagtcgagtaatgacagtcctgtgtctgtaatgcactcgtccccaagaaccctattacatctgttctatgttagaagggggaattattacttcaatcggactcttcaagatgtgtaagtatgcaaacaattgatataaagaccaaaaaaggaaaaccaaggaaaagaagacattacaggagcagaagaaaggttaggatcgccctaagcgtaggcagactggtacaagaggccactgcttcaaggaagctataggcycagccacctcttatcttgccttttattccatttttggtttcaaatagtaagtcaaatcttcctgggcacagcaaaatccatattaaattaagatgactttaaacactgctgtgagaatcagttatttagctctgacctacctcttctattaatgatatctatatcatgtaatctaaaaa

SEQ ID NO: 30852 - DNA, 600 bp, Chicken  19866894252642_1
aagcaaagttagaccccaaaaatgggaagaaaactgaaccctgaacactctgtgaccacaaaagcactaccagcactctatgcacgcgttacttctccctccctgtggcttattagcagcgtacataaacttaataggggatgcattcaagaccgaatgctatgacagcgtatcaatagtgatgatataatccatctacaaaagctctacaagaacagattaaatactgctcaaagaaaacccctttgcttatcaggggtaagaagatcaaactccagctctaggctgccgttaactgcratttgggagctgagttaaacgatctgcaggaggcacacgttgctatgctgtgtcatttacacggctatacggggtctgctcaaaggacagcagaatccaccacatcagtgctcttctgggcaccaaacgtctccccccgcgcttctcctcagctgcagtcagcacgaggcacagctgccgcctgctccagcggccttcctcaccactctgctcttccggaataacttgctaacgacctccgttagccatctgccccctctgccattacaactgctacccacacaaaacccgatctcagct

SEQ ID NO: 30853 - DNA, 599 bp, Chicken  19866894252647_1
  misc_feature (1)..(74): n is any nucleotide
nnnnnnnnnnnnnnnnnnnnnnnnnnnnnnnnnnnnnnnnnnnnnnnnnnnnnnnnnnnnnnnnnnnnnnnnnnatgaaaacgaggacagagagcatcgttaggctccaggatgtattgggttccactgagatcagagctgctcctgcaaaagatatggaaaaagtcccagtccgcagcagatgatttcagatacacggaggttcacctgagagcaccaataacagccgcacttcagtgcagctgcagaaagagggagggaagaggttagttaaagaggctacggtgcggctgagcgccsccgaggtccttctcagaccagcctacaattcctggtcgcctgaaggatttgcagtctgcagaaggttggggctggaggagacggcgtcccctgcaggacggccgcraacaaattcaggagcggctgcggggcggctcctcccgcggggctcctcaatgctccgctctctttcccagcgcagcttcttacgggagctgagggaagggaaggaaacgcaccgctgctccgacgcgctgcagcgccgtcccaccgataggggcgattcaacggagctcagcagcgcgttaccacagcgccgg

SEQ ID NO: 30854 - DNA, 600 bp, Chicken  19866894252647_2
ccaggatgtattgggttccactgagatcagagctgctcctgcaaaagatatggaaaaagtcccagtccgcagcagatgatttcagatacacggaggttcacctgagagcaccaataacagccgcacttcagtgcagctgcagaaagagggagggaagaggttagttaaagaggctacggtgcggctgagcgccsccgaggtccttctcagaccagcctacaattcctggtcgcctgaaggatttgcagtctgcagaaggttggggctggaggagacggcgtcccctgcaggacggccgcraacaaattcaggagcggctgcggggcggctcctcccgcggggctcctcaatgctccgctctctttcccagcgcagcttcttacgggagctgagggaagggaaggaaacgcaccgctgctccgacgcgctgcagcgccgtcccaccgataggggcgattcaacggagctcagcagcgcgttaccacagcgccgggaaatgaatcatccgacaacagcaacagacgcaacttagccagcttcccaacagcatccctgggatgccgtgcaatagataataacgagattgagaagccggcttct

SEQ ID NO: 30855 - DNA, 600 bp, Chicken  19866894252651_1
gtgaaatctcacttctggagtagaaagctcgtaacttttgataaccatggacctccactcagcattctcattctgcatgcagagatcacacattcatatgataattgttcaaacccaaaagatacagaacaataattgcaaggtttattttgtggtcttgtgcgccctgggaaatctaagtatgtaaaggttcacaggccaagaggcaccactgggttgtcataaactgaacacagagaaatagtgaatgtgtgtgtgcctgacatgttgcccggagtctactctggcttcttcctctcyttaaaaatatattaatttactcttttccacaaatacaattcagagtgaaacacaaaggcaaagccccaggtgtttttaatacttctaaagattacatcatcaataaattctgcatccttctaaaaaatcttcaaaaaaaacttctcatggtcatttcttaaaattccctttatgtaaatgttcagggaaatgaacagatctaatcaaatccttaattgcttctaatttacgactttttctctatttaggcaataccagtgtctcgctccttcagcaatatcccaagaatagcaacaaaaa

SEQ ID NO: 30856 - DNA, 599 bp, Chicken  19866894252657_1
  misc_feature (1)..(18): n is any nucleotide
nnnnnnnnnnnnnnnnnnatttcaaaaattgaggtcttaaaacttacagaaatggctacttgtatagaaagtaagtgagatgtgatgcaggttaaagcaggcagttggagatgtaacatattctggtatggagacctcattaaacatgctagcactgtaataagacagggcaattctacacaactgaaaattattctaatttccacatggcatttatgcagaaacaaagcaagagtgcaattttcttccaagatcaaccttgtacaccagaaacaccgtgtttttcctattacagtctargtttactatgagagagttaaaaactaataagaagaaggatgttttatctgaaaaacagcaatttaaaaacagtacaacactgaatttctaaatccagcaagtgaacctcagtttttcatcctatacaaaaggtttttacttttggcagtattccttcttgagagtataatggattgatcccacggattggccattcagacacaattcttatcagagaaatataattgagaagaagctcatcagtcatgcctactctcagtctcttyagaacttcagtatgcacatcccatgcagcacag

SEQ ID NO: 30857 - DNA, 540 bp, Chicken  19866894252657_2
ccagaaacaccgtgtttttcctattacagtctargtttactatgagagagttaaaaactaataagaagaaggatgttttatctgaaaaacagcaatttaaaaacagtacaacactgaatttctaaatccagcaagtgaacctcagtttttcatcctatacaaaaggtttttacttttggcagtattccttcttgagagtataatggattgatcccacggattggccattcagacacaattcttatcagagaaatataattgagaagaagctcatcagtcatgcctactctcagtctcttyagaacttcagtatgcacatcccatgcagcacaggagggaaatctctagtcaggatattcccacttaagggaactgctgggcatcttttgcatgactgggcagccaagtccaygtcacagctccagaggagctcagaaatgccttttcctctgcactgtcattctttgttccattaacaatagttaaacatgaatatttagcttgtaaaccgtttgattatctggatactgtaacaggaaa

SEQ ID NO: 30858 - DNA, 428 bp, Chicken  19866894252657_3
actgaatttctaaatccagcaagtgaacctcagtttttcatcctatacaaaaggtttttacttttggcagtattccttcttgagagtataatggattgatcccacggattggccattcagacacaattcttatcagagaaatataattgagaagaagctcatcagtcatgcctactctcagtctcttyagaacttcagtatgcacatcccatgcagcacaggagggaaatctctagtcaggatattcccacttaagggaactgctgggcatcttttgcatgactgggcagccaagtccaygtcacagctccagaggagctcagaaatgccttttcctctgcactgtcattctttgttccattaacaatagttaaacatgaatatttagcttgtaaaccgtttgattatctggatactgtaacaggaaa

SEQ ID NO: 30859 - DNA, 600 bp, Chicken  19866894252660_1
cactgcccgactgctctttagagaagaaattactgctaacacctaaccttgccgttttgactagcaggtcacggacaccaaagagggcatggcgcttctttggcctgttgagctgattagtccagtaagaaaagcaaagctaattaaaaaagaaaaaaaagaaaagatggcttacaagtgctcaggtgtatgccagagctgccaggaagcacctggttactggcaagaggaggggaaagaggaggagaggggaagactaagccttctttctggtcccagcccactagacaagacaatggyaactgcatctgtcaggattcctgctctgcttaaagacaaaataacctggaaaagcacatttcttttcttgggatggtcatttttctgagcctaagtagctttagtgccaataaactcgagaggaaaagacgtatttgttgattcttgtaaaaagatcaagctagcagcttttaagagtgcaattatgctgctttcaacatgtaggscagcaaggtagtaccttgttttaaatactgaaactgttgtggtggatatgagttttacatttgaaccctgaggtacatgatgagctaatctaaa

SEQ ID NO: 30860 - DNA, 600 bp, Chicken  19866894252660_2
aagcacctggttactggcaagaggaggggaaagaggaggagaggggaagactaagccttctttctggtcccagcccactagacaagacaatggaaactgcatctgtcaggattcctgctctgcttaaagacaaaataacctggaaaagcacatttcttttcttgggatggtcatttttctgagcctaagtagctttagtgccaataaactcgagaggaaaagacgtatttgttgattcttgtaaaaagatcaagctagcagcttttaagagtgcaattatgctgctttcaacatgtaggscagcaaggtagtaccttgttttaaatactgaaactgttgtggtggatatgagttttacatttgaaccctgaggtacatgatgagctaatctaaaccactggattcacagagctgttgctgaagccagtaataatatttcataattactttttgcttccttccttgccaataacaaatgccatcgtgctaaagttcagaaacatactgcttttcaacactttgaggacaaatgctgacctaactaccgagtcgagcacttggaacagtaaccaatggcaggaagtttctcacatgtaattt

SEQ ID NO: 30861 - DNA, 600 bp, Chicken  19866894252660_3
ccttccttgccaataacaaatgccatcgtgctaaagttcagaaacatactgcttttcaacactttgaggacaaatgctgacctaactaccgagtcgagcacttggaacagtaaccaatggcaggaagtttctcacatgtaatttaccagcactggaactgcaagtttcggatactcaccagacttctgataacaggagatagctgattttattttcctcctgtgattttgagcattctactgcaacacacactcagaagaattgttcaatgtattttaaatgtactccatataaaaactyaaattccatataagacaaacagacaaattttgcatttcttttagcctgtcttggtcagcagcagatcttttttttttttwaaagagtttttctttttgtttcatttccagtcctcaagccatggattaaaatacacaaacaggctacagctgtatatccttctcaatcctgacacctcctccatttgggaccgttgtctttttctcttttgacttctgtaaactgaaatgcaatactttcatctgcatctactgctaaaagccatttatccccagccacagaccagcccccatgtgtctc

SEQ ID NO: 30862 - DNA, 600 bp, Chicken  19866894252660_4
cctaactaccgagtcgagcacttggaacagtaaccaatggcaggaagtttctcacatgtaatttaccagcactggaactgcaagtttcggatactcaccagacttctgataacaggagatagctgattttattttcctcctgtgattttgagcattctactgcaacacacactcagaagaattgttcaatgtattttaaatgtactccatataaaaactyaaattccatataagacaaacagacaaattttgcatttcttttagcctgtcttggtcagcagcagatcttttttttttttwaaagagtttttctttttgtttcatttccagtcctcaagccatggattaaaatacacaaacaggctacagctgtatatccttctcaatcctgacacctcctccatttgggaccgttgtctttttctcttttgacttctgtaaactgaaatgcaatactttcatctgcatctactgctaaaagccatttatccccagccacagaccagcccccatgtgtctcattaagcacacttacatctggctcttaaaatcccaaccagactatttcttgcctagcagtagcatactgatgaaagaagc

SEQ ID NO: 30863 - DNA, 600 bp, Chicken  19866894252660_5
ctggttgggatttttcttgaagctcctcctgaagtcaatcaagaatagttacatcctcaagaagatcctagcaacactgagagtcccgaggcacgaaaaccatccagtgccatcagccttcttaaagttggatgatttgatcacaagtaactggcatactacatcaccacagtctaattacatatgattaatcaactctgaaccaattacttccagaagtccccactgggccttttcaggtggcaggaacgtcaggaattcccgattctggcatgcaggaagtaattccagactagctcytaccattcatattggcttctgttcaagagcttccactggatcaatcctgtggtggcataaactaaactgaaaaaaacaagaaaggagcaggcaagcaggaacccagccctaaatcactcaggatttcagaggagcaaatagcaccttgtgtcatgctacatgccaacaagcatggccctacctgcaggtctcagcatccttagcacaagaagctctctgcagtcagctggctgtgctattggaaccagctgtatattctatgcagctcctacaggttgctctatgaaaaacaagttgcat

SEQ ID NO: 30864 - DNA, 600 bp, Chicken  19866894252665_1
tagacacactgaagtgttaataaatgaattcttgtggagaagaaacagtaagtttagcatttaaaggctgcacctgcatccactgaagttatagataatgttcacgttgacttcagtgtggtacaataaggtattataagcttacatcagtgcatgtaatcagccttgaatcagctccttcaactgcatattaatgttcatttgtgcaaaaacttctctgtacactgatgttgaatagcgctttcaattatttgttagattgggtacacattctgataatggtattttatgtgtaaatakcagcctaacatttttctcacttgtttgatctaacctgtccaacctagcccaggatagatgtttgtgtttcctccccaccctcctgtcygttgtcttagcacagagcagtgctatttgctttgtctccatgctgcagagtggggagtgggtgaggatggagccttcacagtctcccctttctctggttcttctgttttccttgcaacagcctgtctcaagcttacagagtgggtaggrcctaggaaacatagtggggaagaagtcatagactcakgtcaggatgcaaggaaaaagactgct

SEQ ID NO: 30865 - DNA, 600 bp, Chicken  19866894252665_2
ttatagataatgttcacgttgacttcagtgtggtacaataaggtattataagcttacatcagtgcatgtaatcagccttgaatcagctccttcaactgcatattaatgttcatttgtgcaaaaacttctctgtacactgatgttgaatagcgctttcaattatttgttagattgggtacacattctgataatggtattttatgtgtaaatakcagcctaacatttttctcacttgtttgatctaacctgtccaacctagcccaggatagatgtttgtgtttcctccccaccctcctgtcygttgtcttagcacagagcagtgctatttgctttgtctccatgctgcagagtggggagtgggtgaggatggagccttcacagtctcccctttctctggttcttctgttttccttgcaacagcctgtctcaagcttacagagtgggtaggrcctaggaaacatagtggggaagaagtcatagactcakgtcaggatgcaaggaaaaagactgctgtgaaatactttccattataacgtttcacagtagtctgaggagtgaaggggttagataggggagagtgatcttcactcattacctttg

SEQ ID NO: 30866 - DNA, 600 bp, Chicken  19866894252665_3
gcgctttcaattatttgttagattgggtacacattctgataatggtattttatgtgtaaatakcagcctaacatttttctcacttgtttgatctaacctgtccaacctagcccaggatagatgtttgtgtttcctccccaccctcctgtcygttgtcttagcacagagcagtgctatttgctttgtctccatgctgcagagtggggagtgggtgaggatggagccttcacagtctcccctttctctggttcttctgttttccttgcaacagcctgtctcaagcttacagagtgggtaggrcctaggaaacatagtggggaagaagtcatagactcakgtcaggatgcaaggaaaaagactgctgtgaaatactttccattataacgtttcacagtagtctgaggagtgaaggggttagataggggagagtgatcttcactcattacctttgaggttacactgatgcctaaaaatattagtagtatccaaaagatttcataaccttatgatatttatagatgtaagacactatagaagaggcatcagtgttcattatcagctaagtcatttcacccataggtggttttatccagggtacag

SEQ ID NO: 30867 - DNA, 600 bp, Chicken  19866894252665_4
gataatggtattttatgtgtaaatakcagcctaacatttttctcacttgtttgatctaacctgtccaacctagcccaggatagatgtttgtgtttcctccccaccctcctgtcygttgtcttagcacagagcagtgctatttgctttgtctccatgctgcagagtggggagtgggtgaggatggagccttcacagtctcccctttctctggttcttctgttttccttgcaacagcctgtctcaagcttacagagtgggtaggrcctaggaaacatagtggggaagaagtcatagactcakgtcaggatgcaaggaaaaagactgctgtgaaatactttccattataacgtttcacagtagtctgaggagtgaaggggttagataggggagagtgatcttcactcattacctttgaggttacactgatgcctaaaaatattagtagtatccaaaagatttcataaccttatgatatttatagatgtaagacactatagaagaggcatcagtgttcattatcagctaagtcatttcacccataggtggttttatccagggtacaggtggaggatataaatcatctattctgaaattttcaag

SEQ ID NO: 30868 - DNA, 600 bp, Chicken  19866894252676_1
ggctttaatgacacagttagaatatttatgacaaaacagctggagtcactggcatatcaaccacttaaacataccacaccattctgttgttctcttcttcttaattctagctgccaacagtgtgttttaggctaaaaataaagcatttaaagaaccctgaatcaaaaaaaaatgatccagaaacacattaaggtataaaccccaagcttaaaaacaaacaaaaaccaaaccactctttaaagagatcccattaatgctaatagtatttctaggaatagtcactcttatgagaaactaatwtkwaagrcttgttctttmaattacttttcacagggcagtttaccttccataacattagtgcaatgagattttgttcactctaggagagtaggtaggtagatattctcactgaatcagagttctgcatatactctttgatgaggactattaaaccacagctttccactccttccaacttcaaagctgtctcttactgcaagcagactacagaaagaaagaaaaactgtctaatatattgtggttccttcaggcacaggtagattagagatcttcatatgctgctactgtggttgaaggacc

SEQ ID NO: 30869 - DNA, 600 bp, Chicken  19866894252676_2
ctttaatgacacagttagaatatttatgacaaaacagctggagtcactggcatatcaaccacttaaacataccacaccattctgttgttctcttcttcttaattctagctgccaacagtgtgttttaggctaaaaataaagcatttaaagaaccctgaatcaaaaaaaaatgatccagaaacacattaaggtataaaccccaagcttaaaaacaaacaaaaaccaaaccactctttaaagagatcccattaatgctaatagtatttctaggaatagtcactcttatgagaaactaatwtkwaagrcttgttctttmaattacttttcacagggcagtttaccttccataacattagtgcaatgagattttgttcactctaggagagtaggtaggtagatattctcactgaatcagagttctgcatatactctttgatgaggactattaaaccacagctttccactccttccaacttcaaagctgtctcttactgcaagcagactacagaaagaaagaaaaactgtctaatatattgtggttccttcaggcacaggtagattagagatcttcatatgctgctactgtggttgaaggaccaa

SEQ ID NO: 30870 - DNA, 600 bp, Chicken  19866894252676_3
tttaatgacacagttagaatatttatgacaaaacagctggagtcactggcatatcaaccacttaaacataccacaccattctgttgttctcttcttcttaattctagctgccaacagtgtgttttaggctaaaaataaagcatttaaagaaccctgaatcaaaaaaaaatgatccagaaacacattaaggtataaaccccaagcttaaaaacaaacaaaaaccaaaccactctttaaagagatcccattaatgctaatagtatttctaggaatagtcactcttatgagaaactaatwtkwaagrcttgttctttmaattacttttcacagggcagtttaccttccataacattagtgcaatgagattttgttcactctaggagagtaggtaggtagatattctcactgaatcagagttctgcatatactctttgatgaggactattaaaccacagctttccactccttccaacttcaaagctgtctcttactgcaagcagactacagaaagaaagaaaaactgtctaatatattgtggttccttcaggcacaggtagattagagatcttcatatgctgctactgtggttgaaggaccaat

SEQ ID NO: 30871 - DNA, 600 bp, Chicken  19866894252676_4
atgacacagttagaatatttatgacaaaacagctggagtcactggcatatcaaccacttaaacataccacaccattctgttgttctcttcttcttaattctagctgccaacagtgtgttttaggctaaaaataaagcatttaaagaaccctgaatcaaaaaaaaatgatccagaaacacattaaggtataaaccccaagcttaaaaacaaacaaaaaccaaaccactctttaaagagatcccattaatgctaatagtatttctaggaatagtcactcttatgagaaactaatwtkwaagrcttgttctttmaattacttttcacagggcagtttaccttccataacattagtgcaatgagattttgttcactctaggagagtaggtaggtagatattctcactgaatcagagttctgcatatactctttgatgaggactattaaaccacagctttccactccttccaacttcaaagctgtctcttactgcaagcagactacagaaagaaagaaaaactgtctaatatattgtggttccttcaggcacaggtagattagagatcttcatatgctgctactgtggttgaaggaccaatgttg

SEQ ID NO: 30872 - DNA, 600 bp, Chicken  19866894252676_5
agaatatttatgacaaaacagctggagtcactggcatatcaaccacttaaacataccacaccattctgttgttctcttcttcttaattctagctgccaacagtgtgttttaggctaaaaataaagcatttaaagaaccctgaatcaaaaaaaaatgatccagaaacacattaaggtataaaccccaagcttaaaaacaaacaaaaaccaaaccactctttaaagagatcccattaatgctaatagtatttctaggaatagtcactcttatgagaaactaatwtkwaagrcttgttctttmaattacttttcacagggcagtttaccttccataacattagtgcaatgagattttgttcactctaggagagtaggtaggtagatattctcactgaatcagagttctgcatatactctttgatgaggactattaaaccacagctttccactccttccaacttcaaagctgtctcttactgcaagcagactacagaaagaaagaaaaactgtctaatatattgtggttccttcaggcacaggtagattagagatcttcatatgctgctactgtggttgaaggaccaatgttgaaaaaaaatgt

SEQ ID NO: 30873 - DNA, 600 bp, Chicken  19866894252676_6
atatttatgacaaaacagctggagtcactggcatatcaaccacttaaacataccacaccattctgttgttctcttcttcttaattctagctgccaacagtgtgttttaggctaaaaataaagcatttaaagaaccctgaatcaaaaaaaaatgatccagaaacacattaaggtataaaccccaagcttaaaaacaaacaaaaaccaaaccactctttaaagagatcccattaatgctaatagtatttctaggaatagtcactcttatgagaaactaatwtkwaagrcttgttctttmaamtacttttcacagggcagtttaccttccataacattagtgcaatgagattttgttcactctaggagagtaggtaggtagatattctcactgaatcagagttctgcatatactctttgatgaggactattaaaccacagctttccactccttccaacttcaaagctgtctcttactgcaagcagactacagaaagaaagaaaaactgtctaatatattgtggttccttcaggcacaggtagattagagatcttcatatgctgctactgtggttgaaggaccaatgttgaaaaaaaatgttgg

SEQ ID NO: 30874 - DNA, 599 bp, Chicken  19866894252677_1
  misc_feature (1)..(23): n is any nucleotide
nnnnnnnnnnnnnnnnnnnnnnncactgccagctcatgttgaatctttcatcaatcgacactccccaaatccttctcaggactgctctcaagccattctctgcacaaactgtatctgtgcttgggattgccctgacccatatgcaggaccttgcacttggcttgttgaactttcatgaggttggcattggtccatctctcaagcctgtccaggtccccctggatagaatcccttccctctactgtgtcatctgcaccactcagcttggtgccatctgcaaacttgctgaaggtgcactcratcccactgtccatgttgcctacaaagatgttaaataacatcgatccctgcagaatgccactcatcactggtttccacttggacactgagctgttgatcacaactctctgagtgcaaccatccaaccaattccttatccagagagtagtccatccatcaaatccatttytctccaatttgacaacaggatgccatgtgggacagtgtcaaatgctttgcacaagtccaggtagatgatatgagttgctctttctttatcactgatgctgtaactccatcataagaggccaccacgtttg

SEQ ID NO: 30875 - DNA, 600 bp, Chicken  19866894252677_2
ctttcatgaggttggcattggtccatctctcaagcctgtccaggtccccctggatagaatcccttccctctactgtgtcatctgcaccactcagcttggtgccatctgcaaacttgctgaaggtgcactcratcccactgtccatgttgcctacaaagatgttaaataacatcgatccctgcagaatgccactcatcactggtttccacttggacactgagctgttgatcacaactctctgagtgcaaccatccaaccaattccttatccagagagtagtccatccatcaaatccatttytctccaatttgacaacaggatgccatgtgggacagtgtcaaatgctttgcacaagtccaggtagatgatatgagttgctctttctttatcactgatgctgtaactccatcataagaggccaccacgtttgtcaggagtgacttgtccttggtgaagccatgttggttaccatcgattacctcatctttattttccatctgccttagtagagcmtacaggaggatctgttccatgatcttgtcaggcacagaggtgagactaattgtcctgtggttccttggatcttctttttttcccttc

SEQ ID NO: 30876 - DNA, 600 bp, Chicken  19866894252677_3
acactgagctgttgatcacaactctctgagtgcaaccatccaaccaattccttatccagagagtagtccatccatcaaatccatttytctccaatttgacaacaggatgccatgtgggacagtgtcaaatgctttgcacaagtccaggtagatgatatgagttgctctttctttatcactgatgctgtaactccatcataagaggccaccacgtttgtcaggagtgacttgtccttggtgaagccatgttggttaccatcgattacctcatctttattttccatctgccttagtagagcmtacaggaggatctgttccatgatcttgtcaggcacagaggtgagactaattgtcctgtggttccttggatcttctttttttcccttcytgaaaatggaggttgtggttccccttttccaatcagtgggaacttcaccagactgccacgtcctttcaggtagcggcttggcaacttcattcaccagttccctcagatcccagggaaagatctcgtcaggtgccatggacttgtgcaccttcagatggtctcgagcctgatcttcacttacagcaggcagatctaccttttccaagttctta

SEQ ID NO: 30877 - DNA, 600 bp, Chicken  19866894252677_4
ctccaatttgacaacaggatgccatgtgggacagtgtcaaatgctttgcacaagtccaggtagatgatatgagttgctctttctttatcactgatgctgtaactccatcataagaggccaccacgtttgtcaggagtgacttgtccttggtgaagccatgttggttaccatcgattacctcatctttattttccatctgccttagtagagcmtacaggaggatctgttccatgatcttgtcaggcacagaggtgagactaattgtcctgtggttccttggatcttctttttttcccttcytgaaaatggaggttgtggttccccttttccaatcagtgggaacttcaccagactgccacgtcctttcaggtagcggcttggcaacttcattcaccagttccctcagatcccagggaaagatctcgtcaggtgccatggacttgtgcaccttcagatggtctcgagcctgatcttcacttacagcaggcagatctaccttttccaagttcttaccattgctttctgcaacttggrctttgtggctagagcccttgtcagtgaagactgaggcaaggaagtcactgaacacctcagatttct

SEQ ID NO: 30878 - DNA, 600 bp, Chicken  19866894252677_5
tcttgtcaggcacagaggtgagactaattgtcctgtggttccttggatcttctttttttcccttcytgaaaatggaggttgtggttccccttttccaatcagtgggaacttcaccagactgccacgtcctttcaggtagcggcttggcaacttcattcaccagttccctcagatcccagggaaagatctcgtcaggtgccatggacttgtgcaccttcagatggtctcgagcctgatcttcacttacagcaggcagatctaccttttccaagttcttaccattgctttctgcaacttggrctttgtggctagagcccttgtcagtgaagactgaggcaaggaagtcactgaacacctcagatttctccatatctcytgtgaccagatctccagtttcckaccggagagggtccacatcctcccagacattctatttatcactgatatacctgtagaatttcttcttggtcccctcgctgtccctggctagatttaattctgtctgggttttagctttttccctgcctgctctgacaacgttgcagtcctcccaggcaacctgttcctgcttccactccctatagactttaagtaagtcca

SEQ ID NO: 30879 - DNA, 600 bp, Chicken  19866894252677_6
ggttgtggttccccttttccaatcagtgggaacttcaccagactgccacgtcctttcaggtagcggcttggcaacttcattcaccagttccctcagatcccagggaaagatctcgtcaggtgccatggacttgtgcaccttcagatggtctcgagcctgatcttcacttacagcaggcagatctaccttttccaagttcttaccattgctttctgcaacttggrctttgtggctagagcccttgtcagtgaagactgaggcaaggaagtcactgaacacctcagatttctccatatctcytgtgaccagatctccagtttcckaccggagagggtccacatcctcccagacattctatttatcactgatatacctgtagaatttcttcttggtcccctcgctgtccctggctagatttaattctgtctgggttttagctttttccctgcctgctctgacaacgttgcagtcctcccaggcaacctgttcctgcttccactccctatagactttaagtaagtccaagagctccttgttgatccacagaggcctcctggcgttcttgcctgccttcctttttctcaggatgcaatgcttctg

SEQ ID NO: 30880 - DNA, 600 bp, Chicken  19866894252677_7
cagtgggaacttcaccagactgccacgtcctttcaggtagcggcttggcaacttcattcaccagttccctcagatcccagggaaagatctcgtcaggtgccatggacttgtgcaccttcagatggtctcgagcctgatcttcacttacagcaggcagatctaccttttccaagttcttaccattgctttctgcaacttggrctttgtggctagagcccttgtcagtgaagactgaggcaaggaagtcactgaacacctcagatttctccatatctcytgtgaccagatctccagtttcckaccggagagggtccacatcctcccagacattctatttatcactgatatacctgtagaatttcttcttggtcccctcgctgtccctggctagatttaattctgtctgggttttagctttttccctgcctgctctgacaacgttgcagtcctcccaggcaacctgttcctgcttccactccctatagactttaagtaagtccaagagctccttgttgatccacagaggcctcctggcgttcttgcctgccttcctttttctcaggatgcaatgcttctgggctaggaggagatggttcttga

SEQ ID NO: 30881 - DNA, 600 bp, Chicken  19866894252684_1
ttgatcttggagaaaaggcggccttcgctccttctataaaccaaaagattaagcttacttataaaggattagcagagctctcttctgttaatttgtagtggtgtagtcaaagtgtctgattctacatcagtggaaaatccattatcgatcaatgggaattttacagctgaagccaaagggattagaagctcatcgtttggaagtgactgaaggagagaaagagctggatatgcttgttgtcacatggctgtgagccaccactgcggtgtggccaccagaaatggcaaagcaaagtcctgrgttgcttcaggcaggctttttcaagagatgtatgaaaggaygtggggcagggctgtggagaaagcttgtttgggatgctgctgactgtctttcttactcacctttaagaaaaaatatttcagaatggaagagaaggtgacctgaagtcctgcagattgtgccgtggtggggagaatgartgtggaataggrgccctggtttgaggaggtctgatgtccaggatttggttaaagcagtggggagaaacacggatctggaattgagggctgtgtgggagcactggtgcctgcaccgtgctgc

SEQ ID NO: 30882 - DNA, 600 bp, Chicken  19866894252684_2
caaaagattaagcttacttataaaggattagcagagctctcttctgttaatttgtagtggtgtagtcaaagtgtctgattctacatcagtggaaaatccattatcgatcaatgggaattttacagctgaagccaaagggattagaagctcatcgtttggaagtgactgaaggagagaaagagctggatatgcttgttgtcacatggctgtgagccaccactgcggtgtggccaccagaaatggcaaagcaaagtcctgrgttgcttcaggcaggctttttcaagagatgtatgaaaggaygtggggcagggctgtggagaaagcttgtttgggatgctgctgactgtctttcttactcacctttaagaaaaaatatttcagaatggaagagaaggtgacctgaagtcctgcagattgtgccgtggtggggagaatgartgtggaataggrgccctggtttgaggaggtctgatgtccaggatttggttaaagcagtggggagaaacacggatctggaattgagggctgtgtgggagcactggtgcctgcaccgtgctgccacctggggacatcggtttgagaggtgagcctggggaagcg

SEQ ID NO: 30883 - DNA, 600 bp, Chicken  19866894252684_3
gattagaagctcatcgtttggaagtgactgaaggagagaaagagctggatatgcttgttgtcacatggctgtgagccaccactgcggtgtggccaccagaaatggcaaagcaaagtcctgrgttgcttcaggcaggctttttcaagagatgtatgaaaggaygtggggcagggctgtggagaaagcttgtttgggatgctgctgactgtctttcttactcacctttaagaaaaaatatttcagaatggaagagaaggtgacctgaagtcctgcagattgtgccgtggtggggagaatgartgtggaataggrgccctggtttgaggaggtctgatgtccaggatttggttaaagcagtggggagaaacacggatctggaattgagggctgtgtgggagcactggtgcctgcaccgtgctgccacctggggacatcggtttgagaggtgagcctggggaagcggcaggaggaaatgactgctggtggtattgaaggtggtgtcctggcaaattagacggcctgcaaaagtttcttcccttaataaacaacagctgcttttccttctggtggagtgcacggaccaatgctgttactaccaga

SEQ ID NO: 30884 - DNA, 600 bp, Chicken  19866894252684_4
atcgtttggaagtgactgaaggagagaaagagctggatatgcttgttgtcacatggctgtgagccaccactgcggtgtggccaccagaaatggcaaagcaaagtcctgrgttgcttcaggcaggctttttcaagagatgtatgaaaggaygtggggcagggctgtggagaaagcttgtttgggatgctgctgactgtctttcttactcacctttaagaaaaaatatttcagaatggaagagaaggtgacctgaagtcctgcagattgtgccgtggtggggagaatgartgtggaataggrgccctggtttgaggaggtctgatgtccaggatttggttaaagcagtggggagaaacacggatctggaattgagggctgtgtgggagcactggtgcctgcaccgtgctgccacctggggacatcggtttgagaggtgagcctggggaagcggcaggaggaaatgactgctggtggtattgaaggtggtgtcctggcaaattagacggcctgcaaaagtttcttcccttaataaacaacagctgcttttccttctggtggagtgcacggaccaatgctgttactaccagaactctaagaaaa

SEQ ID NO: 30885 - DNA, 600 bp, Chicken  19866894252684_5
tttgtagcttcatcatttattaatctagcgcattagatgagaagctttatagatttgcttgcctaaggaaaaaggagaggaagatagataaaggccaaactggatccacgtattctgtcttgcactttgagatactgtcaaactgttgcctcatttttagtacgtttctgtaagaaagagcacttcccccaggatggctaattgtgacctggtgcttaatcagtctgggtacgctgagatttggataaagttgctcgtgcagttcctttgccctcctcatcacgctgctggtatagagaygtagaattgtaaacgggcaggcaaaataaaatacagatgagaatgctgygaaaaggtacrttttgtactatcttggccatcttaattggctgtcctagttatgggagggaagccagaaaatagcattggctgtgttgcagtaatcagctcagaagtgacagaagcgctcttctttcttaccttgatgtagctggaggggggttggaaattagacatttgtctcggcagctccacgtagccccaacgctgccagccacagattagtaaaataaatccctcacgttcgtatttaaatgggaa

SEQ ID NO: 30886 - DNA, 600 bp, Chicken  19866894252684_6
tagatttgcttgcctaaggaaaaaggagaggaagatagataaaggccaaactggatccacgtattctgtcttgcactttgagatactgtcaaactgttgcctcatttttagtacgtttctgtaagaaagagcacttcccccaggatggctaattgtgacctggtgcttaatcagtctgggtacgctgagatttggataaagttgctcgtgcagttcctttgccctcctcatcacgctgctggtatagagaygtagaattgtaaacgggcaggcaaaataaaatacagatgagaatgctgygaaaaggtacrttttgtactatcttggccatcttaattggctgtcctagttatgggagggaagccagaaaatagcattggctgtgttgcagtaatcagctcagaagtgacagaagcgctcttctttcttaccttgatgtagctggaggggggttggaaattagacatttgtctcggcagctccacgtagccccaacgctgccagccacagattagtaaaataaatccctcacgttcgtatttaaatgggaagtataaagaacattttctgcctttcttttcttttttaatgtgtcgtttg

SEQ ID NO: 30887 - DNA, 600 bp, Chicken  19866894252684_7
gcctaaggaaaaaggagaggaagatagataaaggccaaactggatccacgtattctgtcttgcactttgagatactgtcaaactgttgcctcatttttagtacgtttctgtaagaaagagcacttcccccaggatggctaattgtgacctggtgcttaatcagtctgggtacgctgagatttggataaagttgctcgtgcagttcctttgccctcctcatcacgctgctggtatagagaygtagaattgtaaacgggcaggcaaaataaaatacagatgagaatgctgygaaaaggtacrttttgtactatcttggccatcttaattggctgtcctagttatgggagggaagccagaaaatagcattggctgtgttgcagtaatcagctcagaagtgacagaagcgctcttctttcttaccttgatgtagctggaggggggttggaaattagacatttgtctcggcagctccacgtagccccaacgctgccagccacagattagtaaaataaatccctcacgttcgtatttaaatgggaagtataaagaacattttctgcctttcttttcttttttaatgtgtcgtttgttggctggtac

SEQ ID NO: 30888 - DNA, 600 bp, Chicken  19866894252688_1
cctcatggaccaaacagtacgaaggaggaatactgaaatacggaaatgaaaggaaaaataaacacaacataagccctcaaaggcacagagacagccaaaagactgacttgggacaaaacactcggagaatcttctcaaagacgatttggcaaagaaaacaaagcccaatttcccttgagtcaacatccaaacccctcgggctcgctcagccccgcggcccctctcgccctcgggccccacacgcactcagccggcagaacgaagccgcacggcgccgggccctgcgccccgcacacgtaraagctcttccccttgttggggccatcgcggacgccggtcttcagaaggcagagggagcctgcagggcggagaagagggggacgaattagactcgcagacggcagcctgaatacagaatatccgcccctctacccaccggccctcaccgtgctccgcgcacacaaccgcctccatcgcagcacaaccaccccgcccctgcctgcaaaccgaccaatcacaccgagcgccggcggatggaccgcccactcaggacgtgacagccaatcgccgcggcgccctggcttctctccgccccctctc

SEQ ID NO: 30889 - DNA, 600 bp, Chicken  19866894252688_2
tgacaagtgagaaaatgatgctggtaataacagaaatacggagaggctataatttgattagcaaaaatattaacaacattcatactaaatactggattagtgaaatgaacactgagagcccaattcagtactggtgtggacagctgcagcctcgctgacctgcctgaagactgaatttggctcagcatcgttgtgaaaaatgtcccttttacaaaacatgagtgatttgtgcgttcaccatgtgacataaaaatttttgctcctaaaaaccccactagttttggcctggcactgacttcrcttcacccacctttgccctttccgcattcactgacactttygctcaactygttgggaagcaggaatgtgaaagaaaagggatgcagataaaacacttcaagccctctgagggaagcacataccttaaggagcactgaccactatgaagaactgcgactgtagtattaatgacagcaataataacctcagtgcagggcatttcctggcaaacagtgggatctgggttttgaagtgccccaaagtgccaacttacctaacacacagaaagtaaaaaaatacaggagcgtggagctgtacaca

SEQ ID NO: 30890 - DNA, 600 bp, Chicken  19866894252688_3
agaggctataatttgattagcaaaaatattaacaacattcatactaaatactggattagtgaaatgaacactgagagcccaattcagtactggtgtggacagctgcagcctcgctgacctgcctgaagactgaatttggctcagcatcgttgtgaaaaatgtcccttttacaaaacatgagtgatttgtgcgttcaccatgtgacataaaaatttttgctcctaaaaaccccactagttttggcctggcactgacttcrcttcacccacctttgccctttccgcattcactgacactttygctcaactygttgggaagcaggaatgtgaaagaaaagggatgcagataaaacacttcaagccctctgagggaagcacataccttaaggagcactgaccactatgaagaactgcgactgtagtattaatgacagcaataataacctcagtgcagggcatttcctggcaaacagtgggatctgggttttgaagtgccccaaagtgccaacttacctaacacacagaaagtaaaaaaatacaggagcgtggagctgtacacacactgctgctgagcaatcagctctctatccagtccacagct

SEQ ID NO: 30891 - DNA, 600 bp, Chicken  19866894252688_4
aatttgattagcaaaaatattaacaacattcatactaaatactggattagtgaaatgaacactgagagcccaattcagtactggtgtggacagctgcagcctcgctgacctgcctgaagactgaatttggctcagcatcgttgtgaaaaatgtcccttttacaaaacatgagtgatttgtgcgttcaccatgtgacataaaaatttttgctcctaaaaaccccactagttttggcctggcactgacttcrcttcacccacctttgccctttccgcattcactgacactttygctcaactygttgggaagcaggaatgtgaaagaaaagggatgcagataaaacacttcaagccctctgagggaagcacataccttaaggagcactgaccactatgaagaactgcgactgtagtattaatgacagcaataataacctcagtgcagggcatttcctggcaaacagtgggatctgggttttgaagtgccccaaagtgccaacttacctaacacacagaaagtaaaaaaatacaggagcgtggagctgtacacacactgctgctgagcaatcagctctctatccagtccacagctcatttcatc

SEQ ID NO: 30892 - DNA, 600 bp, Chicken  19866894252692_1
ccactggagggcggcagagagataaggcaacatacagaaagtggagggtccggaaggagacgactccattcccctcctttcgggtctttgaccctgtgctttctctttttccccctcctcacgttgaaaaaaaagtcatacttcaacacagcaaacttggcaggtgatgctttgcttctggagtgttaatttaactcctacaaatgcatggggtggtacaatctgaaaaagaaagagctattagacctgtttcagttgtcttgtttcagggctgtaacactgctgtttcacttcgctgcyttgyccaagtgtgggattcctgtgaggtgtccctgaaagtagtacaaccttacctgttggctgttattctgctttttttagcttttcttttcgtggcacaagtaacttgcgaatataaggcaacaccaataataaggtgaaaaacaacacgtggccaaggaaataaatagacttatacacctgtaaagagaaagggttaagggtcagcaagcagacatctgctaagaccacacaaaagggcaagcaggggtaaaagggattggttgcgtggactgtgtgttttaagttaataaatacctt

SEQ ID NO: 30893 - DNA, 600 bp, Chicken  19866894252692_2
tggagggcggcagagagataaggcaacatacagaaagtggagggtccggaaggagacgactccattcccctcctttcgggtctttgaccctgtgctttctctttttccccctcctcacgttgaaaaaaaagtcatacttcaacacagcaaacttggcaggtgatgctttgcttctggagtgttaatttaactcctacaaatgcatggggtggtacaatctgaaaaagaaagagctattagacctgtttcagttgtcttgtttcagggctgtaacactgctgtttcacttcgctgcyttgyccaagtgtgggattcctgtgaggtgtccctgaaagtagtacaaccttacctgttggctgttattctgctttttttagcttttcttttcgtggcacaagtaacttgcgaatataaggcaacaccaataataaggtgaaaaacaacacgtggccaaggaaataaatagacttatacacctgtaaagagaaagggttaagggtcagcaagcagacatctgctaagaccacacaaaagggcaagcaggggtaaaagggattggttgcgtggactgtgtgttttaagttaataaataccttcatc

SEQ ID NO: 30894 - DNA, 551 bp, Chicken  19866894252695_1
aggcagtgctttaaaggccgtgcccacccctcagcacagccagaactcagctttgcctttctgccacccatactgctctgcccacagaccgctcttctcagcgccacctctgcagcacacagcaccagccccacctcctgtgcttggtgtctcttcataagaattgtttttggataacaaaagcccaccccgaggcccgattacttctgatccatgctataccctggaggaggcgatgcctaaaaatacctcttctccacatccacggctccacgctgctcacagtggtcccaaagtggygcagaggaatttcacggctgaagaacagccacaggaacatcatcctgccaggggagaccacctcactggggctgctgacccgcactgcacttcgtgtcttgtatttcacctgagattacagcaaacttcttcagcactgtattttttttccccctgtaaagggcagacagccgtgccctgggggttttttcttttcttccaaacagttccagccacagcttcagctctgccccacaatgggcaccgatggc

SEQ ID NO: 30895 - DNA, 600 bp, Chicken  19866894252705_1
tcctgcaaccataaacatttcagtttggcagactaaactgtagtggtgtcctccgagctggggctgacgggaacactgtatgctctccctgctttcccctgccatatggctgggctttctgggtccgcctgcagcacttcagttcaacagcctccatggggtgagggtggtgtgtgtgcacatgtgtgcaccctctgatttgtgtgctgtctgtggtcctgtggattgtatcagagggctgggaagtgtggtcagttcgtcccttggcaggcattctacagtgaatgagttttacttaaygtgtgctgcagcggtctctgcttgggaagagagttgggaatggagagcaccaggtttttgcaccgggacacataacaccttcatgcctctgagaaacgatggtttcagtgctgctggccagcagagtgcagcagtgctgaagccatcgtgggtctgagtgtrttggttcagtcattcagctgttaccgagggtctccttggggttttattcccaagtctagagttcatgtcattccctcgagggaaacaggaacttgcagggctaacctctgttgagcactcctctattaaacagacctg

SEQ ID NO: 30896 - DNA, 600 bp, Chicken  19866894252705_2
gagggtggtgtgtgtgcacatgtgtgcaccctctgatttgtgtgctgtctgtggtcctgtggattgtatcagagggctgggaagtgtggtcagttcgtcccttggcaggcattctacagtgaatgagttttacttaaygtgtgctgcagcggtctctgcttgggaagagagttgggaatggagagcaccaggtttttgcaccgggacacataacaccttcatgcctctgagaaacgatggtttcagtgctgctggccagcagagtgcagcagtgctgaagccatcgtgggtctgagtgtrttggttcagtcattcagctgttaccgagggtctccttggggttttattcccaagtctagagttcatgtcattccctcgagggaaacaggaacttgcagggctaacctctgttgagcactcctctattaaacagacctggcaaagctggtgcattggtagattaagtccaaaacccagtgcagaacgtagccagggctttgagctgccccatgttgcgaggggacccagcagccagatctgtctggaaatactgctacaagtgcgtaacaaaatgtatagctgaatgtttgctgagtgctc

SEQ ID NO: 30897 - DNA, 600 bp, Chicken  19866894252710_1
ctccaggcactgcactttgcattccagctatttgttttctgatttcacaatctttacggttttctccattatctttcacagcacatgcataaaagcccacaaaaacaaaatctgacagactgtgccggggaacagtaaaattgactctacacaatgtgctgtaaaatgcaatgaactaaataaatagaaaaccaggtggaaccatttcttagtttgtttcatctaccttgagtgttacttggagcagcactaggtagacatttgctaacaaacatgcaagtttgcagcagatggtcctckattaaaaatgcgatctcagagagctctgggaagcccttggagagctgaggaaaccgacaggttggtatttatgtatctccccagaattcaggatataaagccaacccatgtgagccatatacccaaagagaaggataacgcaattctctcctatctctgccctgctgaggtactgattctcggcaggggaagtgaggtctgcacgcgttgctctttaaccagtgattgtaaaaagatggcgagaagcagcagcagtgtcagcagtagcttctgcatcagccaaagagttaccacacataa

SEQ ID NO: 30898 - DNA, 600 bp, Chicken  19866894252719_1
gcatgaataacaccttctgagaacagtcccaaagacaaagaggattgctttatctgagtgtatattctactcctaggttaacatcaaaagagtactgaagcgtacccagacactcctatggcctgttttctggagagaaaatccaagacattgctgtctcctggccttttttgtagggggggaggccaagatagatctcacaagccctgagaggttatacatctaaaaacatggccattagtacatgattcagccactgcttctatagcttaaatggtacatattaatatgatgagaagktcagggcccagagcattgggtgagttagggaggcactcaaatttgattccagacattagtaagacttggagtgacgggtatgtgatgaaagagaaatttaactctgccttgcacagtggattactgcagcactgataggagaaatgtcccactttcayacctttrgacattagcacctagagaccttttctgcttcaactgcctgagtgatctctcactttaaaagccttcatggagctgaataatttttatagttctcctttaacttttgcctaagctgcatgtaaatgtgtataccct

SEQ ID NO: 30899 - DNA, 600 bp, Chicken  19866894252719_2
tcctggccttttttgtagggggggaggccaagatagatctcacaagccctgagaggttatacatctaaaaacatggccattagtacatgattcagccactgcttctatagcttaaatggtacatattaatatgatgagaagktcagggcccagagcattgggtgagttagggaggcactcaaatttgattccagacattagtaagacttggagtgacgggtatgtgatgaaagagaaatttaactctgccttgcacagtggattactgcagcactgataggagaaatgtcccactttcayacctttrgacattagcacctagagaccttttctgcttcaactgcctgagtgatctctcactttaaaagccttcatggagctgaataatttttatagttctcctttaacttttgcctaagctgcatgtaaatgtgtataccctgccctcctctcacagctacaaatctgcccatcatctgaggtcacaccgtcatttacaccctgaccccagtcacttgtgctcagctacaaattgctggggcagaccaccaaccactgctgaccacttcttagcaccatggttgaacgtgaagatctggt

SEQ ID NO: 30900 - DNA, 600 bp, Chicken  19866894252719_3
cttttttgtagggggggaggccaagatagatctcacaagccctgagaggttatacatctaaaaacatggccattagtacatgattcagccactgcttctatagcttaaatggtacatattaatatgatgagaagktcagggcccagagcattgggtgagttagggaggcactcaaatttgattccagacattagtaagacttggagtgacgggtatgtgatgaaagagaaatttaactctgccttgcacagtggattactgcagcactgataggagaaatgtcccactttcayacctttrgacattagcacctagagaccttttctgcttcaactgcctgagtgatctctcactttaaaagccttcatggagctgaataatttttatagttctcctttaacttttgcctaagctgcatgtaaatgtgtataccctgccctcctctcacagctacaaatctgcccatcatctgaggtcacaccgtcatttacaccctgaccccagtcacttgtgctcagctacaaattgctggggcagaccaccaaccactgctgaccacttcttagcaccatggttgaacgtgaagatctggtttctgtc

SEQ ID NO: 30901 - DNA, 600 bp, Chicken  19866894252720_1
cacaaattgttttgccagttcttatagctcacctgaaaatcgtgtattgtagagttaataattgtatctacatggctcaatcacattacagtcaagcttatttagtgttttgattgaggaaacttgattaccgttagagctccatgaaacacatttagaggagatgatgtgttaatcctttagttattctaaaccagtaccttactttctgttccttatcaatcttcactgacataatgatttaagagataagttttcctaagtgaggaacaaaggagtaaggctagaactgccgccccmaaagtctcctttgtttatcgtatacctccctaacagattcagctgctattatcccatattcagaactaggctacccttcagctgttcccagtgttgctctgcccgtgtgcgctgacagtaaggatttttacagtctcagaagatgaagaaatggagataagctgcatgcattagcaataaaaagtgggaaaagacgcaaccgccgtcagtgcttttttgcagcatgtggaaattgactataggcttcctcctgccccacaggtacttatcaggaagtgcaggcctttaataggacagaaa

SEQ ID NO: 30902 - DNA, 600 bp, Chicken  19866894252721_1
tggctggaagactgtgtagaggaaatggacctgggggtgttgattgatgctagactgaatatgagccagcagtgtgcccaggtggccaagaagaccaatggcatcctggtttgcatcagaaatagtgttgccagcaggaacagggaagtaattgtcccctgtactcagcactagtgaggcgacacctcaagtactgtgcccagttttgggccccttgctgtaagaaagacatcgaggccctggagtgcgtccagagaagggcaacaaagctggtgaggggtgtggagcacaggccttatraagagcggctgaaagagctgggattgtttaacctagagaagaggaggcttaggggagacattattgctctctataactacctgaagggaacctgtggtgagctgggagtcagcctcttctctcgtgtaaccagtgataggactagagggaatggcttcaagctgcaccaggggaggttcaggctggacgctaggaaatactacttctctgaaagagtggtcaggcactggaatgggctgcccagagaggtggtgaagtcacctaccctggaggtgttcaaggaaagkttggatgttgtgt

SEQ ID NO: 30903 - DNA, 600 bp, Chicken  19866894252721_2
cacaggccttatraagagcggctgaaagagctgggattgtttaacctagagaagaggaggcttaggggagacattattgctctctataactacctgaagggaacctgtggtgagctgggagtcagcctcttctctcgtgtaaccagtgataggactagagggaatggcttcaagctgcaccaggggaggttcaggctggacgctaggaaatactacttctctgaaagagtggtcaggcactggaatgggctgcccagagaggtggtgaagtcacctaccctggaggtgttcaaggaaagkttggatgttgtgttgagggatatggtttagtgagaactattggtgatgggtggatggctgaactgggtgatcctgtggttcttttccaaccttggtgattctatggttctatgattctatggtttacatactggatgagatgtgtctgaatcaagattttagcataatttaactactacagacatttttattgaagtaaaattgtataggtttgacgttcagtgttaacatatataacaataacaaaaactgcatttaaggatgataaaaatatacctttttaaaaataaaaataacttt

SEQ ID NO: 30904 - DNA, 600 bp, Chicken  19866894252732_1
tccttcagccactccttgtaaggcctgtgctccagacccctcaccagctttgttgccctcctctggacacgctccagggcctcgatgtctttcttgcagtgaggggcccaaaactggacacagtactcgaggtgcggcctcaccagtgctgagtacagggggacaattacttccctgttcctgctggccacactatttctgatacaagccagggtgccattggccttctttgccacctgggcacactgctggctcatgttcagtctagcatcagtcaacacctccaggtccatttcctckacacagtcttccagccactctgccccaagcctgtagtgttgcctggkgttattgtggccaaagtgcaggacctagmatttggtcttattgaatctcatcccattggcttcagcccagctatccagcctacccagatccctctgtagggcctcgctaccctcaggcasatagacacttccagtcagcctggtgtcatctgcaaacttactgagggtgcactcaatgccctcatccaggtcgtcaataaagatattaaacaggacaggccccagcaccgacccctggggaacaccactcatg

SEQ ID NO: 30905 - DNA, 600 bp, Chicken  19866894252732_2
ctttgttgccctcctctggacacgctccagggcctcgatgtctttcttgcagtgaggggcccaaaactggacacagtactcgaggtgcggcctcaccagtgctgagtacagggggacaattacttccctgttcctgctggccacactatttctgatacaagccagggtgccattggccttctttgccacctgggcacactgctggctcatgttcagtctagcatcagtcaacacctccaggtccatttcctckacacagtcttccagccactctgccccaagcctgtagtgttgcctggkgttattgtggccaaagtgcaggacctagmatttggtcttattgaatctcatcccattggcttcagcccagctatccagcctacccagatccctctgtagggcctcgctaccctcaggcasatagacacttccagtcagcctggtgtcatctgcaaacttactgagggtgcactcaatgccctcatccaggtcgtcaataaagatattaaacaggacaggccccagcaccgacccctggggaacaccactcatgaccagttgccagctggatttaactccatttaccaccactctctgggc

SEQ ID NO: 30906 - DNA, 600 bp, Chicken  19866894252732_3
gggcctcgatgtctttcttgcagtgaggggcccaaaactggacacagtactcgaggtgcggcctcaccagtgctgagtacagggggacaattacttccctgttcctgctggccacactatttctgatacaagccagggtgccattggccttctttgccacctgggcacactgctggctcatgttcagtctagcatcagtcaacacctccaggtccatttcctckacacagtcttccagccactctgccccaagcctgtagtgttgcctggkgttattgtggccaaagtgcaggacctagmatttggtcttattgaatctcatcccattggcttcagcccagctatccagcctacccagatccctctgtagggcctcgctaccctcaggcasatagacacttccagtcagcctggtgtcatctgcaaacttactgagggtgcactcaatgccctcatccaggtcgtcaataaagatattaaacaggacaggccccagcaccgacccctggggaacaccactcatgaccagttgccagctggatttaactccatttaccaccactctctgggcccggccctccaaccagttccttacccagc

SEQ ID NO: 30907 - DNA, 600 bp, Chicken  19866894252732_4
tacttccctgttcctgctggccacactatttctgatacaagccagggtgccattggccttctttgccacctgggcacactgctggctcatgttcagtctagcatcagtcaacacctccaggtccatttcctckacacagtcttccagccactctgccccaagcctgtagtgttgcctggkgttattgtggccaaagtgcaggacctagmatttggtcttattgaatctcatcccattggcttcagcccagctatccagcctacccagatccctctgtagggcctcgctaccctcaggcasatagacacttccagtcagcctggtgtcatctgcaaacttactgagggtgcactcaatgccctcatccaggtcgtcaataaagatattaaacaggacaggccccagcaccgacccctggggaacaccactcatgaccagttgccagctggatttaactccatttaccaccactctctgggcccggccctccaaccagttccttacccagccaagagtgtacctgtccaagccacagactgccagcttctgcaggagagtattgtgggagacagtgtcaaaggctttactgaaacctaggta

SEQ ID NO: 30908 - DNA, 600 bp, Chicken  19866894252732_5
ttctgtgaacaaataatcactaagaactaaacatttagagtatgagaaaaggatgtaaaatgacaacagcagctttacaggaacagatgaggtccaaagaatttggctctccccctttgataaaggaaaatgagagaaaaaaagattttatttgcttggtctagtggttggcgagcctgcccatggcaggggggttgaaactcgataatctttgagatccttttcaacccatgccattctatgattatttagatttgactctcacaacactatctgatgaaatctacaaggactactgcraaactggtggtgaagctgtagatgggagcagctctcagctgtacaggatagacactcagagctgtgtgagagaaattaagctgcagtttatccacgatcatcaaggattttcatcagtgatccagataataacacagaacacatatattgaagttgtggattacagcactgatagtgctgagaagggctgtggatatgatagggaacaagacaaactggaaaaatgtcttactagaaaagtgggatgctcctgaggaaggatggctacaaggctatacagagtgtctgttgcagtgtgca

SEQ ID NO: 30909 - DNA, 599 bp, Chicken  19866894252746_1
  misc_feature (1)..(119): n is any nucleotide
nnnnnnnnnnnnnnnnnnnnnnnnnnnnnnnnnnnnnnnnnnnnnnnnnnnnnnnnnnnnnnnnnnnnnnnnnnnnnnnnnnnnnnnnnnnnnnnnnnnnnnnnnnnnnnnnnnnnnnntcccgtggcccatcaattaactggagagggtattgatcgggtaattgtgtcaggtttcccaaagctttctgggaaatgcagctgctgctgctgctgcttcagatgattgcatatgctctgtctttgattcacagagcacagctagggagtattctcactcaatgtgacttaaacgagcaaygagctcacaatttacccttaggagggtattatttgcagctctcactggatgggtgtttgacattaacaagaaaacagaagaagccagaacctaacaattaattcccactgagccaaatggaaactttaaattgggggtctatggcagtctgacatatgttagcttatagcaataggctacctggctggaaggatctttgtgtctggcaaactaaacttacaacagtaacatgatttgtaccacagtccgatttcacccttctcctcctaaaggctcggtaaatcaarctcatgttggtg

SEQ ID NO: 30910 - DNA, 600 bp, Chicken  19866894252746_2
ttaaacgagcaaygagctcacaatttacccttaggagggtattatttgcagctctcactggatgggtgtttgacattaacaagaaaacagaagaagccagaacctaacaattaattcccactgagccaaatggaaactttaaattgggggtctatggcagtctgacatatgttagcttatagcaataggctacctggctggaaggatctttgtgtctggcaaactaaacttacaacagtaacatgatttgtaccacagtccgatttcacccttctcctcctaaaggctcggtaaatcaarctcatgttggtggctctctgtgctgaaaaactgctgyggtaagccctgctgggcctcccaatgttagcacagctcctaaattcggacatgatttgcttaaatggaccagctattgattaataagggattcttttctgaatcttcagatgaataactagcaagccataatttcagtgctacaggcttaggaagatgattttggcctgttataagtgtacatgtgccagatgctcattgccttttccatgctgaatacctattgattacagctaagtataaaacattacattgtctttgctt

SEQ ID NO: 30911 - DNA, 600 bp, Chicken  19866894252746_3
ggtattatttgcagctctcactggatgggtgtttgacattaacaagaaaacagaagaagccagaacctaacaattaattcccactgagccaaatggaaactttaaattgggggtctatggcagtctgacatatgttagcttatagcaataggctacctggctggaaggatctttgtgtctggcaaactaaacttacaacagtaacatgatttgtaccacagtccgatttcacccttctcctcctaaaggctcggtaaatcaarctcatgttggtggctctctgtgctgaaaaactgctgyggtaagccctgctgggcctcccaatgttagcacagctcctaaattcggacatgatttgcttaaatggaccagctattgattaataagggattcttttctgaatcttcagatgaataactagcaagccataatttcagtgctacaggcttaggaagatgattttggcctgttataagtgtacatgtgccagatgctcattgccttttccatgctgaatacctattgattacagctaagtataaaacattacattgtctttgcttttaggatggcttacgtggcctcacaacctacaagaca

SEQ ID NO: 30912 - DNA, 600 bp, Chicken  19866894252748_1
gattcaaagaaattctgcagggatgcattctgtctgcctgccagctgagaactccttatcatcacagcgtgtcaaaaacccctgtgtttagcagtggttgctctcactgctcttctttctggttggtagagttgttatctcatctgcaagaacagtgtccatgtctgtcatttcaacgaaatctgaatttcttatttttgtcaggattgacagcagtgctgctattcctgtttgttgtgcgctctccaggactgagtcacctctgtgtgctctgtgactgtcaggtcaagtttctttcayacaggggagaggcttggataaggaaaatcgcctaactaatgccttgctgcaggtttctgtggtgtgattaaacagtgcatctcaaagcagtctgacacacaagacatttttattttagttttaaaaaaaaaawaaaakcaaaaggacagaaacaaaagtttttatagtgacttatggaagtattcctgggccttttcctgggcaagattaaaggcacaggagtgatttgattcagaacagaaatactacagtgagtttattgagcagagaaggaccgattcacagtagctgactttgttt

SEQ ID NO: 30913 - DNA, 600 bp, Chicken  19866894252748_2
gttatctcatctgcaagaacagtgtccatgtctgtcatttcaacgaaatctgaatttcttatttttgtcaggattgacagcagtgctgctattcctgtttgttgtgcgctctccaggactgagtcacctctgtgtgctctgtgactgtcaggtcaagtttctttcayacaggggagaggcttggataaggaaaatcgcctaactaatgccttgctgcaggtttctgtggtgtgattaaacagtgcatctcaaagcagtctgacacacaagacatttttattttagttttaaaaaaaaaawaaaakcaaaaggacagaaacaaaagtttttatagtgacttatggaagtattcctgggccttttcctgggcaagattaaaggcacaggagtgatttgattcagaacagaaatactacagtgagtttattgagcagagaaggaccgattcacagtagctgactttgttttaccttaatagttctttctgctcttcactagaccttattccacttctgttaaagtcctgcagagacagaggccaaaactgcctacactgctcaggcttgactgggtcaccatgggctgtatggcggtgtaatc

SEQ ID NO: 30914 - DNA, 600 bp, Chicken  19866894252748_3
ctcatctgcaagaacagtgtccatgtctgtcatttcaacgaaatctgaatttcttatttttgtcaggattgacagcagtgctgctattcctgtttgttgtgcgctctccaggactgagtcacctctgtgtgctctgtgactgtcaggtcaagtttctttcayacaggggagaggcttggataaggaaaatcgcctaactaatgccttgctgcaggtttctgtggtgtgattaaacagtgcatctcaaagcagtctgacacacaagacatttttattttagttttaaaaaaaaaawaaaakcaaaaggacagaaacaaaagtttttatagtgacttatggaagtattcctgggccttttcctgggcaagattaaaggcacaggagtgatttgattcagaacagaaatactacagtgagtttattgagcagagaaggaccgattcacagtagctgactttgttttaccttaatagttctttctgctcttcactagaccttattccacttctgttaaagtcctgcagagacagaggccaaaactgcctacactgctcaggcttgactgggtcaccatgggctgtatggcggtgtaatcatgtg

SEQ ID NO: 30915 - DNA, 600 bp, Chicken  19866894252749_1
gttacatcattttaatggtaggtcagaaaattacttgtttcagtaatatttcatggcattttatagttagcattctaatctcttagcccttttgaatttgtacgcaggcttatgtaactgaaaggggggagctcttaaaatttaagaatgtaacaataaacatttttatattctttttttaggactaatgttactagaaatggaaatcaactagatattttttcttagcccagctcttcctggacattatcatacaatcagttcaggatgattgtttatactgaagggttcccccccccktttttttttccccagaataagatattgatggaattctccattttaaaaaataaggtaataaagattacagagtaatcaatctaaataaatctagtttcattatccgaaagtttgtccttatccatctgttcttgacagtcataattcaggcatattgcaaaaattctccagtgaactgagaatgtagtggaatagaaaaatggaggaacaaatggagatttcaaaggagttgctaagaatggtttagaaatagaatagaaatgatcagtaaggaagagacaaaacgatcagtagaacagg

SEQ ID NO: 30916 - DNA, 600 bp, Chicken  19866894252752_1
cctgccaactcgtcttcttgcaaatcctatacaccttcttggaattgtaagggttgtaaggcaatgcctgaacctcagtttgtccaattctgccaattctgaattttcatatgaagaattagtttggtccaaacgaggctgtaaagaataaaggaaagctgtttttgcacattcttgaaaaaacgaagtagtctgtggtgttctctaagggatcacagtagcaagacacctgcacaacaggaacagaagcagatgccaccacgcatctgtgctgtgctaagaacttacagcacaacttgygggagatgcccatgctctaactcagggagattgtttgggcttctgaagcagacaacttgcaactaagttacatctccagagagttataggcagagcactatacagttaaaaaatgtattttgccatgcaacttcacttctctggtgggaagtgagcaaagtaaaaccagacccaacatggcacattccttctgttagtcctccataggcagcagctccccatctacaaacccatactcagtatgaagttccactatcagtagttctgagaagatgatggaacatttaatcagactttctc

SEQ ID NO: 30917 - DNA, 600 bp, Chicken  19866894252757_1
catgtatcataacatcgcatgtacaattaactctaacattatgcagcccaaggtggagtagttaatattacttagcctattaagcctgtacagtaagtccaaagtttctaagttcaagttgtcaatcgattgctgttgcttctcctcgttttcactggttcttcctgatatgccttatttggggagagtttacaaagtgtaagtacagctatcaagcaggaagtaatttgcaaacctttgcgcaacctgtttacaaggacatcttgttagcaagcctcttttgtctcagtagttctgagytggactgaaaggtattggaagatgcttgtaatgtggaagtaatgcagtatcactgctgttyttaatgatctctgtcctttgggtgctattcttgatgtgtcatgctgtgcaggtgtatgttctgaagggttttattcgtggtgctctgagatctcctttctatctttggtctggattaggatgtggggatgcctccctgtgttgrattgatgatggtgaggtaaaatatctctgaccattcatctctatagttgctgctcttccttcatgcaggagtggtctgttcccttcggcaatggg

SEQ ID NO: 30918 - DNA, 600 bp, Chicken  19866894252757_2
ttaatattacttagcctattaagcctgtacagtaagtccaaagtttctaagttcaagttgtcaatcgattgctgttgcttctcctcgttttcactggttcttcctgatatgccttatttggggagagtttacaaagtgtaagtacagctatcaagcaggaagtaatttgcaaacctttgcgcaacctgtttacaaggacatcttgttagcaagcctcttttgtctcagtagttctgagytggactgaaaggtattggaagatgcttgtaatgtggaagtaatgcagtatcactgctgttyttaatgatctctgtcctttgggtgctattcttgatgtgtcatgctgtgcaggtgtatgttctgaagggttttattcgtggtgctctgagatctcctttctatctttggtctggattaggatgtggggatgcctccctgtgttgrattgatgatggtgaggtaaaatatctctgaccattcatctctatagttgctgctcttccttcatgcaggagtggtctgttcccttcggcaatgggaaatccttgctgtttctgctctgtattttctccttgtgagctgtgggcagcagggatagct

SEQ ID NO: 30919 - DNA, 600 bp, Chicken  19866894252757_3
cagctatcaagcaggaagtaatttgcaaacctttgcgcaacctgtttacaaggacatcttgttagcaagcctcttttgtctcagtagttctgagytggactgaaaggtattggaagatgcttgtaatgtggaagtaatgcagtatcactgctgttyttaatgatctctgtcctttgggtgctattcttgatgtgtcatgctgtgcaggtgtatgttctgaagggttttattcgtggtgctctgagatctcctttctatctttggtctggattaggatgtggggatgcctccctgtgttgrattgatgatggtgaggtaaaatatctctgaccattcatctctatagttgctgctcttccttcatgcaggagtggtctgttcccttcggcaatgggaaatccttgctgtttctgctctgtattttctccttgtgagctgtgggcagcagggatagctagtctgtgttagtgctgagaaagtatctgaagtgtggtagtggaagcaggtttctgtagaaaattcttgcatttttagcagctttattgccaggatatgaaagctttggtccactcctctccctttgtttccactgaaactcat

SEQ ID NO: 30920 - DNA, 600 bp, Chicken  19866894252767_1
gaggcatcaagcgcagcccatcacgggaagggggctgggagggtcagcggctgcctgcagagcagcacggcacgcagctcacgcagccggtaccaggcagtgccagcgaaggaggccctgggagagctgcctgtctgctgaagcagagggctggggatagccagggctggctgccagcactgctccagcagccgctgagcggtggcatgggcacagccggtgtgcacgtgcagctcatgcggactgaagccgggtctgtcctgcatctgtgtgccaagccgaggaatggaggtcagggcrgcatgctaaggatgaacctgtatcgtggcccagctcagcgaggccacagtgaagcccactgtggttaaaccatgagcttacactttcagagggctgccagggcttctaaayctcctcaggtctaccacgctgaagtttctgctggcygccagtgctgatccaccttcctaggagagatgtgctgagctggtttgcatcattttctcccgtcatacgtggtagtcattacatcagcaagcaggtccccgcagtgtctcaccaggtgtaagatctcacattactccagcagctctgaggaca

SEQ ID NO: 30921 - DNA, 600 bp, Chicken  19866894252767_2
gaggccctgggagagctgcctgtctgctgaagcagagggctggggatagccagggctggctgccagcactgctccagcagccgctgagcggtggcatgggcacagccggtgtgcacgtgcagctcatgcggactgaagccgggtctgtcctgcatctgtgtgccaagccgaggaatggaggtcagggcrgcatgctaaggatgaacctgtatcgtggcccagctcagcgaggccacagtgaagcccactgtggttaaaccatgagcttacactttcagagggctgccagggcttctaaayctcctcaggtctaccacgctgaagtttctgctggcygccagtgctgatccaccttcctaggagagatgtgctgagctggtttgcatcattttctcccgtcatacgtggtagtcattacatcagcaagcaggtccccgcagtgtctcaccaggtgtaagatctcacattactccagcagctctgaggacatattcggaataccttttggtttcggtcacctgccatttcaaaccagcagaattcttttttctttcttttttacagcagttcccaccttcatttcagtttcccaatcagatt

SEQ ID NO: 30922 - DNA, 577 bp, Chicken  19866894252767_3
gggctggggatagccagggctggctgccagcactgctccagcagccgctgagcggtggcatgggcacagccggtgtgcacgtgcagctcatgcggactgaagccgggtctgtcctgcatctgtgtgccaagccgaggaatggaggtcagggcrgcatgctaaggatgaacctgtatcgtggcccagctcagcgaggccacagtgaagcccactgtggttaaaccatgagcttacactttcagagggctgccagggcttctaaayctcctcaggtctaccacgctgaagtttctgctggcygccagtgctgatccaccttcctaggagagatgtgctgagctggtttgcatcattttctcccgtcatacgtggtagtcattacatcagcaagcaggtccccgcagtgtctcaccaggtgtaagatctcacattactccagcagctctgaggacatattcggaataccttttggtttcggtcacctgccatttcaaaccagcagaattcttttttctttcttttttacagcagttcccaccttcatttcagtttcccaatcagattgttctgttgacat

SEQ ID NO: 30923 - DNA, 600 bp, Chicken  19866894252771_1
atacagatctattataaatacaaccttcatttagagatataatcactgttggcagtgaaaatatttcagagtggttgtttgcctgcgaggcatatgtattttcctgaaataaatgaagcatactttgctctccctctccccctcccaacctcccctgctgcagcccccaccaccaaccctaagcagggaagaacaagccataatgcagaacaaaaccaaaataaaattgaaacctgataaggccacattctcagggagaagccatgtgtgagatatttttgcttaattatttcaagaaaygtatggcccccttggctgtcaccaaggctggccttgtcaggctgatatcacgatgaaccattgtgcaggcgatcgctggatactcctaccctttgagctaatcagctcacgtttcatgttccttttccaacttttaaaccaaaatagagcccttactgttttgcatcatgcctttctcccactcctcttataggtgcttgagagatgcccagttgcagagatgtgaggttgcatgcacacacttgtatttactgctatttgcttcagsagaatgcttttcagcctcagcagatgtataga

SEQ ID NO: 30924 - DNA, 600 bp, Chicken  19866894252771_2
tgagatatttttgcttaattatttcaagaaaygtatggcccccttggctgtcaccaaggctggccttgtcaggctgatatcacgatgaaccattgtgcaggcgatcgctggatactcctaccctttgagctaatcagctcacgtttcatgttccttttccaacttttaaaccaaaatagagcccttactgttttgcatcatgcctttctcccactcctcttataggtgcttgagagatgcccagttgcagagatgtgaggttgcatgcacacacttgtatttactgctatttgcttcagsagaatgcttttcagcctcagcagatgtatagaaaaggctatctgcaatctgactkcgtataaatagtgactgtagatgatctccaaagaaataactcagcaggagggaattccagtgcctgagtttcagtcggtcatgcctcagtgcctcgtgcatctggttgagaagacaggtactttcagccctaaattatacaggatattggaaaagcacccactgatgatattagaaagggagctgtttgctttctgaatagatcatcatctctgcactgaacaagggtttaatatctaaagggaa

SEQ ID NO: 30925 - DNA, 600 bp, Chicken  19866894252771_3
aaggctggccttgtcaggctgatatcacgatgaaccattgtgcaggcgatcgctggatactcctaccctttgagctaatcagctcacgtttcatgttccttttccaacttttaaaccaaaatagagcccttactgttttgcatcatgcctttctcccactcctcttataggtgcttgagagatgcccagttgcagagatgtgaggttgcatgcacacacttgtatttactgctatttgcttcagsagaatgcttttcagcctcagcagatgtatagaaaaggctatctgcaatctgactkcgtataaatagtgactgtagatgatctccaaagaaataactcagcaggagggaattccagtgcctgagtttcagtcggtcatgcctcagtgcctcgtgcatctggttgagaagacaggtactttcagccctaaattatacaggatattggaaaagcacccactgatgatattagaaagggagctgtttgctttctgaatagatcatcatctctgcactgaacaagggtttaatatctaaagggaataagggctcaatttttccctcccttgaacaatgtctttatgtatctcacaaggta

SEQ ID NO: 30926 - DNA, 600 bp, Chicken  19866894252771_4
tttgaattagaaatttaacccagctttagagcagaggggacggacaggatggcagaaagccattcgggaggcattttaccttcttttgcagatgtcagaccccagcagagcctaggaagaggctacatagactcacgtgtgcgtagtcccatgtatatcattagtactttttctgaccctgtgtctccaagcagccacggtccagatgcattctcctggctctcgcagttctctgtcatgatgactgcccaagctttggggtagagaagtcccatacaacctggtttgtggtacacaaakagagagcagaaacaaaggcacgctctgatcctttcacgactaggcaggaaacatcatgatacttgtttaaaacttactccatgacaaaaagtaatcgctagatgacagcttgagttagggaaaatatgcattagaactagaaacatggcatcactgcgctgcatgtggtaatagaatggatgaaacccctccccagacacacacacacacaaaacccactaagaaactgcagatgaggaaagaaatttgtcagctttttcagcccacaaaagacaaaagtggggaagaaaggcagtgttg

SEQ ID NO: 30927 - DNA, 600 bp, Chicken  19866894252773_1
tgaagtgctcgtgatgcatagctgcacacagctgaagaccaagtcaaacacagctgccctgagtacaaactgcatcctgtgtcatattctgaagccagaaattaaagaggttgcagttttgtggatgcactttttttttcccccttgggtcatggtagcaacatcggcgttcccaaccaacttattgcacaagcaagaaatggtgcaggtctttgtgtttcgtaggaaccgggtccttgtttaatgcagaggtgagctgtatggaattagctttgctaactctacctgctggtggtgttyttcycactactaggaaatgaaacagtgataagatgatggtttactttttccttttgagactacgtcatcccttaagttgggactttcaaatgccctaagtcacaaagctattcccatcaaagtgtttatcccagatgaagattgatcagtcatttcttcatttcatctttcagattttctttgagctctgtaaattcccatcttccactacgccatcagctaaagtggacatccagcaactggcctcagtgtccaaacacttacatcccaactccgcttctcattacgtacacatgtact

SEQ ID NO: 30928 - DNA, 599 bp, Chicken  19866894252773_2
gtgctcgtgatgcatagctgcacacagctgaagaccaagtcaaacacagctgccctgagtacaaactgcatcctgtgtcatattctgaagccagaaattaaagaggttgcagttttgtggatgcactttttttttcccccttgggtcatggtagcaacatcggcgttcccaaccaacttattgcacaagcaagaaatggtgcaggtctttgtgtttcgtaggaaccgggtccttgtttaatgcagaggtgagctgtatggaattagctttgctaactctacctgctggtggtgttyttcycactactaggaaatgaaacagtgataagatgatggtttactttttccttttgagactacgtcatcccttaagttgggactttcaaatgccctaagtcacaaagctattcccatcaaagtgtttatcccagatgaagattgatcagtcatttcttcatttcatctttcagattttctttgagctctgtaaattcccatcttccactacgccatcagctaaagtggacatccagcaactggcctcagtgtccaaacacttacatcccaactccgcttctcattacgtacacatgtacttct

SEQ ID NO: 30929 - DNA, 600 bp, Chicken  19866894252777_1
catggagaacagaatgattcctgcaagtcactgcttagctgcttcaattacattttctctttggcagggacaagatactgatttgaaacttttcctcttggatctgaagtttgccatttgcttcttgctgtgtgtggaggaagccgggtgagggtcagccttcctccccttcctcccttcccagacctgctgtcctccacagctttctcactgccaggccctagctgctgattgcacacctagctggaatcaattaatacataacgacattggaatacacacctataatgtaacgcatcrtttaattgaaaggctttgttatattatcagtctcttttgtcgtacaatatgccccaggatctctgtgttgaagacagcaggtcccattttccagttcatcgtacctttctcaacagatgttcttctcatatactgaggatggtttcaaggggatttcataaaagcaactgcttttgacatttcattacgcagaagtatttttgtcattgagtgatgatagtacttattgttaggcagttttgaaaacaaaaaaaacaatatttacataatgccatttctttttgattgtgtagtttgttt

SEQ ID NO: 30930 - DNA, 600 bp, Chicken  19866894252780_1
ctgacaatctgttaattaacgtgctattcttatccataacagttgataatggagttctatcatataagtgtacccactgtaatatctgaatgcattcatcacttaattggccacaattcttcgtgcaaaacgctgaaacaagtgaactgtcacctctttaatgaagctgcctatatcttaaaccccttgccctttaaaatactatttatactcaagatgaaaaattgtattctggtttctgccagagaccgtggttaatgttcactgccctttattcaccttatttttaattctgaaaayccacactcattaactgtacacttccaaggaattgctggaatcacctaaataaaagcttagaagtgacatttattgtaaatttgatagtcacagttatgatatgaaatactgaaaagactctctattagtctgcacagctgtaagtgtgatstgatagattaagggtaacattataccacccactacaaacaaacaaacaaaaaatatttaaataaagcattacgtagttgtatctaagtagagagacaaatttactagatgagtactgaacattataatgacaagcttccttgaacagac

SEQ ID NO: 30931 - DNA, 600 bp, Chicken  19866894252780_2
acctctttaatgaagctgcctatatcttaaaccccttgccctttaaaatactatttatactcaagatgaaaaattgtattctggtttctgccagagaccgtggttaatgttcactgccctttattcaccttatttttaattctgaaaayccacactcattaactgtacacttccaaggaattgctggaatcacctaaataaaagcttagaagtgacatttattgtaaatttgatagtcacagttatgatatgaaatactgaaaagactctctattagtctgcacagctgtaagtgtgatstgatagattaagggtaacattataccacccactacaaacaaacaaacaaaaaatatttaaataaagcattacgtagttgtatctaagtagagagacaaatttactagatgagtactgaacattataatgacaagcttccttgaacagacaaagggtcagagtgaggtactaatgatgggtagcactgtataagtaactggtgaattgaatatacttttttgagtgcacttgagtaaatactgacccttaaaacactcagtacaatctcaatcacttaaaatacatgtgaaccaggaggtg

SEQ ID NO: 30932 - DNA, 600 bp, Chicken  19866894252787_1
ggcccttcctaaattgaaacctgacttggaaacctgtcatgaatgaccattttttggtttcaagttaaccatttttggaacaaaattacctcattgtgaaaatgcttactttcggcattaagtattcacatctggatattttatcaacacattatttccatgtatcaatgaatattcagttgttagtgatgttaaccttctgctaatcctaccctttgggatagctcctgctcaaggcgggagctgctagtaccacggtgcatttgatggaccccacagggtcttgcctagtttcacacmtaactccaagtcttccagccttttgaattgctcatttcagaagtgaccttcctgaagcattcaggccaagttttaaatgaagacatcagtaggtataagtagttcatttttatctagcattgacaaaaagtctgtaagatcagatcaaatggaaatgaacattctgcaaagctcttgttgctaatacctctgaaaagccagagcaaaacacaataaagatgacaactatcagcaatgatttcaagcaaagaagctttgctagacaaactggatgggcaaaactgaaaacctcacataact

SEQ ID NO: 30933 - DNA, 600 bp, Chicken  19866894252788_1
gtccctaaaagacttagagaatttacagaattcttatattcttattttcagaatttacagagttcttataacacttggggagatgtgacacaagtggattcctctctggtgcgcatatgctctccagggggatgttggcactctaggtcctctgtatcttacccacatcactaagggtgtcttagatactcaacagtagctaagatgaccctagacatctatatttaggcacctgagtctctctatcagtgacccaaaatcactaacactaaaaatttagtaatcacggtgactttaacratgcatatttagtccaagaaaagtggatatattaactcataatttacgcagaaagaatgaaagaacataagtgaccttataaatagtttcaagaagaagcatattgaatgcttttggatgtaaaataagtggaaagattaaagattttcttcatacacctatgtgatctgcacaactgaaatttcaaatttctgaatttctatttgcgaatgttcataagctcaccaggatcaatgctaccaaattcctgacactactagaaaaaaaatatagacacctctccctcttccatacatgtag

SEQ ID NO: 30934 - DNA, 600 bp, Chicken  19866894252794_1
cacccacactgctcctatgaccctttccatttcctgggtgtctaagtacagaacagaaaagattcattaacctggcaagtaacctctttttatgggggaagtgattttccgtcacgctctgttagatcctattgatttctgtttttcccctctttggcctcttctgcaatatattctcttctctgtcatgcttcagtaacaaggtgatatgtgatatgctggtgttttggtagttttttttcttctttttctgtttcctaggctgggatctcctaaggccattgctgaagttgccaaggytctgccttttcttagaaagctttgttgataaggtaaaatgttgtttagtaatgggatactgacatcagcactaacctcttggctgtcctcttttttttcttgacaccaaagaacattttctatccttttgctctcttgctctctttttacattgtacaattattaatctcctggaaaagataggatgtgtttgccacagagtttgcaactgcgtgtgaaatagagaccttcaaaccatcaaggatgcctgctctttttgtcataggcacttttgactgctgggtcctgatkcttctgctg

SEQ ID NO: 30935 - DNA, 522 bp, Chicken  19866894252794_2
tgccaaggytctgccttttcttagaaagctttgttgataaggtaaaatgttgtttagtaatgggatactgacatcagcactaacctcttggctgtcctcttttttttcttgacaccaaagaacattttctatccttttgctctcttgctctctttttacattgtacaattattaatctcctggaaaagataggatgtgtttgccacagagtttgcaactgcgtgtgaaatagagaccttcaaaccatcaaggatgcctgctctttttgtcataggcacttttgactgctgggtcctgatkcttctgctgtgcctacaaacatcacagctacatctctgattcccgagctgaatctttgcagtaactagttagggaaataatttcccttccaaaagtatacttgcacttctcctactaattttttagctttcacagttacaagaagccatattctgaagaagtggttggcctccatgttgcctacccctactgctgttcaggttcagtgaatcagaataggac

SEQ ID NO: 30936 - DNA, 599 bp, Chicken  19866894252808_1
  misc_feature (1)..(12): n is any nucleotide
nnnnnnnnnnnntcccacacactgaaattctaggtctttcagtaaaatgtacatggtccagctctgcataagacaatgctgctcagatgcatttaatttcatactttacacaataaaaaatgtctattcattggtgcccctcaccacttacataccctttagtaatgcaaatgatttgggtagtagtgcaaagcgatggcaataattttgatacctgtaatacagaaatagagtatgcatctgagtactgaaatgagagcgctgtatgggcacagatcaagcaaaatcaggaaaaaaagmakgggagcaaataggttccatccaaactgtctgaaatgctaaccagcaccaaaaagtgaaatgtaatgtcttttttttcttttttcttttttttccccaagatactaggctgcttccaagcaacctctgaataagagattgtgcctcaactatgggccttctgcatagcctcccagcctgtaaaaacatctcacgcattggaaaactgatccaactccctcaacttcccctgccttcccaaagaaaggggaaataggttttcctatggccaaattattaggattaaactttataataat

SEQ ID NO: 30937 - DNA, 599 bp, Chicken  19866894252808_2
  misc_feature (1)..(10): n is any nucleotide
nnnnnnnnnntcccacacactgaaattctaggtctttcagtaaaatgtacatggtccagctctgcataagacaatgctgctcagatgcatttaatttcatactttacacaataaaaaatgtctattcattggtgcccctcaccacttacataccctttagtaatgcaaatgatttgggtagtagtgcaaagcgatggcaataattttgatacctgtaatacagaaatagagtatgcatctgagtactgaaatgagagcgctgtatgggcacagatcaagcaaaatcaggaaaaaaagmakgggagcaaataggttccatccaaactgtctgaaatgctaaccagcaccaaaaagtgaaatgtaatgtcttttttttcttttttcttttttttccccaagatactaggctgcttccaagcaacctctgaataagagattgtgcctcaactatgggccttctgcatagcctcccagcctgtaaaaacatctcacgcattggaaaactgatccaactccctcaacttcccctgccttcccaaagaaaggggaaataggttttcctatggccaaattattaggattaaactttataataatga

SEQ ID NO: 30938 - DNA, 600 bp, Chicken  19866894252809_1
actgtcacgatgaagtggcagcgggggggtggctgcaatttgagctgtgctgtgttgcacacggccgcaggctgcactttggacatgtcctctatatagcttcttccatgtggaagtgtatctaccagtttagtatctcaataatactgtgcgtactgacacagcatgtcaccaagaacacccaaggaagacatctggagggtattaagatgatacccattaagcagctgtgtgaacaggtcattggcagcttgaggagcagagtgtttttcagcaatcccaagatctgtctctaagaayagtgtagatccaccacatcactgtgatagatgacccttagtgaatgtgtcattctttgtggacttttggactgatctttcccttttacattttatgaacagagagggtcctaaccctttccttcagcaataaaagattccagcttgatttttcactacctcttaatttctcagtaaagtgtcttgcatctgtcattaatactttctattaatgaccttgatgacacacataagatgaaagtttctggttgaaaaagttgtaaatgaaagaactgttactactctgatttggtcacaccct

SEQ ID NO: 30939 - DNA, 600 bp, Chicken  19866894252811_1
gagaaaagctgtcgcataacatcccccagatgatgaagggcacttttcagcatccacagctaaggggaagactcgacccctgcagctttcccagcacatctgcactctgttatgaagtgcaatgtgttttctaagtgtttgaaatcttcgggggggagccagtgtgacaggcgaagaatttaactggcagagccgcagctttcctcagaaattgttctttccttaatatcagactaatatcgaagtatgatttcacactgttttcaagtaccagttactttgacaaagaaaaccactatyagtgtaatgagacatcattaatatgagagctgtatttggtagaacaggcatattcttaatgaggaggcaaactacatttttccttcagagtttgttgtccttttctgtgggtgggtcaacaaactgtgaaaactgttccactttgtaatttccagtgtgacaggggcaccacacgcatccaatgggagcaacctcacagaagatgaacgaaacattgagaaggcacagaagccctggaagagtccaaatgtgacaaatctatrgccaagcatcccattaactaaggaacgaatggggctg

SEQ ID NO: 30940 - DNA, 600 bp, Chicken  19866894252811_2
tcaagtaccagttactttgacaaagaaaaccactatyagtgtaatgagacatcattaatatgagagctgtatttggtagaacaggcatattcttaatgaggaggcaaactacatttttccttcagagtttgttgtccttttctgtgggtgggtcaacaaactgtgaaaactgttccactttgtaatttccagtgtgacaggggcaccacacgcatccaatgggagcaacctcacagaagatgaacgaaacattgagaaggcacagaagccctggaagagtccaaatgtgacaaatctatrgccaagcatcccattaactaaggaacgaatggggctgctgtgtgctgggtggcattaacagtcctccagcatcaaataattgaaaggactcaaagaatcatgtcgatcagtatggttttagtcagcctcattatttgttactgttgtattttctaattacgggtgttcttagttgcaaagtaacattgttaagatcacactataggtatacctagaataatttaagtccttgacgcccaattatcacattaaacatcacatcaacctgattatcgtgcagtattacccaatacatttcca

SEQ ID NO: 30941 - DNA, 600 bp, Chicken  19866894252815_1
tgctgtcctgaaacctttgcagcctggctggtctgctcctttgggtgccagcaggtctgttccatgtgtgattgctctccctcatgtgccttagcatgtcttccaggaggttctgttccatgatcttcccatgtatagaggtgagggtcactggcctgtagttccccgtgtcctcctttgtcctttcttgtaaatggtagtgatgtttcccttttttcagaccctggggacttagtgtgacagccatgacttttcacatatgctggagagtggctcagcacccctatcagccaggtcccytaggtcccttggatgcgtgtcatctggccccatagacttgtacacgttcagtctcatgaggtgatcttggacttgccctttcagtggggggaagtttgctcctccagtttccacctcgaggttcagggatgtgaggttcaggggtgtgagaaatatgagaatcctggctgccatctcatttaaggatgaggacagtgtcttttttctttttaagtatggatcaatcatgtatgaagatgaactcccactcagcctcccttggtccctacctactttcatttcattctgctgctgctcatt

SEQ ID NO: 30942 - DNA, 555 bp, Chicken  19866894252815_2
gcctcatgtagatcttaagctgtaaataatgttttatacagattctaagattattaaatccttccagtttgcctccctcctactcttacagttcatttgattagagtggagatattcttttgaaaattaactatttctgttttgattttgcaagcaaccttgggaagatacagtgtggctgtgtgcattgatgatcagaagatttgccataggaatccagaaacactgccttccagagaaccgactgttggcatggaaaacaaacaccagagaaaccctggaattccgagatgtagttgmctttctgaatgcaggcaagttgcaattaaaaaacagttatttggggagagcaatgcattcaaaatacagttctttggagagggctggcaggcacatcacaagtgaaataaattagtaatgtgaggmgatagttatgcttgaggattaacgaattttggacagctgtaggagccaacccactgggctctgtgcattgcctcgctgtaactatttatgctgctcctctggataccggggcatcacagagccaggcat

SEQ ID NO: 30943 - DNA, 429 bp, Chicken  19866894252815_3
ttaactatttctgttttgattttgcaagcaaccttgggaagatacagtgtggctgtgtgcattgatgatcagaagatttgccataggaatccagaaacactgccttccagagaaccgactgttggcatggaaaacaaacaccagagaaaccctggaattccgagatgtagttgmctttctgaatgcaggcaagttgcaattaaaaaacagttatttggggagagcaatgcattcaaaatacagttctttggagagggctggcaggcacatcacaagtgaaataaattagtaatgtgaggmgatagttatgcttgaggattaacgaattttggacagctgtaggagccaacccactgggctctgtgcattgcctcgctgtaactatttatgctgctcctctggataccggggcatcacagagccaggcat

SEQ ID NO: 30944 - DNA, 600 bp, Chicken  19866894252823_1
tgggacctgtgctggagcgtggctgtgctggcggctgagtgggatggggtgagatgtgctgggggtcggtacgagctgtggatttctctgttcagatgggtttttcatgcattttttatccgcgccgagatttccttgtctgtgggaagggctgggtatcatggagaagcagcacaggttgtgttgagagcgctgaggtctcttggagtgatgctgggtcctgcctagagctgaagtagtagcacaggtacttctccacgtgctttccagtctcaaagctgaggaggtgaaatgggagckagggggtatatgagcagcacatcctgcctggggagcctgtgttagtgttgggaaacatctgacagtgcacgttcagcagctcattccttcagagcaaggcgccttttatgttcccactcccaattatcctcttaattactcaatgaaatgcccaataaaacaaatcactataatttctattttattctcttgtctatcatggtttacttaagagcacaggatccattaaggaggccccttctcatcagggaatgctttccaatagatcatacttactgaatggctttatgttcctatcct

SEQ ID NO: 30945 - DNA, 600 bp, Chicken  19866894252824_1
taagagcattacatgtggttattctgcttaggggctgagagagtttggatatatggaagtgaaaaagttagttcaggatcagagaatgggtccagtcccatgttatttctgaatacagcctgaacttctcgaggtctgcaaccaaagatgagctgaatcctgcaggaaatatcattttcagtcttttggaggccgctacagcacacatgtgatacagtgggaaaacaagtaattctgtctcagagcagcataaaagaaccctaaaacccagcaccatgcccttagggtatagatttgccrtatggggatcataccaataaattaaagaccgatccttaggattttctacagtgaatgggtaacactccttggaggataattctttttccagtttcgcagatctggaacaatttcactggtttgtaagatggaacatttgcttatttttcacacagtccacttaccttgaccaaaacaggaaagaaaaaaaaattgttcccatttagattttttattgggataactatttttatataaatgatctataacacggtagtttgacaaatatcttccactgttattaaagacttcatcatatta

SEQ ID NO: 30946 - DNA, 600 bp, Chicken  19866894252835_1
aagcacacattgctaatgaactgaagagtcttaaggctgagttgaatatgaattggtgctcttctttttctacttgttttttttaaaggaaaaaaaataaggtgatgaagaatgcagaggtctctagatagcacatgctttggttctctgcacattctagagtattaaagtgaactggaaaagttgaacttcctattgaactctcttctttcatttgcagtgatataatgatgagagacaatctctttgaaattgtaactacttctcgaaccttttatgtacaggtaatttcttttaaaytttgggtagaaccaagagattgacatagtcaaagcaaagaagcagtgccatttctcttataaagttgtatttaaatgtactgggattttcagagggaatacaattttcatcatatttcagaagatgcatgtaagagacactctaaataacagcaagcgttgttagtgtctaaaagcaatgaacaataaatcctaatgtgatttggttggtatttgggtcttcaaattccatagtatctactcaatatactaaatcttttactttcaggtactgaatttttatttatagtaatcaagttct

SEQ ID NO: 30947 - DNA, 599 bp, Chicken  19866894252838_1
  misc_feature (1)..(30): n is any nucleotide
nnnnnnnnnnnnnnnnnnnnnnnnnnnnnnaaatggtagaattagtttgtttgccactggtagtgcccaatctgccaatttaacagtcagctgcaatctgtgtatgatataagctgctctcctgctgcagtaattgtatattctaacaaacttgtaagattcaccactgaaacactctatttttgtatatgttcattaggaactgtgagatttaattagctaaagtgcaagcattttattttttctgttgcagacagagattggagatgtgtatattctttgtgggcaaatgctcttccyagagaaactcttttaccccagctgctaatcctaccacttttcctctaatttttggtatatgtctgttgtacatggcaattttgcaacaatgattggcaggatatttttagtgagggtcatatcagcacccagtatgcaaagactgatctgaaagtaatgcctctgttatgtcagaggtggatggtatggcagtacaggttgaacctttccaccaatatcccattgcatgttgttgttgtgtgacagatggcagcagaggagcactctgacacagtggcatctgacatggaaatgcagat

SEQ ID NO: 30948 - DNA, 599 bp, Chicken  19866894252840_1
  misc_feature (1)..(94): n is any nucleotide
nnnnnnnnnnnnnnnnnnnnnnnnnnnnnnnnnnnnnnnnnnnnnnnnnnnnnnnnnnnnnnnnnnnnnnnnnnnnnnnnnnnnnnnnnnnnnntgtttagccaggcagttttttttttttctatgtcagacattttaagcagcatttcaggccttagtcaaactatcagtgagtctgagttcagacaggttccctaatggctaccactgtaagatagatgttttttttttcctgcagttggtacattcttaggccttccaggctaaaagagaacatgaaaggaaaggcatggaaaaaartgtctctcaattaaaaaaaaaaatcacttatcctattctctttctaatgacatttccccagtttccctggactcttttgttgagtaaacagaatggattatyatatatgagaaagttcccttgggaagagctgttttcaactgacaggggaattgagaagggtaagaaagaaatacgcctattgatcaaagacctacsattctgtcaacttccaaggaataatatattttgggctgaaagaccatggctgggatagatcaaggattcttgcaggagtgagaaaccctttttttcagtct

SEQ ID NO: 30949 - DNA, 600 bp, Chicken  19866894252840_2
caggcagttttttttttttctatgtcagacattttaagcagcatttcaggccttagtcaaactatcagtgagtctgagttcagacaggttccctaatggctaccactgtaagatagatgttttttttttcctgcagttggtacattcttaggccttccaggctaaaagagaacatgaaaggaaaggcatggaaaaaartgtctctcaattaaaaaaaaaaatcacttatcctattctctttctaatgacatttccccagtttccctggactcttttgttgagtaaacagaatggattatyatatatgagaaagttcccttgggaagagctgttttcaactgacaggggaattgagaagggtaagaaagaaatacgcctattgatcaaagacctacsattctgtcaacttccaaggaataatatattttgggctgaaagaccatggctgggatagatcaaggattcttgcaggagtgagaaaccctttttttcagtctgcttgataagcagttagaatactgactctggtttcacatttaaatctgagaaaaagaacacctaattaaaaaaataaacacgcaaatrgaacattattaactt

SEQ ID NO: 30950 - DNA, 600 bp, Chicken  19866894252840_3
tggctaccactgtaagatagatgttttttttttcctgcagttggtacattcttaggccttccaggctaaaagagaacatgaaaggaaaggcatggaaaaaartgtctctcaattaaaaaaaaaaatcacttatcctattctctttctaatgacatttccccagtttccctggactcttttgttgagtaaacagaatggattatyatatatgagaaagttcccttgggaagagctgttttcaactgacaggggaattgagaagggtaagaaagaaatacgcctattgatcaaagacctacsattctgtcaacttccaaggaataatatattttgggctgaaagaccatggctgggatagatcaaggattcttgcaggagtgagaaaccctttttttcagtctgcttgataagcagttagaatactgactctggtttcacatttaaatctgagaaaaagaacacctaattaaaaaaataaacacgcaaatrgaacattattaacttttagaagttctttagaccagttatatacgagctcagttcatactttatttcttctcttsagcattctctctgctgtactttttcaaaaaagaaagt

SEQ ID NO: 30951 - DNA, 600 bp, Chicken  19866894252840_4
acagaatggattatyatatatgagaaagttcccttgggaagagctgttttcaactgacaggggaattgagaagggtaagaaagaaatacgcctattgatcaaagacctacsattctgtcaacttccaaggaataatatattttgggctgaaagaccatggctgggatagatcaaggattcttgcaggagtgagaaaccctttttttcagtctgcttgataagcagttagaatactgactctggtttcacatttaaatctgagaaaaagaacacctaattaaaaaaataaacacgcaaatrgaacattattaacttttagaagttctttagaccagttatatacgagctcagttcatactttatttcttctcttsagcattctctctgctgtactttttcaaaaaagaaagtaagcagatgatcagcaagatgtctgatcctccatcccatttcttgggttaccaaaatagggatgaagagtataaacaaattgtatacagcaacatacataacacctactacctgaagccactgttcagagcattgtgcaccagtgggcagagaccatgcacagacagtccagttgttgtgcctcaccat

SEQ ID NO: 30952 - DNA, 600 bp, Chicken  19866894252840_5
tggattatyatatatgagaaagttcccttgggaagagctgttttcaactgacaggggaattgagaagggtaagaaagaaatacgcctattgatcaaagacctacsattctgtcaacttccaaggaataatatattttgggctgaaagaccatggctgggatagatcaaggattcttgcaggagtgagaaaccctttttttcagtctgcttgataagcagttagaatactgactctggtttcacatttaaatctgagaaaaagaacacctaattaaaaaaataaacacgcaaatrgaacartattaacttttagaagttctttagaccagttatatacgagctcagttcatactttatttcttctcttsagcattctctctgctgtactttttcaaaaaagaaagtaagcagatgatcagcaagatgtctgatcctccatcccatttcttgggttaccaaaatagggatgaagagtataaacaaattgtatacagcaacatacataacacctactacctgaagccactgttcagagcattgtgcaccagtgggcagagaccatgcacagacagtccagttgttgtgcctcaccatgtatac

SEQ ID NO: 30953 - DNA, 600 bp, Chicken  19866894252840_6
gtaagaaagaaatacgcctattgatcaaagacctacsattctgtcaacttccaaggaataatatattttgggctgaaagaccatggctgggatagatcaaggattcttgcaggagtgagaaaccctttttttcagtctgcttgataagcagttagaatactgactctggtttcacatttaaatctgagaaaaagaacacctaattaaaaaaataaacacgcaaatrgaacattattaacttttagaagttctttagaccagttatatacgagctcagttcatactttatttcttctcttsagcattctctctgctgtactttttcaaaaaagaaagtaagcagatgatcagcaagatgtctgatcctccatcccatttcttgggttaccaaaatagggatgaagagtataaacaaattgtatacagcaacatacataacacctactacctgaagccactgttcagagcattgtgcaccagtgggcagagaccatgcacagacagtccagttgttgtgcctcaccatgtatacttaacygccctcccctgatctacttagcaggagaggtagtagcacacgttccaggcccctctttcata

SEQ ID NO: 30954 - DNA, 445 bp, Chicken  19866894252840_7
cttttagaagttctttagaccagttatatacgagctcagttcatactttatttcttctcttsagcattctctctgctgtactttttcaaaaaagaaagtaagcagatgatcagcaagatgtctgatcctccatcccatttcttgggttaccaaaatagggatgaagagtataaacaaattgtatacagcaacatacataacacctactacctgaagccactgttcagagcattgtgcaccagtgggcagagaccatgcacagacagtccagttgttgtgcctcaccatgtatacttaacygccctcccctgatctacttagcaggagaggtagtagcacacgttccaggcccctctttcatagattcatagatgtaagaatatctcacttgtgacatcctggcacaccgtaacaattacagaagagacagcatcttctttaaatg

SEQ ID NO: 30955 - DNA, 600 bp, Chicken  19866894252843_1
aagtcagtcctacattatattatctattgtggttaaaaccaaagcagacagaaccacctctagtgacctctcttgctatggattcaagggcagaataagcctttgattttccctaaatacactgtacaccattcctgcaatattgctagcaaggactggaacttagcattagtactttagcagacacaaaaggctgccagagcacaaaatgatcaccatatatttacagccctgcaacagaaacagaacagatgccccacttgtttcttttgcaaaagctgggagctggggtaccgtcarcttaccagcacactaatgaatgaatacttaaggtctaacctttttctccctgaagggtgtgctgaacacctgaatagttttgtcactgtgctttatattctatacatcacctccatgaaaactgatggaactctactacctcaacaacagttgacactagaaagcataactaaatacagctttaagcttagagtactgaacctaacatctttggattcaaatactcaaataactggctttcattcaaaaaatagtttagttcctctctcagcctgcaccttaatgaacagatttctctac

SEQ ID NO: 30956 - DNA, 599 bp, Chicken  19866894252846_1
  misc_feature (1)..(25): n is any nucleotide
nnnnnnnnnnnnnnnnnnnnnnnnntgctcccactactctgtgtgcttagctcttgcagatgatggtgttacagagaagtgtatagtttgtaaagttggcctttttgcactggttggagtttaatatgcagcttgggagattctgagggtacaacctctgcactcttccttcccagaaaaaaaaaatgaatgcttggaaagattgatgaagagaaattgaactaaaaattgtcttcggagccttggcatatttggggatttaacctcagtttgtagccctatcaaattctacattaaaayggctgtgtaggtccatacttctctttctcatagcaaatgaaaactcttttcatttcctttgcacttgggttcgttgtgggaacaggtatacatatgtcagcataacagacacattttctgcgtaccttggatgcttctaaagcatttaactacttaaagattgctttttcctcgacaattttgagaaaagtgtccctttaaagcagttatttatattttttatgtgtaaggatttgcatttagccttaaaagagactgcagcaacaaaaatccaaaatgcagttatataaaaagccttt

SEQ ID NO: 30957 - DNA, 599 bp, Chicken  19866894252849_1
  misc_feature (1)..(258): n is any nucleotide
nnnnnnnnnnnnnnnnnnnnnnnnnnnnnnnnnnnnnnnnnnnnnnnnnnnnnnnnnnnnnnnnnnnnnnnnnnnnnnnnnnnnnnnnnnnnnnnnnnnnnnnnnnnnnnnnnnnnnnnnnnnnnnnnnnnnnnnnnnnnnnnnnnnnnnnnnnnnnnnnnnnnnnnnnnnnnnnnnnnnnnnnnnnnnnnnnnnnnnnnnnnnnnnnnnnnnnnnnnnnnnnnnnnnnnnnnnnnnnnnnnnnnnnnnnnnnnnnnnaaaaagacgacatttctgtaacagcaaaaactgaaagaatcwgcaggtgattaaaaaaaaagggaaaaaaaagctctgcatatgaaagaagtctaccaatgtggtctttcactgacaggatatatcaagtttgtagatgacagtgaaygttgacttgcatggtatcaggtcttatccagcaatatatatattacatacaatatatattaaattttaatgctgtcttgccactgtaagtgatcataaaaacaaggaaaaggcaaacttctctcatttagtaaaatgaaacatcacaagctgatgtcttaaattaarcagaatctaaacactaacaattacct

SEQ ID NO: 30958 - DNA, 599 bp, Chicken  19866894252849_2
  misc_feature (1)..(152): n is any nucleotide
nnnnnnnnnnnnnnnnnnnnnnnnnnnnnnnnnnnnnnnnnnnnnnnnnnnnnnnnnnnnnnnnnnnnnnnnnnnnnnnnnnnnnnnnnnnnnnnnnnnnnnnnnnnnnnnnnnnnnnnnnnnnnnnnnnnnnnnnnnnnnnnnnnnnnnnnaaaaagacgacatttctgtaacagcaaaaactgaaagaatcwgcaggtgattaaaaaaaaagggaaaaaaaagctctgcatatgaaagaagtctaccaatgtggtctttcactgacaggatatatcaagtttgtagatgacagtgaaygttgacttgcatggtatcaggtcttatccagcaatatatatattacatacaatatatattaaattttaatgctgtcttgccactgtaagtgatcataaaaacaaggaaaaggcaaacttctctcatttagtaaaatgaaacatcacaagctgatgtcttaaattaarcagaatctaaacactaacaattacctgtatgttaaagtgatccagcattcctaagagttcctccttctttgaagaaatgatagcgcctaagggggagaggaagagtgagagagagaaataactgctattgac

SEQ ID NO: 30959 - DNA, 600 bp, Chicken  19866894252849_3
ctgtaacagcaaaaactgaaagaatcwgcaggtgattaaaaaaaaagggaaaaaaaagctctgcatatgaaagaagtctaccaatgtggtctttcactgacaggatatatcaagtttgtagatgacagtgaaygttgacttgcatggtatcaggtcttatccagcaatatatatattacatacaatatatattaaattttaatgctgtcttgccactgtaagtgatcataaaaacaaggaaaaggcaaacttctctcatttagtaaaatgaaacatcacaagctgatgtcttaaattaarcagaatctaaacactaacaattacctgtatgttaaagtgatccagcattcctaagagttcctccttctttgaagaaatgatagcgcctaagggggagaggaagagtgagagagagaaataactgctattgacatgccagcatactgcagtctaacatgccaacacagatgcagaccttgtaagaaaatctttcattgacattaatgcatttaaagtaattaaaccattaaaagagctttaaagattgagggcaaaacaaactatcaccaaccagatttgcttttyagtctgtaagttctg

SEQ ID NO: 30960 - DNA, 600 bp, Chicken  19866894252849_4
atgtcttaaattaarcagaatctaaacactaacaattacctgtatgttaaagtgatccagcattcctaagagttcctccttctttgaagaaatgatagcgcctaagggggagaggaagagtgagagagagaaataactgctattgacatgccagcatactgcagtctaacatgccaacacagatgcagaccttgtaagaaaatctttcattgacattaatgcatttaaagtaattaaaccattaaaagagctttaaagattgagggcaaaacaaactatcaccaaccagatttgcttttyagtctgtaagttctgctcccttccaggttaatgtgtgtattcacaataatagagtcaccgtacagttctggtttaaatgcatctctgccttggttttgcagtgttactgagatatctgcagaactaaaggaaaaaaaacaaaacaaaaataaacacacaagcatccatagatagctgaaatgaattacaaattaaacagaaaaataaaatcggaactcaatatttttttccacaaaaattgtcacatcgggttataattgaaaataatcattcgcagtacagactggaacaaaacacact

SEQ ID NO: 30961 - DNA, 572 bp, Chicken  19866894252851_1
gactgagatcttaattctctaactgctattagtaaagccatcatgtggtgaaaagcaactcagacaaccaacgataaatggagatttatacgtaccttatttgcaggggtcctgacttcatattcaagggttgaagcatttaagggtcattcagcctgtttcttttgtgtcttttttttttttttttttaaataaaaacattgaaactctaaagttgctagaatctagagttcttttttgtacacactactactatgatttcagtggattcctgacttctgtcagtttggtaatccaatwgatctagatgtttactttgctgcattttaagaaaatcgtggtcataggaattcattttctgcaagttgctccctaattacagtattaatatgaagacataatggcaagtgttccaaaataatgatatattaggatacgtttctattttttttctgtacctcatttcacttcactttctggcggtataacacaaatatattaaatcgtgtttgtcatgcatataaattttagtgtttaagggactgtagaagagctgaaggggaaattaacaa

SEQ ID NO: 30962 - DNA, 600 bp, Chicken  19866894252852_1
tttttttgtttgtttgttttcttctcaaacaaatcccatctacccattcacttgaacttccattccttcgtgagattttcccccaccccaagctgaccccacagagagttagagagtgaacaaacctttgagctttcagtgccaggaaagcatggagaaactgtttacaaagtaagctgaacaagtgtcagagtgcacaagtgcacatattgctactgctgactttataatgtctcccataccaacagacagaagtgaacttcttcaaactgcctcatcattacctcttccaatttgctraattttatcacattttatccagaatcaacgcctggtgatgctagaaatatgttcaactaatctaaaaatcagaaggctaaaattacacactctgtatcctacaggaagaatgtcaagcttccttcattactgctttcctttgctgtgcacagttgatatcagggccttgaaaaacagcattcaagcagtaattagcaagacagagctggtgtacagtcacgctaaaacttgttcattttaccccttaaataggctgacaaattgaatgtggtaatttatctgtttagctaaacatcactg

SEQ ID NO: 30963 - DNA, 600 bp, Chicken  19866894252854_1
acagtgcatgctttgtgggaaatgcagctataaatacctgggggaaaatctattgtccattttaatgagaagaggatagagtctcttgtttttacatctagtagcttgagctgttcctgattgtgagaacaaggttctctaattaattaacgcactgtgaagcccctggcgttgctatgctggtattcctggagccacacagagccccacggggccctgtgactgttgtttgaactcctcctgctctggttcctctgttagatgagctgtggggtgctccataagcagctgctctttcartggttgcgatgaatctgcatggtccaaaaggactcatgtgttattgtcaagggtgcagggttgggagagccccagctctgttgctgagaccctttggtggtcctctgtacccacatctacttctgatagccacccagctgggcctggtgaccccattgcaggagcactgctgactatttctctccccttcttgcaggcgctggacatggacacagaggatgaccccttgttgcaggacgcctggctggatgaggaggacgaagaggttgccttcagctcaaggaagaggcgggagggtgc

SEQ ID NO: 30964 - DNA, 600 bp, Chicken  19866894252863_1
ccaaactttttcataaatatgtacaggatgtgccaagatgaatctgcccacggaatggcgtttcggtggggctgcactgctgtaattcaaagcagaatttggccttcgactctaattgttcccaactctagaagtactgaattgattttcttcagacatgaactgttttctccttcatcaccgaggtctataaaacaagccgagttcaaatttcctagcgtcagctgttcttgagttatgagagcagagaagctgcaaccggaacaaataggaatagctggtttctcttcgtgcccacayatcayaaaaacagccaagatgattttgctgagagttctcaaaaatattcacctttaggctggagccaagcctgaaaagtaccttgccccacctgaggaacgtgcttgagaaaatttggagcagctgaaaaatggaggggagcctggaaacagaaatcaagctgaagccataatagtggtttacttccacaggactaataaacgattctcaattcttggccataaattagctttgtaaggacgcaacatgttcctgagtgggcctgtggctttctccgttcctagaagagacatttttgct

SEQ ID NO: 30965 - DNA, 600 bp, Chicken  19866894252863_2
ctttttcataaatatgtacaggatgtgccaagatgaatctgcccacggaatggcgtttcggtggggctgcactgctgtaattcaaagcagaatttggccttcgactctaattgttcccaactctagaagtactgaattgattttcttcagacatgaactgttttctccttcatcaccgaggtctataaaacaagccgagttcaaatttcctagcgtcagctgttcttgagttatgagagcagagaagctgcaaccggaacaaataggaatagctggtttctcttcgtgcccacayatcayaaaaacagccaagatgattttgctgagagttctcaaaaatattcacctttaggctggagccaagcctgaaaagtaccttgccccacctgaggaacgtgcttgagaaaatttggagcagctgaaaaatggaggggagcctggaaacagaaatcaagctgaagccataatagtggtttacttccacaggactaataaacgattctcaattcttggccataaattagctttgtaaggacgcaacatgttcctgagtgggcctgtggctttctccgttcctagaagagacatttttgctctgag

SEQ ID NO: 30966 - DNA, 600 bp, Chicken  19866894252864_1
agaacaaaacagaagggcagcaaaagccttttgatataagttgtgttataatcaggttctcagaaatccatagcaatggcccagctacttccttgaaatgccacaagtaactttgtatgtgcatggtggaatagtgaatcagcatggagaaagcaacaaccacagtttgagatggaatcttctctgtgctaaggaaagtcttttcccatggagagctttattttctctactagagaccaggcagatgcctgatcagatacaggcaccctgagaaaggagggagttgtatctctgacatgyagccaagagcatagatgtggtatgagagctgcatttgcccttggggtagtgcaagagctttccaaagtattcaggtaccaaggacagaggattctggaggaaaaggtctgaccattcacacccttctcctgccggagaagggagaggaatgaggatgaaacggggtccttgagatggggaccaaaatgggctggcgaaaggatgtcagtagagatagacatgtggcttctgattggagggaagacacagaaagtaaaaatatatgagagaaaggagtcagcaaaagccagtcagtgccaa

SEQ ID NO: 30967 - DNA, 600 bp, Chicken  19866894252864_2
caagagctttccaaagtattcaggtaccaaggacagaggattctggaggaaaaggtctgaccattcacacccttctcctgccggagaagggagaggaatgaggatgaaacggggtccttgagatggggaccaaaatgggctggcgaaaggatgtcagtagagatagacatgtggcttctgattggagggaagacacagaaagtaaaaatatatgagagaaaggagtcagcaaaagccagtcagtgccaagccaccctgtcatggagttacactgagtttcccctttttattccagctctsatggctcttgcatgtgggcactggtttcctaagctgaaaggagccatgtctgtgttgttgatgagggaaattagtttcagaagtgtttacatcgtgttgtgtagagcagtgtgctttgtcattttttaagtctgtgayagcacctgcaaatataaagcagaagtaaaacccaggctggacctggactaaacttatcacgccatttgtttccagacacctacacaaaagcaaaaaaaaattatcaggagtgatgtcacatctatatcacaaatggtgaaaatctgtcatttatatataact

SEQ ID NO: 30968 - DNA, 600 bp, Chicken  19866894252864_3
gctggcgaaaggatgtcagtagagatagacatgtggcttctgattggagggaagacacagaaagtaaaaatatatgagagaaaggagtcagcaaaagccagtcagtgccaagccaccctgtcatggagttacactgagtttcccctttttattccagctctsatggctcttgcatgtgggcactggtttcctaagctgaaaggagccatgtctgtgttgttgatgagggaaattagtttcagaagtgtttacatcgtgttgtgtagagcagtgtgctttgtcattttttaagtctgtgayagcacctgcaaatataaagcagaagtaaaacccaggctggacctggactaaacttatcacgccatttgtttccagacacctacacaaaagcaaaaaaaaattatcaggagtgatgtcacatctatatcacaaatggtgaaaatctgtcatttatatataactgctttcagaggaaatgttactctacatttctgtctgaaatgccacctgacaatatcaaaaagaccaagtgctgcccaaggaccgaactgaaatgtcagatggtggctcacagcagctctctctgttattattccagca

SEQ ID NO: 30969 - DNA, 600 bp, Chicken  19866894252866_1
gtatccccgttcggcccctgcggggtccctctctggagcacccttcgcccaacccgagcatccccccgcgcctctctctgctcccgggcagccacgctttggaagctgctttatttcaaaggcagctttaaagcgagtttcgaggaagccgcctcctttcctcctaattttgatttgagcttcacaacggggtggcgagcgaaggagataaacagtaggtgaagaacggtggtgagcccgatagcgatctgcacctaatcgttccgactgcgtgcgcggctgactcagcgcctcgttgcyctgtgcttagagagccgcagcgcgtttacacggctttgtttgtgctccccggcgtttccacacgccgacttggaagytggcgttttaggtagcagccaccgattccgcatcgctttcagccgtccaaagttgccgggcgcgccgcttgtctcastgacaccggcacgatcgctgctcccaccccgtgcggagccactgagaccctcttacaacgtggagcacaccttggagttaagagagttttaagcctgtccttatcgcgcacggcgcgctgcgttcacccatttgctctcagacagc

SEQ ID NO: 30970 - DNA, 600 bp, Chicken  19866894252866_2
ctgctcccgggcagccacgctttggaagctgctttatttcaaaggcagctttaaagcgagtttcgaggaagccgcctcctttcctcctaattttgatttgagcttcacaacggggtggcgagcgaaggagataaacagtaggtgaagaacggtggtgagcccgatagcgatctgcacctaatcgttccgactgcgtgcgcggctgactcagcgcctcgttgcyctgtgcttagagagccgcagcgcgtttacacggctttgtttgtgctccccggcgtttccacacgccgacttggaagytggcgttttaggtagcagccaccgattccgcatcgctttcagccgtccaaagttgccgggcgcgccgcttgtctcastgacaccggcacgatcgctgctcccaccccgtgcggagccactgagaccctcttacaacgtggagcacaccttggagttaagagagttttaagcctgtccttatcgcgcacggcgcgctgcgttcacccatttgctctcagacagcgcttttgaacgctcggtattcttatttttcaatgacattcgcttattattagagcagctggtagccccagtgaagtg

SEQ ID NO: 30971 - DNA, 600 bp, Chicken  19866894252866_3
cctttcctcctaattttgatttgagcttcacaacggggtggcgagcgaaggagataaacagtaggtgaagaacggtggtgagcccgatagcgatctgcacctaatcgttccgactgcgtgcgcggctgactcagcgcctcgttgcyctgtgcttagagagccgcagcgcgtttacacggctttgtttgtgctccccggcgtttccacacgccgacttggaagytggcgttttaggtagcagccaccgattccgcatcgctttcagccgtccaaagttgccgggcgcgccgcttgtctcastgacaccggcacgatcgctgctcccaccccgtgcggagccactgagaccctcttacaacgtggagcacaccttggagttaagagagttttaagcctgtccttatcgcgcacggcgcgctgcgttcacccatttgctctcagacagcgcttttgaacgctcggtattcttatttttcaatgacattcgcttattattagagcagctggtagccccagtgaagtgcctggcaaagggctccatcgtaaaacactgctttctaagtttatagtttctaatttggctgtgaaagtgtgattctg

SEQ ID NO: 30972 - DNA, 600 bp, Chicken  19866894252866_4
gagaattcattttgtccaaacgagtgaaccttcacatcgctcccatctctgtcttgtacaggctttatggtgtggttcaatagctcacggttaggaaagaagaaggtgtcttcccattctacaggattcttctacaagctcttcaaatgtcactcggcaaagatcaggaatccttcactgacgtccccacagtctgggctgctctcactcacccacattctgcccctttctgttgtcccgtggatggctaagaagcgggggctgagtgccctctaatccagtggttaagggcctcactgyggaacgataaatcagattgtacgttcttgcagtaggtcatgaagctttttaaccaggagatcttttcagaggcggagagatctctaaagatttttacgtttaaattcaatttcagttttaaactgcccccgagtttgtcttcacgtttcacttcttcaggctgtccagcaggcatagatgatgattattatttttttttgcctggaataaaaacattttaatgaccagttttgttcagggatgattcatactcttaaaccacccaaggttgttctcttagtcacgggtgttagacaggtc

SEQ ID NO: 30973 - DNA, 600 bp, Chicken  19866894252866_5
gctctcactcacccacattctgcccctttctgttgtcccgtggatggctaagaagcgggggctgagtgccctctaatccagtggttaagggcctcactgyggaacgataaatcagattgtacgttcttgcagtaggtcatgaagctttttaaccaggagatcttttcagaggcggagagatctctaaagatttttacgtttaaattcaatttcagttttaaactgcccccgagtttgtcttcacgtttcacttcttcaggctgtccagcaggcatagatgatgattattatttttttttycctggaataaaaacattttaatgaccagttttgttcagggatgattcatactcttaaaccacccaaggttgttctcttagtcacgggtgttagacaggtcccaaaaaatccatgccattttgaagacaaggtcttcgatttcactggataagattgtggtttggatacctctggcaggcacttcaggatacctaagtgtgcacaaggagactaaaaagactggagttaagtgtttaggctgttcccttctgaagaaaagcaaagtgtaagtctttgccttttcactctaatgactttttt

SEQ ID NO: 30974 - DNA, 600 bp, Chicken  19866894252868_1
aaccctttgtaccattcccactttgtgcatggcttttttgtctatctgaaaatagatcacaatgtttttcaagtggtgcagcattgattgcatgcatttagttaactgaacttggaattttaactgtttgatgcatgttttgcctgaacaccctgacatataaacaaggtttttgctttgcctactagatgctcttcatgagcaaatatcttagagaaactgaggacaattgttcaaataatgaataaacagtaacaaaattttgagagaaatccaatgctgagtttgcaaagcacacaygctaaaagaagctaacattaaaaaggtggataaatgcaagtagtataagtcgtaattaaaactagcaaaacgcctatgaaacgagagtttctgtcataactgtttgcccttacagcaagggaaactgctaacacaagtgaaagggttgcaagctcctcctgtgctcaggacctctccggctgaacagagwctaaacgatgtttttgtaggtgccaatttctgaattacagttacagaaatcattgtacaaccatgactgagtatctcagctcaagtcggtttaacagcaacattaacact

SEQ ID NO: 30975 - DNA, 600 bp, Chicken  19866894252868_2
gctcttcatgagcaaatatcttagagaaactgaggacaattgttcaaataatgaataaacagtaacaaaattttgagagaaatccaatgctgagtttgcaaagcacacaygctaaaagaagctaacattaaaaaggtggataaatgcaagtagtataagtcgtaattaaaactagcaaaacgcctatgaaacgagagtttctgtcataactgtttgcccttacagcaagggaaactgctaacacaagtgaaagggttgcaagctcctcctgtgctcaggacctctccggctgaacagagwctaaacgatgtttttgtaggtgccaatttctgaattacagttacagaaatcattgtacaaccatgactgagtatctcagctcaagtcggtttaacagcaacattaacacttttagtagttacgagtataggctttttgattgtgctgcaccttccaggaccaaatcctactctcagcatccgttacccaaaaacaaggggtccaggcacagccaccccgacctgctgcaactgcctctgctgggggcatcccagaagctgcagattcctccagctggctgccttaccattttgatagcca

SEQ ID NO: 30976 - DNA, 600 bp, Chicken  19866894252876_1
atctccatgtgatatttaatctagactgtaagcccctcaggggcagagatcacatctacttgtctgtaaaacctaatgtgcacatatggcaaagaacaaatagtaaaaaggatcacaggcaatatgcgatgctaagttttgttcacctttgcagcatgagaacatatttattccacaattgctttccagaaaacttaagcttgagaaagcctctgcggccccagtcaaaatgcacacccgggtggtgtgacaccattctctgcagtaacaggagattttatcattggaccttctgatgcycaaatgtccctctaatagcgtttggtgtttaaaggctggttaagaagaacgaatcctttgttttatcctaatatatatctgatgtgacagctgctacctgatttaaggaraactggagaaattcaaaaaatagcaacagaatttaaagtaaggaatgacagaagttttccgcatttcaatttttttccccctatttctttccccagtcaaaaaagtatcacataagagctgcacatggacagcaacacagtactgggaattgtgaatctgtgagcagggatctggaaagaatgatgttac

SEQ ID NO: 30977 - DNA, 600 bp, Chicken  19866894252876_2
gatcacaggcaatatgcgatgctaagttttgttcacctttgcagcatgagaacatatttattccacaattgctttccagaaaacttaagcttgagaaagcctctgcggccccagtcaaaatgcacacccgggtggtgtgacaccattctctgcagtaacaggagattttatcattggaccttctgatgcycaaatgtccctctaatagcgtttggtgtttaaaggctggttaagaagaacgaatcctttgttttatcctaatatatatctgatgtgacagctgctacctgatttaaggaraactggagaaattcaaaaaatagcaacagaatttaaagtaaggaatgacagaagttttccgcatttcaatttttttccccctatttctttccccagtcaaaaaagtatcacataagagctgcacatggacagcaacacagtactgggaattgtgaatctgtgagcagggatctggaaagaatgatgttactcagcagtgtgctaatcacctgaccacagcagttaaaaaaccgtcctcatacaacaaaaatgctcattgctagcaggctatcacagggtgggcttgactattctttttcc

SEQ ID NO: 30978 - DNA, 600 bp, Chicken  19866894252879_1
ttagttgtctaatgtctgaatcacaatcagtcactgcaaaggtagtctgaaaatagctatgtactgtagtttaccacatgagagtgaaagtgatcctgtggaaaggattatgtggtttgaactgcatgtgtatgtgatgcatacacatacattttaacacacacatacatacacacacaaaaaaaagacacctactggaaaacatgtcttaataattttatattgagcttgcttctgggaaatactgaaatttttaggccactataaatactgttatttatatttgcagtggaaaaaatrcttcttaagacatgagtaatgggttgttaaagaatcatagggattgacttgttagttccttctgcttttaaagttgtcaggctttgtacttcagggatctgttctaaaatccctgaattgttgcctcctgatttcaggtgcaacatcactttcacataaatgtatgttagctggttttaaaaagtgaatacgcagaaatgcctgaacttcacgtgccagaaagtgaatgcttttggtctctgtaactagcaactttcctcaccattatgctcatcaaatgagcgtttgaaaaggcaatac

SEQ ID NO: 30979 - DNA, 600 bp, Chicken  19866894252881_1
aggttggccaagttactggggatgggggagctgttgcggctggttgactttcccacatttcaaggcagaaatgttgtaaaaccaactggagctatctgtgctcagagcagctgcccacccgtactgtggtagctggttttggatgctgagacttctagttcagaatctgcccctcttaagaaaatcaatattttttaatactgtttttatccccttagaaaaatgatttatgaatgaagctaaatttgtggagaggtaggtactattccatactttcctcgtgcacttgtgcacctcttrtgtcagtgggaatggtggtggaacrctgctgtttatttcagatatcagactgtgcccagcagccctgctcaggagtggcagtgacaccagaggctctgcaccaggcctcaggagagctgatttcaccactgtattgctctttgtaagcttgagaaggttaccaaggtcaaatcttctctaaaagctagttgcatgcctgagctccttatgggctgtcctttgactttcccactggttctttggcacattatctgcaaagctggaaaacttgctttggaatatcagtgttaggcacaggga

SEQ ID NO: 30980 - DNA, 600 bp, Chicken  19866894252881_2
gggagctgttgcggctggttgactttcccacatttcaaggcagaaatgttgtaaaaccaactggagctatctgtgctcagagcagctgcccacccgtactgtggtagctggttttggatgctgagacttctagttcagaatctgcccctcttaagaaaatcaatattttttaatactgtttttatccccttagaaaaatgatttatgaatgaagctaaatttgtggagaggtaggtactattccatactttcctcgtgcacttgtgcacctcttrtgtcagtgggaatggtggtggaacrctgctgtttatttcagatatcagactgtgcccagcagccctgctcaggagtggcagtgacaccagaggctctgcaccaggcctcaggagagctgatttcaccactgtattgctctttgtaagcttgagaaggttaccaaggtcaaatcttctctaaaagctagttgcatgcctgagctccttatgggctgtcctttgactttcccactggttctttggcacattatctgcaaagctggaaaacttgctttggaatatcagtgttaggcacagggaagtgctaattacagtagaggagacc

SEQ ID NO: 30981 - DNA, 600 bp, Chicken  19866894252881_3
agccctgctcaggagtggcagtgacaccagaggctctgcaccaggcctcaggagagctgatttcaccactgtattgctctttgtaagcttgagaaggttaccaaggtcaaatcttctctaaaagctagttgcatgcctgagctccttatgggctgtcctttgactttcccactggttctttggcacattatctgcaaagctggaaaacttgctttggaatatcagtgttaggcacagggaagtgctaattacagtagaggagaccacataagctgcaatgactgagtggaggtggtaacrcaggctactggtattttcaaagagtagtacatactgtattttggactgctytgaaggatggttagttgcaacaaaccccagaattttgttgattcgtgacttatattttgtttttattcagcattttttgccttttctgagggctccmgcagctgaaacagcacagccttgccacacagcagtttcagctgagtctggtgtttgaaatggcaacactgctaaatgtttgtgacttggttttagtagagcatttttgctgccaatttccttaagaaagcagaaacaatatgtaaagcaaga

SEQ ID NO: 30982 - DNA, 600 bp, Chicken  19866894252881_4
gagagctgatttcaccactgtattgctctttgtaagcttgagaaggttaccaaggtcaaatcttctctaaaagctagttgcatgcctgagctccttatgggctgtcctttgactttcccactggttctttggcacattatctgcaaagctggaaaacttgctttggaatatcagtgttaggcacagggaagtgctaattacagtagaggagaccacataagctgcaatgactgagtggaggtggtaacrcaggctactggtattttcaaagagtagtacatactgtattttggactgctytgaaggatggttagttgcaacaaaccccagaattttgttgattcgtgacttatattttgtttttattcagcattttttgccttttctgagggctccmgcagctgaaacagcacagccttgccacacagcagtttcagctgagtctggtgtttgaaatggcaacactgctaaatgtttgtgacttggttttagtagagcatttttgctgccaatttccttaagaaagcagaaacaatatgtaaagcaagaaatacaaataaaggagaggttttaaaatacttttgatgtttaaaaaaacca

SEQ ID NO: 30983 - DNA, 600 bp, Chicken  19866894252881_5
tgggctgtcctttgactttcccactggttctttggcacattatctgcaaagctggaaaacttgctttggaatatcagtgttaggcacagggaagtgctaattacagtagaggagaccacataagctgcaatgactgagtggaggtggtaacrcaggctactggtattttcaaagagtagtacatactgtattttggactgctytgaaggatggttagttgcaacaaaccccagaattttgttgattcgtgacttatattttgtttttattcagcattttttgccttttctgagggctccmgcagctgaaacagcacagccttgccacacagcagtttcagctgagtctggtgtttgaaatggcaacactgctaaatgtttgtgacttggttttagtagagcatttttgctgccaatttccttaagaaagcagaaacaatatgtaaagcaagaaatacaaataaaggagaggttttaaaatacttttgatgtttaaaaaaaccacagcagaacaaagaaaaaaaaaacaaaaaacaaaaaaccccaacatgctaaacaaaaatggttcagaagacatgctaaatttagcaaacttcttttg

SEQ ID NO: 30984 - DNA, 600 bp, Chicken  19866894252887_1
gttaattacctatgcattagttgtatttacaagatgtgagcaaccaaagacaggttgttctttgtttcccaaaccagatgcaggatagcaggagtgtggcctcacagctcatctaaattctaaattccgtcaggctggcatctgctccctttctgctgattaagaaatactgacaaacatttttctgtttcttctttttgcctgcagaaagtccttcttttctgttcatacctgtaaactcaaaaatggactcttcccacttggtggctttaactgtgtttacagaaaagaagatattgytaaattggagaggcaaagcttgaacaagtcactctgagaggcataatcatatacataccatgatttcctgacatatcacaaaaaaaaaaaaaaaaaaaagaaaaagccaattacatttgtaaagtgtactaattttttcaacagttctcctggatagaaatcttcaaagatgtccccaaaatgaaatgctttcctgtcaaacaaatgaagtgtattcagctgtggcccctggggaactgctggcagagttcagagctgacacagatcgagaccctgttctcctccacatgaagcagaaaa

SEQ ID NO: 30985 - DNA, 600 bp, Chicken  19866894252887_2
agctgacacagatcgagaccctgttctcctccacatgaagcagaaaatctgcatttctgtcttaacttgcagggcaatatcttatgtgtcttggtgttcttccacttctcagaaagagtttcaaaaggacatgatgctgatgctgccaaaaatgctaagtttgagaaatgtgggtgcttatggctattgcctcagtccagacaatctgctgaattaaataatcacttgtcatctgggagagacttgctaaggtacctttatatactgcttgttcttgttgctttgcacaattgaacttaytcaatcgcagctgaacatttattctttctataatattatttccttttggacatgaagaaggaaagatttggtatgaggtgaaggaacattttctttgtggtcatgtttacattttttcaatgctccttcgtgaagtcatattatgtagtttgatgtatatgcttaagctatgaacagacatatcttctatgtgggtagattacaatatattgaatatatatttatttttatatgaatgcacatagagatatatcttttctgaaagaaaatatacatgtccaaactaatacgtgcatttca

SEQ ID NO: 30986 - DNA, 600 bp, Chicken  19866894252891_1
ttaaggtcttcatttcacctcttagttgtaaggacagtacttggccatcaatttacgctggagagtgtttgatagcacacttgaccttaagtcagattttccttacaatcttttttccatctgcttgatggtataagaaatgcagtaaaactccagtgaacttaagcaatgttactgcactcaggaaaattctgtcttggtatttagagataccaccagctgaagggtttcaaagcataacatctctcttgataactacccttcttcactacccaaggaactggcagcttcctgaagtcyaaaagtggaatagctggttagcagttaaacccagatctttaaacccttcacctgctttcttttctctacttagcttctccataggattctttcttaaatgtagtaagagtgaataatttgccttcctcttgccccataactgtctacatgtctccagacaaaactagaccatgtagaagaagctagataactctcagcagaaatactggaaaaaaacatgccatgatgctgacagtgttctacacaataactctggaagtaaaatcagtcaaagatagcttttccttcatgatgctctgc

SEQ ID NO: 30987 - DNA, 599 bp, Chicken  19866894252892_1
  misc_feature (1)..(275): n is any nucleotide
nnnnnnnnnnnnnnnnnnnnnnnnnnnnnnnnnnnnnnnnnnnnnnnnnnnnnnnnnnnnnnnnnnnnnnnnnnnnnnnnnnnnnnnnnnnnnnnnnnnnnnnnnnnnnnnnnnnnnnnnnnnnnnnnnnnnnnnnnnnnnnnnnnnnnnnnnnnnnnnnnnnnnnnnnnnnnnnnnnnnnnnnnnnnnnnnnnnnnnnnnnnnnnnnnnnnnnnnnnnnnnnnnnnnnnnnnnnnnnnnnnnnnnnnnnnnnnnnnnnnnnnnnnnnnnnnnnnctttgagaaagcatacatttgcaaytttctaaacaattataaaggctttaaaagctggatactgcaatattactgtacacacctgccattaagaatggtggtccaatcatggtttacagcatttgaatcaccggaaatcaacactgcagaattaaattagtgacaatttctattaacttttgatctgaatttataatctgtaatctcttactcactgctcacttgcaacatagcaaattcttgcaattggatttacttaagtataattgcttgcaatttacaccaatttagtattaacttcagtttagttcctactctagttta

SEQ ID NO: 30988 - DNA, 600 bp, Chicken  19866894252892_2
gtacacacctgccattaagaatggtggtccaatcatggtttacagcatttgaatcaccggaaatcaacactgcagaattaaattagtgacaatttctattaacttttgatctgaatttataatctgtaatctcttactcactgctcacttgcaacatagcaaattcttgcaattggatttacttaagtataattgcttgcaatttacaccaatttagtattaacttcagtttagttcctactctagtttacatcacattcatttaaatttgtagagatgaatgcatctgttaagatatcrcttaaactggggatgaacatttccactcaaaatagtttttccaagtatagagtttcaaaaacagtaacgtcaaaactattttcttccaaatgcattgatttgggatttgttagcataaaagatacttaaaatttcagaatattacttgaaatggcatgtacttaccaagtattaaaaaaacggtagctgtattgataaagggaggattctgggttgtgagcgggtgactggatgagttgttcatttttgtttttcacttggactccaaagagcaataaaggaaaatcatgtagctacatc

SEQ ID NO: 30989 - DNA, 499 bp, Chicken  19866894252894_1
ctgccatataaatgcataaggctgtacttaatatttagataagcaacccttaaggaaaagatggagtatcaatgattcagtgaagtgtcttcttccttttcagagttaatgatgaacaatagtccattctgcacttggctgcagaaagagaggttgcttttggtaatgcgacagcgagatggtccagctgtactgcctatctgtattgtttagaagctgccacaacagagaatgtatcaatcaccatctgaatgctgcagaagtgtttctggtgaaaatctgtgtagcgtgattacaacytatacaagcttcccaaaagttcagccaagaaaatggaagctgcttattctgtcttagcacagaggtatttggtggcatggaacaaccacaccttaaaatggatgaccacttcatttgtgcttcttgcttgacagcaaaaatatacagagtacctactataccactcatgaatgccccacatccccacgacagcccaaag

SEQ ID NO: 30990 - DNA, 599 bp, Chicken  19866894252897_1
  misc_feature (1)..(36): n is any nucleotide
nnnnnnnnnnnnnnnnnnnnnnnnnnnnnnnnnnnnctgtgcttcctgattgtggaagcagtttgtcactctcgaagcagcctagagaaggcagaaagaactaagatcttaattaagatattgaaagattcagcagtgacagtgcaagagcagaaagcaaaaaaatttcacatgcccaacccttcttaggccaacagaaacttgcagcacttccacaagaacgtgcattctagattttcttcttcttggcagaggtattgcatcgtgctgggtgtaccttgaaagattattatatgagaraccattaaaaagcattttaaaaacagataggaagccagcaagcttttcttggtgcaacatcaatcggattgcttatttatctggcaatatttatcttcccaaggaaacttttgtatagttcaagaggctttatttctcaagagagagattcatagtattactgtgcatcatcattttgcacagactgctgaattagtcctacttccttacactgcattcaggaacctgcccatgcagtactcagtgaggcaccaggatctcccagggaaaaggtttcagcttttgctactgatctgcag

SEQ ID NO: 30991 - DNA, 600 bp, Chicken  19866894252900_1
tatatggtgagaaataatgctgcttttctatccaaaagcctggcacagagctatcagttcttaacttctacagtggccaaagcatcacagaagattctataggattttcctagaaagcatcagttaccttttcctgctgtagtctcagcagaagaccacgctgcctctttcgaatagggggcatcttatcatcctctcccttgtctcgcaaatgcctgcaaacagattggaagagatgattaaataaagaaaaaacaaacaaacaaaaaaaacaaaccaacaacacaagtgaacaacaayagcctggtaccctttaaaattactttttttcatctgcagaagagtayataygttcttgaattaagacttgtggagtaatggatgggaactaccttctctaagaacaaatattggatattttcctgtgtctatgaaattcttctatctaaccacgatcaatttaaacatcaaagcacacttacaaactgaattctgttctttccaaatgacaataacatttgcatagattacagacatgagaaaatttgttcaacctctgatacttaaccagggaggactggagtagaaaaaaagtattac

SEQ ID NO: 30992 - DNA, 600 bp, Chicken  19866894252900_2
gagctatcagttcttaacttctacagtggccaaagcatcacagaagattctataggattttcctagaaagcatcagttaccttttcctgctgtagtctcagcagaagaccacgctgcctctttcgaatagggggcatcttatcatcctctcccttgtctcgcaaatgcctgcaaacagattggaagagatgattaaataaagaaaaaacaaacaaacaaaaaaaacaaaccaacaacacaagtgaacaacaayagcctggtaccctttaaaattactttttttcatctgcagaagagtayataygttcttgaattaagacttgtggagtaatggatgggaactaccttctctaagaacaaatattggatattttcctgtgtctatgaaattcttctatctaaccacgatcaatttaaacatcaaagcacacttacaaactgaattctgttctttccaaatgacaataacatttgcatagattacagacatgagaaaatttgttcaacctctgatacttaaccagggaggactggagtagaaaaaaagtattaccaaaaaaacgtaagtaggagattttcataagaaaatgatcagttagc

SEQ ID NO: 30993 - DNA, 600 bp, Chicken  19866894252900_3
tatcagttcttaacttctacagtggccaaagcatcacagaagattctataggattttcctagaaagcatcagttaccttttcctgctgtagtctcagcagaagaccacgctgcctctttcgaatagggggcatcttatcatcctctcccttgtctcgcaaatgcctgcaaacagattggaagagatgattaaataaagaaaaaacaaacaaacaaaaaaaacaaaccaacaacacaagtgaacaacaayagcctggtaccctttaaaattactttttttcatctgcagaagagtayataygttcttgaattaagacttgtggagtaatggatgggaactaccttctctaagaacaaatattggatattttcctgtgtctatgaaattcttctatctaaccacgatcaatttaaacatcaaagcacacttacaaactgaattctgttctttccaaatgacaataacatttgcatagattacagacatgagaaaatttgttcaacctctgatacttaaccagggaggactggagtagaaaaaaagtattaccaaaaaaacgtaagtaggagattttcataagaaaatgatcagttagcaaca

SEQ ID NO: 30994 - DNA, 600 bp, Chicken  19866894252903_1
tgtggctgatgctgaggcagggagctgaaggtgcagggaaggggatgctcccaggttgccaagcaagtgcaacctccttcacctgccaaagagttgggaagtcagaatagggttgtgaggaatgacggcgagtaatggaggcaggcagcaggggacttgcttatttcaaacaacgtcagacacacagaaaacgtgtggttactgctcaggggtgatctccagaagatgcctgcatctctgctgtcctgagcagtgcaggagcagtgcagcctcacagctttccccaggctggggctgctygcgtggctgtcaggcagggctggctgggtctgctttgtcctcyttaaatgtgcctcacccacatcttgttggttggagtcctcctgtccctgtccttgtgcagagtgcttcctgctgtgtgtgtgctgcagcccaggagcacgctgtggttttgctcccgctgtttctgtgtgttttattacgcagcgattgttttgcctatggaaatgaacttctgctttggggcagctgtggctgcaccccgtccagttcagagaagtgagctgtgctgtgcgctcaccccacccttcctcggacctt

SEQ ID NO: 30995 - DNA, 600 bp, Chicken  19866894252903_2
gatgctcccaggttgccaagcaagtgcaacctccttcacctgccaaagagttgggaagtcagaatagggttgtgaggaatgacggcgagtaatggaggcaggcagcaggggacttgcttatttcaaacaacgtcagacacacagaaaacgtgtggttactgctcaggggtgatctccagaagatgcctgcatctctgctgtcctgagcagtgcaggagcagtgcagcctcacagctttccccaggctggggctgctygcgtggctgtcaggcagggctggctgggtctgctttgtcctcyttaaatgtgcctcacccacatcttgttggttggagtcctcctgtccctgtccttgtgcagagtgcttcctgctgtgtgtgtgctgcagcccaggagcacgctgtggttttgctcccgctgtttctgtgtgttttattacgcagcgattgttttgcctatggaaatgaacttctgctttggggcagctgtggctgcaccccgtccagttcagagaagtgagctgtgctgtgcgctcaccccacccttcctcggaccttatctccctggcagatgggctgtttgctttgctttcctcgaact

SEQ ID NO: 30996 - DNA, 594 bp, Chicken  19866894252903_3
gttggagtcctcctgtccctgtccttgtgcagagtgcttcctgctgtgtgtgtgctgcagcccaggagcacgctgtggttttgctcccgctgtttctgtgtgttttattacgcagcgattgttttgcctatggaaatgaacttctgctttggggcagctgtggctgcaccccgtccagttcagagaagtgagctgtgctgtgcgctcaccccacccttcctcggaccttatctccctggcagatgggctgtttgctttgctttcctcgaactctcctccctgtaccactctccatccccwgtgtgctcctctcagccttgccccagctccccactctgatctctcccagtgtgagctcctatcctggccctgcacccagcaaaaccaaacccctcctggcttccgctgagcccagttctgctctcgtgtttccctttatctctgtctggaggcaaagctcaggatgttcataacccacggtgctgggcactggtggaacagctgcttgtgggtcagtgctggggtgcaatgggctgctccccataagggctgggctgtgtgggacgcctctctatggcaccgagctctgctttt

SEQ ID NO: 30997 - DNA, 600 bp, Chicken  19866894252907_1
tctttcagattttgtactccatttggagatgcagaagtccttacatgagcacctgttctccctctgtatgtgtcacttaatgatagttgcttataatttgatgactaaaaaaacattttgaccttgcaaggctctagcatgctttaattaaaaaaatatatatatataccgattagattaacttactctattttactgttatttaaacttcagcaaatgaacagatattgtagtagtttctcaagaattgctttttactaccagtaggcgggttaatttcactatcaaacaacagatccytagtcctttcagtcagttcctttgcttctccagcattttccatatgcttaagaacatctataagtgtaattatagcaaaggtatttttatatttaaaatgaagaaatgatttcaaagtcaagctaatcagttgtcttcttgtagttcaaggtgggtctagttatgtatacttatacagataccttgaattttggatgccatcttaatgtagaagtatttttacaattgcctttcatatttattattttactttatgttggctgctgttggtttagttaattactctttacatccaccttc

SEQ ID NO: 30998 - DNA, 599 bp, Chicken  19866894252909_1
  misc_feature (1)..(273): n is any nucleotide
nnnnnnnnnnnnnnnnnnnnnnnnnnnnnnnnnnnnnnnnnnnnnnnnnnnnnnnnnnnnnnnnnnnnnnnnnnnnnnnnnnnnnnnnnnnnnnnnnnnnnnnnnnnnnnnnnnnnnnnnnnnnnnnnnnnnnnnnnnnnnnnnnnnnnnnnnnnnnnnnnnnnnnnnnnnnnnnnnnnnnnnnnnnnnnnnnnnnnnnnnnnnnnnnnnnnnnnnnnnnnnnnnnnnnnnnnnnnnnnnnnnnnnnnnnnnnnnnnnnnnnnnnnnnnnnnnccgtcagtccggactgcagctcccagytgtgacctctgcaggaaaataactgacaaaggacatcggggaccagacccaacaaatatttctatctcctcgttcccagcaaatgcccacgtcctggaggaggtgtgctggcggccaccgaaggtcccctygcatgtcacacccgtgtcacacctgcagaagccgtgtcagtgctgccacccaccggagctgcagctgaggtcctgctctgctttggggaaaacccccacgaagcaacagccgggctgggggggcacggcctgcacccttcacccatggcttggagtggggcagaaggg

SEQ ID NO: 30999 - DNA, 599 bp, Chicken  19866894252909_2
  misc_feature (1)..(142): n is any nucleotide
nnnnnnnnnnnnnnnnnnnnnnnnnnnnnnnnnnnnnnnnnnnnnnnnnnnnnnnnnnnnnnnnnnnnnnnnnnnnnnnnnnnnnnnnnnnnnnnnnnnnnnnnnnnnnnnnnnnnnnnnnnnnnnnnnnnnnnnnnnnnnnccgtcagtccggactgcagctcccagytgtgacctctgcaggaaaataactgacaaaggacatcggggaccagacccaacaaatatttctatctcctcgttcccagcaaatgcccacgtcctggaggaggtgtgctggcggccaccgaaggtcccctygcatgtcacacccgtgtcacacctgcagaagccgtgtcagtgctgccacccaccggagctgcagctgaggtcctgctctgctttggggaaaacccccacgaagcaacagccgggctgggggggcacggcctgcacccttcacccatggcttggagtggggcagaagggctgacatgtggggactgctccagcagtgctgtgggactcagcgaggtggtcccggtcccaaagaagagccaaatcctcctcccactttttaaaagcaaaatgctaaaygcacaygggctttcctgtgccaa

SEQ ID NO: 31000 - DNA, 600 bp, Chicken  19866894252909_3
ctggcggccaccgaaggtcccctygcatgtcacacccgtgtcacacctgcagaagccgtgtcagtgctgccacccaccggagctgcagctgaggtcctgctctgctttggggaaaacccccacgaagcaacagccgggctgggggggcacggcctgcacccttcacccatggcttggagtggggcagaagggctgacatgtggggactgctccagcagtgctgtgggactcagcgaggtggtcccggtcccaaagaagagccaaatcctcctcccactttttaaaagcaaaatgctaaaygcacaygggctttcctgtgccaaaagtgtctcctggtctctcttttttttcccaacagcagctcttggtggtagctgtttttaatgacgattgctgctcagattgctcaggaacaggcccaggctgctttgggaaccccaaggaargaaacagaggcagcagatctgtctcatcactgcttgctttggaaggaaagccaccactgctctgccacgaaggaccaggctgcaaagttgggctgaagagtgtctgctttccaacctgtaagctgtgctgaaatcccatccctgctgtaggaca

SEQ ID NO: 31001 - DNA, 600 bp, Chicken  19866894252909_4
gccaccgaaggtcccctygcatgtcacacccgtgtcacacctgcagaagccgtgtcagtgctgccacccaccggagctgcagctgaggtcctgctctgctttggggaaaacccccacgaagcaacagccgggctgggggggcacggcctgcacccttcacccatggcttggagtggggcagaagggctgacatgtggggactgctccagcagtgctgtgggactcagcgaggtggtcccggtcccaaagaagagccaaatcctcctcccactttttaaaagcaaaatgctaaaygcacaygggctttcctgtgccaaaagtgtctcctggtctctcttttttttcccaacagcagctcttggtggtagctgtttttaatgacgattgctgctcagattgctcaggaacaggcccaggctgctttgggaaccccaaggaargaaacagaggcagcagatctgtctcatcactgcttgctttggaaggaaagccaccactgctctgccacgaaggaccaggctgcaaagttgggctgaagagtgtctgctttccaacctgtaagctgtgctgaaatcccatccctgctgtaggacacgcaca

SEQ ID NO: 31002 - DNA, 600 bp, Chicken  19866894252909_5
gcacggcctgcacccttcacccatggcttggagtggggcagaagggctgacatgtggggactgctccagcagtgctgtgggactcagcgaggtggtcccggtcccaaagaagagccaaatcctcctcccactttttaaaagcaaaatgctaaaygcacaygggctttcctgtgccaaaagtgtctcctggtctctcttttttttcccaacagcagctcttggtggtagctgtttttaatgacgattgctgctcagattgctcaggaacaggcccaggctgctttgggaaccccaaggaargaaacagaggcagcagatctgtctcatcactgcttgctttggaaggaaagccaccactgctctgccacgaaggaccaggctgcaaagttgggctgaagagtgtctgctttccaacctgtaagctgtgctgaaatcccatccctgctgtaggacacgcacacggcagtgcctgtggactctcctggcacagctgaacccaacaacatcacagccttcaggagaacagcagtgctgagtcacactcccagaaggaagtgtccatgcacctccattggggtgaaaggctgtcatacatccgca

SEQ ID NO: 31003 - DNA, 600 bp, Chicken  19866894252909_6
agcagtgctgagtcacactcccagaaggaagtgtccatgcacctccattggggtgaaaggctgtcatacatccgcagtgcccgctgtgtcagattgctcggtgttaacgctcggagcaaaaaaacattacattaacaactcggcctgtttggtcaacagcaaacacgaccttcagcagacagaaaatagcagcgggacggttccctgtgcagctgagagcaaacccggatcgatgcagcaagctcgtgctgcaaagcaggttactgagcacagagtttacagcagggatgcagaagctgmgagtgcatcgttttacatgcagagttgtaaaatcttcccagaaatggcagtggtctcacagcagtggtctgaacaatgctgctgggttggggatgagatcctgcgttgtgcataygctgcaaccagcagrgaaccacagttcctccccggatcctcaggggaagcaggagctgggatgcacwtcagaacagacaccctatgccgtcccctgcccagattcatgtaggaggaaggctgatctctttcaggaagagcgctgcaggaactcatagaaagggcattgggagggcaaagaaacat

SEQ ID NO: 31004 - DNA, 600 bp, Chicken  19866894252909_7
gcaaaaaaacattacattaacaactcggcctgtttggtcaacagcaaacacgaccttcagcagacagaaaatagcagcgggacggttccctgtgcagctgagagcaaacccggatcgatgcagcaagctcgtgctgcaaagcaggttactgagcacagagtttacagcagggatgcagaagctgmgagtgcatcgttttacatgcagagttgtaaaatcttcccagaaatggcagtggtctcacagcagtggtctgaacaatgctgctgggttggggatgagatcctgcgttgtgcataygctgcaaccagcagrgaaccacagttcctccccggatcctcaggggaagcaggagctgggatgcacwtcagaacagacaccctatgccgtcccctgcccagattcatgtaggaggaaggctgatctctttcaggaagagcgctgcaggaactcatagaaagggcattgggagggcaaagaaacatggcctgggcttgcaggaggaactagcagggcagctcaggagcaggtggggatggcagtgacagcagtgacacggccacgtcctgctgcaggcagccttggctgcattgccctggg

SEQ ID NO: 31005 - DNA, 600 bp, Chicken  19866894252909_8
attaacaactcggcctgtttggtcaacagcaaacacgaccttcagcagacagaaaatagcagcgggacggttccctgtgcagctgagagcaaacccggatcgatgcagcaagctcgtgctgcaaagcaggttactgagcacagagtttacagcagggatgcagaagctgmgagtgcatcgttttacatgcagagttgtaaaatcttcccagaaatggcagtggtctcacagcagtggtctgaacaatgctgctgggttggggatgagatcctgcgttgtgcataygctgcaaccagcagrgaaccacagttcctccccggatcctcaggggaagcaggagctgggatgcacwtcagaacagacaccctatgccgtcccctgcccagattcatgtaggaggaaggctgatctctttcaggaagagcgctgcaggaactcatagaaagggcattgggagggcaaagaaacatggcctgggcttgcaggaggaactagcagggcagctcaggagcaggtggggatggcagtgacagcagtgacacggccacgtcctgctgcaggcagccttggctgcattgccctggggcagcaataggccgc

SEQ ID NO: 31006 - DNA, 600 bp, Chicken  19866894252909_9
aaaatagcagcgggacggttccctgtgcagctgagagcaaacccggatcgatgcagcaagctcgtgctgcaaagcaggttactgagcacagagtttacagcagggatgcagaagctgmgagtgcatcgttttacatgcagagttgtaaaatcttcccagaaatggcagtggtctcacagcagtggtctgaacaatgctgctgggttggggatgagatcctgcgttgtgcataygctgcaaccagcagrgaaccacagttcctccccggatcctcaggggaagcaggagctgggatgcacwtcagaacagacaccctatgccgtcccctgcccagattcatgtaggaggaaggctgatctctttcaggaagagcgctgcaggaactcatagaaagggcattgggagggcaaagaaacatggcctgggcttgcaggaggaactagcagggcagctcaggagcaggtggggatggcagtgacagcagtgacacggccacgtcctgctgcaggcagccttggctgcattgccctggggcagcaataggccgcatctgagtgctgcaggcacagcatctccgctctggcagaccgtttccagctg

SEQ ID NO: 31007 - DNA, 598 bp, Chicken  19866894252918_1
gaattttcccttttaaaatttactgtgtattaattatgtacgacgtttcagagagtgagagttgtttgtagcctatggcaatgaggtagtgaaatgagacattactgagatagaaaacaaaaatgtgtcagcatatcaaattacacagatattggtagcccagttaaatttgcttattggaaatttatatggaaagctatgattgatattgtgaaattaaatctctgcattctggtcttaggtatcagtaccatatttctataaaaataacactgaggtggttggatgaaaaaaaagtgraattctcatcttgtagcatcataggaaagaaaaactacaratagaatatgttcttaaactattctgctgttgataatgatagagtgactgaagtgcatttcaaaagccaaaaatcatagcaacactcatttgacaaaataaggaaacggcttatgtgagatttatatgctgcatataaatattttcttttttcccccttgtctgaaagattgcttttctctagtagtgcactaaactacaaaattccggagggaattccttctttgacacagaagaaagaagggtctccaactttctg

SEQ ID NO: 31008 - DNA, 558 bp, Chicken  19866894252918_2
cgacgtttcagagagtgagagttgtttgtagcctatggcaatgaggtagtgaaatgagacattactgagatagaaaacaaaaatgtgtcagcatatcaaattacacagatattggtagcccagttaaatttgcttattggaaatttatatggaaagctatgattgatattgtgaaattaaatctctgcattctggtcttaggtatcagtaccatatttctataaaaataacactgaggtggttggatgaaaaaaaagtgraattctcatcttgtagcatcataggaaagaaaaactacaratagaatatgttcttaaactattctgctgttgataatgatagagtgactgaagtgcatttcaaaagccaaaaatcatagcaacactcatttgacaaaataaggaaacggcttatgtgagatttatatgctgcatataaatattttcttttttcccccttgtctgaaagattgcttttctctagtagtgcactaaactacaaaattccggagggaattccttctttgacacagaagaaagaagggtctccaactttctg

SEQ ID NO: 31009 - DNA, 599 bp, Chicken  19866894252920_1
  misc_feature (1)..(98): n is any nucleotide
nnnnnnnnnnnnnnnnnnnnnnnnnnnnnnnnnnnnnnnnnnnnnnnnnnnnnnnnnnnnnnnnnnnnnnnnnnnnnnnnnnnnnnnnnnnnnnnnnnctgggaggattggctgacacacccagtcttgccattcagcaagacctggacaggctggagagctgagcagaaagaaaccagatgaggtttaacaaaagaaagtgtagagtcttgcacctgggaaggaataaccacaagtatcagtacaggttgaggcatgacctgctggagaggagctctgtgaagagggatctgggtttcmtggtggacgacaggttgaccatgagccagcagtgtgccctggtggccaagaaggccaatgggatcctggggtgcattaaaggagtgtggccagccggtcaaggaaggtgatcctccccctctactctgccctggtcaggcctcacctggagtattgtctccagttctgggctccccagtacaagaaaggcaaggatctgttggagagagtccagtggaaggccacagagatgatacagggcctggagcatttccccatgagaaaaggctgtctgacctgggtctgttcagccttgaaaa

SEQ ID NO: 31010 - DNA, 600 bp, Chicken  19866894252923_1
cattattagctccattccactaagaaaatgcattcctctagtgaacctatcttgaagcaatgaatctccacctactccagctatttcctttgccatgtcacaataggaactgcagatgagtacgaattaagtaataattattgttgctttaactcttgggttgaaactgcttacttgtggtttatttttgcacagctctcaaaactgctcagctaaaaatgcatttaaaatgtttgttgtattactgggaaagatagcctgccaagggctattatgataaaataaatgacagtagctgcrcttggccaacagaatattggatcattaaccttttccttcagcagattctacagtcagggtctgaatggaagttggggatggttttgggattgaaaatccttagaatcagcwttctgccttgactggcttgtcttctgaccctaagcacacatctttctcaaatgaatctccttcatcttcttatgttcttaaatttctttggtaatgagcaggtttttagaattggaactatgtcttaatgtctttgtaatatcattcaagtaggagtctttgtcatacatgttaataaattcgcatggt

SEQ ID NO: 31011 - DNA, 600 bp, Chicken  19866894252923_2
gcagatgagtacgaattaagtaataattattgttgctttaactcttgggttgaaactgcttacttgtggtttatttttgcacagctctcaaaactgctcagctaaaaatgcatttaaaatgtttgttgtattactgggaaagatagcctgccaagggctattatgataaaataaatgacagtagctgcrcttggccaacagaatattggatcattaaccttttccttcagcagattctacagtcagggtctgaatggaagttggggatggttttgggattgaaaatccttagaatcagcwttctgccttgactggcttgtcttctgaccctaagcacacatctttctcaaatgaatctccttcatcttcttatgttcttaaatttctttggtaatgagcaggtttttagaattggaactatgtcttaatgtctttgtaatatcattcaagtaggagtctttgtcatacatgttaataaattcgcatggtcttgataagaaatgtaaaagatgaataggtaagaataaatacactaaggaagatggtcctctcatgccaatgttgttaattctacaacaactggattggccacgtgtgagt

SEQ ID NO: 31012 - DNA, 596 bp, Chicken  19866894252936_1
tttgcttgttttagtcttgcaccttcattactctaaaaatgaaagctttttgaatcacttatttcttagctggaccatgcaagttctatgacaatcccccagagtccagcttgccaaataaaaataaattgtgctgccataaatgttatgaaaaacctactacccagcagaatatcttctcgttataatgaaaaatatcagttgcattatggcttggattttttttcctgtctgaatgataaaggctcagcagactgattgctttccatactgcaagaaggtcattctatgcactgaaarttgtgaggattgaacagactagggctacatgagatttcgtttaactggaaatactaaataaatacataatgactacaaaggagcagatatcatgaaattcttggtacatttctaaggaattgtgtgatgatgctgtagacatcacagaaaaaaatatattaggtttactgtactatggagaatatatcagtctagaatctctagagacaagatacagggttgacaaactgttgttgattcaacagtgtttgaattataaagagaatgaaaagaggagggagagaagaattagtgat

SEQ ID NO: 31013 - DNA, 600 bp, Chicken  19866894252937_1
aattacatacactagagcactcacaaatgcctcacatctcttctattccactacagtttcaattttaaaagcattatatcctcttagccatgctgtgtgagaagcttcatcttgagcagctgtgatgggccctcagctggctgtcataagccagttggttccagccacctgggggaattgccatcagagttcttaagaaagtttgtttattctctatatgagaattctgcctcctatctctaaaacaagtgtgtgctttttctcgtatcttcaaaaacaggtgttttattttctcagaaratgtttagtcagggaacattatttcctaaatacaagaagttcagtccttctctattccctttctttctcggctagcttggcaacatctgcttttgcaagatcttggtgtacagtgaaatgcttccttgttagcctgtcttgtttttcaccaagtgatgtctataataccagaagaagaaaccaagacatctacagtgttttgattaatttaaatggacagtagttggttgttgcattttttttccccatgaattttgaatttcagcaagttctgttttacaacagaactcaagtcttttt

SEQ ID NO: 31014 - DNA, 600 bp, Chicken  19866894252937_2
tttcctaaatacaagaagttcagtccttctctattccctttctttctcggctagcttggcaacatctgcttttgcaagatcttggtgtacagtgaaatgcttccttgttagcctgtcttgtttttcaccaagtgatgtctataataccagaagaagaaaccaagacatctacagtgttttgattaatttaaatggacagtagttggttgttgcattttttttccccatgaattttgaatttcagcaagttctgttttacaacagaactcaagtctttttgagaagttggttttcttgtcrtatatcctaataacagctgttattcctatagaatctgtgagtgactgagctagtaactactttaggaacgctaagcctcttagaaatcagttgggattacgtactgttttatttataggaaacttgtgataaaaatataggcaactgaaaaggaaaaatgtgacaattgttgaaatcctctttcatcatttttggattaaggtttttcttttctttctttcttaatagctgtttcttggctcttggtcagcattgcttcagcatttgatcctcacaggtggagtttgagagggtatttaa

SEQ ID NO: 31015 - DNA, 600 bp, Chicken  19866894252937_3
agagggtatttaagatttaaccttcaatctaatttgcttactttccatttcaaatctatttgattcacagacaattagacgtgttgcatataatgaaaggaagcacatagtctgtagcatctgcatgtaacctgaatatctgaaaccttaaaaaagatttttttttttttttggcttgggatttatgctccttatcatggactgtgtgatctaagcaagtgtctcatagtgtccctctgaggaaactagcaaagttcaactatttatagactgaaataaagcacacctttgctgggtctyataagcacaaggataagaacaagtttcattttgaaatagatttagttaatatcttcaacataagtaatatccttttagagatctatatgcattttatttgcrttatcaacatagagaaatttcagagctaccctctattcctgtttttttttcttagtctgtttttatttgctgatttccctgtgatttttttttttgcagtaatgaatatgtgctaaaaaaaagtcaaataaaaatcccatgaatgaccctcaaaattcctagactcattatgtgaatttctgtaattctcctctgtgg

SEQ ID NO: 31016 - DNA, 600 bp, Chicken  19866894252937_4
gcacatagtctgtagcatctgcatgtaacctgaatatctgaaaccttaaaaaagatttttttttttttttggcttgggatttatgctccttatcatggactgtgtgatctaagcaagtgtctcatagtgtccctctgaggaaactagcaaagttcaactatttatagactgaaataaagcacacctttgctgggtctyataagcacaaggataagaacaagtttcattttgaaatagatttagttaatatcttcaacataagtaatatccttttagagatctatatgcattttatttgcrttatcaacatagagaaatttcagagctaccctctattcctgtttttttttcttagtctgtttttatttgctgatttccctgtgatttttttttttgcagtaatgaatatgtgctaaaaaaaagtcaaataaaaatcccatgaatgaccctcaaaattcctagactcattatgtgaatttctgtaattctcctctgtggagaagaaactagatagagcacctgagaaatctgaacagtgaagctttgattgcctggactcaattctcctctactgaattatttgataatttatagcatttc

SEQ ID NO: 31017 - DNA, 599 bp, Chicken  19866894252942_1
  misc_feature (1)..(87): n is any nucleotide
nnnnnnnnnnnnnnnnnnnnnnnnnnnnnnnnnnnnnnnnnnnnnnnnnnnnnnnnnnnnnnnnnnnnnnnnnnnnnnnnnnnnnnntgataacctataattaatgcatccaaaatcagcagagctgagattttctttgcttacctcttaagtccaaagataacagcactcagtgtgtgggagggatatcattgtgctaaattgctgagttgcctgattttaaaaaaacagcaaaataatctattgtgtactttgaccacctcgcccgcattttcccttttaatcttgctctggttcagygtactgcttgcatagatccagttttagatgcacttgacattggccttaacaatagtatctagataagctattgtataaaatctgaaaggmgtaggaatgcattgagggaatagtagtttgggcatttagtaactaattgagtctggatatgatttagttgcaaaacatagtatatattaaaactaaacaaagcagccctcagaaccccagttcttaagttctcgaactgtctggcacaaaataacccaacttcttctggccatgtgtgrtacctcttgcttatagctgtggtctgtttc

SEQ ID NO: 31018 - DNA, 600 bp, Chicken  19866894252942_2
taacctataattaatgcatccaaaatcagcagagctgagattttctttgcttacctcttaagtccaaagataacagcactcagtgtgtgggagggatatcattgtgctaaattgctgagttgcctgattttaaaaaaacagcaaaataatctattgtgtactttgaccacctcgcccgcattttcccttttaatcttgctctggttcagygtactgcttgcatagatccagttttagatgcacttgacattggccttaacaatagtatctagataagctattgtataaaatctgaaaggmgtaggaatgcattgagggaatagtagtttgggcatttagtaactaattgagtctggatatgatttagttgcaaaacatagtatatattaaaactaaacaaagcagccctcagaaccccagttcttaagttctcgaactgtctggcacaaaataacccaacttcttctggccatgtgtgrtacctcttgcttatagctgtggtctgtttcattgtcccccactgaaagctgataaaactggggcaagtgacctactccctgaatgttattagcaggaccagaagcaggagtagagtctgtc

SEQ ID NO: 31019 - DNA, 600 bp, Chicken  19866894252942_3
attttcccttttaatcttgctctggttcagygtactgcttgcatagatccagttttagatgcacttgacattggccttaacaatagtatctagataagctattgtataaaatctgaaaggmgtaggaatgcattgagggaatagtagtttgggcatttagtaactaattgagtctggatatgatttagttgcaaaacatagtatatattaaaactaaacaaagcagccctcagaaccccagttcttaagttctcgaactgtctggcacaaaataacccaacttcttctggccatgtgtgrtacctcttgcttatagctgtggtctgtttcattgtcccccactgaaagctgataaaactggggcaagtgacctactccctgaatgttattagcaggaccagaagcaggagtagagtctgtcttgtgttaccttgacataagtcacaggacttgatgtgtttttgggtttgtttcagcaaggcagttccccttccatggcagtggccagtacaggatgcttcagggggaggcacatttagtacatgtgaggtaatctcctccttcatcctgggcctacgttgtcacctggaccttcttgat

SEQ ID NO: 31020 - DNA, 600 bp, Chicken  19866894252944_1
gttcaaagggtttaaggaggaaagtgatttgttttaaagccaggcaggagcatacagttattttagtgaaagttgtttttttagaagtgtgtttgtggcaggagaccatctaattggtatggctgggaattgagaaacctcacatgctgcctctgcctctggaagctgctgctcaggaaatccgtctgactcactgttcctatcaggcatacctctgagtagcaaacactgccacatccacagtgacagaaaataaaagagcagtatttatagaacagtgctaaaatttagctttaaaayaatcgtttcaggccctgtacctagctgaagtacttccttggctttgaatcaggtgcacaaatgtacataaatgcacatactgaaggtacagattaatcctctttagaacagtcagtcctgactgaaaacccttaagaaaaggttcttcagtgtttggcctggggatagggggcatatgaatggcatcaggaaatgatctcaaaacttttgcaaggtggcaaatgttgagaagggcttgcttacggcacctggggctgtattctctgtcaggtgagatggaaaccttagtttccttctcag

SEQ ID NO: 31021 - DNA, 600 bp, Chicken  19866894252945_1
agccttgagatattagtactaacacagctagttcacttatcaggaggcaatttcatatctgttatctctctcctaaaaaaatcatttatttttgattgtacaaacctgctacagtgaaagtcctggggagctctgtcatgcaagcatttgtgaatctgtttcagtggaattcctctagagggctctgaaaagaaaatgttcactatgataactggctacacgctatcctttagatatcagcctttgatcaagtctgggacttggactgaacctacctgcactcagaataatctgagaagkagtttagaaaaccagaggtttctttcagaaccttgaatctcattggtaggtttccccagtgagccatctgtcagacatgtatttatcccaccttcagtgctattcttcaaaattaaattacatttaattttagcaaggtctgtataatgctgtttccagtgtagtggtaaaaacacagtagactgcgttttcagacctaatcatcagaggggggttcctttgcagtatcttttttttcaagctttccagagggagatattaagaaaaaaaatcctctgayaaaatagaaatggaaatacc

SEQ ID NO: 31022 - DNA, 502 bp, Chicken  19866894252945_2
ctcagaataatctgagaagkagtttagaaaaccagaggtttctttcagaaccttgaatctcattggtaggtttccccagtgagccatctgtcagacatgtatttatcccaccttcagtgctattcttcaaaattaaattacatttaattttagcaaggtctgtataatgctgtttccagtgtagtggtaaaaacacagtagactgcgttttcagacctaatcatcagaggggggttcctttgcagtatcttttttttcaagctttccagagggagatattaagaaaaaaaatcctctgayaaaatagaaatggaaataccacagacatattccagtacctactatatgtagaaatagacttaagtctcaaataaattatttttctttccctttatktgttccgatcaggtaaagaagtcattttgtgaatctggttattactgtaatcaaaacaattgcatttatgatttcctctgttgccacagaactatctctacatcat

SEQ ID NO: 31023 - DNA, 406 bp, Chicken  19866894252945_3
atgtatttatcccaccttcagtgctattcttcaaaattaaattacatttaattttagcaaggtctgtataatgctgtttccagtgtagtggtaaaaacacagtagactgcgttttcagacctaatcatcagaggggggttcctttgcagtatcttttttttcaagctttccagagggagatattaagaaaaaaaatcctctgayaaaatagaaatggaaataccacagacatattccagtacctactatatgtagaaatagacttaagtctcaaataaattatttttctttccctttatktgttccgatcaggtaaagaagtcattttgtgaatctggttattactgtaatcaaaacaattgcatttatgatttcctctgttgccacagaactatctctacatcat

SEQ ID NO: 31024 - DNA, 600 bp, Chicken  19866894252948_1
cttgagagttccttggccacaggttggcctcagctccaagttccaactgtgtgcaagctcaaaacctccctcacctacctattggcttggcagaaatttattagctcatcaccctgagagtcacaccggatatacatgtaatcttacctaccaaaaaacatcttgcaatctacagtacgctctagagaaagcagctttaaattctacaaagcagtaaccttgttgttgcaggggatagcaatatccacatagcgcagcggggagtcggtgttgcacagcgcaatggtggggatgttgacrtaagaagcctcggtcagtggctgatgatcagctcggggatctgtaacaaccaggagtcgtggctcacggaaagccgcctggatctgatttgtgaaggtaccaggggtgaagcgtccagcaataggagtagccccagtggcagcagcaaacttcagaacagcacgctgcaaaacaaatcaagaggtgaagtaggaaattcagtttcaatcaactcaccctggtgtgctgtcagtgaccacacaaacttgtttcaattcctatgacatcagggctcacgtaccagttccctgaatgagtgaa

SEQ ID NO: 31025 - DNA, 600 bp, Chicken  19866894252953_1
tttaattaaccaaataacttgtgggtgtccaacccacatgaaaatggagttggaacatagaaaaaatagattttgttttttgaaaccttgaaatctattctcaaattcctttaccaaaccagaaagcagggctgcacatttttcattgttcataaggactgtatttagccaatgtatcaaaatgcatgaaattatctgtcataaattgagcttgacataatttaagtttcatttcaaacactgtttttctctgaaacataacacagatgagttgatttttgccttgaaggtgcatgtttwgttcatttaaatgaacggtcacatccaccaaaaatgctaaatctgagagccatttttcaaaatctagcacaaattttccttttgatttcataaacaacttgatttcatttcgcaaatacaatctttttagcaatttacctsttccatcagaaaagtaaataatgctcccataatcagcatccacacttctaaggaactcctggaattggcaacgatgcaatcccctggactttatcaaattcacagctttgatgatgatttgcacattatccatttttaaagctttcactcataaatttt

SEQ ID NO: 31026 - DNA, 600 bp, Chicken  19866894252953_2
ttcattgttcataaggactgtatttagccaatgtatcaaaatgcatgaaattatctgtcataaattgagcttgacataatttaagtttcatttcaaacactgtttttctctgaaacataacacagatgagttgatttttgccttgaaggtgcatgtttwgttcatttaaatgaacggtcacatccaccaaaaatgctaaatctgagagccatttttcaaaatctagcacaaattttccttttgatttcataaacaacttgatttcatttcgcaaatacaatctttttagcaatttacctsttccatcagaaaagtaaataatgctcccataatcagcatccacacttctaaggaactcctggaattggcaacgatgcaatcccctggactttatcaaattcacagctttgatgatgatttgcacattatccatttttaaagctttcactcataaattttcttgctgtatgatgcagtgatatttcatcacacgtattgctggtggcaattgcatcatcatctgttaattttatacttctcctcctttttttttttttttttttttttttttttaccagtcttcatcagggcaccatcagt

SEQ ID NO: 31027 - DNA, 600 bp, Chicken  19866894252958_1
tttatagctctaatggatagaacagcagtagccaccggctcacatatcaccatactataaaaacacatgcacactgagaatctttttgtgcctggaggttttacaaccatctaaataataacagattaatcagccaccttgtattcctgcctgtttctgcatagtgctgatgcttgctagaaatctgatgcgacatatttaagctgagaagcataataacgcatgccataacagctgatgcctcaaaaaaggcatggcctgtcatgaaggtatttcaaaagatggaagaacaaaaaacakaagatgccatttgatttttttccctacttcactgcattcttgatctttctgttgtctacatatctggaaagttcatacccttctgatgaattccacttaataagaaacamaacagttggaaaacaaaggcatggtgtaataaaaaaaaatagcacagcctaacatcagctactgctttacagtatgctgcaatttagttctgggtgtgctgcagaacactgcataatacagctagagttgcctggcaacaaacagcaactatatcagaagcagcaaaggtgtgaatgaataaacaaaagt

SEQ ID NO: 31028 - DNA, 600 bp, Chicken  19866894252958_2
ctaaataataacagattaatcagccaccttgtattcctgcctgtttctgcatagtgctgatgcttgctagaaatctgatgcgacatatttaagctgagaagcataataacgcatgccataacagctgatgcctcaaaaaaggcatggcctgtcatgaaggtatttcaaaagatggaagaacaaaaaacakaagatgccatttgatttttttccctacttcactgcattcttgatctttctgttgtctacatatctggaaagttcatacccttctgatgaattccacttaataagaaacamaacagttggaaaacaaaggcatggtgtaataaaaaaaaatagcacagcctaacatcagctactgctttacagtatgctgcaatttagttctgggtgtgctgcagaacactgcataatacagctagagttgcctggcaacaaacagcaactatatcagaagcagcaaaggtgtgaatgaataaacaaaagtgacagtaacgtgaaaatgccctgtaaaaccatgttcagtatgagaatgtctgactaagttttcactgtgtttcaaggggaattttgtgtcaaattctcctcacagttaaa

SEQ ID NO: 31029 - DNA, 600 bp, Chicken  19866894252958_3
tattcctgcctgtttctgcatagtgctgatgcttgctagaaatctgatgcgacatatttaagctgagaagcataataacgcatgccataacagctgatgcctcaaaaaaggcatggcctgtcatgaaggtatttcaaaagatggaagaacaaaaaacakaagatgccatttgatttttttccctacttcactgcattcttgatctttctgttgtctacatatctggaaagttcatacccttctgatgaattccacttaataagaaacamaacagttggaaaacaaaggcatggtgtaatmaaaaaaaatagcacagcctaacatcagctactgctttacagtatgctgcaatttagttctgggtgtgctgcagaacactgcataatacagctagagttgcctggcaacaaacagcaactatatcagaagcagcaaaggtgtgaatgaataaacaaaagtgacagtaacgtgaaaatgccctgtaaaaccatgttcagtatgagaatgtctgactaagttttcactgtgtttcaaggggaattttgtgtcaaattctcctcacagttaaattggaattaaggtaggtatgtgagaattgga

SEQ ID NO: 31030 - DNA, 599 bp, Chicken  19866894252959_1
  misc_feature (1)..(65): n is any nucleotide
nnnnnnnnnnnnnnnnnnnnnnnnnnnnnnnnnnnnnnnnnnnnnnnnnnnnnnnnnnnnnnnnntacagcattttttcctgtactggtagcacaggccattccagaaataacaaacacgtgacacctagagcgcaatttatctccttgaatatgagaaatgttagtgtgtatctgtaggtgtcaatttgtgagttagtggtgaaaggctacaaagccattcaaataactcaaaggcagccatggacgttgaggcatccgttggacactccctgagactcccctgagaggactgatcagrtgtctgatgactatagtcactgtcatctgagaggtaattaggtatccaaaacacctaatgcagggctggtaaggakggcacaccacctatggacttctcgaccagtacrgagcagcagctgaaggccacatgcaaggctggagcacctccgatagtgctggactgctgtatgttggcaactaaatctaaaacttataagcctctatacactggtgtcttaatctgcaaggtgaatcctaccttyacttacagtaagtaaagctgcaagcgaacaccaaaatgaaatgtttaggagaggt

SEQ ID NO: 31031 - DNA, 600 bp, Chicken  19866894252959_2
ttcctgtactggtagcacaggccattccagaaataacaaacacgtgacacctagagcgcaatttatctccttgaatatgagaaatgttagtgtgtatctgtaggtgtcaatttgtgagttagtggtgaaaggctacaaagccattcaaataactcaaaggcagccatggacgttgaggcatccgttggacactccctgagactcccctgagaggactgatcagrtgtctgatgactatagtcactgtcatctgagaggtaattaggtatccaaaacacctaatgcagggctggtaaggakggcacaccacctatggacttctcgaccagtacrgagcagcagctgaaggccacatgcaaggctggagcacctccgatagtgctggactgctgtatgttggcaactaaatctaaaacttataagcctctatacactggtgtcttaatctgcaaggtgaatcctaccttyacttacagtaagtaaagctgcaagcgaacaccaaaatgaaatgtttaggagaggtgaaggaaccccacaccactcctaactgcgtatgcactccaatgggaggggaaagtgtgtgactgtgagaatgtttaa

SEQ ID NO: 31032 - DNA, 600 bp, Chicken  19866894252959_3
taacaaacacgtgacacctagagcgcaatttatctccttgaatatgagaaatgttagtgtgtatctgtaggtgtcaatttgtgagttagtggtgaaaggctacaaagccattcaaataactcaaaggcagccatggacgttgaggcatccgttggacactccctgagactcccctgagaggactgatcagrtgtctgatgactatagtcactgtcatctgagaggtaattaggtatccaaaacacctaatgcagggctggtaaggakggcacaccacctatggacttctcgaccagtacrgagcagcagctgaaggccacatgcaaggctggagcacctccgatagtgctggactgctgtatgttggcaactaaatctaaaacttataagcctctatacactggtgtcttaatctgcaaggtgaatcctaccttyacttacagtaagtaaagctgcaagcgaacaccaaaatgaaatgtttaggagaggtgaaggaaccccacaccactcctaactgcgtatgcactccaatgggaggggaaagtgtgtgactgtgagaatgtttaatgcgacacatttgcatacaaatagttacagagc

SEQ ID NO: 31033 - DNA, 600 bp, Chicken  19866894252959_4
gacgttgaggcatccgttggacactccctgagactcccctgagaggactgatcagrtgtctgatgactatagtcactgtcatctgagaggtaattaggtatccaaaacacctaatgcagggctggtaaggakggcacaccacctatggacttctcgaccagtacrgagcagcagctgaaggccacatgcaaggctggagcacctccgatagtgctggactgctgtatgttggcaactaaatctaaaacttataagcctctatacactggtgtcttaatctgcaaggtgaatcctaccttyacttacagtaagtaaagctgcaagcgaacaccaaaatgaaatgtttaggagaggtgaaggaaccccacaccactcctaactgcgtatgcactccaatgggaggggaaagtgtgtgactgtgagaatgtttaatgcgacacatttgcatacaaatagttacagagcactcaaatgagtcacgaaaatacacatcatttctaaaaatgggtgcatatgttaatgcagtggtaaggttgagattgtaattgaagatgagaaaatatactgttctggaccgtaacttctgcccattcttcccac

SEQ ID NO: 31034 - DNA, 600 bp, Chicken  19866894252962_1
atctgtccatatacaagaccaccagattggtcaggcatgacctttccttggtgaaaccatgctggttgtctcagatcactcattcatccctcatgtgtcttaacatgtcttccaggaggatctgttccatgatcttcccaggcatggaggtgaggatcactggcctatagttccccagatcctccttcctccttttcttgttcatgggagtgatgtttccctttttccagtccccagggactttgcctgtcgtgatttttcacatatgatggggaacatcttggcaaccacatcagaaakctcccytaggaccctgggatgcatatcattcagcctcgtgaggcagtcttgaacttgttctgcccttacagtagtggggagtttgctccccaagttcccatctaaaggttcaggttcagggatgcaaggttcatggatgtgagaatctggctgccagtgaagtctgaggcaaagaactcactgagtacctcagacttctccatatctgctgtagccagttatcctttcccatttagcagagtggttacattctctttggcctgtctcttctgacttttgtacctgtggaaacccatcttg

SEQ ID NO: 31035 - DNA, 600 bp, Chicken  19866894252962_2
ccatatacaagaccaccagattggtcaggcatgacctttccttggtgaaaccatgctggttgtctcagatcactcattcatccctcatgtgtcttaacatgtcttccaggaggatctgttccatgatcttcccaggcatggaggtgaggatcactggcctatagttccccagatcctccttcctccttttcttgttcatgggagtgatgtttccctttttccagtccccagggactttgcctgtcgtgatttttcacatatgatggggaacatcttggcaaccacatcagaaakctcccytaggaccctgggatgcatatcattcagcctcgtgaggcagtcttgaacttgttctgcccttacagtagtggggagtttgctccccaagttcccatctaaaggttcaggttcagggatgcaaggttcatggatgtgagaatctggctgccagtgaagtctgaggcaaagaactcactgagtacctcagacttctccatatctgctgtagccagttatcctttcccatttagcagagtggttacattctctttggcctgtctcttctgacttttgtacctgtggaaacccatcttgttgtta

SEQ ID NO: 31036 - DNA, 600 bp, Chicken  19866894252973_1
ctggccttgaacacctccagggaaggggcatccacagcctctgtgggcagcctgttccagcacctcaccattctctgtgaaaaacttccgcctgacatccaatctaaaccttcccttcttcatgggtgtattaccttatttatggactaaccatgtcacaagcaaagatgttgctgctgctgctgtgcagccaagcttgggttcagaggacttactaactgggtgtggagaatgagaagacagtctctaatgtccatagcttcactctgccagaccaattttaagctaaaggtagaggtrgtagcagagaagggggctcttggaaataarttggaacaacagtgtcctgcaggactgcatgcagtgttttttcttgcacccaacatgatggcggatcactgttctctcatgttgctcctttttgttccacgtaggcaggtgaataatgcaagtcacgtgggagccagctttaagtgatacamtgctaagttcagaacttaccttagccatctgggttgctgtgtcaccttttgcacccagatagaccatagygagagcagttgcaatactccaaggagcaaagaaaatgttttgtccttt

SEQ ID NO: 31037 - DNA, 600 bp, Chicken  19866894252973_2
tccacagcctctgtgggcagcctgttccagcacctcaccattctctgtgaaaaacttccgcctgacatccaatctaaaccttcccttcttcatgggtgtattaccttatttatggactaaccatgtcacaagcaaagatgttgctgctgctgctgtgcagccaagcttgggttcagaggacttactaactgggtgtggagaatgagaagacagtctctaatgtccatagcttcactctgccagaccaattttaagctaaaggtagaggtrgtagcagagaagggggctcttggaaataarttggaacaacagtgtcctgcaggactgcatgcagtgttttttcttgcacccaacatgatggcggatcactgttctctcatgttgctcctttttgttccacgtaggcaggtgaataatgcaagtcacgtgggagccagctttaagtgatacamtgctaagttcagaacttaccttagccatctgggttgctgtgtcaccttttgcacccagatagaccatagygagagcagttgcaatactccaaggagcaaagaaaatgttttgtcctttggaagttacatccagctttttgtaaaggtc

SEQ ID NO: 31038 - DNA, 600 bp, Chicken  19866894252973_3
ctgtgcagccaagcttgggttcagaggacttactaactgggtgtggagaatgagaagacagtctctaatgtccatagcttcactctgccagaccaattttaagctaaaggtagaggtrgtagcagagaagggggctcttggaaataarttggaacaacagtgtcctgcaggactgcatgcagtgttttttcttgcacccaacatgatggcggatcactgttctctcatgttgctcctttttgttccacgtaggcaggtgaataatgcaagtcacgtgggagccagctttaagtgatacamtgctaagttcagaacttaccttagccatctgggttgctgtgtcaccttttgcacccagatagaccatagygagagcagttgcaatactccaaggagcaaagaaaatgttttgtcctttggaagttacatccagctttttgtaaaggtccagggtgaagctgttggttgatgctgaaagacgctccatcgatacagcctgagacgaaggattagcagagggaggtgatgactgcatcttcacaacatctaacaaaatgggaagttgctggtaggagattgcctgcacccttgtaaacacgc

SEQ ID NO: 31039 - DNA, 600 bp, Chicken  19866894252973_4
tccatagcttcactctgccagaccaattttaagctaaaggtagaggtrgtagcagagaagggggctcttggaaataarttggaacaacagtgtcctgcaggactgcatgcagtgttttttcttgcacccaacatgatggcggatcactgttctctcatgttgctcctttttgttccacgtaggcaggtgaataatgcaagtcacgtgggagccagctttaagtgatacamtgctaagttcagaacttaccttagccatctgggttgctgtgtcaccttttgcacccagatagaccatagygagagcagttgcaatactccaaggagcaaagaaaatgttttgtcctttggaagttacatccagctttttgtaaaggtccagggtgaagctgttggttgatgctgaaagacgctccatcgatacagcctgagacgaaggattagcagagggaggtgatgactgcatcttcacaacatctaacaaaatgggaagttgctggtaggagattgcctgcacccttgtaaacacgctgatgggatggctctgtaatggccaaaatgccacgtacagtcagatagcaagtctctttttaagacctac

SEQ ID NO: 31040 - DNA, 600 bp, Chicken  19866894252975_1
gtataatgggatatgatgggagaaataacatttccttttctctttcatacaaaatcaactgcaaaaatagctcaaaagtgaaaaactaaaggtttcagagaaatgtgtcactgtggaactggagactgtaccaggtgagggccctgggtagatgactgtgaagtgatgaccaactcaaggtgcacagcacatttccacatccttttcttgcactgctaggtttatctggtgcagattcaactatttaactgcttcttgaactctggcaagctcaatgccatgaccagtgtctaatttcartgtcattactcacctacctaaataatgcagttatatttatggtatacttagaatatgagatttaaaagaaacactaagagccataacctgctgggcaagctggaaagctttcagtctgtatctccatctgcctctgtcattaggggaaagaaagaggaagagacactttcacagcaattcaatacatacaagataaggctctaaaatgyttcttaaatgaaaaagattgtatctgtggaaattttgtagacatacctttctccaagtaacacaattayttgtggtgttggccagatggga

SEQ ID NO: 31041 - DNA, 600 bp, Chicken  19866894252975_2
gcactgctaggtttatctggtgcagattcaactatttaactgcttcttgaactctggcaagctcaatgccatgaccagtgtctaatttcartgtcattactcacctacctaaataatgcagttatatttatggtatacttagaatatgagatttaaaagaaacactaagagccataacctgctgggcaagctggaaagctttcagtctgtatctccatctgcctctgtcattaggggaaagaaagaggaagagacactttcacagcaattcaatacatacaagataaggctctaaaatgyttcttaaatgaaaaagattgtatctgtggaaattttgtagacatacctttctccaagtaacacaattayttgtggtgttggccagatgggagtgcaaaggccttttccatatccttaaaccaggtgaagtgcaaacaaagcacacaagcttcacatagaattggcttctgataacaatgctgattttttattcccacaccctgagttcagcagaattatcagcatttctatgatttctttttcttgacttttgatactttaaaatttgctaaagggtgaagtccttccaaagtgctcaaa

SEQ ID NO: 31042 - DNA, 600 bp, Chicken  19866894252975_3
catgaccagtgtctaatttcartgtcattactcacctacctaaataatgcagttatatttatggtatacttagaatatgagatttaaaagaaacactaagagccataacctgctgggcaagctggaaagctttcagtctgtatctccatctgcctctgtcattaggggaaagaaagaggaagagacactttcacagcaattcaatacatacaagataaggctctaaaatgyttcttaaatgaaaaagattgtatctgtggaaattttgtagacatacctttctccaagtaacacaattayttgtggtgttggccagatgggagtgcaaaggccttttccatatccttaaaccaggtgaagtgcaaacaaagcacacaagcttcacatagaattggcttctgataacaatgctgattttttattcccacaccctgagttcagcagaattatcagcatttctatgatttctttttcttgacttttgatactttaaaatttgctaaagggtgaagtccttccaaagtgctcaaactttgtttgtacaagtggagtatgatgaaaggggtggtgagcctcacctctgtgcctggggaagatcat

SEQ ID NO: 31043 - DNA, 599 bp, Chicken  19866894252982_1
  misc_feature (1)..(73): n is any nucleotide
nnnnnnnnnnnnnnnnnnnnnnnnnnnnnnnnnnnnnnnnnnnnnnnnnnnnnnnnnnnnnnnnnnnnnnnnnactgttttgatcagttaagatggagaattctgaagggttgaagtataagctgcaatatagaagcatctggttttagaacacagaaaactcactggaattttaaaaaatgttttagaatgtaatctacagagcttgactattgcatccctggcattgcatcatcctattgttttagggcaacgtttttctgtttttaagagtgttcttgaaaggatgaagtgttaccrtctaagctgttttaatgccttttgattttgactgagtagtcaaaatgtgcaggggtttttgaactcataattgatctaattgctttttaatagagctgattttagagtttacccagatatggacttctggagaaaaaaacattaagtgtaataaatggatttgatttttttattttttttcctttaagggacatgttgagaccatctttgattgtgaattcaaacctgataaccctgatcttcttgctacagcttcatttgatggcacgataaaagtttgggacataaatactttaaca

SEQ ID NO: 31044 - DNA, 600 bp, Chicken  19866894252985_1
atgaacgggattgggaccaattaacatgtaattgtaatatagtcatgcttaacatgcttagcattgctgcggttggacttgatggtctttgaggtcctttccaacctgagtaattctatgattctgtgattaaggagcagatcatgctctcagcattgttggtgcttcactgaatacctttcttgcccccttggttaggaagcagtggcacaaatcaatttccaggaggtgctttgctgcttaccataagctttcccattgctgctcacagtccatggtaaacccccatgggccccatcrctgccagcgtgccccatccctacsctctgtgacagctttgaaagctgaaagaccaacaagggaccttaggaagcagggggacaggtgtatcaggtgtatcagcctttggcaagggctgcagctycaaagcaaagcgcttcagcgttgttctgagttcactcagatgaaattctccaaacgtaagccaaagctggggaagagtttcaaaactcaaccctgtacatccctcagcatgcaaatctgtgcacacacaaatggtatccggtctgaaacgggatctgaagtggtcctcggattcat

SEQ ID NO: 31045 - DNA, 600 bp, Chicken  19866894252985_2
catgtaattgtaatatagtcatgcttaacatgcttagcattgctgcggttggacttgatggtctttgaggtcctttccaacctgagtaattctatgattctgtgattaaggagcagatcatgctctcagcattgttggtgcttcactgaatacctttcttgcccccttggttaggaagcagtggcacaaatcaatttccaggaggtgctttgctgcttaccataagctttcccattgctgctcacagtccatggtaaacccccatgggccccatcrctgccagcgtgccccatccctacsctctgtgacagctttgaaagctgaaagaccaacaagggaccttaggaagcagggggacaggtgtatcaggtgtatcagcctttggcaagggctgcagctycaaagcaaagcgcttcagcgttgttctgagttcactcagatgaaattctccaaacgtaagccaaagctggggaagagtttcaaaactcaaccctgtacatccctcagcatgcaaatctgtgcacacacaaatggtatccggtctgaaacgggatctgaagtggtcctcggattcatcctgtgtggttaggaacataaagg

SEQ ID NO: 31046 - DNA, 600 bp, Chicken  19866894252985_3
tgtgattaaggagcagatcatgctctcagcattgttggtgcttcactgaatacctttcttgcccccttggttaggaagcagtggcacaaatcaatttccaggaggtgctttgctgcttaccataagctttcccattgctgctcacagtccatggtaaacccccatgggccccatcrctgccagcgtgccccatccctacsctctgtgacagctttgaaagctgaaagaccaacaagggaccttaggaagcagggggacaggtgtatcaggtgtatcagcctttggcaagggctgcagctycaaagcaaagcgcttcagcgttgttctgagttcactcagatgaaattctccaaacgtaagccaaagctggggaagagtttcaaaactcaaccctgtacatccctcagcatgcaaatctgtgcacacacaaatggtatccggtctgaaacgggatctgaagtggtcctcggattcatcctgtgtggttaggaacataaaggaagcagttcctgtgattacagacgtctttaaacagcccttatgaataatacacttgagctgctgtaaaaaagctgcggcagtgatgctgttactcatctc

SEQ ID NO: 31047 - DNA, 600 bp, Chicken  19866894252986_1
ctgaaatgctaacatttatttttaagtctactaaaaatgggcatggataacaccagctgaaaaaggaggtaaaacgggctgggcctggggagggtggtaaggatcagtaatagctgtgtgtttgtaaaagcaacagcagaaataagcaaacaaaacccttccccatcggggcaaagggctggaactaagaaaagtcagatttccccccagttaaggctgagagaaggtgctgtccatctgaaactgtaccatcatttaaaggcaaaaaaagcaaaccgtgcacctgagcttcgggtcctkccttagacatgaagtccccagacagggaaatgaggccgtcaaatccacaaactgtttaatcaaagtattattcttccccttcaggaagctgtttgactagacatgggaaagagttcacgttgacagcatgcaaaattccttaatttcctcgtagaaagtaacttactgtgagcctacctctggctgtgtgctttggaggaagaagacccctccagcggcagcggtgcagttctgctcagttctgcactcaccagcctcttacctttctcatctagctgtgtcctgtaacagcaatgggtt

SEQ ID NO: 31048 - DNA, 600 bp, Chicken  19866894252986_2
cagacagggaaatgaggccgtcaaatccacaaactgtttaatcaaagtattattcttccccttcaggaagctgtttgactagacatgggaaagagttcacgttgacagcatgcaaaattccttaatttcctcgtagaaagtaacttactgtgagcctacctctggctgtgtgctttggaggaagaagacccctccagcggcagcggtgcagttctgctcagttctgcactcaccagcctcttacctttctcatctagctgtgtcctgtaacagcaatgggttaaaagaaaatgagacggrgctgacagtgtccctcttaagtccaggagggccaacttgaaatcaatccaccgcatgctagctcagcaatgcaaggcatgcggggcggcagtaacacgatcggatttgctcaaaccactgagccaaagcggtgctgtgttcgcaggggctgtgagggacagggtgcttgtttccagagaccgtggccatggaggctggtactgctcagaaaggagagcagggagagggtcgtaagcccatttgggtgctggtggccagcgtggctcaagggaagccgaccctcactgcagaatgtctacg

SEQ ID NO: 31049 - DNA, 600 bp, Chicken  19866894252986_3
tgaaatcaaagaggcacttctcaagtgctggtgaatcagaggtgattagttatagggccgtgtgctgtatccctgctcctgccacctgctgccactgcagcaccgtgattgctgccaggcctttcctcatccgctttgtccatccccacagccctgggtcactgggcagaagtcctcaggaacctgcaggagcagaggggtctgtggcactcagctgcacatcttcacacccaaggtgtctgcccctgcacaaaaggggttgggagtaaaacgcggcctcccttcgtgtgggggggaggraggggtggccgtgctgctgcagggactcgtttgtgttttagtgggaaccgtggggcaatagaagtgttctgctccgagactaaagccgtgtttgctgtgtatgtgattgtgcattcttttaaattaaactattttgcaagcacttccttcctgcatttctcagaaggagggaggggggtgtgcaaagaatgttcaactgcctttgacggaggaggaaaactgaagaaaacaagcgatgcaatcctaactactgaccttttacttgagcttggtgatgtttttcagcagcagagcctccag

SEQ ID NO: 31050 - DNA, 600 bp, Chicken  19866894252986_4
ttgcttcagtgggtaactgagcattaaagaaaaacccaacctcgtccctgacagaccgcttgtttttaggaaactctccccagttctgaggattaagatgattgcagctgatgttctcatacagccttgcccattgcactgtgcgctccccttgccctctggtagaggttaggggccagagagctgtgggtccctgggctcacgggttcaggtcaggctccctgcctcccaggtttttggctagcagcatggaaggatgaatgctgcccattcccttacagcttctagcgcttctatctkttgaacctcccttcagcctcactgctgaaatgatgtccagtggagatcaagctggagyttctgaagggtatgatcctggctgtgggagaaccttcctgaggagaggagcagagcctgggactggaggtgcttctgcctgggaaggctgcctactttaaggacgcaggtgctatttacaagtgctttgaagttgcttaacacacggtgtttagaaaataaacctggatgatcctgacctctgtgcatttgcatcctttcaacggtgcttgtagctccagcagcagatgacggtgctgcagt

SEQ ID NO: 31051 - DNA, 600 bp, Chicken  19866894252986_5
cttgtttttaggaaactctccccagttctgaggattaagatgattgcagctgatgttctcatacagccttgcccattgcactgtgcgctccccttgccctctggtagaggttaggggccagagagctgtgggtccctgggctcacgggttcaggtcaggctccctgcctcccaggtttttggctagcagcatggaaggatgaatgctgcccattcccttacagcttctagcgcttctatctkttgaacctcccttcagcctcactgctgaaatgatgtccagtggagatcaagctggagyttctgaagggtatgatcctggctgtgggagaaccttcctgaggagaggagcagagcctgggactggaggtgcttctgcctgggaaggctgcctactttaaggacgcaggtgctatttacaagtgctttgaagttgcttaacacacggtgtttagaaaataaacctggatgatcctgacctctgtgcatttgcatcctttcaacggtgcttgtagctccagcagcagatgacggtgctgcagtgtgtcagcctggccacgtgctgctgtgtgctttagaggttctgcctgtgaccgtgtct

SEQ ID NO: 31052 - DNA, 599 bp, Chicken  19866894252987_1
  misc_feature (1)..(12): n is any nucleotide
nnnnnnnnnnnnccccaagaactgcaaccaaaatcctgatggacagactggggacctgaaggttccttccaacccaagccattctatgacctgtgctgggaacctgagatgtaggagctctgtggtgcagcctgcaggctccagccctgtgacgtggggctccattgtggaaaatgggctccatcgtctgaggagccgaggaagatgtcttcaccaaatgtttccaaagtccccagaagacagaattgcccatagacaaagggctgccacaggctccttacactacagggaaacgtttckcaagagatctcgtgttcccagtggagcacaggtgtggattgtgaaagtgctgagcacacaccaggccctgatgctggggccagactcttgtcagtggtcaaggcaagaaaccagactggcatagtcgtaatcaatcacaggtctaagaaagtaaaaacaaagcttgaaatagctgaggacccagttctaatcccaagcaacactggcgcagccacatgcagagttatgtggtttaaactcatgcagatgagagtggaaactggcctccagttcaagtgcatgctgagggaaaagacagc

SEQ ID NO: 31053 - DNA, 600 bp, Chicken  19866894252994_1
agcagctgtgttcattacttctgctccctgacacatgcaagagggtgatgactgcagaggaaatgaagatacatctacttgacagtcacctgcatggcagcgatggagtcagcccagttaatacagccctggtggatactccatcaatgatacatactccaatgacacttcatccccctcatgagtgctcacacagagtccagtggtagctacactcagcacagcttaatccgccaccattattttatttctttgcatactgcagtagcactatttaaaagaattaagtaacgaaaacaktttaaaatatctaaatctttttcatgagtctattcaaactgcggtagcattttacaytgggggcggattgtgagataattgattttgatgccatcacgtgtgcccttgctttagacacaggacatataactcacgtggaggtcaattatctcacagtacagtccccagtgccagtgtctatggtttaaaaagattctttgctagataacgtatactactaccacaagctggcatttgtttccaaacaaaattcagtggtaaaattgagtttattgcctccttgaagataaatggggatac

SEQ ID NO: 31054 - DNA, 600 bp, Chicken  19866894252994_2
aggaaatgaagatacatctacttgacagtcacctgcatggcagcgatggagtcagcccagttaatacagccctggtggatactccatcaatgatacatactccaatgacacttcatccccctcatgagtgctcacacagagtccagtggtagctacactcagcacagcttaatccgccaccattattttatttctttgcatactgcagtagcactatttaaaagaattaagtaacgaaaacaktttaaaatatctaaatctttttcatgagtctattcaaactgcggtagcattttacaytgggggcggattgtgagataattgattttgatgccatcacgtgtgcccttgctttagacacaggacatataactcacgtggaggtcaattatctcacagtacagtccccagtgccagtgtctatggtttaaaaagattctttgctagataacgtatactactaccacaagctggcatttgtttccaaacaaaattcagtggtaaaattgagtttattgcctccttgaagataaatggggatacatgaatgtataaaataaatattttagtacaaaagtagtatactgaatgcatgactat

SEQ ID NO: 31055 - DNA, 599 bp, Chicken  19866894253003_1
  misc_feature (1)..(99): n is any nucleotide
nnnnnnnnnnnnnnnnnnnnnnnnnnnnnnnnnnnnnnnnnnnnnnnnnnnnnnnnnnnnnnnnnnnnnnnnnnnnnnnnnnnnnnnnnnnnnnnnnnnctgttagccagcacagctctgagcgaggatgggaggatgctactgctcccttctgcctgccgagagggggagggattgctcaccagtgctgctggtcccagacaaaaaagagatggaaaagactccgtcctcacgcctctgttgtggcctggctaatgtgagtcatgctgagtgcctggggcacccggagctgcctccctygtgctgtcctccgctgccccccagcaccagggctgcctctgtgcccggccgacrtggcacagcaatgcttctgcctggggttaaatgtaggatgcagagggacagcctccagcatggagtgggaagaaygtgcccctgtaccctgagyggctcaaagcagagctggtgcgtagcgcagggctcccgcaggagcgttcccaagccttcagatcagtggtgggacagaggagtaaattcgacacatattttccatcctcagctattcacattgcccctaacctgatcccaattagatacac

SEQ ID NO: 31056 - DNA, 599 bp, Chicken  19866894253003_2
  misc_feature (1)..(45): n is any nucleotide
nnnnnnnnnnnnnnnnnnnnnnnnnnnnnnnnnnnnnnnnnnnnnctgttagccagcacagctctgagcgaggatgggaggatgctactgctcccttctgcctgccgagagggggagggattgctcaccagtgctgctggtcccagacaaaaaagagatggaaaagactccgtcctcacgcctctgttgtggcctggctaatgtgagtcatgctgagtgcctggggcacccggagctgcctccctygtgctgtcctccgctgccccccagcaccagggctgcctctgtgcccggccgacrtggcacagcaatgcttctgcctggggttaaatgtaggatgcagagggacagcctccagcatggagtgggaagaaygtgcccctgtaccctgagyggctcaaagcagagctggtgcgtagcgcagggctcccgcaggagcgttcccaagccttcagatcagtggtgggacagaggagtaaattcgacacatattttccatcctcagctattcacattgcccctaacctgatcccaattagatacacagaggcagctgccaaggaacttttatgactcatttgaaagggagcctgcaccag

SEQ ID NO: 31057 - DNA, 600 bp, Chicken  19866894253003_3
gggaggatgctactgctcccttctgcctgccgagagggggagggattgctcaccagtgctgctggtcccagacaaaaaagagatggaaaagactccgtcctcacgcctctgttgtggcctggctaatgtgagtcatgctgagtgcctggggcacccggagctgcctccctygtgctgtcctccgctgccccccagcaccagggctgcctctgtgcccggccgacrtggcacagcaatgcttctgcctggggttaaatgtaggatgcagagggacagcctccagcatggagtgggaagaaygtgcccctgtaccctgagyggctcaaagcagagctggtgcgtagcgcagggctcccgcaggagcgttcccaagccttcagatcagtggtgggacagaggagtaaattcgacacatattttccatcctcagctattcacattgcccctaacctgatcccaattagatacacagaggcagctgccaaggaacttttatgactcatttgaaagggagcctgcaccagagccgtgtattcgaatccagctgtctgcactctgttgttgtttaaaaggacatttgtgcttgcttagctcacctag

SEQ ID NO: 31058 - DNA, 600 bp, Chicken  19866894253003_4
cttctgcctgccgagagggggagggattgctcaccagtgctgctggtcccagacaaaaaagagatggaaaagactccgtcctcacgcctctgttgtggcctggctaatgtgagtcatgctgagtgcctggggcacccggagctgcctccctygtgctgtcctccgctgccccccagcaccagggctgcctctgtgcccggccgacrtggcacagcaatgcttctgcctggggttaaatgtaggatgcagagggacagcctccagcatggagtgggaagaaygtgcccctgtaccctgagyggctcaaagcagagctggtgcgtagcgcagggctcccgcaggagcgttcccaagccttcagatcagtggtgggacagaggagtaaattcgacacatattttccatcctcagctattcacattgcccctaacctgatcccaattagatacacagaggcagctgccaaggaacttttatgactcatttgaaagggagcctgcaccagagccgtgtattcgaatccagctgtctgcactctgttgttgtttaaaaggacatttgtgcttgcttagctcacctaggaaagggccagtgggcccc

SEQ ID NO: 31059 - DNA, 600 bp, Chicken  19866894253004_1
ggtagctgttggtgagtgccctctttcagggttatgtctgcagcccctataggctgtcactcatcacctctttttggaggtgattttgaaagacccaggtaaaatgttatggcactgtgtctcctcgctggtatttgccacttctgaattttattttgctaaaatccatatttatgtcttttctggaatgagtttggagcagtgcttcctatgcaagtcacgaaaggttggagttatggtgatttaattattatttcagtaatttttctatggaaaaataggatgttcttctggacggcstttgttatttgctagttacagcaagttagagaggtacagttggcttgatgcaaaaagttatcattttttgtttttgtttgtttgtttgcttgtttaaaacttctcaaccacctgatgttttcccaggggacttaaaagaccatggcagacccagttcaaattaactggtgttaacaytaaaaaagctgattttatagcaattgctccagatccatggatatactggagtgaatataaatggagctcttaggagctattatcacagtcacagtacaatacagaaatagacactgtgtgttt

SEQ ID NO: 31060 - DNA, 600 bp, Chicken  19866894253004_2
cttttctggaatgagtttggagcagtgcttcctatgcaagtcacgaaaggttggagttatggtgatttaattattatttcagtaatttttctatggaaaaataggatgttcttctggacggcstttgttatttgctagttacagcaagttagagaggtacagttggcttgatgcaaaaagttatcattttttgtttttgtttgtttgtttgcttgtttaaaacttctcaaccacctgatgttttcccaggggacttaaaagaccatggcagacccagttcaaattaactggtgttaacaytaaaaaagctgattttatagcaattgctccagatccatggatatactggagtgaatataaatggagctcttaggagctattatcacagtcacagtacaatacagaaatagacactgtgtgttttacaggggaaagccaagacctgtaaagattggactggttttatttacaacaaatttcttaagacgtttaggtagaaatacctgaataaatatagaggactattcatgtttatttcagagaatccctgttaagtattcagcgtgttacactatcagtcaaattcttaatgatcagttg

SEQ ID NO: 31061 - DNA, 471 bp, Chicken  19866894253008_1
tcaaccataacattttgagcttcctaaccatgagttagatcttttgcccttgtgctcacagaaacacctggttttctgctctacccatcaagtgtgctgggagatgagcagtggaagaaggcaaaggaaaaatatagtaaagtaaaaaaacctaacctctggggagaacactgaatcacatgaggagatgttgggcattgacagtgatggttgttcttcagatgacatgttcataattagtatctgtctctgtcgggatctcggcagagcatataaccttcagagaagagctgtacatgsgcagtgagctacctaccgtgagctccccagccttgatgaaaggccaccagcctctgacacgcttctgctgaaagatggagatcttgttttcttcacatgctgccacaaccatgcctaaatcacagctcttggctgtctttgctgcccgagggaacccattcaggttcagtt

SEQ ID NO: 31062 - DNA, 599 bp, Chicken  19866894253009_1
  misc_feature (1)..(39): n is any nucleotide
nnnnnnnnnnnnnnnnnnnnnnnnnnnnnnnnnnnnnnntgcacgtgtgctttctgtaagagctcagtgtcacttccgaagctgtggctctacagtgtcagcacttggatttggacagcatacgctcgtagagagtaaggttcagttcttaattctgatctttcagtctccagggttgctgctgccaaatgcactgagctctcactgaggcttacactgcagtgcatcatgatgctgcttcagtcagcgctgctgatggatccaggtgcagactctcttagcctgcctcgaggcacagaygttacccttcttttggtcaggttacatagggctgcagcagtttwgtagcaggcatttaagcaaaataaattcacatgtgctttttgtttctggtgtctgaattttgtcctgattgtrtttttcttcttaaagttccaccactttggatttatgtgagattttaacttctgtagcatagaatgaactttttyagctactgaggttgcagagacatgtaaaggtgaattctaaaagctgcagtgtaaaatgaaacaaaagactataaagtttctcactttactggctgtcataatgaaaga

SEQ ID NO: 31063 - DNA, 600 bp, Chicken  19866894253009_2
gtgtgctttctgtaagagctcagtgtcacttccgaagctgtggctctacagtgtcagcacttggatttggacagcatacgctcgtagagagtaaggttcagttcttaattctgatctttcagtctccagggttgctgctgccaaatgcactgagctctcactgaggcttacactgcagtgcatcatgatgctgcttcagtcagcgctgctgatggatccaggtgcagactctcttagcctgcctcgaggcacagaygttacccttcttttggtcaggttacatagggctgcagcagtttwgtagcaggcatttaagcaaaataaattcacatgtgctttttgtttctggtgtctgaattttgtcctgattgtrtttttcttcttaaagttccaccactttggatttatgtgagattttaacttctgtagcatagaatgaactttttyagctactgaggttgcagagacatgtaaaggtgaattctaaaagctgcagtgtaaaatgaaacaaaagactataaagtttctcactttactggctgtcataatgaaagacttgtgaataggttggagttggaaatgctgtttctctttttcttt

SEQ ID NO: 31064 - DNA, 600 bp, Chicken  19866894253009_3
gcatacgctcgtagagagtaaggttcagttcttaattctgatctttcagtctccagggttgctgctgccaaatgcactgagctctcactgaggcttacactgcagtgcatcatgatgctgcttcagtcagcgctgctgatggatccaggtgcagactctcttagcctgcctcgaggcacagaygttacccttcttttggtcaggttacatagggctgcagcagtttwgtagcaggcatttaagcaaaataaattcacatgtgctttttgtttctggtgtctgaattttgtcctgattgtrtttttcttcttaaagttccaccactttggatttatgtgagattttaacttctgtagcatagaatgaactttttyagctactgaggttgcagagacatgtaaaggtgaattctaaaagctgcagtgtaaaatgaaacaaaagactataaagtttctcactttactggctgtcataatgaaagacttgtgaataggttggagttggaaatgctgtttctctttttctttaaatgtcttttcttagttttcacaccatttcatttcatcttgagttgtctttttcctttctctaaacttactc

SEQ ID NO: 31065 - DNA, 600 bp, Chicken  19866894253009_4
cactgagctctcactgaggcttacactgcagtgcatcatgatgctgcttcagtcagcgctgctgatggatccaggtgcagactctcttagcctgcctcgaggcacagaygttacccttcttttggtcaggttacatagggctgcagcagtttwgtagcaggcatttaagcaaaataaattcacatgtgctttttgtttctggtgtctgaattttgtcctgattgtrtttttcttcttaaagttccaccactttggatttatgtgagattttaacttctgtagcatagaatgaactttttyagctactgaggttgcagagacatgtaaaggtgaattctaaaagctgcagtgtaaaatgaaacaaaagactataaagtttctcactttactggctgtcataatgaaagacttgtgaataggttggagttggaaatgctgtttctctttttctttaaatgtcttttcttagttttcacaccatttcatttcatcttgagttgtctttttcctttctctaaacttactcttcgtcattaaaatactcgtttcacttcttctctctgcctttttcctgtacatgtttttcatgttttcttctca

SEQ ID NO: 31066 - DNA, 600 bp, Chicken  19866894253018_1
actggggggctccgggctcactcctacagtgggatggcagattgatgccacatgctgagtctgaacgtgtaacaaggatgcaagaggaatctttctccccagcagagaattatagttcaaaaaatgaagaatatttgtttgtctttccaataaaggcatcacgggaagggtaacttcctacttgctaaaatacaggctgtatcacaatgaaaaaattgagggaaatattgctcatctattcttccttaactgccacaacatttgcgagcatccttcttttattaaataccacctgagacyttttttttaatactacatgaaagaatggtactttattaggtaaatataatgaaataaccatgtgttgtttcttactttatggcaaatgtttccacttcctgatggtattgattccagagattgaaaaatgttgctttatcccagcaccactcacctccacacaatctggtaagtgcagcccaggagctgcgtcagatctccttttccatcgagtccctctgacttgttaagtataatacttgtggagtcaaaagatactgctcaaactcaaaggttctgttcagtgcaatgcatttttgc

SEQ ID NO: 31067 - DNA, 600 bp, Chicken  19866894253018_2
aaatataatgaaataaccatgtgttgtttcttactttatggcaaatgtttccacttcctgatggtattgattccagagattgaaaaatgttgctttatcccagcaccactcacctccacacaatctggtaagtgcagcccaggagctgcgtcagatctccttttccatcgagtccctctgacttgttaagtataatacttgtggagtcaaaagatactgctcaaactcaaaggttctgttcagtgcaatgcatttttgctcggcgtttcctttttctgtgccctactattgtgcatcccygaaaagagatttttttttccagctgaagttgttgggaaaggaaaatggcaaagtacatttggtagaaattttatccaaaagtttgcaattgcacccaataaaggactgagtgcactttgaagaagatggaaattgtgaaaacctgaagtgtgggggscttgcaaagagctcttcttgcagactggagggtgagatttcctccataggggctgtttgaatccatcagctgaaatcaaaactgtgccactttgaatgcatgacattactttggggacaggctatggcaagaatggcttctcc

SEQ ID NO: 31068 - DNA, 600 bp, Chicken  19866894253018_3
aaataaccatgtgttgtttcttactttatggcaaatgtttccacttcctgatggtattgattccagagattgaaaaatgttgctttatcccagcaccactcacctccacacaatctggtaagtgcagcccaggagctgcgtcagatctccttttccatcgagtccctctgacttgttaagtataatacttgtggagtcaaaagatactgctcaaactcaaaggttctgttcagtgcaatgcatttttgctcggcgtttcctttttctgtgccctactattgtgcatcccygaaaagagayttttttttccagctgaagttgttgggaaaggaaaatggcaaagtacatttggtagaaattttatccaaaagtttgcaattgcacccaataaaggactgagtgcactttgaagaagatggaaattgtgaaaacctgaagtgtgggggscttgcaaagagctcttcttgcagactggagggtgagatttcctccataggggctgtttgaatccatcagctgaaatcaaaactgtgccactttgaatgcatgacattactttggggacaggctatggcaagaatggcttctccaaagctctgt

SEQ ID NO: 31069 - DNA, 530 bp, Chicken  19866894253018_4
tccttttccatcgagtccctctgacttgttaagtataatacttgtggagtcaaaagatactgctcaaactcaaaggttctgttcagtgcaatgcatttttgctcggcgtttcctttttctgtgccctactattgtgcatcccygaaaagagatttttttttccagctgaagttgttgggaaaggaaaatggcaaagtacatttggtagaaattttatccaaaagtttgcaattgcacccaataaaggactgagtgcactttgaagaagatggaaattgtgaaaacctgaagtgtgggggscttgcaaagagctcttcttgcagactggagggtgagatttcctccataggggctgtttgaatccatcagctgaaatcaaaactgtgccactttgaatgcatgacattactttggggacaggctatggcaagaatggcttctccaaagctctgtgcactcacacacaaagtcactgggaaaaccaggggagtgcctgataccttcagccctcccaaatccagcgtacaacc

SEQ ID NO: 31070 - DNA, 600 bp, Chicken  19866894253019_1
ccttctcagccttctctcgtccaggctgaacagcccaaggtctctcactctttccttacgaaagagatgctccaggcccttaaacgtctttgtggcctttcactggactctctccagaagttctctctctctcctgtactggggaccccagaactggacacagtactccaagtgaagcttcaacaacactgaatagatggggtggatcacctccctcgacctgctggctgtgatcttttcaacgaaccccaggataccattggtcttcttgaccaccatggcacagtgctggctcatggmcagcctgttgtccactgggacactcagatccttctgaggggaacccttttccagcagataaacctctaacttgtagtggcttatgtggctattcctctctagatgtaggamtctacacttgcccttgttgaactgcattgggttmctctccacccaactccccagcctgtccaggtctcactgaatggcagcacagccttctagtgtgtcagtcactcctctcagctttgtatcattagcaaatgttctgaggggatgttctatccctatatcccgtttttttttttgcaaaatggaatt

SEQ ID NO: 31071 - DNA, 600 bp, Chicken  19866894253019_2
ctccagaagttctctctctctcctgtactggggaccccagaactggacacagtactccaagtgaagcttcaacaacactgaatagatggggtggatcacctccctcgacctgctggctgtgatcttttcaacgaaccccaggataccattggtcttcttgaccaccatggcacagtgctggctcatggmcagcctgttgtccactgggacactcagatccttctgaggggaacccttttccagcagataaacctctaacttgtagtggcttatgtggctattcctctctagatgtaggamtctacacttgcccttgttgaactgcattgggttmctctccacccaactccccagcctgtccaggtctcactgaatggcagcacagccttctagtgtgtcagtcactcctctcagctttgtatcattagcaaatgttctgaggggatgttctatccctatatcccgtttttttttttgcaaaatggaattgcttcacagagcaggaccatagaatcagaagggaaaacatgaccattcctgtaaaagccagcaagctcagcaatgaatatcttgttaatcaaatagtggttttaagtatct

SEQ ID NO: 31072 - DNA, 600 bp, Chicken  19866894253019_3
ccccagaactggacacagtactccaagtgaagcttcaacaacactgaatagatggggtggatcacctccctcgacctgctggctgtgatcttttcaacgaaccccaggataccattggtcttcttgaccaccatggcacagtgctggctcatggmcagcctgttgtccactgggacactcagatccttctgaggggaacccttttccagcagataaacctctaacttgtagtggcttatgtggctattcctctctagatgtaggamtctacacttgcccttgttgaactgcattgggttmctctccacccaactccccagcctgtccaggtctcactgaatggcagcacagccttctagtgtgtcagtcactcctctcagctttgtatcattagcaaatgttctgaggggatgttctatccctatatcccgtttttttttttgcaaaatggaattgcttcacagagcaggaccatagaatcagaagggaaaacatgaccattcctgtaaaagccagcaagctcagcaatgaatatcttgttaatcaaatagtggttttaagtatctatcttttttctttttctttacaaaaagataattc

SEQ ID NO: 31073 - DNA, 600 bp, Chicken  19866894253019_4
ctcgtttgcaaagaattagtggaacagcagtattcactgttagaatatatattgttttccctcaacagcaactgaaatctcagctttacttttacatttgccacagaaaagaacaataatggctagaagagatgcagaaaaatattgacttatgctaacacttacacatgcacttactttattttctatcgtgcaaaatttctttagtatagagggcaaattaaatgaatatatttcttcctctattcctattagatatattgttttaatcttcctagagtgcctactttcaccgtaagyatgtcaagctaaaagcagattatcttcagaaggacagaactgttgtttatatccagtgagagtaggagtacctgaccattcaggaatacctactgtggtttttgcatttcaaacattgccttgttagcttgaggttttcatgkgtgtacagttctttgactgcaaagggtgtatttttttatcttctacattatgtttgtttgtttgtttgtttaaataagctaagaatcatataacttaaggtcagtcaaatagtacctattcttatagtccatagtatggtatttatgactttacctt

SEQ ID NO: 31074 - DNA, 600 bp, Chicken  19866894253019_5
attgacttatgctaacacttacacatgcacttactttattttctatcgtgcaaaatttctttagtatagagggcaaattaaatgaatatatttcttcctctattcctattagatatattgttttaatcttcctagagtgcctactttcaccgtaagyatgtcaagctaaaagcagattatcttcagaaggacagaactgttgtttatatccagtgagagtaggagtacctgaccattcaggaatacctactgtggtttttgcatttcaaacattgccttgttagcttgaggttttcatgkgtgtacagttctttgactgcaaagggtgtatttttttatcttctacattatgtttgtttgtttgtttgtttaaataagctaagaatcatataacttaaggtcagtcaaatagtacctattcttatagtccatagtatggtatttatgactttacctttgtaagtacaggatatgtggtttacttcattttaccaggggttcccaagctgcctttgatttcatcagagctgtgacttccctccttgaaaacatctttaatgaaaagaatagtttgtgaactgtgaaggaactcctcaggaa

SEQ ID NO: 31075 - DNA, 600 bp, Chicken  19866894253020_1
ttccctgaacaggctgaagtagtttccctgaaattctggctcttaaatgtcctgcttacctgctgtatttctcttaggatactaaactattttatggtattatagttgtagctagcaccatctaccatatccctgatcagctttttcttatttgagtaacaattccagcatactacttcctttagtttgttccaaacacatctgaaagagtcattgttgatgccgtccagctacctcctggactgcttgcactctgtagtgttgcccttatagtagattctgagattgccgagtgcttcrtgagaactagtaactcttcttttagtccatttgttcttcttgactgcatggcctgtatgagatgcccaccatgattaccttktttttgccacctgtctgatcttaaccaataagatcctgttcccaccccatcttactagccttttgttcttaaagaatctgtatccagccattgcagcactttggtcatacaacctacctgaccatgttgttatcatcattaggtgactttgcaaggatttgaactcctcctgcttttttttccaacactgagtttgtttgtgtacaggcatttgagat

SEQ ID NO: 31076 - DNA, 600 bp, Chicken  19866894253020_2
taaactattttatggtattatagttgtagctagcaccatctaccatatccctgatcagctttttcttatttgagtaacaattccagcatactacttcctttagtttgttccaaacacatctgaaagagtcattgttgatgccgtccagctacctcctggactgcttgcactctgtagtgttgcccttatagtagattctgagattgccgagtgcttcrtgagaactagtaactcttcttttagtccatttgttcttcttgactgcatggcctgtatgagatgcccaccatgattaccttktttttgccacctgtctgatcttaaccaataagatcctgttcccaccccatcttactagccttttgttcttaaagaatctgtatccagccattgcagcactttggtcatacaacctacctgaccatgttgttatcatcattaggtgactttgcaaggatttgaactcctcctgcttttttttccaacactgagtttgtttgtgtacaggcatttgagatggagtatgagttgtgcagccttctcagtggaagtgaataagcctccctcgttattctgtcccatgcatatgttctccattct

SEQ ID NO: 31077 - DNA, 599 bp, Chicken  19866894253022_1
  misc_feature (1)..(164): n is any nucleotide
nnnnnnnnnnnnnnnnnnnnnnnnnnnnnnnnnnnnnnnnnnnnnnnnnnnnnnnnnnnnnnnnnnnnnnnnnnnnnnnnnnnnnnnnnnnnnnnnnnnnnnnnnnnnnnnnnnnnnnnnnnnnnnnnnnnnnnnnnnnnnnnnnnnnnnnnnnnnnnnnnnnnttttttttttatcctttggaagttctaacactcactaaaattactttcagtttgaaaatattgtcaatcagcagaagcaggtacaaattctagaaaaacaaggctattctttaggctggagctgcaagaaggtgakgaagaggaggaaaagttgggaaaaatccatccacagggactcgttaggctgagtcaaagtcacgtgctctgtgacagcaacagagtggcttgtgggccagaggcttccatgcagaatcctgcccgtccttttgaggctgtgtcccatcccaaatgcagtcagctgaaaagtttccagagaagtggcaakcaaaatgtactgaaattatacttatagctctctttctgtgtttgtactgggagctgggaacatcccagagccaagctcgtgtaagattttgtgaagcagaaggacactgc

SEQ ID NO: 31078 - DNA, 600 bp, Chicken  19866894253022_2
taacactcactaaaattactttcagtttgaaaatattgtcaatcagcagaagcaggtacaaattctagaaaaacaaggctattctttaggctggagctgcaagaaggtgakgaagaggaggaaaagttgggaaaaatccatccacagggactcgttaggctgagtcaaagtcacgtgctctgtgacagcaacagagtggcttgtgggccagaggcttccatgcagaatcctgcccgtccttttgaggctgtgtcccatcccaaatgcagtcagctgaaaagtttccagagaagtggcaakcaaaatgtactgaaattatacttatagctctctttctgtgtttgtactgggagctgggaacatcccagagccaagctcgtgtaagattttgtgaagcagaaggacactgcaaggcaattatacccactgttttagttctatgcccagaaaacattgtttgctttgaacaaggttttaactggacaaaatgactactgcttggatagggtttggacagcagggggtggcaaagtgcagttcatacaaagtttggaaagtggtcggagctgctgatcccacccgggacgtggcctcatgcag

SEQ ID NO: 31079 - DNA, 600 bp, Chicken  19866894253023_1
cagagtggcctacttaagaatgctgctgtgcagcaggccgaggtttggcagtaaagttttagcatcacgagatgctgtttcaattttggggaagcggggatgggtcttcagtgtcatctgtaccagcacgtggctttatgtggtgaattccagcgcacacacagggctgggtcctgcctgttggatcctgcagcccttgactcagtgggaagtgcatcaggatccagtgtgccattgctgaggtctgctttgtgaagcatcagcagaacggcaggagctgtgcagaacttctgcacttgktgcatgtgtgaattactcgctaggctgtctccaggtgcttctgggttctcatcaggctggatatacaaatctttcaagagagtgtccctcagaatgtttaatcctcacatgtgttgaaagtgaattgttgtttttcaaattgtgtggttgctgctgtttcactgctgagktggagtgggcctttcagctttggcttcacgtgctgccagtgatgctctcatctgatttactgtcaagaacttaaccaagtgggtggagacaccgagctgtctgtcctctgagtgactgcaattctatcat

SEQ ID NO: 31080 - DNA, 599 bp, Chicken  19866894253023_2
gtcctgcctgttggatcctgcagcccttgactcagtgggaagtgcatcaggatccagtgtgccattgctgaggtctgctttgtgaagcatcagcagaacggcaggagctgtgcagaacttctgcacttgktgcatgtgtgaattactcgctaggctgtctccaggtgcttctgggttctcatcaggctggatatacaaatctttcaagagagtgtccctcagaatgtttaatcctcacatgtgttgaaagtgaattgttgtttttcaaattgtgtggttgctgctgtttcactgctgagktggagtgggcctttcagctttggcttcacgtgctgccagtgatgctctcatctgatttactgtcaagaacttaaccaagtgggtggagacaccgagctgtctgtcctctgagtgactgcaattctatcatccaatattttgtgtctggagacagaacaaatgtcattagtgatttcagaattcattagaactgaatcattgtgaacactttgcagtttgtgacatgtcactggtcacagagctccctgtagaggaaaataaaaatcacttgctaacagttctttgtttttttccccatt

SEQ ID NO: 31081 - DNA, 600 bp, Chicken  19866894253026_1
ataaaagcagagcttccttctaaagacacgattgcagtgtgtggtatataatttagccttactttcagaaggaatctccatatttcataaaaagggatggatgacagcacatgctagaaacagctgtgaagttaccatgtgttctcagcactttttcatcagtgtgccagcagatatggcagggtgacacaacaccttgttcctatatgctgtgcagagagagagggcaaaaatcagtgccaagcgtgttgacagaatgggattctgcctgccctattgtctgctacctcgcctaattcyagtctatcccattacaaaaggagatacacaataagggcacctcatatcttcctgagctttgtcagcgatgcacaagttcaatctgatgatttcactgccttactctaattgaagctacagggctccctggatgtctgaaggcaatccagtggcatgtgataatcagaaggccagactggatgctccagtgcttctccctatgtagctgttgttgttaaagtcagctactgccatggtctgaggtttcaaaggcttccaggatcaaagccatggaaaattacaccataggattttagatat

SEQ ID NO: 31082 - DNA, 600 bp, Chicken  19866894253029_1
cagattcattcccatgtttgcagctgctattaaaatcatgtgtactgtgtcagtgcactaatctgtaagtaagaagtcatttacttccaggtagaacaactagtcagagtattgtgtctggtgatgttgcttccctgtcaaagcaaacaagtctctcctgtgaatgagtgtctccttatttccacttctcagcccacccccctcctttgtatcagggaaagggcaagaaaggatgagtcactgctggaaagagtccctgtcctcacccttctggctctgatacaaatacattaacacccytctctactgagcagttttagtggtatgcactgacctgaacagactcatgcttgtccaatttgacaagttccaacaatgagatgcccagcctgatggatgaggggagaaaggcctttcacactgtcccctttgcctggggcaccaactggtaagcagtacccttatctcaatccaaaagctttctgataggggagtgagtgagcagttgggcgggagttaggcccttagcccaggttacmccaccacaggtaccagaccggcaccatctgaattggtgtattgacaccaacacttgtccac

SEQ ID NO: 31083 - DNA, 600 bp, Chicken  19866894253029_2
actgctggaaagagtccctgtcctcacccttctggctctgatacaaatacattaacacccytctctactgagcagttttagtggtatgcactgacctgaacagactcatgcttgtccaatttgacaagttccaacaatgagatgcccagcctgatggatgaggggagaaaggcctttcacactgtcccctttgcctggggcaccaactggtaagcagtacccttatctcaatccaaaagctttctgataggggagtgagtgagcagttgggcgggagttaggcccttagcccaggttacmccaccacaggtaccagaccggcaccatctgaattggtgtattgacaccaacacttgtccacataactaagcttttgatttagcaaggtgtcaccaattggtgtggttttttcactctccaaggaaatctgtgcactgtatccattcctttccactctgattggcttacagatactttctccagtgtaagctatttaagatgagctgagcagcacttgcagctgaaggggcagcactgttcttcctgtgcacaaacccagcagcgcctgtctggcaccagcacaatcactgctactaaccc

SEQ ID NO: 31084 - DNA, 600 bp, Chicken  19866894253033_1
atttaggtttatatgtcatttatatttgtaacaaagattttgttaagaaaacagataaagccaatttagcattgggtcagaggagttgaatttcttccacattttgtgaacatggtcttagtggtctgtttttgcttgttttgtgcaggaatttgaactcaagaaaaagcgcaaaaaatgtgaaaacctcgagcatgaagtgaggaaaaagcataaaagatgcaaagaactcgtaagtgttctcgttgtctaatggtgtgagtgtaatggcaaagagctaggttgttttgtggttctccygggttctgttctgttcattgcagtgatgaattcccastcttaatctgaaatgtcacaaatttggagcttcagctctaggagctggaattgtttatttagtccttcagccacctgtgttgggtaaagctacataaatcactggataaaactccatagccttttctagtctggggagatgctttctcttttcacgtgtactccaggcaagcaccaaaagatttctgcaacttgagatggtaattgaatatacagccatattcttgtgcttctactccttggatgaagtcttacctcttgttt

SEQ ID NO: 31085 - DNA, 600 bp, Chicken  19866894253033_2
ttttgttaagaaaacagataaagccaatttagcattgggtcagaggagttgaatttcttccacattttgtgaacatggtcttagtggtctgtttttgcttgttttgtgcaggaatttgaactcaagaaaaagcgcaaaaaatgtgaaaacctcgagcatgaagtgaggaaaaagcataaaagatgcaaagaactcgtaagtgttctcgttgtctaatggtgtgagtgtaatggcaaagagctaggttgttttgtggttctccygggttctgttctgttcattgcagtgatgaattcccastcttaatctgaaatgtcacaaatttggagcttcagctctaggagctggaattgtttatttagtccttcagccacctgtgttgggtaaagctacataaatcactggataaaactccatagccttttctagtctggggagatgctttctcttttcacgtgtactccaggcaagcaccaaaagatttctgcaacttgagatggtaattgaatatacagccatattcttgtgcttctactccttggatgaagtcttacctcttgtttcatttcatggaggttttacaggtaatattgcagcatc

SEQ ID NO: 31086 - DNA, 600 bp, Chicken  19866894253041_1
ttagtaacaatgtttctgactcatcagtatagtcgttacatgaaaaccagcgaataagcagcattttgagctttcaggtctaagacttttagaagggaaggaatataagagacagtgcagcagtcaagttaggaaaatagcaatgcactttcaggaatgtgcttgacagccttttttttactgtcagtgtgttattatgaaatccatattgtactactgatgtcacttattcagtggctatttgaaagccagtgaaaaaggattttctctaaatctaagcacaattatcagtagtatatsagtggataggatggtgatacaagatgctttctccattttaaacattagcttcaatctaccagacctcacacttcaaagttactggctattctgccctattcaaaacatggtgacttttcatgtgtgttaattgttccttggatgtaaatctgcttccttatctgtgtggagatgggcattctcaacagtgcttcctctttggtatggcaagatagacttgcacaggagacaaaggcttgataataaggaaatgggataaaacagacaatagaaaataaatgaatggtttgctaagaatgt

SEQ ID NO: 31087 - DNA, 600 bp, Chicken  19866894253042_1
tgtgtagctttcacttaaacttcttgatgaatttttttttaacttcatagtgaggcataaatacaatctaccttgtgtgagtcattaacttgatctgaattgtccagagactgtgataaatggtcaaaatacaagttttatttcttagccctgtggctgtttactgcagtgctgagttactttatgcggaagaatttctgttgctgtaagaattagggaagatatcagcagaaactgcgcagggacacttagctttcatttgggctttttcaaggagaaaagcaaaggtactgaatttcrtaatggaatgaaagtacttgaagggcaagaagtagaagatctgaaaatgaaatttctatgaactttttttattgtatttgagctgtatgttcttaaattacctgggattttttttacgtcaaggtttaaaccactaatagatgtgggtttttctactccaacaaaataattttcttttctaagagatgaggtatagaaaaaaagaatgtctttattttctgtgttgtctggagaaaaaaaatgtatggaaattcacctttgtttgacttcctacctctcattctttacattctttaacat

SEQ ID NO: 31088 - DNA, 599 bp, Chicken  19866894253044_1
  misc_feature (1)..(66): n is any nucleotide
nnnnnnnnnnnnnnnnnnnnnnnnnnnnnnnnnnnnnnnnnnnnnnnnnnnnnnnnnnnnnnnnnnctcctacaagaacgctgctggggtttgcagctgggcaggctctgagcattatgctgggcagctggtgggagctcagagcagtgatgtgctggctgcagggctcctgctccccctggctcctaacagcactgcttttcaccacttgttgttaatggggatggtatcaaacctggacagatcaatgggcagcctgggtaataaccctcccacctctgtcacagtcagtgctgaaakctggtttatggctctcatttgtaaagctcctcttgaaaagcaatttcataatattataaagtatatgcagtttctttttttatccagacagaatatgaaatgtaatcaggactgtttaacctgcaaagcggtgctgatcggtattaagtatatttttgccttttgaacacttggaatgtaattgcgtagcagcattgcatgcactgtcctgctctgatgagaagtgctgtgggtcacttagctgagtccttggaagtgctgctgtgattctggtgctcttgcgtcacggaaatctgcct

SEQ ID NO: 31089 - DNA, 600 bp, Chicken  19866894253046_1
tagagtgttcttttgaagatttctcccatgaagtccttgctggtctgactaattgattccttactagcagagatcatcttttctactgctttttctgttaacgaagaaatgaatttacttcctgatttcactggatgaaaataatgtttctcgattatgctgctgtattcttaagagctaaagaatgaattacatgttcgttcatgatgtagctggttgctgtactcatattcatgcaaaggcttcgatggagttgacataaagttcttgaaaatggcaaaaagagaaaaactgtttcartgatgctaacaaaaattctaaagttactcatttaaaaaatagaatggaagtactagttctgatataarctatgaaatggactactaaatgcatcttgaaaaaccacattcctacaatgcatttgcttgtaggcagtgagtgaaacagaaactctttagttctgacccattcagcctttcctctcctgccaaaaaacactgatgaaatgtgtttgatgtattccttttaaatacttaatatagacgaaaagaacaattattttaatctacttgtggtaccacccactttgtaccataaatc

SEQ ID NO: 31090 - DNA, 600 bp, Chicken  19866894253046_2
agagatcatcttttctactgctttttctgttaacgaagaaatgaatttacttcctgatttcactggatgaaaataatgtttctcgattatgctgctgtattcttaagagctaaagaatgaattacatgttcgttcatgatgtagctggttgctgtactcatattcatgcaaaggcttcgatggagttgacataaagttcttgaaaatggcaaaaagagaaaaactgtttcartgatgctaacaaaaattctaaagttactcatttaaaaaatagaatggaagtactagttctgatataarctatgaaatggactactaaatgcatcttgaaaaaccacattcctacaatgcatttgcttgtaggcagtgagtgaaacagaaactctttagttctgacccattcagcctttcctctcctgccaaaaaacactgatgaaatgtgtttgatgtattccttttaaatacttaatatagacgaaaagaacaattattttaatctacttgtggtaccacccactttgtaccataaatcagcagtctcagtagtttgatacaggccaaacaagcaaacaccagccagcggccagaagtaaatcttga

SEQ ID NO: 31091 - DNA, 600 bp, Chicken  19866894253048_1
tcaaattctgagtcatccttcaagtcagtgctgtgagaggattaacttcagaattttcagttgaaaagaaatacttgatttgtttctgaaatgtagtttgtcccatacatgctctcaaagtgctgtggactttcttaacctgaatcattgtagatgttggaggaatcttggcagcctgagaggtttttctttaagcactgttgtgtaattttatagaaagcctagttggttctctggatctaaaacttggtgttggcagttgaaatagaaagggaataaaggttgaatgtaaatggttcrtaacattttcttgtaattgtgttgaaagtattcagcattctagtttttatagatgtagcagacaaggcaaagagaagaggcaggtggaaggaaacaaaatgaccaatgctcttccaaaagggaatatacttgagcagtttcatatttccctagtggcatgatgagtctttgttctcttaacttttctgatatacaaggcaatgggagatctcaaacaacaaatagcagcaatacttaaaaataaattaggatggaagtgctcacttctcaatgtagattataaaaatccattctcgtggc

SEQ ID NO: 31092 - DNA, 600 bp, Chicken  19866894253062_1
taccaggactgctgcttttcaaccaccaaagaaaatccaagataggttctttcctctgtctcctacaactacattgatcatcaattctggaaagctttggtgggaattaggtaggaaaatatcacatatttgtgtgtgacaataaggcaagatttaggtagataaggaggtgtgcagagggaaaactcaaagcataataaaagtcatccagtgcagaaatagtaagagattgattatttcttaatgaaaaagattgcatttactgtccaagatcatcatgtttctgggctagagaggagmatcctattttcagctccacagactgattttctgttagctcaacaggaggtctgttgggagaactgctgagacagaaaaataaaaataaccaaacttgctttaaaatctcacgagtttcaggacttgatttgtcatattcatctgcatgcagtcggtcacgctttattctgacatatctcttggtccgatctcttgctcactctgaaagtcgtgtctctgctttctgcctgtgagctgggctcagatgccttgaagaccctgtctttatgccattttccttgttatgaatttatctgctct

SEQ ID NO: 31093 - DNA, 600 bp, Chicken  19866894253063_1
tgttagtgacactgattgtaggaatcaaacatcaagctgatgtctcataaatagaaactggaactaaagagcagcacaaactgatgattttagagacctgctgactgctgtttgagcacactgggttatatttttagttttaaatgttggtttcgtatggatccatcacattgttctgatgagtctttttgagcagttagaagcctcctccaaccttcccctagaatactgactacaaatgttgtggattgctgctcttctgcaagtcaagtaatgcaaggcctactcagcttaagtgaratgcattgtctacctaamtgtgcaaaagtaacttttggtgacactggaagatttaactggggatgacacagcaagcttcaagtccaagaaatgcaatatcctgtcatttctagaaccagatggaatatatcacttctggtaatgatttctgagaggtctttttaaaaaataacgctgtgctgtcattctgtatttattttataaatgtcttctgtctctgcattgaagtagtttggcattttatgtactgtgttmtgtttttgtgatctggattgatctgcaagcctttgagaccacttg

SEQ ID NO: 31094 - DNA, 600 bp, Chicken  19866894253063_2
taggaatcaaacatcaagctgatgtctcataaatagaaactggaactaaagagcagcacaaactgatgattttagagacctgctgactgctgtttgagcacactgggttatatttttagttttaaatgttggtttcgtatggatccatcacattgttctgatgagtctttttgagcagttagaagcctcctccaaccttcccctagaatactgactacaaatgttgtggattgctgctcttctgcaagtcaagtaatgcaaggcctactcagcttaagtgaratgcattgtctacctaamtgtgcaaaagtaacttttggtgacactggaagatttaactggggatgacacagcaagcttcaagtccaagaaatgcaatatcctgtcatttctagaaccagatggaatatatcacttctggtaatgatttctgagaggtctttttaaaaaataacgctgtgctgtcattctgtatttattttataaatgtcttctgtctctgcattgaagtagtttggcattttatgtactgtgttmtgtttttgtgatctggattgatctgcaagcctttgagaccacttgttggtagtgagaactggt

SEQ ID NO: 31095 - DNA, 600 bp, Chicken  19866894253063_3
tcttctgcaagtcaagtaatgcaaggcctactcagcttaagtgaratgcattgtctacctaamtgtgcaaaagtaacttttggtgacactggaagatttaactggggatgacacagcaagcttcaagtccaagaaatgcaatatcctgtcatttctagaaccagatggaatatatcacttctggtaatgatttctgagaggtctttttaaaaaataacgctgtgctgtcattctgtatttattttataaatgtcttctgtctctgcattgaagtagtttggcattttatgtactgtgttmtgtttttgtgatctggattgatctgcaagcctttgagaccacttgttggtagtgagaactggtgtgcattcagatgaccaaagagcaaactggcttgctgttccattcttaacattttataatactcttatgctttttggtaaaatactcaagatactgagcttttattcaaataatacgaggtatgtatgttgtaatggtcatcatgtggtatttggtgtgatggctaaaatagcctggtgttgaaataagatgaaaaaactgaaagggaaatgtttaataaggatttgaaccttcaat

SEQ ID NO: 31096 - DNA, 600 bp, Chicken  19866894253066_1
tgcttgatcagatatgtgccacaaactgtgatggttcaagtggttgacttttacccaacctacagctttactgattcactgtttctccctttctcctgaatacctgatcatcatccgctcagcagtgatttgagaacccactcttcgctcagactgccagggccatttccacattcatccatacttggatgcagaaaagaaagacatcagaggttgctgttctcggagtttcactaacagctcctaccttagtcaaattaggagacagtttcattaaacgattggagaaagctcctcctrtggcccactcagaacaaaagactgtcttttgttatctgtgagcatagttttatttctcctgttttatctctgcattagtagaaacttgaaaatgaaattgtgtgtgaaaacaaatctcatctcttcttccttttttttttctttttgtagaattgctgcggtcagttcctcaattagtgcttgaaatgattccctctctgtccccaggatatgttcgaatatgaagaacagattcaggaggcaattgcaaaagacaaagaacaatatcaattgagattttggatatactttattcttgaa

SEQ ID NO: 31097 - DNA, 600 bp, Chicken  19866894253068_1
tgcactgagatcacacgaactgaacatgttcagcagccagtctgaatggcggttgctattagttaagagtcacttgaggatatgcagatagagtcctacactgacgtgccaagtagtaacggactggaaatctgtccataactgattgtaagtgcagctgctggaaaattgtcacttaaaaaaaaataatctgcccttgcttctggttatgcacagccagaaatctgctccttaaagtctgtgtgcttcagtgccccatccgcaaataggaaaatatcccctccacgttttctcctacayagactgttaattgggtcaaggatgttttgtaatatagccaaattattattggtcatggtggtaggagaggctgggcttcctgtgcagcatcacctagctggaggtcccacagcaaggctggggagctgagtccactgttccagtcctggggagtatgagctgataggcttggactcctctgtgggtatcattgaaatattgaattattcagcctcatgaaccaagggtgaatcataaccagaatgctgctgtcaccctgataatatcttataaaccctacattagaataacgtctatggg

SEQ ID NO: 31098 - DNA, 600 bp, Chicken  19866894253080_1
ctgaagaaagatgaccttaagattgcacttttcccccctcattgtttagctttatcctactgtaaggacagaaatgggttacatgtttgttccagaagctgtgtgatttatctttccaaaatgtgatagagcaaaaggctgtttgaggccgcaccttgagtactgtgttcagttttgggcccatcactacaagaaagacattgcagccctggagtgcgttcagagaaggacaatggagctgtgaagggtctggagcacaagcattatggggagtggctgagggaactgggactgttcagwctggagaagaggaggctcaggggagaccttatcactttctacagttacctggaaggaggttgtggcgaggtgggggtcagcctcttctcccaggaagcttcaggttatgtattaggaaaaaattcttctccagaagagtggtaatgcatttgcacaggctgccagggaggtgatgaagtcatcgtccctggaggtgttgaagaaattagtagatgtggcattgagtgacacgggttaatgagcacggtggtgatgggttgatgattggaatagatgatcttactggtctttaccaaccta

SEQ ID NO: 31099 - DNA, 600 bp, Chicken  19866894253080_2
gtggcgaggtgggggtcagcctcttctcccaggaagcttcaggttatgtattaggaaaaaattcttctccagaagagtggtaatgcatttgcacaggctgccagggaggtgatgaagtcatcgtccctggaggtgttgaagaaattagtagatgtggcattgagtgacacgggttaatgagcacggtggtgatgggttgatgattggaatagatgatcttactggtctttaccaacctatgaaaaactggcattcagctcccatctttattagcagactatagagccaaaacaaaacagkattctactgtggtttttgcagtttttaatttaaaaactgttgtgactctcaagttgtaaaaatacttccttggggacatcaagtggaattcctctggcaaaactgaatgtaactccttttcttgctctttcactgaaaaccttcttttcagtatgtaggtatttgtcccaacgccatgccaagggctggtatcctgaacaaagtgatattgcatgtctgtttcctattagcgccaccactggtgtgacaatggctcctctgctgtagggttatctgctgatcccagctttcttctcagat

SEQ ID NO: 31100 - DNA, 600 bp, Chicken  19866894253087_1
atatgaaggaagatgcctcaaattcttttcgagatcaaaaatgtgcacaaatcccatttattattatagattattgtgatgcagagttgcatctagtgttcttggattgttgactataaatttatacctccttaattgtatgaaatgtggctatgataattacatttctttaggaaaatatacaactgtggagtactgtgatgtgattgtaatactctgaatcattttcctaattgttaatggctaaagtagtaaagattgtttgctgttaattcagccttgcattgaaacttgttcaarctcattggcaactaaagttaaacccttactgtgatatcgttcatgttaactgtgagtctttgttgtacccattagctgtttgcctttatcatagctgcatacctctgaagagatgttgtgttactgggctgtacaactggctgaatgggaaagttggagactggcaagcggatgagcagtgattctctaaatgtgataagtagtatagaactgtgggatgtgcatctttttgtttcttctaaattgcagtaggcaagcagttaatataattggcagtgattattgcttatgcttcagatt

SEQ ID NO: 31101 - DNA, 600 bp, Chicken  19866894253088_1
ttttaggaccaatggactccagacaaacagaccccagaatcccacagtgacagctacctctctaagaatagtcttgcaattagcttattgtcatttcatatagaccgcacctggtgtatcttatattcaacagtctcaatgcaaaagacttttccatacactgcgtttttaaattgtgaaacgtattgttttaggatgctgtggattctaaaaacatttaaacatcaaaaagtaactacacaaattcaaagaaagaaattccattaaggctatcaaacatcaacaaaggtccatcaacasatgaatccccattattctcactgaggttcagagtctgtgcatttgaccatctggcagttctgtaatgagcagaggtggtactgatgggcattgtggaccattcactaaaaagatctagttctataacttataggagtatttactgaaaaactggaatttgtaagcaagtctggtttctgctaggaagaatgaccaaaaaaaatataaagaaagttaagttctctccttgccttcttctgcttcttcccttttcccctctgagtagtgtctgtaaggtgtatgcacctgaatccatatcta

SEQ ID NO: 31102 - DNA, 600 bp, Chicken  19866894253093_1
ctcacatgtgcaggggctgctctgccaccctgccaaaggggtcacctcaggaggctgcttcggcacggagagatgaaccataacaagcaagactatcctaatggtgtggcttaagcaacagtggaaaaacacctctactctctggaagaagcgttggtttgaaagggagttgtgttctgaatgttcactgatctaccaggcagccttacaagtgttatttactgtaattaatttgactgtgctgccttgggcattagtgagatagtgacgaaggaatagatagtgtggcagtatcaatamtgcacagaaagatagtgaaaagcagtcttctggagwcwtacgtattctaatgaagagcaaaagagaactaagacaacatgctagggaacgtgatgcacggagacgcggtgctcagcccggctctgatgggcacagatgccttctggcttctgcagagcatgaggcatctgagcttggggctgtcagtagctacaaaactcctgcaaatgccaccacagcctgaggtgactgatggaatacacacaggtggccaagggatcacaacgtcctaagcccagacctgctcctgggtgcctgctg

SEQ ID NO: 31103 - DNA, 600 bp, Chicken  19866894253093_2
aggggtcacctcaggaggctgcttcggcacggagagatgaaccataacaagcaagactatcctaatggtgtggcttaagcaacagtggaaaaacacctctactctctggaagaagcgttggtttgaaagggagttgtgttctgaatgttcactgatctaccaggcagccttacaagtgttatttactgtaattaatttgactgtgctgccttgggcattagtgagatagtgacgaaggaatagatagtgtggcagtatcaatamtgcacagaaagatagtgaaaagcagtcttctggagwcwtacgtattctaatgaagagcaaaagagaactaagacaacatgctagggaacgtgatgcacggagacgcggtgctcagcccggctctgatgggcacagatgccttctggcttctgcagagcatgaggcatctgagcttggggctgtcagtagctacaaaactcctgcaaatgccaccacagcctgaggtgactgatggaatacacacaggtggccaagggatcacaacgtcctaagcccagacctgctcctgggtgcctgctgccatctcctctactctatgaaaccagcactggctgc

SEQ ID NO: 31104 - DNA, 600 bp, Chicken  19866894253093_3
gggtcacctcaggaggctgcttcggcacggagagatgaaccataacaagcaagactatcctaatggtgtggcttaagcaacagtggaaaaacacctctactctctggaagaagcgttggtttgaaagggagttgtgttctgaatgttcactgatctaccaggcagccttacaagtgttatttactgtaattaatttgactgtgctgccttgggcattagtgagatagtgacgaaggaatagatagtgtggcagtatcaatamtgcacagaaagatagtgaaaagcagtcttctggagwcwtacgtattctaatgaagagcaaaagagaactaagacaacatgctagggaacgtgatgcacggagacgcggtgctcagcccggctctgatgggcacagatgccttctggcttctgcagagcatgaggcatctgagcttggggctgtcagtagctacaaaactcctgcaaatgccaccacagcctgaggtgactgatggaatacacacaggtggccaagggatcacaacgtcctaagcccagacctgctcctgggtgcctgctgccatctcctctactctatgaaaccagcactggctgctg

SEQ ID NO: 31105 - DNA, 599 bp, Chicken  19866894253097_1
  misc_feature (1)..(169): n is any nucleotide
nnnnnnnnnnnnnnnnnnnnnnnnnnnnnnnnnnnnnnnnnnnnnnnnnnnnnnnnnnnnnnnnnnnnnnnnnnnnnnnnnnnnnnnnnnnnnnnnnnnnnnnnnnnnnnnnnnnnnnnnnnnnnnnnnnnnnnnnnnnnnnnnnnnnnnnnnnnnnnnnnnnnnnnnnatttgaaaatatgtcttggctgcagggaatgctgtagcagtacagctgtttttccagtagactccaagagattgttttagaattccctttgtagagaattgcagtattttgaggttctgctccaattcgcwacaggtcaggttcagaaacccagaattcctttgtagactgcagtaactgtactcctaaatttgctcttcctttctcaaaattgtaatggcatatacggctgagtgcattatgcgtgttcctaaatcatgaataattgtctggcttttgttttattgtgtttgttgttggggtcttttccccacttaaagaaaagagaattgaggggaaaccattgcacatattgtggttgcattgtcttggttaacctaagaaacttccttgctgcagcactcttagcctctgttctctgttcaagaac

SEQ ID NO: 31106 - DNA, 531 bp, Chicken  19866894253097_2
tcttcctttctcaaaattgtaatggcatatacggctgagtgcattatgcgtgttcctaaatcatgaataattgtctggcttttgttttattgtgtttgttgttggggtcttttccccacttaaagaaaagagaattgaggggaaaccattgcacatattgtggttgcattgtcttggttaacctaagaaacttccttgctgcagcactcttagcctctgttctctgttcaagaacaagttctttcttctgcattttactcccaggcctctggcagggtttgctaaaatttaaactatgckttgggcttactctgagaactttgctggtgctggagctgagttcatctgtctgggacaaagaacactgggtggtgggcggtgaatggcaggtctggatccgcaccgaggggacggatggggatggagcgtgcgaggtgagagatcctcctcctttactttccagagggcatttccagtggtgcaggtggcagagggatctctgccaaagcactcgctttctttaatctcttc

SEQ ID NO: 31107 - DNA, 600 bp, Chicken  19866894253101_1
taaaataaataaatgagaatgtatttctaaggaactaggtgaaggcaggagagagtgcggagaggcagggcgagaaaacctgcctctcttgttatcttattgattcgcttaatcagggctaatgtgggtggagatgttaaatagtaaccaagctcttatggaaaccaatctgcaaggtgctgtcgctgtagctatagtaactgctgccaagctagaaactcaaacatggcttttactgtactctttcggggctcctgcttccagccggtgccaaggctggggcagcagaggctggagttygctggggaaggatggggtgagctgtggcatttctgtgcctgggcactgagaggtttgtgggcacttaatacgatgcagaagaaaggcaggcgagggtgaaaccacgtggccccaggctggggataagctgagctgggctggtgcatgctggggtacagcccagccaacggacttggagtgtcctctcggtgcaaaaccggggggtcacttggggatggggagcagtggggtgcagggtggtacccagagcacaaggctggcgtgggacatttgcagctccctccccatctccgctccctg

SEQ ID NO: 31108 - DNA, 599 bp, Chicken  19866894253104_1
  misc_feature (1)..(73): n is any nucleotide
nnnnnnnnnnnnnnnnnnnnnnnnnnnnnnnnnnnnnnnnnnnnnnnnnnnnnnnnnnnnnnnnnnnnnnnnntacatcaagttaacgaagtcaattgtgatgagatgtgtaacagcagagaatacccttcctgtgtttaccaagggaagagtccacctaagaatgcacacgctttaaaacttaacccaccttgatgcagtagatcagcttttcatcactgtacatccctcatgtctcattaaagccaccccctcctgcctgaagaatgtcaagcaaggggttaaaatgctcaacgcctyctgagccctggatttgcctgctgtgcaattccttgccttgccttcgaacagagctgcctttctgctccttaggtcctcctgacacagcacacaattcagcgtctgtacctcccatcactcagggagcagtgcagtagctgagcagctcccggcccagtgtcaggttgttggagctctttgtttggcatttcttccaggtttcctggaggaaggtaaataatgttaagtaccccaaggaagttcttaacatctttacaagatctcagcctcctgggcaccattcccaattttgtgaaagc

SEQ ID NO: 31109 - DNA, 599 bp, Chicken  19866894253105_1
  misc_feature (1)..(108): n is any nucleotide
nnnnnnnnnnnnnnnnnnnnnnnnnnnnnnnnnnnnnnnnnnnnnnnnnnnnnnnnnnnnnnnnnnnnnnnnnnnnnnnnnnnnnnnnnnnnnnnnnnnnnnnnnnnncattttccccaacattcttcatgcttttctcactggttatacgaatcacgtgatgtgaaaaaacttgtgcagcaagtatgctctggtcatttacgtttcggaagaacaatcaccgtcggaaagaagatgttagaaagtaacacacccacaatatctaacctttatcttactcatgaactgtgtctgaaggascaaagataagtgggtaggaggcaacaaactgctagattaaaattgttatgacaggctggatctggctcataaaacttttttgttttttaaggctttctgatagagttaagcttcctagcttgtgcaaatagtgtcgtataactggcagacgcacttgaattgatgagaggttcttggctatcttagaaaattggtgtagttgccttggattcacaataaatgcctagaagacaaagtgattgtatctagaaaaagggaaaacatattaagggttgaaatgaagcagggataatctttta

SEQ ID NO: 31110 - DNA, 600 bp, Chicken  19866894253109_1
gtagaggagttacaatttcactggactgacttatccctaaaatgaataaatatttaaatctgagcaatcatatggcaaccacacacattagatgtttattgcccagtgctagccttgtagtcacaccatttttcttcttctattttcctttgtagattatttgatgatgttgttttcagttcacttcatatggctctttttttactcctcacaaattgctggagactaatgggacaattcttcagcaattacactgaaacgatcacagaaatgccctggttctatttcacgtttcgataygtgggagcactgcatgctatcttgtcccttgaatttcctgtatattaaaccttaagaaagatattaatcagcaccgagtaagactactgacactgatgaattcctttttaattgttcagtgtgtagtccagacagggcatcagtgcatcaaccaggcaagccagatgagatctgaatcacagagggtctaggatgctggcaatcagtctactcacactgttcctgctgtttcctaattcctcagcttgtgtggtagagaagcagaactcagcacttgcactcctcactgggtactccaaa

SEQ ID NO: 31111 - DNA, 600 bp, Chicken  19866894253110_1
acagatatactgtaagcttgcaagcttctctcccttgaagagtggcaggaggaaaagtgctttagtcaatttgcttaccaggagttgagatatttctttagagcagtgttgtttgttttagtcagcatgatgtggcagaaagtacggcttgacagggcaaattaagaattgtttgagagtagcatttacaatatatatttattttttgcatcttggctgtctgactgagaattgtacctgagattctaagagcctggaatcccagcatcagagattgcaaaccagctttttcttgctttwaatactgaactgacaatcagaagttcttgttgatgtaaaccaagagtctttctgttttaagaacaaacagtaaagctattacaaactagaggatactagtctcctktagagcttctgttcgtatttcttttaactaagtcagctttatcctttcatttaggaagacgttggttattgaagctgttgttagaatgtttgaatgtttaattcaaagaaggcttatagcattagtgtcctttgtggaagatggtagtggctgaagcgcagagtgaaaaaataagtttgttaatgcatttgata

SEQ ID NO: 31112 - DNA, 600 bp, Chicken  19866894253110_2
tgttgtttgttttagtcagcatgatgtggcagaaagtacggcttgacagggcaaattaagaattgtttgagagtagcatttacaatatatatttattttttgcatcttggctgtctgactgagaattgtacctgagattctaagagcctggaatcccagcatcagagattgcaaaccagctttttcttgctttwaatactgaactgacaatcagaagttcttgttgatgtaaaccaagagtctttctgttttaagaacaaacagtaaagctattacaaactagaggatactagtctcctktagagcttctgttcgtatttcttttaactaagtcagctttatcctttcatttaggaagacgttggttattgaagctgttgttagaatgtttgaatgtttaattcaaagaaggcttatagcattagtgtcctttgtggaagatggtagtggctgaagcgcagagtgaaaaaataagtttgttaatgcatttgatattggtattgttcatcagaatagtctgtaagtatgctagatggtattttttcaacacattatggattttccaaaatctttcactggctatgctgaatattgtaagtg

SEQ ID NO: 31113 - DNA, 600 bp, Chicken  19866894253113_1
aattttcttatttaattccattttgctcatacctaagtgcttttcagagactaactgcagtattaataaatgttctttctggactagttaatttcttaggctgataaaagttatcttaataaaagatatagctttcaactaaagcctagatttcaaaagataagaacagttatttttcctccccacccctcagccccctctggaatcagttacattagtttaaagacaatttttccagactgattaagaaggaagattgagaaattgaacttcagatttactctttcaccagactgatayaagaagcaggtaatgagatcaacttgttgttagtcacaaagcagtttctttgaaatgaaacttgtcagacatacttatcactttagcagtcacagagtttgatacaaacagcatgaaaatgtttaggcctactgtttcttcaacttttaaagcaactaatatgcaccctcacagcttctcagatctactactaaatgtcattttccatttttttaaatttcatttcttaataatcatttgccaccagtatactggggggtggttttcttggtaaagcttctattttgtagtactttctgt

SEQ ID NO: 31114 - DNA, 599 bp, Chicken  19866894253114_1
  misc_feature (1)..(173): n is any nucleotide
nnnnnnnnnnnnnnnnnnnnnnnnnnnnnnnnnnnnnnnnnnnnnnnnnnnnnnnnnnnnnnnnnnnnnnnnnnnnnnnnnnnnnnnnnnnnnnnnnnnnnnnnnnnnnnnnnnnnnnnnnnnnnnnnnnnnnnnnnnnnnnnnnnnnnnnnnnnnnnnnnnnnnnnnnnnnntatttccatgaagtgtgcaaaaaatatgccagtttagattttgtctaagtgcagttcttggaaagtttgtgaacggggagaggttgagtaatgtgttgcatagaaggggcagaacaaatcccagggyttgtctcaaacgtgggcttttaaaataaaaacactcttgtacaagtaattgtacttggcaggggctctgcctgttaaaagtctgtatgggtacaaacaagattgaaatagcttaaaaccagagctgagtgttgtgttctggtcagcacagctatctgctggcggcacagcagagccatgatctcacctggcagtgtgcaacagctgttgagaatgatgagtttagtcacataaatatccagtcagggattatgaatctggaactagaatatgtttgttgaggtttttttcctgcagcat

SEQ ID NO: 31115 - DNA, 600 bp, Chicken  19866894253121_1
catagacagtgctcactaaatatgtgaaatgttttctggacacaatgggagtgctgtcctgacctttaagaaaagattaaagtgtatgtagtttgcctgcatactttgcatagtcctaaaattgaggctcttatcagagccaacataggatgtaaagtaaaattcagtaagaatgtccctaaattaaactgcgtcagtctttcccccagttttggtgctgtgttctaaatgggaagcaggctgacgtggttaggagtccctggtttctgttctctgtttgagcactgtccaagacagacrgtgggcatctctgagacagcttatgcagtcactccaaagctttaggaggaccttgcatttactgtcattctgtaagacttacctagcaaaatctggaaagtgttttctcgtatcagtttaaattctggccattgttcactcctttgcaatttgagaaggctttgggcagcagcagaggctctggaattatcttttgcagactcaggaagatggtaccagactgtcattctcaaatcacatttgaatttttttcaggaacagcgctggaaactttttaaagcagaagttgttggcactcac

SEQ ID NO: 31116 - DNA, 600 bp, Chicken  19866894253142_1
atcacagagctgggctgccttccttctcccacgcctttcccaaaagcggtggagaggagagaaattcaaacccagccccggtgcctgctgtgatcagaggcatgcagtggcagggctgagctctgggtgaatgaatgaatgcaagcaatggggtgcaggagctgcaggagcagcgggagcatctcctgggctctgcttgtgggttgggcccagaggctggaggggatggtcagagcagggccggcatgggacagcttgaaataaatgagaggataaataaagcaagtaaagccatagagrgcaaakgccgcctcaataagcagcagtcacatcccatccagaaagctttttttttccaacagtctctttgatatgcccaagccagaatactgcaagaaagccaggcttastcaccaaccccttgctctttgtaagctgagctttgaggccattgagcacagaacaagggtggggggaggttttgcaccaacgtgttcttcaaggagtgcctgaaggtagcaggagctgcaggtcttccagatcttcatagtgctgcttgggatgaaagcccagtgggtttgaggggctggagccttatgc

SEQ ID NO: 31117 - DNA, 600 bp, Chicken  19866894253142_2
gagctgggctgccttccttctcccacgcctttcccaaaagcggtggagaggagagaaattcaaacccagccccggtgcctgctgtgatcagaggcatgcagtggcagggctgagctctgggtgaatgaatgaatgcaagcaatggggtgcaggagctgcaggagcagcgggagcatctcctgggctctgcttgtgggttgggcccagaggctggaggggatggtcagagcagggccggcatgggacagcttgaaataaatgagaggataaataaagcaagtaaagccatagagrgcaaakgccgcctcaataagcagcagtcacatcccatccagaaagctttttttttccaacagtctctttgatatgcccaagccagaatactgcaagaaagccaggcttastcaccaaccccttgctctttgtaagctgagctttgaggccattgagcacagaacaagggtggggggaggttttgcaccaacgtgttcttcaaggagtgcctgaaggtagcaggagctgcaggtcttccagatcttcatagtgctgcttgggatgaaagcccagtgggtttgaggggctggagccttatgctacagc

SEQ ID NO: 31118 - DNA, 600 bp, Chicken  19866894253142_3
cagggctgagctctgggtgaatgaatgaatgcaagcaatggggtgcaggagctgcaggagcagcgggagcatctcctgggctctgcttgtgggttgggcccagaggctggaggggatggtcagagcagggccggcatgggacagcttgaaataaatgagaggataaataaagcaagtaaagccatagagrgcaaakgccgcctcaataagcagcagtcacatcccatccagaaagctttttttttccaacagtctctttgatatgcccaagccagaatactgcaagaaagccaggcttastcaccaaccccttgctctttgtaagctgagctttgaggccattgagcacagaacaagggtggggggaggttttgcaccaacgtgttcttcaaggagtgcctgaaggtagcaggagctgcaggtcttccagatcttcatagtgctgcttgggatgaaagcccagtgggtttgaggggctggagccttatgctacagcacaaggaactccatcacttccatccatcatccatttctttcacccatcacccatgatctgttaccatcagccatcacacatcatccatccgcagcacccatcac

SEQ ID NO: 31119 - DNA, 600 bp, Chicken  19866894253153_1
ttaataaacatcgctgatatgtcggtgaggagaaagcaggagcaaggggaggacacacacagaaaggcggctgacaatttacttatagccacgctcttctcttgccttggcccgcatgcagcccaggtagctcttcccagggaggaacatccccagccctcctcagcagagcccacggacaggctgcacccacctcccgggcagctcccatccaacagctcatttccctacgagcttaggaccacctgccccaagctgcatacctggccctaagcctcaaagagaggcagtgggatttasagacaactcacacagcagctatgagcggattccgacaaaaacggcgtgcatttcatcagcaccttgcaggctccaaagctatttcactgccattgtgctccttctataaattgctctccaagtgtttggaagtcgctctactcttgcccacaaggctgtaaatcaaagggacttgcttgtgatcaggagccacatcccttgcttttgtttaatctctgtaaagcagcaaggaaatttttgatgcctgtagggagtatttgccctacccaattccaacagtgacaatcacaggtagcaaag

SEQ ID NO: 31120 - DNA, 600 bp, Chicken  19866894253153_2
ttaatcaagctatgcatggctaaaaatgctcctgagcattagcaggtgcttagcggcactgcgtaagtgcagagctaaggaataacgtgctgtaagcacagctaacataagtgttcatagctccctgtggggctaagaatgactgcaaacctggggcttacatatgcaaaagcaagttcccacagagcctgcagccaccacagtcagggctgcagggcaggtcccctacctgctctcccttgcaaggcacagagcagcccagggccacagggatgcactccaacagcatgggagaacacygggacacaatgaykgtagatgccccatccttggagacagccaaggtcaggctggawgggctctgagcgcctgatggagctgtgggygaccctgttcagtgcagagcagtgggatcaggtgacctttaagggtttcttccaactcaaaggtttgactaaggttattgactaagcacaagtcctgacaatactcactgagttatgaggattcgttacgtctccagcactgatacttgcactcatagtaaactataaatgctctcaggacttggattcataatttttatgagttggccacatt

SEQ ID NO: 31121 - DNA, 600 bp, Chicken  19866894253153_3
gcatggctaaaaatgctcctgagcattagcaggtgcttagcggcactgcgtaagtgcagagctaaggaataacgtgctgtaagcacagctaacataagtgttcatagctccctgtggggctaagaatgactgcaaacctggggcttacatatgcaaaagcaagttcccacagagcctgcagccaccacagtcagggctgcagggcaggtcccctacctgctctcccttgcaaggcacagagcagcccagggccacagggatgcactccaacagcatgggagaacacygggacacaatgaykgtagatgccccatccttggagacagccaaggtcaggctggawgggctctgagcgcctgatggagctgtgggygaccctgttcagtgcagagcagtgggatcaggtgacctttaagggtttcttccaactcaaaggtttgactaaggttattgactaagcacaagtcctgacaatactcactgagttatgaggattcgttacgtctccagcactgatacttgcactcatagtaaactataaatgctctcaggacttggattcataatttttatgagttggccacatttccacacaatgtc

SEQ ID NO: 31122 - DNA, 600 bp, Chicken  19866894253153_4
catggctaaaaatgctcctgagcattagcaggtgcttagcggcactgcgtaagtgcagagctaaggaataacgtgctgtaagcacagctaacataagtgttcatagctccctgtggggctaagaatgactgcaaacctggggcttacatatgcaaaagcaagttcccacagagcctgcagccaccacagtcagggctgcagggcaggtcccctacctgctctcccttgcaaggcacagagcagcccagggccacagggatgcactccaacagcatgggagaacacygggacacaatgaykgtagatgccccatccttggagacagccaaggtcaggctggawgggctctgagcgcctgatggagctgtgggygaccctgttcagtgcagagcagtgggatcaggtgacctttaagggtttcttccaactcaaaggtttgactaaggttattgactaagcacaagtcctgacaatactcactgagttatgaggattcgttacgtctccagcactgatacttgcactcatagtaaactataaatgctctcaggacttggattcataatttttatgagttggccacatttccacacaatgtcg

SEQ ID NO: 31123 - DNA, 600 bp, Chicken  19866894253153_5
cactgcgtaagtgcagagctaaggaataacgtgctgtaagcacagctaacataagtgttcatagctccctgtggggctaagaatgactgcaaacctggggcttacatatgcaaaagcaagttcccacagagcctgcagccaccacagtcagggctgcagggcaggtcccctacctgctctcccttgcaaggcacagagcagcccagggccacagggatgcactccaacagcatgggagaacacygggacacaatgaykgtagatgccccatccttggagacagccaaggtcaggctggawgggctctgagcgcctgatggagctgtgggygaccctgttcagtgcagagcagtgggatcaggtgacctttaagggtttcttccaactcaaaggtttgactaaggttattgactaagcacaagtcctgacaatactcactgagttatgaggattcgttacgtctccagcactgatacttgcactcatagtaaactataaatgctctcaggacttggattcataatttttatgagttggccacatttccacacaatgtcgatatttgtaggactgcaaagctacaaagttaggaccagaaaa

SEQ ID NO: 31124 - DNA, 600 bp, Chicken  19866894253153_6
gtgctgtaagcacagctaacataagtgttcatagctccctgtggggctaagaatgactgcaaacctggggcttacatatgcaaaagcaagttcccacagagcctgcagccaccacagtcagggctgcagggcaggtcccctacctgctctcccttgcaaggcacagagcagcccagggccacagggatgcactccaacagcatgggagaacacygggacacaatgaykgtagatgccccatccttggagacagccaaggtcaggctggawgggctctgagcgcctgatggagctgtgggygaccctgttcagtgcagagcagtgggatcaggtgacctttaagggtttcttccaactcaaaggtttgactaaggttattgactaagcacaagtcctgacaatactcactgagttatgaggattcgttacgtctccagcactgatacttgcactcatagtaaactataaatgctctcaggacttggattcataatttttatgagttggccacatttccacacaatgtcgatatttgtaggactgcaaagctacaaagttaggaccagaaaagcattccaagggctaacttctccatcaata

SEQ ID NO: 31125 - DNA, 599 bp, Chicken  19866894253158_1
  misc_feature (1)..(93): n is any nucleotide
nnnnnnnnnnnnnnnnnnnnnnnnnnnnnnnnnnnnnnnnnnnnnnnnnnnnnnnnnnnnnnnnnnnnnnnnnnnnnnnnnnnnnnnnnnnnnattttccatctaagctatggtacattgggcatttctgtatatagtacagctgtgttatggtcagagatcctagagggcttgaagtcatgctacctgagctgcattttaactaataaatacctattttgctcgggaatgttgtgtgaagggaattctgccttgaaacacacaaaaagatgcttttctgttttttctggttcttgtaaygttctggttttctggttctcataacgcaaactcaggaaatgggggttctgtagagatggggagacaacagttaacagagaaatcatacggaaggggctcctgacaggttcctttactacagagtgctggcaggtgccactttaataggtattgctattaacagccatctgtagagaaaatgaaatgtgctcatctcactgaattatgatttatgccagacaaagcagtcaaaccaaagtaatatttatattataatgcagagtcattgattaaatgcacatggcatctcaaatccagtt

SEQ ID NO: 31126 - DNA, 600 bp, Chicken  19866894253158_2
tattactttaaaaaatgtgtctctacttgttattaatagaagaaagtcagacctggccaatatttcaataggctgaccttttgttttgctgacatataaaaggaacaaagctccttttgggttagtcacaattccagagaatatgaagtatgctcgcttcagagaaaactgacccctttgagccactctgtctcctccttccctcttgttttccacacagggtttttgaaagaaagtgggcgagagatggttaaggagataggaaaacagtctgagagttcatttcaagcgcctgctctkctactgacttcctgggtgacactggtcggcacactgccacagtcatcctctacacatttccctgcttcgtataatcactggttggctaaatgtttaaaggttacatatgtttaaaaaccattttggctacttatgtagaagtacagcaggcttctagttttaattttctggaaaaaaaaataattaaaaaaagtaagcttttgtttgattttctctagctgcttctctgatctctaggatacctccttctttctcagataactgtttttcagtgattccaatttttctcaattgttaatc

SEQ ID NO: 31127 - DNA, 600 bp, Chicken  19866894253161_1
atggcataaaaggaaaattttttgcattaaacattctgcttatgtttccagcttcacattccttagtttgtaattcacttgtcttagagttcatttacttacaaacaactctttgccatcaatactcaaagctactaaaagaactgacaaacgcacttcatggggctgtgaacttcaagttttcactttggattccattaatggcttttcttttctaaaataaaagccacacaggtcatttaaagaaattctttgcagagaccaaaagtttcccagaggtgtgctgagctcaccagtacracacacaggagatatcaaacagcagagtccrataaaggacgccttttgagcacaggattatctttttgttcttttgctcaaaagacaaagctccttactcactcctgctcagaaacactgcctcacacttcagcacctacatggagagttaataatgtgccacccgcagcagggcactgcattggatcagctttaaaggccatcacaatggcaacctctcgcatattacaaatgaacctgagcctttaaagccaattctaacaccacaagtgttagtttactttcttttgcttaagttaa

SEQ ID NO: 31128 - DNA, 600 bp, Chicken  19866894253161_2
cattctgcttatgtttccagcttcacattccttagtttgtaattcacttgtcttagagttcatttacttacaaacaactctttgccatcaatactcaaagctactaaaagaactgacaaacgcacttcatggggctgtgaacttcaagttttcactttggattccattaatggcttttcttttctaaaataaaagccacacaggtcatttaaagaaattctttgcagagaccaaaagtttcccagaggtgtgctgagctcaccagtacracacacaggagatatcaaacagcagagtccrataaaggacgccttttgagcacaggattatctttttgttcttttgctcaaaagacaaagctccttactcactcctgctcagaaacactgcctcacacttcagcacctacatggagagttaataatgtgccacccgcagcagggcactgcattggatcagctttaaaggccatcacaatggcaacctctcgcatattacaaatgaacctgagcctttaaagccaattctaacaccacaagtgttagtttactttcttttgcttaagttaaagtgcttttatctttaatttaacacctctcc

SEQ ID NO: 31129 - DNA, 600 bp, Chicken  19866894253164_1
cagagggagtggctccatacaatggagttgattttacaccagaggcttttacaccagaggaagttgaagagagaactgacttaatttcagctacattgctgctccagaggaaaaaaaccaacaagggtacttaaataagcaattgggtccttcacccacgcagagcaccgaccccagtgagcttcctgtctacaccctctgagctggattgggctgcatgcgtggagcctgtctgccccactccttgccacctccagcagtattactgctttcttgaagtgctgccaaaagtaacagggragatgagagtcgagtgctatcagtcgtgctggagactgtggaggtaggaggctcaccccatcacgtgggtgagggccacatcccgctctccccacaggcagagacttttaccaccttaccacttcagcagtggcacttactgaccttctgtctatcctagaggactttctggaacttgaggtcatttttaagtatttgctccgtttccagctgtccacctaacgcctatgagaaaaaatgtcatcctgaccagaataccaacagaggctcagagcctctgctacaaagcacctgcacatg

SEQ ID NO: 31130 - DNA, 599 bp, Chicken  19866894253172_1
  misc_feature (1)..(52): n is any nucleotide
nnnnnnnnnnnnnnnnnnnnnnnnnnnnnnnnnnnnnnnnnnnnnnnnnnnncagacccaacaggtgttatcctttcagacaggaactgcaaaatctctaaggaaactgggcctggctcccactccagggtctaatttaacgagcaacccccaattgactgtaatggatctggactctattacaagcaagaaatcagggtctggatctaataagaatgtcttcaccacattttgtttttaaagtctgcttcaaggagagacaactggatgcagaaagccagtttgctctgtttatgagtrgtttgactcactttttccagcacagacattcaaccaagcctctcaatccccacacagccccaacctaccctattcatcaacagagctgcacaccaaaaagcactgaccctaagaagaagattggcccagagatgcaacacctgtcctgctatcagcatccctgtctcaccagcacctgtagcatccacttacttcaccatcagctccctrttgccacacagctgggatggagttaatccctgtaggtgcagaggcagccaagcaccccagctatgggatgctttagggcctaaggagtt

SEQ ID NO: 31131 - DNA, 600 bp, Chicken  19866894253172_2
taagaatgtcttcaccacattttgtttttaaagtctgcttcaaggagagacaactggatgcagaaagccagtttgctctgtttatgagtrgtttgactcactttttccagcacagacattcaaccaagcctctcaatccccacacagccccaacctaccctattcatcaacagagctgcacaccaaaaagcactgaccctaagaagaagattggcccagagatgcaacacctgtcctgctatcagcatccctgtctcaccagcacctgtagcatccacttacttcaccatcagctccctrttgccacacagctgggatggagttaatccctgtaggtgcagaggcagccaagcaccccagctatgggatgctttagggcctaaggagttttcccacttgcctgaattggccacatgcactaagcagcagatccaggctgcccgtgcttacgaggtttaatttcctaattgaaatttcatggcaaagctgcacctttctgattagtcaccccagcatgagggctgcctcataacacagacatctgccctccggactaacctttctagaagctgcatcaacaaagtaatgctaataaaaata

SEQ ID NO: 31132 - DNA, 600 bp, Chicken  19866894253188_1
gctgcttcataaactgccatgcagtgcatagtgagaaaaaacagataagtgatttatctcaggagggagaccaaaacagccatttgtgtgctgctggttcccccctctgtctcactgcaaccagcacacgagctgcttgggtgcagatttgcagtgtgggtgctgacctggacccaaaagcaccaacctgcaggggtgagatgtcacctgtggttcctgagtggtccacagcccagtgccacaccactgggtccaagaactgactatgctgtgcaaggaacatgtgggatttttacatgyggccataaagtgatggcttataattcaattagagctcaggaaaacctgctgagttatgtcacaactacttagcctggcattggcttcttggaggtctaaggatgtggttgaagtgggggaaaaggacagagaaaaaaagctgatggtaaatttttatggggttgttgtagcagtggtgggactgttcagtgtcctcaaaaatggacagagaaaggaccagcctggtttgatttgcaaagaaacttcaaagccactgctcttatgtcccgcttcagagcctttatggacacctatctcctc

SEQ ID NO: 31133 - DNA, 499 bp, Chicken  19866894253188_2
ttcagtgtcctcaaaaatggacagagaaaggaccagcctggtttgatttgcaaagaaacttcaaagccactgctcttatgtcccgcttcagagcctttatggacacctatctcctcattttcataaagatccacttctcctttcctcctcgttttcctttctccatgtcttgtctttctttgccatctctatctttcctcttttgacaggtcaaaaaacaaacaaaaaaaacccaaacgttggagctcgatgatctttaaggtcccttccaacctaagccattctgtggttctatgataygtataaagaattctacacctgcaccactattctgcttctctccagaggctgttgggtagaaagtcaatgcagtagttaaagaaaaaacgatggaagcttgaaaaaagcagcttgcatgggctcctttgggcatctttccctgctgctggaggtaagagcctgctgccacatcagcacagctgcacacatctgcaggctg

SEQ ID NO: 31134 - DNA, 600 bp, Chicken  19866894253190_1
gtggcatttgcacaggagaaggttcgattaattttcaattacaagagtcaatgggaatcctttggaaaatggaaacccaaataagaggcacagacagggcagaaagaaggctgaggggagatgtccaaaaggactccaaagggcagagacctacactgacacaatactgtttccgtgcaagccaatttagtcaatgctctacccaatgcaaaaacccaagctctatgagcacgatgtacagacatatcagtggttgtcagtaaacccaggcacttaatccagagttatcaaatctactgratcctccctaaatctgcatactgcggatactggcgtatactgcagtagcctgcaacaacacagagtttacgcagagtcaaggtacatggaagctacaatttcagtttctgtaccacaggaaaatgggcaaacttcttctagatctgagctggcctcggaagtcaagcactatatccaagttcagaatgctggtggaccagtcaggctttgactggtacctcctcatctcttacagttgtttcatccagaagccccatctacaacaactgcataattgttacaggaacagatgtgccttga

SEQ ID NO: 31135 - DNA, 600 bp, Chicken  19866894253192_1
aaactggactgaagacattggggacacaaacacagagaagacctaaaggtacctgaagtccaagttcaaaaacacatgtaatttgcatcccaaaaaactggaaaagggagagaaaagcttctagagaaaacctccagaaacaacctgcactaaaaaaaggtcttaagattttagcactgcttataaaagctgataggaaacgagaaagagtgctaaaaaaaaggaggctacttttggaaagacagaaagcacaaggatgaagtgagaattcccaagagccaagctgtattagactctgayaaagtaaattaaactgcacaacaaaccattatwtacttaaaaggaaaatatacataatatgtagcatgtataatataagaatataaacaaaaataataaaaaaagaattattcaatgagcaaagaggcgggagaggaaaaagggcctgaaaatcaaataaatactacttgtctttagtttttaaggactcttttataagaaaaaaggacttttaagaaaaacagaggtcaggatagggtgactcatggctgaaagtgtgtagaaagtgtgaaaattgaagttattgcaactggtgtggaa

SEQ ID NO: 31136 - DNA, 600 bp, Chicken  19866894253192_2
agagaagacctaaaggtacctgaagtccaagttcaaaaacacatgtaatttgcatcccaaaaaactggaaaagggagagaaaagcttctagagaaaacctccagaaacaacctgcactaaaaaaaggtcttaagattttagcactgcttataaaagctgataggaaacgagaaagagtgctaaaaaaaaggaggctacttttggaaagacagaaagcacaaggatgaagtgagaattcccaagagccaagctgtattagactctgayaaagtaaattaaactgcacaacaaaccattatwtacttaaaaggaaaatatacataatatgtagcatgtataatataagaatataaacaaaaataataaaaaaagaattattcaatgagcaaagaggcgggagaggaaaaagggcctgaaaatcaaataaatactacttgtctttagtttttaaggactcttttataagaaaaaaggacttttaagaaaaacagaggtcaggatagggtgactcatggctgaaagtgtgtagaaagtgtgaaaattgaagttattgcaactggtgtggaaactagcctcaaaggctttaatgtacttcagcag

SEQ ID NO: 31137 - DNA, 600 bp, Chicken  19866894253195_1
cagcacacagtgaaagccccaacaataatcccaagagtagtggcagctttctgctctctcttaaaaatggaaatgtttttcttgtcattcttcaggagtcgtgaaaaattagtacattcttcagattccttgtgcagttttatcactccattcatagaaatcccttccatttcttctggccggggaaaaccggcgaacttgtgtttagcagcgctcctcttggcagccttgtaaatctgataatacatgaaaagcatcactgacattgggatataaaatgcaactgccgtggagtaaatygtgtagccgaagtcttggctgatcaaacagaccttttcatcattcacgttttgggcccaaccaaagagcgggggtatggtgatagaggcagataagagccacacacacaggatcattttggccatacacttcccgttctgcctcacaggatatgtgagcggtcttgttattccaaggtacctaaaatgacaacacagagttgttatgcagtgcaatgattaagtgctaaaagttatttcacatagtcagccattatatttaacaccttttgttaaggcttctattttatctttttcaatg

SEQ ID NO: 31138 - DNA, 600 bp, Chicken  19866894253197_1
acagttatcaggtaatggaaggaaaacaaatcccttatttattgatataatgtcttttacagttctgcataatatatattattttcttatgcactggatcctgctttcttcctttgatttgtatcagtttataggagaaggaagcagaaaactaaaggtggtataaaaactcatattttaaataaatgtataaacaatgagaatattcatttacttggtcttgcttgcttgctagcttgctttggtttggagttttttagtgtttgtgcctcttggtttttcaaaatgcaatttgtgtaytattcattatgcattaggctttttctaaaaataaatactaaaaaatggtccttgaagctcttttccccttaattttctcctttcattcaggcatgcttcaaattattgttgtaattcctcattttggccttcggatatacttttcagtagtgaaaccttactgatttttttttttcccaaaacttaaactatataaatgcagctatatgaagcttcccaggacactcaggttgggatacaaaggtgcaaaggacgacagagtgtgagtaaccgctgatgactcagagacataagacggga

SEQ ID NO: 31139 - DNA, 600 bp, Chicken  19866894253198_1
acaagggtgttagacttcatgtccgtctgtgaggtgctgagtttagcgttcagtttttccttattttctaagtcaggccttttcataaaaaaaataatgcatatgctgatgtgtacccatttaacagaagcagggtcaacttcttaaagttcttgctcaaccaacattaataatctaaggaggacttgcatttaaacttctgcagttttctgtttctgtaaatacgtagtaaaacataagcaaactgagtatttcattgaaaaaatgcgccacaataatatttgcctaaaacttataaawatttccaagaactgtttgcatcaaggcaatgaagaaggagtaccattttgctctgttgcattcaatacttaatgcagaaacagttagttatttgatagtttcacattcatttaactaatatgattgttcacttgtagactgacttctggatttacgcattataaaaacatgataaagttattttcataacttacttcaggccatgtttttcattagatatgagccattacttttgtgatggtacaatatcaaaacaaaaaattcaactgcttctattattcaagacttgtatattaatgt

SEQ ID NO: 31140 - DNA, 599 bp, Chicken  19866894253200_1
  misc_feature (1)..(65): n is any nucleotide
nnnnnnnnnnnnnnnnnnnnnnnnnnnnnnnnnnnnnnnnnnnnnnnnnnnnnnnnnnnnnnnnnggaacatatgtttggttgtaaagacacagcatttgctgttttgttcataggagattaatgttctgatgcatataccttacataaaacatcagtctatgagctcatgtaaccatggagtaataagtaatttatatacatggaaactctgggttcattgagacctaatctacatattttattaaggaagagatctttacaaaccttaatactaatgaatattttcataaataacaayttattgctaactgaaaataattggcctaattttatgaaaacrtggaccccccaaaatcctaccttattcttacagtcaagtgaagtgcaaaacccgtgaaaattgggctcagttattaatgcacaaatagcctcaaatcttattagtagcatagcattaaaaataatatttatttatttataatattgttggtatgatagattctaattgcactgtatgtatactttttcttctaattgcagtaaggtatgagcagtacaaccacacactgatagaagtgctaattatttctatttgtg

SEQ ID NO: 31141 - DNA, 599 bp, Chicken  19866894253200_2
  misc_feature (1)..(23): n is any nucleotide
nnnnnnnnnnnnnnnnnnnnnnnggaacatatgtttggttgtaaagacacagcatttgctgttttgttcataggagattaatgttctgatgcatataccttacataaaacatcagtctatgagctcatgtaaccatggagtaataagtaatttatatacatggaaactctgggttcattgagacctaatctacatattttattaaggaagagatctttacaaaccttaatactaatgaatattttcataaataacaayttattgctaactgaaaataattggcctaattttatgaaaacrtggaccccccaaaatcctaccttattcttacagtcaagtgaagtgcaaaacccgtgaaaattgggctcagttattaatgcacaaatagcctcaaatcttattagtagcatagcattaaaaataatatttatttatttataatattgttggtatgatagattctaattgcactgtatgtatactttttcttctaattgcagtaaggtatgagcagtacaaccacacactgatagaagtgctaattatttctatttgtgtatttacactttacttttacacgctagcatsatttaggcatc

SEQ ID NO: 31142 - DNA, 600 bp, Chicken  19866894253200_3
tttatgaaaacrtggaccccccaaaatcctaccttattcttacagtcaagtgaagtgcaaaacccgtgaaaattgggctcagttattaatgcacaaatagcctcaaatcttattagtagcatagcattaaaaataatatttatttatttataatattgttggtatgatagattctaattgcactgtatgtatactttttcttctaattgcagtaaggtatgagcagtacaaccacacactgatagaagtgctaattatttctatttgtgtatttacactttacttttacacgctagcatsatttaggcatctttagggaaggcacataaaggaggtgtttgaggtgctttgtgtactataatgaataacaaacttgagcaacacataacccaaaattaattttaaaaagctgaaagttttgttaatgatgcgtatgaagcatttaattaacaagactcagtgaagaaaccacaagtcacagtaacaaatagaatgagattgttgctaccctgagcagaatactaacgggccgttcttcatgctgctgcgcttgcaccacttctattctcctgtagtctgccagcaagtaccggcctggag

SEQ ID NO: 31143 - DNA, 600 bp, Chicken  19866894253221_1
atgctaaagagtttgtctccttatttcctgtagctcctctttagatattgaaaggatgctatcaggtcaccttggagccttcttttcttcaggatgaatagccccagctctctcagcccatctttgtaggagaggtgtttcatcccttggatcattttggtggccctcctctgctcatgctccaataggtccatgtctctcctgtactgaggaccccacatctggacgcaggcctcaccagtgcagagtagaggggcaaaatcacctctctcaccctgctggccacgcttcttttgatgyttctgttttctcctgtttctgcttccacccatgaatacccagaaacaagtttatgtgtgaaatgaagatatcaccttctaagatacagcttgagcaggcttgtttcatgaagtcttcatgtctgctcttaaaaaagtggaagaatccaccttctcttagaaaatttgatgactaaagtaaaaactgaaaccatccttcaaaagtcaaatgtgatgtatttaatagactgtgaaacccagccccttgccaaagagaggtggaggtgctcatctgcaagatgagttagctaaactagtctag

SEQ ID NO: 31144 - DNA, 600 bp, Chicken  19866894253233_1
ctgagccagttagggccagggaaacacaggcgatgatgtggggacggacaccaagaacagctcccagaggccctcagcacaacccaaggaaggctcactatgtctccaagcctcacaaatatgatcagccagagaccagatgcaagcttggctgggccaggctctgctgtgacccaatatatgcagtggtggtcgatgaggtcacagtccatccatcacaccattactctgtgacatcaaatacttttgctcagttctgtcactctgagagagccagagaggaactccttactgggagaraagtgataggatgagggctaatggcttaaagtaaaagcatagatttagattggacttggatttggatttggaagaaattctttcctatgggggtggtgaggcagtggcacagactgcctggagaagctgtggataccccatccctgttaatgttcaaggccagggtgcatgggtcctgggcagcagagcttagcagaaagtgcccctgcttttggcagagcagttggatctagatgatctctaaggtcctttccatcccaaaccactgcattaatctatgaacagagagcccaacagcta

SEQ ID NO: 31145 - DNA, 600 bp, Chicken  19866894253235_1
caaatgaagaccagtaaagcattttaccatggaaagactttgcttcaaaactcagctgtttttcctggaagtttagcctctgtctgcagtaaggttcatggcactggcaatgatcttcttatgtgtggcagtaaaggtcattgttcttatgtgagtgggattttctctctgaggctactgggttaagtggctggagtgcaaagtagtgttttgaaaagggtataagtgactttagtgcattgttttgagatattaaggtaatatgtgtatgaaaaatatccaccattaaaacattttctygttcagttgcttctgtagaaaagtttgctaatgcacttggtgtgtgtttggaacaaagcagctctctgtaggtttcaaggagcttgctcagcatctctacctacttttgaaataagtactttggaggcatgaatattcttggttctgcctgtcagtgcacaattaagttgcatttagctttcgtgatccttctggaaaaaaaaaaaattgctgacttgtgtttaattaggtctttgttactgtaatcaaaactggggctgctctgcttggtagggctatttgcaatgtgctcacttctct

SEQ ID NO: 31146 - DNA, 600 bp, Chicken  19866894253240_1
ctctcctttcttttgctttcaggacaaagcacagggatgcttttgttctgctttgggatgaatgtggaaaaatagattttaatatggaatagccccctgcctcctaatatatgagacggcttgggttactgatcctattagtaggagcagatgctgattgtcccgttaatcaaagcaagtcattaggcattaattacacttagtaacagaataattgcttggtttacctaaactgtgctaggaacgctttttcctctttctgagtaggataagcttatttaaattttgtctgcaacaaaygcactgaacaggttgcccaagaaagctgtggatgccccatccctggaggcattcaaggccaggctggatgtggctctgggcagcctggtcttggtggttggcgaccctgcacatagcaaggggttggaactggatgagcattgtggtcgttttcatcccaggccattccgtgattctatgattcatttcatacacgtagaggtgagctgatctatgttgcaatgttggcgggttgatgtatgcagcctatagaaaggactggtggcaaagggtgctgggcacagggatgaattttgcaga

SEQ ID NO: 31147 - DNA, 600 bp, Chicken  19866894253245_1
gctgttttatcttggagattctgaaatagattggatttgcctcactgaggaaaaggaatttaaagtgcagtaaattgtctaaagctgataaataatttatattcttttttactgaccacttaaatccagggcaaaacggagtaaatatttgttgcctgtctgattaaataaagggccctgatattgttgtagtctaaatgtatatctatgcagagatgactgtacaaatgcattaaggaattgtttagcgaggctagtattataaagtgacacagcagtttcctaaaaaaaatagtattytttttaggtaatttatgaatattttaattaattatttgaaaatataaatttgatgctgagaacagcaatttcctattaatctaatcatgtggcaagtgaatgtactaagtccataaattttctggaaaggaaaattgcagaagactgaattatttatgggaaatgaagcatgtgatgaatatacctgtgttgttttatttttccacttgcaagctgatactttttcttactcccatatatttattgactagattgaggcaccaagtaagtatactcctatgtactctacatcactttatc

SEQ ID NO: 31148 - DNA, 599 bp, Chicken  19866894253255_1
  misc_feature (1)..(47): n is any nucleotide
nnnnnnnnnnnnnnnnnnnnnnnnnnnnnnnnnnnnnnnnnnnnnnncttgcacacttatttccgggtaggtttggttgatggtgcttggtcagacctttgcctgtcctacactgtggaatgcatagccacagcagtatggaggtctctggcttcactaccagactggccataggtctgtgggaaatgaagctcttgtgggaggccaacagggtgaactcgcctgtgtgtgcctggctttgctagcttctgtctgtagaaagttctttggggtactgtttgtaatattccatggtcgtcyctaaagcactaatttaagtaagtgaatagctgtggcaggtagatgacygtacaccagggagcttgtgcatttcagttaaattaatacagagaagctagagtcatatcaacctacactagcactaaagaagttcacaaaatgagatgctctcagcccaactgagaacttcacatctttcattttatttgtgtacaaattgtgtacattatcagaaagtaagatctaaacatttgcagttttgygtgctaaggaattactcttttacagaggggttactaaaggaagacctactcgacaaa

SEQ ID NO: 31149 - DNA, 600 bp, Chicken  19866894253255_2
ttgcacacttatttccgggtaggtttggttgatggtgcttggtcagacctttgcctgtcctacactgtggaatgcatagccacagcagtatggaggtctctggcttcactaccagactggccataggtctgtgggaaatgaagctcttgtgggaggccaacagggtgaactcgcctgtgtgtgcctggctttgctagcttctgtctgtagaaagttctttggggtactgtttgtaatattccatggtcgtcyctaaagcactaatttaagtaagtgaatagctgtggcaggtagatgacygtacaccagggagcttgtgcatttcagttaaattaatacagagaagctagagtcatatcaacctacactagcactaaagaagttcacaaaatgagatgctctcagcccaactgagaacttcacatctttcattttatttgtgtacaaattgtgtacattatcagaaagtaagatctaaacatttgcagttttgygtgctaaggaattactcttttacagaggggttactaaaggaagacctactcgacaaatcatattagattgtgaaataacttttcccttcactttacagttcttatt

SEQ ID NO: 31150 - DNA, 600 bp, Chicken  19866894253255_3
tagcttctgtctgtagaaagttctttggggtactgtttgtaatattccatggtcgtcyctaaagcactaatttaagtaagtgaatagctgtggcaggtagatgacygtacaccagggagcttgtgcatttcagttaaattaatacagagaagctagagtcatatcaacctacactagcactaaagaagttcacaaaatgagatgctctcagcccaactgagaacttcacatctttcattttatttgtgtacaaattgtgtacattatcagaaagtaagatctaaacatttgcagttttgygtgctaaggaattactcttttacagaggggttactaaaggaagacctactcgacaaatcatattagattgtgaaataacttttcccttcactttacagttcttattttactgcagcatttctrgatttgaacatgtctgttctgaattggccattcttaaagttycactcrtgctaaaagtgtcctacatgctaggtatgcaggaatattttagtttattcaaggctagtaaatgctggcagttgtttttttgagtagttcctgtgcttgcaggtgagcagtgaaagatgcagtagttct

SEQ ID NO: 31151 - DNA, 600 bp, Chicken  19866894253255_4
tgcatttcagttaaattaatacagagaagctagagtcatatcaacctacactagcactaaagaagttcacaaaatgagatgctctcagcccaactgagaacttcacatctttcattttatttgtgtacaaattgtgtacattatcagaaagtaagatctaaacatttgcagttttgygtgctaaggaattactcttttacagaggggttactaaaggaagacctactcgacaaatcatattagattgtgaaataacttttcccttcactttacagttcttattttactgcagcatttctrgatttgaacatgtctgttctgaattggccattcttaaagttycactcrtgctaaaagtgtcctacatgctaggtatgcaggaatattttagtttattcaaggctagtaaatgctggcagttgtttttttgagtagttcctgtgcttgcaggtgagcagtgaaagatgcagtagttctgaatgcaaatgtaagagccattcaactgtacagtatcttattcaactaataacgattccaacagttagacaaacctttaatcaatgcatactttaattgttatgctctgggtgacaatggctg

SEQ ID NO: 31152 - DNA, 600 bp, Chicken  19866894253255_5
aacctacactagcactaaagaagttcacaaaatgagatgctctcagcccaactgagaacttcacatctttcattttatttgtgtacaaattgtgtacattatcagaaagtaagatctaaacatttgcagttttgygtgctaaggaattactcttttacagaggggttactaaaggaagacctactcgacaaatcatattagattgtgaaataacttttcccttcactttacagttcttattttactgcagcatttctrgatttgaacatgtctgttctgaattggccattcttaaagttycactcrtgctaaaagtgtcctacatgctaggtatgcaggaatattttagtttattcaaggctagtaaatgctggcagttgtttttttgagtagttcctgtgcttgcaggtgagcagtgaaagatgcagtagttctgaatgcaaatgtaagagccattcaactgtacagtatcttattcaactaataacgattccaacagttagacaaacctttaatcaatgcatactttaattgttatgctctgggtgacaatggctggagtaaagcatggtatttactttacctgacaagacttagtca

SEQ ID NO: 31153 - DNA, 600 bp, Chicken  19866894253255_6
cactagcactaaagaagttcacaaaatgagatgctctcagcccaactgagaacttcacatctttcattttatttgtgtacaaattgtgtacattatcagaaagtaagatctaaacatttgcagttttgygtgctaaggaattactcttttacagaggggttactaaaggaagacctactcgacaaatcatattagattgtgaaataacttttcccttcactttacagttcttattttactgcagcatttctrgatttgaacatgtctgttctgaattggccattcttaaagttycactcrtgctaaaagtgtcctacatgctaggtatgcaggaatattttagtttattcaaggctagtaaatgctggcagttgtttttttgagtagttcctgtgcttgcaggtgagcagtgaaagatgcagtagttctgaatgcaaatgtaagagccattcaactgtacagtatcttattcaactaataacgattccaacagttagacaaacctttaatcaatgcatactttaattgttatgctctgggtgacaatggctggagtaaagcatggtatttactttacctgacaagacttagtcacatagg

SEQ ID NO: 31154 - DNA, 352 bp, Chicken  19866894253255_7
ctaaaagtgtcctacatgctaggtatgcaggaatattttagtttattcaaggctagtaaatgctggcagttgtttttttgagtagttcctgtgcttgcaggtgagcagtgaaagatgcagtagttctgaatgcaaatgtaagagccattcaactgtacagtatcttattcaactaataacgattccaacagttagacaaacctttaatcaatgcatactttaattgttatgctctgggtgacaatggctggagtaaagcatggtatttactttacctgacaagacttagtcacataggararcacctctaacttcctgttatttcacttaatttatacttgtctgtcactta

SEQ ID NO: 31155 - DNA, 350 bp, Chicken  19866894253255_8
aaaagtgtcctacatgctaggtatgcaggaatattttagtttattcaaggctagtaaatgctggcagttgtttttttgagtagttcctgtgcttgcaggtgagcagtgaaagatgcagtagttctgaatgcaaatgtaagagccattcaactgtacagtatcttattcaactaataacgattccaacagttagacaaacctttaatcaatgcatactttaattgttatgctctgggtgacaatggctggagtaaagcatggtatttactttacctgacaagacttagtcacataggararcacctctaacttcctgttatttcacttaatttatacttgtctgtcactta

SEQ ID NO: 31156 - DNA, 600 bp, Chicken  19866894253256_1
tataataaaagcaaccggaatcccgaggggacaacataccaaacattagccgaaaacaccttcctgagcatgcaaagaaaatcatgagggagaagggcatctgttactaagatctgagtgcaaattctttccacctgccatgggcagaaagtcaaaaacccttcattttctgcagagcgcctgagccgcccatctggatgacactgtaaacttcattaagtggtttccatccagcctgcacggatgctgtttcagccccggccatcagcggggctgaggaggcacctggggatgctggtmctgctgaccagcttgcatttccctgctagtgtggagaatgatggaatgctctcatttcctgagcagaaaccacaatggtttgtatttctgtagatttatcgaagcaggctagaaaatcatttgttggggcgactgcagccactacagggagggagcttgatgcaaaagagaagaacatagccctcagttagcaccagtaagctaagaacataaatacaacgataagtcataaaagtgaggtcctgtcatgttccatgtcaaccatgggccttaaagtcactgctgaaagtcagcaacgga

SEQ ID NO: 31157 - DNA, 600 bp, Chicken  19866894253258_1
atctcggtgttagggtggatgtggcactgagggacgtgctcagtgtgcacagtagggataggctgctggttggactgggtgtaatcttagtgttcttttccaatgttaatgattccatgtggggcttcagctctgccctggggagcagccatggcaggaggcagcctggggctcatcactgctgtgccccaaaggcgctgtgaacccggagctgtgccggtgatcgccgggtgctttctgttacatgatggctttgctgttaaaattctgattttggctcaaagcataaaaagactggamgattccaaggrcctttctaagcactgctggatgacagcgaatctcctgtgattccttctgatccgaaaattacagctcaggtcctccctggtgtgcatctctgtaagtaatgtgctttcggtggagctgtgctgatttacagccctgaccggggcaagaatatgtttcctttaacctaaatgaccttcatttaaatgaacctaatccaggaattaagcattccatcccatttcctatttgcatgatgtatacgttatgttcagttctattacacaaagctgcatctctaagacatatgca

SEQ ID NO: 31158 - DNA, 600 bp, Chicken  19866894253258_2
agggtggatgtggcactgagggacgtgctcagtgtgcacagtagggataggctgctggttggactgggtgtaatcttagtgttcttttccaatgttaatgattccatgtggggcttcagctctgccctggggagcagccatggcaggaggcagcctggggctcatcactgctgtgccccaaaggcgctgtgaacccggagctgtgccggtgatcgccgggtgctttctgttacatgatggctttgctgttaaaattctgattttggctcaaagcataaaaagactggamgattccaaggrcctttctaagcactgctggatgacagcgaatctcctgtgattccttctgatccgaaaattacagctcaggtcctccctggtgtgcatctctgtaagtaatgtgctttcggtggagctgtgctgatttacagccctgaccggggcaagaatatgtttcctttaacctaaatgaccttcatttaaatgaacctaatccaggaattaagcattccatcccatttcctatttgcatgatgtatacgttatgttcagttctattacacaaagctgcatctctaagacatatgcagctttttcctc

SEQ ID NO: 31159 - DNA, 600 bp, Chicken  19866894253258_3
gctgatttacagccctgaccggggcaagaatatgtttcctttaacctaaatgaccttcatttaaatgaacctaatccaggaattaagcattccatcccatttcctatttgcatgatgtatacgttatgttcagttctattacacaaagctgcatctctaagacatatgcagctttttcctctgaaaagtgcttaccctccttgatatgcagacataaaagagcccacaacatttgctcccggatcccacatttgtacactgacctccagagctttccacagcaaatcctatacattagtwttgtggggctctaaattttgatttctgtatatgaacactttaagaaatgtgcttttactctcttttaccttttccaaccatttactcaaatgcacttttctaaaggcagttttaacctttggaaatggattgctgccttaaatggtttcaacgagccatgaatgtggagtttaggtcaaaaaatggaaatcattttggtttcaaaacgttgtctgtcctgtggggtttctctccatagcagctccatgcgttgtagtgatgtggtatgggaaaacattcccagtcggggtttctgggcag

SEQ ID NO: 31160 - DNA, 600 bp, Chicken  19866894253268_1
acacagtggatgctatcgtctggttgggcagaagaagaccaacaacctgcaagagaagaaattcgtgttaacatacacatggttgttgatgctctgctaggcaagaaaacagcaagcataattctattgactttactaagttatctctatgcatgggcttcatttcatggtgagtggccagagcacagccaggaacaagcaggtgggggaacagaaccacccaggaaagcaataaggtgtgaacatctgaagacaggagtgccacccagaagcacatgtgctcctgttttggagccaccwgctttgtttgaagagaactgctgatctgagcccgtatgtatgcactgttcacgtggtcctggcagcattcttgggatgtctcgaaataccattgaggctcattcctgcaattcttcagaggacccatctcttgcagaggatgcagtgcagccagactccttcctgcccagtttgatggcagccttttcccctcaagggcaaaaagctgaagaaacatagagccataaaggttggaaaagagcttctgagatccccaagctcaacccaacccatccccaccatgcccataaccacatctct

SEQ ID NO: 31161 - DNA, 600 bp, Chicken  19866894253277_1
aggccaatttttctattgtgttccttttgcattctgtgagatcagattcattagatcacaagaatggaccaggtgaggagaaataaactacacaggtacaaattatctttaatcgttctttggcgtagtttagatgtgatttgcaaatagattgtctagtttgatttaactttttgcttgctaattagtttgtgtgaggtctgtagttctaattaaaagctaagttcttccccaagaagaggtaactgttttggtttagaaattgtgatatctattatatagttcattgtccatactaaygctaatgtggtttgattccaggtagtctcagatgtgtttatagacagattgctagaatcttagaaaaaaaagaaagcatgaaagaaagcatgttctacttccaatcagttaaggatgcaacttcactgtattatttaattcattgtgtttatctcctttggtgttctagtagctgtatttggataattcctgctgtagaaaattcaatcctagtggctaatcaagtccacagctgccttgggaagactgccaatgaaaatgcctatatgaagtgctactttgcaattgctaatctcctgc

SEQ ID NO: 31162 - DNA, 600 bp, Chicken  19866894253281_1
tcggggttgcaagcagccacatccgcatgaatcaggctgcttagtccaactccatcctctcctgacatcccctctttatacttttggatgttcacagtcgctgcggagagcgttcccagagtcgtgcaatttgtgtgaaagaccgagggaaaaacaaaaaggctgcagaaggatctcattgcaggaatccaccccctgcccaagctgtgattacagacaataccttccgtatttctcaaaggggaatgatatatccttcccaagtggagcccatggcggctgccctgcttgtggccgcgytgggtatgcaatgatgtcatttcagagaagggctcaaggattaacttcagtttgaaggggggggttcagttgttttggtgctttttaaactttgccttcatttcctttttttttttttttttttaaattgcattcaatattgacccagagaagtttccaaaccccatcctgcacactgctccctcccactgctcccctcgctcccccagtcccagttgtcccattggcactgagcattggatccttactgggaaatgggcaggtcatgaggtttactgtcagccacagagacctctttgg

SEQ ID NO: 31163 - DNA, 600 bp, Chicken  19866894253282_1
ttgtagagggtctattaaagcagtaatgaattaattgccagttcagctaaactccttaagagtgggctttagtaggatttaatcatatatttaaaggctctattaagtaggaatgtccataaatgcacacctaggttaatattgaatcaggaacatagtcacatttttaaaggacatagttatcattaccctagaagtggaaaaggccttcagattataaattaactaaccttggaagtgacagattcattgcctagcctatctgtttataggtttgtgacttttcacgtttgtcagaaygyatcttaaaagacgttcactttagggaaagaaagttgctmctggagaaaccttctgaacatggacatttatgggggttgcagcaacttacaatgaaaggtgagcagatgaagcaccaacagtgacttgcacgggaggtgagacagtgagaggaacctctgtgtggcagtgactcagtaacatgcaattatgctgacactgtatctgctgctttttgcaaaggctgctagtggatgttagatcagcaggttgcatccggcttttcagatggtttggagctgttaytccccagtaatttgc

SEQ ID NO: 31164 - DNA, 600 bp, Chicken  19866894253282_2
gtagagggtctattaaagcagtaatgaattaattgccagttcagctaaactccttaagagtgggctttagtaggatttaatcatatatttaaaggctctattaagtaggaatgtccataaatgcacacctaggttaatattgaatcaggaacatagtcacatttttaaaggacatagttatcattaccctagaagtggaaaaggccttcagattataaattaactaaccttggaagtgacagattcattgcctagcctatctgtttataggtttgtgacttttcacgtttgtcagaaygyatcttaaaagacgttcactttagggaaagaaagttgctmctggagaaaccttctgaacatggacatttatgggggttgcagcaacttacaatgaaaggtgagcagatgaagcaccaacagtgacttgcacgggaggtgagacagtgagaggaacctctgtgtggcagtgactcagtaacatgcaattatgctgacactgtatctgctgctttttgcaaaggctgctagtggatgttagatcagcaggttgcatccggcttttcagatggtttggagctgttaytccccagtaatttgcag

SEQ ID NO: 31165 - DNA, 600 bp, Chicken  19866894253282_3
ttcagctaaactccttaagagtgggctttagtaggatttaatcatatatttaaaggctctattaagtaggaatgtccataaatgcacacctaggttaatattgaatcaggaacatagtcacatttttaaaggacatagttatcattaccctagaagtggaaaaggccttcagattataaattaactaaccttggaagtgacagattcattgcctagcctatctgtttataggtttgtgacttttcacgtttgtcagaaygyatcttaaaagacgttcactttagggaaagaaagttgctmctggagaaaccttctgaacatggacatttatgggggttgcagcaacttacaatgaaaggtgagcagatgaagcaccaacagtgacttgcacgggaggtgagacagtgagaggaacctctgtgtggcagtgactcagtaacatgcaattatgctgacactgtatctgctgctttttgcaaaggctgctagtggatgttagatcagcaggttgcatccggcttttcagatggtttggagctgttaytccccagtaatttgcagctcttattcccactcaaaactttggtggaatttcactgw

SEQ ID NO: 31166 - DNA, 600 bp, Chicken  19866894253282_4
cacgtttgtcagaaygyatcttaaaagacgttcactttagggaaagaaagttgctmctggagaaaccttctgaacatggacatttatgggggttgcagcaacttacaatgaaaggtgagcagatgaagcaccaacagtgacttgcacgggaggtgagacagtgagaggaacctctgtgtggcagtgactcagtaacatgcaattatgctgacactgtatctgctgctttttgcaaaggctgctagtggatgttagatcagcaggttgcatccggcttttcagatggtttggagctgttaytccccagtaatttgcagctcttattcccactcaaaactttggtggaatttcactgwtggttggttcagacaccatttcacagctactaatgatgtgcattgatcttgtttattgacccacttgccacagacaggtagaccactttgcatcctgtagtcagaaacctgtttagaaataactatctgcaaatatatcctgagcttctaaggtagatagcgtcatacattttttgcaactactagttatgcaatgttgtgcaacctaaaagcaagacagcaaggggaatatccagtgggtggg

SEQ ID NO: 31167 - DNA, 600 bp, Chicken  19866894253282_5
ctggagaaaccttctgaacatggacatttatgggggttgcagcaacttacaatgaaaggtgagcagatgaagcaccaacagtgacttgcacgggaggtgagacagtgagaggaacctctgtgtggcagtgactcagtaacatgcaattatgctgacactgtatctgctgctttttgcaaaggctgctagtggatgttagatcagcaggttgcatccggcttttcagatggtttggagctgttaytccccagtaatttgcagctcttattcccactcaaaactttggtggaatttcactgwtggttggttcagacaccatttcacagctactaatgatgtgcattgatcttgtttattgacccacttgccacagacaggtagaccactttgcatcctgtagtcagaaacctgtttagaaataactatctgcaaatatatcctgagcttctaaggtagatagcgtcatacattttttgcaactactagttatgcaatgttgtgcaacctaaaagcaagacagcaaggggaatatccagtgggtgggcaagatttccctcgtgtatcagctctcattttatggtgtgtgagagtttccctgtg

SEQ ID NO: 31168 - DNA, 600 bp, Chicken  19866894253285_1
ggggctgaaacccaggagtcccatcaccctgaaacctgcaatgagctttcgaccacggcccgttgctacacttgctggaaaaaaccatctgaccaacacagctgttcacaaatccaaacacgagtaactccgcacgtaacaggtttcccaacagttcccttgctgcacatgtcccaaagagggagagagggaagtctgtgcactcaaattatttctgtctgctcgcggtgctttcttgttgccgtggcttggggatttttgtttgcatcttttaaaatatacaacaggaaagaaaatatygcattattttaccaacatcgctcattccgatggggttgtgtgtacatccgaatttatatttaagtccagattgtttccatagaaccgcagagcagcataggttggaggggaccttaaagatcaccgagttccagccccatggccgtgggcagggctgccaacaactagactggcaggttcatttcagattttgcagatttaattgtcactgattgcctccctccttggtagtgaagagccagtgggacatatgcagctatctttcaacacactttctcatttttctcattatcctacagc

SEQ ID NO: 31169 - DNA, 600 bp, Chicken  19866894253286_1
aaacttaagcttttggcacggatgagtgaggaattcaatgcatgtccttatcaggaccttcagttatccttcagtggctcagcacagagactgaagccagatgctccacattaaataaagtcgtgctattgcacaagtgcaaggggtactcacgccactattctagaagcatccctaacaccagtgtgggagagggtatttttggagaggagagccctgctctgcttgcctgctgactgcatcccacgggctatttttattcaaaccccctccagttgtctccagtgcctgacatgagcrttctgcctgggcaggtcccgcagatgggaggaggtgacttcgtggctgtgaaccacatcacagcgaaatcactgtgcccccgtttgacctctggaggttgaaaccatcttcctttgaaaacacggcaggtccttttgctcacagtgacattcagactcttcacacagcttattaaaaaagggaggggggattgctttggctttttaccccaatcctgaaaacagagcagattccgcaattccaaatattgcctcttgcttgggaaaagcacaagagtttctccgtaacagtaacactgct

SEQ ID NO: 31170 - DNA, 600 bp, Chicken  19866894253299_1
ggtgggatgaatgggtctctggagatatctgccttccaattaagttcaagcaaagcctatatagccattttaaatttgaaatcatgtctaacttttagatgagaaaagtctgatgaaatgaattgtgtatgaattcacacaaagattgcttcaacacagtatgaaatcaagacatcttaatctacaatgaactctaatattaattgcaatgataacacacaataaattatacaccaactttctgctattatgttggattagaatattacattatattaagttaagcaacaagtgaaagarggctgaatcatgagataaactaagggtctcctaaaagagtaaaacagttcttattccttgcattgtcctgtagagagaaaaatgatcaagacttcactcccattcttaactactattgtaatgagtcatctctgtttatcagtcattactggaatctttcattcaaaacacattctgataatggaatcttatggtataatgtttagatatggacaacagaacttaaagatttaaaaacatattaaattagtcatgtggtctaatctttaatagtataatgttctcagagctgtcactggc

SEQ ID NO: 31171 - DNA, 600 bp, Chicken  19866894253301_1
gtcccacgcttaatgttgaagaggcaaatcagtcgtgtatcattttctagaagggcttcagcataacctgctgcaggggcagatggtatttttaagcagtgtgagctcagagtgtgaaaaggcttacagctgaattataggcatctaatctgatcgtggagacactgcgaaagatgtcaaaagtgagatacctagggccctgctctggtaggggtaatacagctgtagatatggtcttaggctggacatctgaaaaataaggtaactaagttatttaaatttttttacaatgaggcctgmtgattcctaataacctgttattgtgccaataacccacactgatctctatttgcttctatttctgtttgcagttagaggagttttcacaatcagtcaacaatagaatggtcttctacaggcagacccaaccctaggtgctcaaacacagtgttagcttccttgtttaacaatagttgctgaataggcttggtggactttgcagattagtaacagaatactgaactctttacctctcatttccagttgcaatttcagaacagaatcaagggttaaataaacaacttctcctctctctctctt

SEQ ID NO: 31172 - DNA, 600 bp, Chicken  19866894253309_1
atttcgctattacaattaagacagagaaactctgctacttggccatttctcccttcattcacagggagaagtatgcagatcccagtacagtgctgttcattaaacatctgtatagctgaagttggccattccccatatgtctccaaccaattttcgttgttcacaaccaacaaagtcagacctcacaatccacagctgccattgacattacccttctttacatggaactaccctgataagaattaaaagtggttccttggcttcagctgttgtatactttgtggtatgtatagacaggarctgagcactattaccctgaacaacagaaaagacccaagtaaggggggaagatctttcacaacatctttcttttgtttcttcttctgaaatgccccagaaaggattagaaaaccctgctgcaattctccatatattccagagtaaagtgagctctaaagggtttggggcaagtcagcgtgacatttagtttgcactaaagcatcttagaagtcatatgaaatatagcgtaacagagcatattctactctattaagcattcaggagcccggcatcgcagtattcagaatacggatgagaagc

SEQ ID NO: 31173 - DNA, 600 bp, Chicken  19866894253309_2
tctactctattaagcattcaggagcccggcatcgcagtattcagaatacggatgagaagctggaattgcacaaggcattcctcctcttatggctgaccgctgagttgaattcaagctgatcctaagggagtcattttcattaacctgcagtagctctctaatcctattccttgaatttcagaccaccgccactacaagaatttatgacctgctgcctgcaccttggatagcgctcacactttactcttttcctgctcccctggatcattaccaccgctccgtgcagcaactgattctctyaaagtggaagtctgctccttagtgcacttacctatgccccatttaactctcaccaacatacatgaagacgctgatggtaacacttggtttaaaacagtgaaaacaatcacatagtctagcccagagtgcagaaccaagagcttcctgaagggttcttcctgaagcccgtagagggcacatgcctatgatttgcctcaaaccccaagctaaaaagaactcccaaaccgccaactttcagctctaaaatcccaacctgctggccaagaagctgactgagcagcctgtcctctgccccggttt

SEQ ID NO: 31174 - DNA, 599 bp, Chicken  19866894253338_1
  misc_feature (1)..(24): n is any nucleotide
nnnnnnnnnnnnnnnnnnnnnnnntgagaactgttgttctcactgggggaactgaaaagtagcttgcagaaaatgaaggaaagattggaacatcctcatgaaaagctcttctaaatatgcagccctgttgctctcaatcagtgaattctatctattgtaagcacgaggttacagggaatactgatcttgcattcaagaacgtactggtacatttgtccacaaatgtaacaccaggctttctgaagttcacccaaccttcaaagaaaacagcagaaacagagacaattacctgtttttctyagtgtcttagacttcccctaggacaagaaagtgaaaagacttgagttacttagagaaggtaagtagagcaaaaagaggcattgaatgatataaacgaagtcagccccaggcttctagatagtatttacctcattcaggaatcagtttgtttccagctgacaaagacaaacgtcaacacagcaattcacctggagcccattgtgactgataacaggcaaatgtctgctgtcagcctatgggtagagggagcacsagcagttacacaaaggatgatcttatgcaagataagaacattcagt

SEQ ID NO: 31175 - DNA, 600 bp, Chicken  19866894253338_2
accttcaaagaaaacagcagaaacagagacaattacctgtttttctyagtgtcttagacttcccctaggacaagaaagtgaaaagacttgagttacttagagaaggtaagtagagcaaaaagaggcattgaatgatataaacgaagtcagccccaggcttctagatagtatttacctcattcaggaatcagtttgtttccagctgacaaagacaaacgtcaacacagcaattcacctggagcccattgtgactgataacaggcaaatgtctgctgtcagcctatgggtagagggagcacsagcagttacacaaaggatgatcttatgcaagataagaacattcagttaaagcatataactcaatataaaaattactagattgataatcaaggagagggggaaagaaracacttctgccacatcctcctactctccagctaagggtagaagtgacaagacacagctgatcttacaaaacattacacaccaaccctgggccactgcctatccagagacagagcgggcatggagccactgacagcaatgcggtgggtgcttgggaccagcaaggagctctatgtcaaggcaacagggtaaaac

SEQ ID NO: 31176 - DNA, 600 bp, Chicken  19866894253338_3
aagtagagcaaaaagaggcattgaatgatataaacgaagtcagccccaggcttctagatagtatttacctcattcaggaatcagtttgtttccagctgacaaagacaaacgtcaacacagcaattcacctggagcccattgtgactgataacaggcaaatgtctgctgtcagcctatgggtagagggagcacsagcagttacacaaaggatgatcttatgcaagataagaacattcagttaaagcatataactcaatataaaaattactagattgataatcaaggagagggggaaagaaracacttctgccacatcctcctactctccagctaagggtagaagtgacaagacacagctgatcttacaaaacattacacaccaaccctgggccactgcctatccagagacagagcgggcatggagccactgacagcaatgcggtgggtgcttgggaccagcaaggagctctatgtcaaggcaacagggtaaaacatctctcttcgagatacaactctaatatatgcaaatttcatttggaaccattcaagacgtatgaaagttatattaaagtaccttgaaaatgatgccttgtaaaaaac

SEQ ID NO: 31177 - DNA, 600 bp, Chicken  19866894253343_1
caatatcccttggacaaaggaaggctggaggagtgaaactcacagaatttaacaaggacaaattaaaaattctcttcttgggaagtaataaccttttttttagcaatacaggctggggactgactagctgggaagcagctctgctgaaaaggtccagcgggtctaaatggatagcaagttgagcataagtcagcagctttctctggcagcaaagatgacctgcagcaccttggggtgtatgaacagctggtaattcaaagaaagggattattgtcatctactcagcactatgcatgttcsatttcttggctcaccaataaaaggaagatgctgattaactgggatgagttcagtgcagtgccactatgatgggagggccactgtgatgagaaagagcacttgccattatgaggagtgactgggtgactgagacttattaagcctggagaagagaacgctgggaagcctaacagctacctgcctgcctatacttaacaaaaagactcagatgagctctttataggaatgctcaacaggagaaaagacaatgaatgtgtgttcaaatgagggatattctgactggatataaggaaaattttt

SEQ ID NO: 31178 - DNA, 600 bp, Chicken  19866894253345_1
ttttcaggcttgcaaagttgagagactggtagtgatggaagatgacaaatttaaacgttgcctagcctgaaagtcggtttacatgttattgccatcttgacctacagaaataaatatttacctgctagatgagaaatatcttgagtaaaaacatgctacatcatagtcagcatcttagcttgtttttcactggtctgtggctgataaaccaaaggggacccttcagtataatacaggttatcagtcaaattatgaaacacttacaaaatgttcatgttactgaaagccatgcttgtagcrtactgttttcttcctgagccttttcctccctgagctgctgtgtgatgggagcagtgccctgcctcygcttcagcaggaagaggggtttgtcccagggaaagacatyggtttctctttgagaaaatgcgtgttgattggtgaaagagcatcactcaaatgacttgcagggctcaggtcagctgccttttcagactaacagtgactgtgaaggtgtatgtggcaaatagcttttcttacagagtgctctgaatttgctccagtagcaagctatttctcctggtagccaactctgaaacctag

SEQ ID NO: 31179 - DNA, 600 bp, Chicken  19866894253345_2
ctgaaagtcggtttacatgttattgccatcttgacctacagaaataaatatttacctgctagatgagaaatatcttgagtaaaaacatgctacatcatagtcagcatcttagcttgtttttcactggtctgtggctgataaaccaaaggggacccttcagtataatacaggttatcagtcaaattatgaaacacttacaaaatgttcatgttactgaaagccatgcttgtagcrtactgttttcttcctgagccttttcctccctgagctgctgtgtgatgggagcagtgccctgcctcygcttcagcaggaagaggggtttgtcccagggaaagacatyggtttctctttgagaaaatgcgtgttgattggtgaaagagcatcactcaaatgacttgcagggctcaggtcagctgccttttcagactaacagtgactgtgaaggtgtatgtggcaaatagcttttcttacagagtgctctgaatttgctccagtagcaagctatttctcctggtagccaactctgaaacctagatcataattgttgctttttgttgtgagatgttcataattcatgttgtaatgtctcagtgggagaaa

SEQ ID NO: 31180 - DNA, 600 bp, Chicken  19866894253345_3
gaaataaatatttacctgctagatgagaaatatcttgagtaaaaacatgctacatcatagtcagcatcttagcttgtttttcactggtctgtggctgataaaccaaaggggacccttcagtataatacaggttatcagtcaaattatgaaacacttacaaaatgttcatgttactgaaagccatgcttgtagcrtactgttttcttcctgagccttttcctccctgagctgctgtgtgatgggagcagtgccctgcctcygcttcagcaggaagaggggtttgtcccagggaaagacatyggtttctctttgagaaaatgcgtgttgattggtgaaagagcatcactcaaatgacttgcagggctcaggtcagctgccttttcagactaacagtgactgtgaaggtgtatgtggcaaatagcttttcttacagagtgctctgaatttgctccagtagcaagctatttctcctggtagccaactctgaaacctagatcataattgttgctttttgttgtgagatgttcataattcatgttgtaatgtctcagtgggagaaagaaagaagaagccttcactcagcatccaaaagagcatgtt

SEQ ID NO: 31181 - DNA, 600 bp, Chicken  19866894253346_1
tgatcacctgatcctctttctttttaatttcatctctaagcccaaccagggggacaagtctgaaagaacagcagtacacaatagctcaccacaaacacagtaggggaataggacttctccacattatgttaaacttcatattgctttttgctccaagctctgatttccccttacttttaaggtaaggggattctttccagaacagcagtatgtatatatctctgaacaaacaacgactcttcctttgatcacattccttccatttttacataatacaattttatctgcaactgagctcartgtgcaacatacactagcaacttaccaaaaaccacccactattgtttgccattaaaatgccatactttacattttaaaaaatcaggttgtgagacctttaaatgaagatttggactggtagtggccttgcagagcttagtcagacgacatgagaaagcatcaacacgatctatcagctctgaagacccagggttttgttctgccatccccttcctggctgtttcagaagtactgattttgttcttcytaagcatccccccaaagcagggcagatcatttttaatgtgatcctacagtcgt

SEQ ID NO: 31182 - DNA, 600 bp, Chicken  19866894253346_2
atcacattccttccatttttacataatacaattttatctgcaactgagctcartgtgcaacatacactagcaacttaccaaaaaccacccactattgtttgccattaaaatgccatactttacattttaaaaaatcaggttgtgagacctttaaatgaagatttggactggtagtggccttgcagagcttagtcagacgacatgagaaagcatcaacacgatctatcagctctgaagacccagggttttgttctgccatccccttcctggctgtttcagaagtactgattttgttcttcytaagcatccccccaaagcagggcagatcatttttaatgtgatcctacagtcgtgatgccaaagctttatttttagagcaattatattttaattatttaaatatattttatgaatagcattaggcaatcataytgcttaaaaaaagtaacagtaatgcagatgggctttaacattattacacgagaaagagattaataatattgcgaaattgatgtgaagctgctattccagaraattagcttgaatgctgtacaaaaacaaggaaaagttgtttgttgttttaaactgtaacaagtttac

SEQ ID NO: 31183 - DNA, 600 bp, Chicken  19866894253346_3
aatcaggttgtgagacctttaaatgaagatttggactggtagtggccttgcagagcttagtcagacgacatgagaaagcatcaacacgatctatcagctctgaagacccagggttttgttctgccatccccttcctggctgtttcagaagtactgattttgttcttcytaagcatccccccaaagcagggcagatcatttttaatgtgatcctacagtcgtgatgccaaagctttatttttagagcaattatattttaattatttaaatatattttatgaatagcattaggcaatcataytgcttaaaaaaagtaacagtaatgcagatgggctttaacattattacacgagaaagagattaataatattgcgaaattgatgtgaagctgctattccagaraattagcttgaatgctgtacaaaaacaaggaaaagttgtttgttgttttaaactgtaacaagtttaccactttccgcacactttagatctatctgttgaacaaaacactgcacagaacagaagagctttgatcacagggtcctatgatctctgcttctcacacatacttcttaatgcacagactggaagagaagacgcc

SEQ ID NO: 31184 - DNA, 600 bp, Chicken  19866894253346_4
gaagacccagggttttgttctgccatccccttcctggctgtttcagaagtactgattttgttcttcytaagcatccccccaaagcagggcagatcatttttaatgtgatcctacagtcgtgatgccaaagctttatttttagagcaattatattttaattatttaaatatattttatgaatagcattaggcaatcataytgcttaaaaaaagtaacagtaatgcagatgggctttaacattattacacgagaaagagattaataatattgcgaaattgatgtgaagctgctattccagaraattagcttgaatgctgtacaaaaacaaggaaaagttgtttgttgttttaaactgtaacaagtttaccactttccgcacactttagatctatctgttgaacaaaacactgcacagaacagaagagctttgatcacagggtcctatgatctctgcttctcacacatacttcttaatgcacagactggaagagaagacgccgctgtcccgattcttctgttccctattaatattttaaggttgtgcgaagtatctactgaattttcattgagacgttcctcgtgcttgcagaaatcctatct

SEQ ID NO: 31185 - DNA, 600 bp, Chicken  19866894253347_1
gccagcacggggtgctgcctttgctctttctgtcaactgttgcaacgaacaaggaaatctcctttatttacttcaatctcctcaggtcaaagttgttccctgggctatgtttatttctttcttcccccacaccagtcccaactagtttggctgcgtggggaatgggtttcaggttgcaggtactcgatgtcctcccacagaacagcctgatcggaaagacaagatgatcagatagaccccactgcttctgcaggcagccctccggtgtctggcttttgtttatcagcactggatcctgcrctcacttagcggctcttatctctgcccagcttatctcctgcagtgtctgcacgtaacggattgcctcggccagcagctccatcaccccgcgctctgccaagaggctgcagtgacccccacagcctcgtggaagcacggcagctctggggcagcattcctgtgatgccgatggtgccctggaccccaacctcctgctcctttcttggttctctgggctctccagagcggtgcttttctgcaaatcccaacctgcagccctggggaaatgctctggcagcgtggtcgtcagggtaattctga

SEQ ID NO: 31186 - DNA, 600 bp, Chicken  19866894253347_2
tttctgcaaatcccaacctgcagccctggggaaatgctctggcagcgtggtcgtcagggtaattctgagcgtaggtcttgcaggtagccattaatgagtgactaactggtgatatttaggccccgagccgagatgctgcatatttaaggctattaggacgacttatttgcctagttatgaggagcaatgagtttatatcgtgactaatgctttttttatcaaatggtttcctttgctgcaagataagctgagcaaattggccctcgttaaatgtctgtctcctgcaaactgtcattctgygagctttgctgctctcacagacaaagaggtgcctccgtcagctcttcttacttgttcaaggcaggggcatatgtttaaactgcaacacctcccaaaaattgtaattcaaagcctcagctgagtcctgttccccctcttaacatctcctatcggagcagtgctgttgggaaggggctgtgtgggtccctttcagttcagggtattctgtgattgctttggtggctgctcattgaagctgtctgctgcaaagcctgcagcctcagatttaaagcagcggtgcagaactgctcacccacccct

SEQ ID NO: 31187 - DNA, 600 bp, Chicken  19866894253349_1
tttaggcacagatcaaatcttaaccaaaacagactgttaattcaagggcattttatactctgggatggaggtatagaagttagagatggcatcaggcaaaagcactgtgtactgaggcatgccagtgtgcttccctagatggccatggaagcctttccccatcccctggcagcagacatgagtaacaggggcacttggtaccggtcatttaattttattagtgtgccatagctcaggcaagtatgattctccatcccaatattttgcaccagtatgatgggtacgtgaacacctaatggytgcagyggggcacatctcaagccactcagttcaaggttaccgacatattcttcaaatgtgagcgaagtatttattttttcaataactttttgctgtaaacatggatacaaacaggagctatttttaattcactagattgcacatctttgcaaagctttaagagcatttaacttgctgaaagcttcagcttggtcattttggtcactccacctcacttcwttgcagctgtttcattagatcttgttggtcacctgtgaagagaagagttatggtgacgtactgtagttttgtacagcagat

SEQ ID NO: 31188 - DNA, 600 bp, Chicken  19866894253349_2
cacagatcaaatcttaaccaaaacagactgttaattcaagggcattttatactctgggatggaggtatagaagttagagatggcatcaggcaaaagcactgtgtactgaggcatgccagtgtgcttccctagatggccatggaagcctttccccatcccctggcagcagacatgagtaacaggggcacttggtaccggtcatttaattttattagtgtgccatagctcaggcaagtatgattctccatcccaatattttgcaccagtatgatgggtacgtgaacacctaatggytgcagyggggcacatctcaagccactcagttcaaggttaccgacatattcttcaaatgtgagcgaagtatttattttttcaataactttttgctgtaaacatggatacaaacaggagctatttttaattcactagattgcacatctttgcaaagctttaagagcatttaacttgctgaaagcttcagcttggtcattttggtcactccacctcacttcwttgcagctgtttcattagatcttgttggtcacctgtgaagagaagagttatggtgacgtactgtagttttgtacagcagatacaaat

SEQ ID NO: 31189 - DNA, 600 bp, Chicken  19866894253349_3
agtgtgccatagctcaggcaagtatgattctccatcccaatattttgcaccagtatgatgggtacgtgaacacctaatggytgcagyggggcacatctcaagccactcagttcaaggttaccgacatattcttcaaatgtgagcgaagtatttattttttcaataactttttgctgtaaacatggatacaaacaggagctatttttaattcactagattgcacatctttgcaaagctttaagagcatttaacttgctgaaagcttcagcttggtcattttggtcactccacctcacttcwttgcagctgtttcattagatcttgttggtcacctgtgaagagaagagttatggtgacgtactgtagttttgtacagcagatacaaatcaggaggattgcatttggaggtgtatcatgaaayttaaacaagcaggtttagagaagtcaccctcatccttcctatgagatcactaaagctgccattgcccatgaaccatttaaaagacccgaacaaagggctacttaaggtcctcagttgattgtgcttaatgctgcattttgttcttcctttgttgttttttttctcctacttaatagttg

SEQ ID NO: 31190 - DNA, 600 bp, Chicken  19866894253349_4
cgacatattcttcaaatgtgagcgaagtatttattttttcaataactttttgctgtaaacatggatacaaacaggagctatttttaattcactagattgcacatctttgcaaagctttaagagcatttaacttgctgaaagcttcagcttggtcattttggtcactccacctcacttcwttgcagctgtttcattagatcttgttggtcacctgtgaagagaagagttatggtgacgtactgtagttttgtacagcagatacaaatcaggaggattgcatttggaggtgtatcatgaaayttaaacaagcaggtttagagaagtcaccctcatccttcctatgagatcactaaagctgccattgcccatgaaccatttaaaagacccgaacaaagggctacttaaggtcctcagttgattgtgcttaatgctgcattttgttcttcctttgttgttttttttctcctacttaatagttgctatgttgtgttcttttttctcagtgccagaaagacgtctaatcaaagactgttggagaaatgattctatgattctataattcaatgattctatgaaacggggtatttaaatgctacttct

SEQ ID NO: 31191 - DNA, 600 bp, Chicken  19866894253351_1
gaaaccaggaggtgcagtaaggactcagtagctggtgtctcttggcctatgtgctgcacatcaatgatactggtcagatcacctgaacatattggtacctgagagtatggaatgaatgtaaatgaataaaatctatgcaagaaagaggtaaaaccaacatattcatatatttcgtatataaatatcttctctttccatatggtctcacacagaactttacacactacttcctattatagcatacttatcgcatatatatcatatcatagcagtgtgttcatttgcccctgcagaagctcygaayacatctgcaacactccttccccttcccaagggatgtctccatgtctcccagtgtagcaaagggatggagtgcccacagcaatcagggccacagtgattctcctcattttgccttctgcataacacaaccatgcaacttctataccaagggcatagccccaaaccttggatgctaccagactctggtctcacaccaagtaatattcatatgggctagaacatggcgtctgctgaaatccagaacttggaccacatcaatcaacagtatttgcctctgtttcaagagcaaatacagcc

SEQ ID NO: 31192 - DNA, 600 bp, Chicken  19866894253351_2
ccaggaggtgcagtaaggactcagtagctggtgtctcttggcctatgtgctgcacatcaatgatactggtcagatcacctgaacatattggtacctgagagtatggaatgaatgtaaatgaataaaatctatgcaagaaagaggtaaaaccaacatattcatatatttcgtatataaatatcttctctttccatatggtctcacacagaactttacacactacttcctattatagcatacttatcgcatatatatcatatcatagcagtgtgttcatttgcccctgcagaagctcygaayacatctgcaacactccttccccttcccaagggatgtctccatgtctcccagtgtagcaaagggatggagtgcccacagcaatcagggccacagtgattctcctcattttgccttctgcataacacaaccatgcaacttctataccaagggcatagccccaaaccttggatgctaccagactctggtctcacaccaagtaatattcatatgggctagaacatggcgtctgctgaaatccagaacttggaccacatcaatcaacagtatttgcctctgtttcaagagcaaatacagcctttc

SEQ ID NO: 31193 - DNA, 600 bp, Chicken  19866894253353_1
aaatatagatggatatatatctatatcttacaagctggtgcacaggatcttctctataaatcagcatttacagattaatatttctcactgttgcgaacttacaatccaatcaatagttatattaaaataaatcagtcagaaaaaacttataaataacagcgaggacaagagttagcttaaccctaaagtgccttctaaccacgaatttcttttaaaccacaagaatctgttcttgatttttgagcatttgtattcttccctctgtagactcattctttaactgcaataatataattattstattatattatcctataactgcaataataatcagttatagacaaattctttcaagcaatatttaatccattttcccaagtgttattctagcagtaacttctgaagctgccaactcacttgtacagcagagcaaagatccaaagttctcacaagttcctagaaacattagcaaccacctgcaggtggcctaacataatagactctctagaggataggctgcagcataagtacagctgtctttagtaaggtgccagagaatcagtttgggagagccattacagatgtttcacctacagggta

SEQ ID NO: 31194 - DNA, 600 bp, Chicken  19866894253354_1
aacaagagaatactcatattatgtcacatcaacagttccctgttaactcctgtaaaaggtccttggctcgaggtcctcgaggaacaactcggatcccactgtgcacttctgttctgtcagtgggcagctgtgtaaagtgaaaacccagctctcctgaaccaacccactgccagcatcctcacccggccctgatgtactcagggcaggagaagcaactgattgcttccatccgtttccttcactgcagatagaaaggcagacagtgcagcaaccaccatcagagcacggcccatccacacrgccggctgctgaggcaccgggctgggcagaccatccacctcacccagcacagccccattacagggaggttttgatgacctctgcttgggcagaacttgcctgtacaacttttttaagtagcacggagggactgaattgcacaactgaaaaaggaacagaatctaatggcaatactgtatggaatgggcagacgaggaaaagtcagtcagtattttcttgagctgaagcagaaaataaagctgatgttgtcatctatgcccttttctgagaatggaactcattccaaaatgcctatcccta

SEQ ID NO: 31195 - DNA, 600 bp, Chicken  19866894253355_1
ttagaaaatgtaagaggaatataaagtattcatctttctaatgacaagctccatctccagaatgcaaacaagagtaattttgtgtgatctatcttttgtagtttgatttttatctcaaaggagaagacatgtttatagtcatcttttctagctttaatggaaaacgtgaagttccatatccttgaaagaaatgagacagaaatactgcaagaggcataattgtaccaaacctatctgaaatagcagatgtcattctgattccaggggcatgccattattagagcaatcaaaacagtgctrtgcagtgttaaaggaacgtcagacatagagcagtgtaaaatatagcaaatgaaaattgctgtttctgcttcctctctatcttttctgcttttctggggaggatggagaaggtggaaagcaccaccgccaccactcttgtggctttttgggtttttttgttgtatttttgtcttttttctttttgtcaccctaccatggggaaaagaaatgaaacccaactactgctataacacagtgagagaccacagtcgtctgtagtgggaggtggaaagatgtcaatttggtgcaaaaaaaacgtta

SEQ ID NO: 31196 - DNA, 600 bp, Chicken  19866894253359_1
ctgcattaaccaaaatccatttgtgaattccccaggggacataaaaagggtgtttgttggtttgttaggttcaaattgcctgctggaagtctggcttcagcacacctgcagagcgcagggctttcctttaaaggcagcgccttaacaaatgtcataggacagtgctgtgtgtggttgtttcttcaattatacagttatgcatgcacacagttgaaaagaatcagggctgttttggtgtctcggccttacagcaacatgctggactggtctgtaaatgcagatcaaatgttcaaagcagcmtaggttatttgcaatacrttcctgatgttttttctcccagcttgtggaaggggatgggttagtgttcccgaatccacggcacttcaggctsatatgccaagtccaaaatgcacagtaaatcacgtctgaagtgccattaacaactgccaggctcatgtttaggaaggagaggagctcaraggtgggargctccaacacgtttttcatgttggcgatgagcgatgcttccctttcttgttggagaggagaaacgtgcagccacttgcagatctttgtgatcatcttgcttgtatagcaaga

SEQ ID NO: 31197 - DNA, 600 bp, Chicken  19866894253359_2
atttgtgaattccccaggggacataaaaagggtgtttgttggtttgttaggttcaaattgcctgctggaagtctggcttcagcacacctgcagagcgcagggctttcctttaaaggcagcgccttaacaaatgtcataggacagtgctgtgtgtggttgtttcttcaattatacagttatgcatgcacacagttgaaaagaatcagggctgttttggtgtctcggccttacagcaacatgctggactggtctgtaaatgcagatcaaatgttcaaagcagcmtaggttatttgcaatacrttcctgatgttttttctcccagcttgtggaaggggatgggttagtgttcccgaatccacggcacttcaggctsatatgccaagtccaaaatgcacagtaaatcacgtctgaagtgccattaacaactgccaggctcatgtttaggaaggagaggagctcaraggtgggargctccaacacgtttttcatgttggcgatgagcgatgcttccctttcttgttggagaggagaaacgtgcagccacttgcagatctttgtgatcatcttgcttgtatagcaagaagcaggaatacagagcac

SEQ ID NO: 31198 - DNA, 600 bp, Chicken  19866894253359_3
tggcttcagcacacctgcagagcgcagggctttcctttaaaggcagcgccttaacaaatgtcataggacagtgctgtgtgtggttgtttcttcaattatacagttatgcatgcacacagttgaaaagaatcagggctgttttggtgtctcggccttacagcaacatgctggactggtctgtaaatgcagatcaaatgttcaaagcagcmtaggttatttgcaatacrttcctgatgttttttctcccagcttgtggaaggggatgggttagtgttcccgaatccacggcacttcaggctsatatgccaagtccaaaatgcacagtaaatcacgtctgaagtgccattaacaactgccaggctcatgtttaggaaggagaggagctcaraggtgggargctccaacacgtttttcatgttggcgatgagcgatgcttccctttcttgttggagaggagaaacgtgcagccacttgcagatctttgtgatcatcttgcttgtatagcaagaagcaggaatacagagcaccagtgctagaaagcagctgagttctgcaggtgacattgttttgttagttctcttagtgtgtaccttgtgctac

SEQ ID NO: 31199 - DNA, 600 bp, Chicken  19866894253359_4
tcttcaattatacagttatgcatgcacacagttgaaaagaatcagggctgttttggtgtctcggccttacagcaacatgctggactggtctgtaaatgcagatcaaatgttcaaagcagcmtaggttatttgcaatacrttcctgatgttttttctcccagcttgtggaaggggatgggttagtgttcccgaatccacggcacttcaggctsatatgccaagtccaaaatgcacagtaaatcacgtctgaagtgccattaacaactgccaggctcatgtttaggaaggagaggagctcaraggtgggargctccaacacgtttttcatgttggcgatgagcgatgcttccctttcttgttggagaggagaaacgtgcagccacttgcagatctttgtgatcatcttgcttgtatagcaagaagcaggaatacagagcaccagtgctagaaagcagctgagttctgcaggtgacattgttttgttagttctcttagtgtgtaccttgtgctaccagaaacgtgaggatggggtggtttagcttgttctctgttgtatgctgtatctgaagctggaatatgatgtgaacctagatagcatcc

SEQ ID NO: 31200 - DNA, 600 bp, Chicken  19866894253359_5
atacagttatgcatgcacacagttgaaaagaatcagggctgttttggtgtctcggccttacagcaacatgctggactggtctgtaaatgcagatcaaatgttcaaagcagcmtaggttatttgcaatacrttcctgatgttttttctcccagcttgtggaaggggatgggttagtgttcccgaatccacggcacttcaggctsatatgccaagtccaaaatgcacagtaaatcacgtctgaagtgccattaacaactgccaggctcatgtttaggaaggagaggagctcaraggtgggargctccaacacgtttttcatgttggcgatgagcgatgcttccctttcttgttggagaggagaaacgtgcagccacttgcagatctttgtgatcatcttgcttgtatagcaagaagcaggaatacagagcaccagtgctagaaagcagctgagttctgcaggtgacattgttttgttagttctcttagtgtgtaccttgtgctaccagaaacgtgaggatggggtggtttagcttgttctctgttgtatgctgtatctgaagctggaatatgatgtgaacctagatagcatccctttgttcc

SEQ ID NO: 31201 - DNA, 600 bp, Chicken  19866894253363_1
ctgataattgtttcctgggaaaagtgggaaagagagtggtttcatttctgtgcaaagaatgacattcaatcagtgtagtgcatttctaaactgagtttctgtgcaacaaatcaggcatctgttaggtctttgcaggcatactcaacaagtcttttgccaaagccttcctctgctgtcaagagtgttttccagagtctaagaaatagaaacttcatctcaagtaaattggagcaataattaatcatctgtgaaatctcccagatagtgaaaaatacttaatcttagtgtgatgttcttaaygtgattccacctttaagttctacatgacaagatgaagcttactcacgtgtctagctggttggcatttgatgcagaaaaggcatttagacataacttgactgtattttagaacaaaaagttgctgtgacgcaacattattcagttaccagaaaaatctttctagatacatacatatgcaaaacagaaatctgtactcrggactctgctgtgggaaagtgaatcccatttttttttttttactgttttgatgatgtattttgttaatacatgacctttagtagtttacttcataatggtgtt

SEQ ID NO: 31202 - DNA, 600 bp, Chicken  19866894253363_2
aagaaatagaaacttcatctcaagtaaattggagcaataattaatcatctgtgaaatctcccagatagtgaaaaatacttaatcttagtgtgatgttcttaaygtgattccacctttaagttctacatgacaagatgaagcttactcacgtgtctagctggttggcatttgatgcagaaaaggcatttagacataacttgactgtattttagaacaaaaagttgctgtgacgcaacattattcagttaccagaaaaatctttctagatacatacatatgcaaaacagaaatctgtactcrggactctgctgtgggaaagtgaatcccatttttttttttttactgttttgatgatgtattttgttaatacatgacctttagtagtttacttcataatggtgttaaaattccaagaactatgtagggatttttattctgggattctaggaaactgatggttgacacaccaacctcattcagtgcaattttttcatacatatttatgccactcctataactgattcccttcccacctgcttacatagctattattattattattattttaagtttccatggcaggcatttatctggtgttta

SEQ ID NO: 31203 - DNA, 600 bp, Chicken  19866894253365_1
attatagtcaagcgagtataaactccggtttactggactcttgatcttccacttttaggaatggacggttgaatagattctacttaaatacgaaccagaagtgccaatttcgtaaaatgccagggagattgttctctgagtgccctgtcattaagtaatgacttctcctgactgcaccgctcgattttctgatgactgtatgtctgtaaggatccacacactaaggaggtcaaaaaaaaaaagaaaaaaaagaaaagagtgggtgctcagttgttggagtgctgacaagagcagtgtacytgtcactgttttatttgatgctgatagatattcctacttctctacaatatktttatacagtgctatgaacctgcagcgtatgaaatagtaaaatctgtcgtgaaatgtattgcaataattacagatgttgtagatacatatttgcatgtgtgcacatacataaaatgttttcagattggaaacactctccaagtgcttgacttgtcacctgcttgagtgacaaacattggaattggctggtttattaacccatctatgaatataaatgttgggaaatctgactttagttaccagattatg

SEQ ID NO: 31204 - DNA, 567 bp, Chicken  19866894253365_2
cttttaggaatggacggttgaatagattctacttaaatacgaaccagaagtgccaatttcgtaaaatgccagggagattgttctctgagtgccctgtcattaagtaatgacttctcctgactgcaccgctcgattttctgatgactgtatgtctgtaaggatccacacactaaggaggtcaaaaaaaaaaagaaaaaaaagaaaagagtgggtgctcagttgttggagtgctgacaagagcagtgtacytgtcactgttttatttgatgctgatagatattcctacttctctacaatatktttatacagtgctatgaacctgcagcgtatgaaatagtaaaatctgtcgtgaaatgtattgcaataattacagatgttgtagatacatatttgcatgtgtgcacatacataaaatgttttcagattggaaacactctccaagtgcttgacttgtcacctgcttgagtgacaaacattggaattggctggtttattaacccatctatgaatataaatgttgggaaatctgactttagttaccagattatgtgataaatgtcatcaaat

SEQ ID NO: 31205 - DNA, 600 bp, Chicken  19866894253367_1
aagtaggcagatgtgaatataagttgcttttctttggtcaaagtataaataataccaaagctatttcagtggttttaatgtgcttcaggtttgaaacatcaaattaatcaataatgcttccgtcaacctatgaaattaaacagtacaaaagttagaatcacctgttactaataggtgtcaaatgtcggagggcccttgagtcactcttaatttcagtaagtgctctcatccaaatatttgtgagcatggtctttcctgaaaatacattgaacaagcatggtgaatgaatgtgctttccarcgcttccagttgtggcatcagagtgcatcagagagatacaaaagatttagtcctttgtttgaaataatttggtctgaagcttgggctttgcacagttttgctcactaatcttccaccagttcagtatacttttagactgacataaatgtcttttgggtaatccctcacacacatgaagacagctgcccgtgtctgttctgggtgggcaaagcttttataccgctgtagttaagactgaagtacaggcctgcacagggagaaatgcatttcttgctgaattagatagtctgagaaaaagca

SEQ ID NO: 31206 - DNA, 600 bp, Chicken  19866894253374_1
aaaggcagttctttgtcaagactgttgttttttgtattgtgaagcgtttgtgtcctgttttgttatcttttcattgtttttttttcttatttgggtggtttttgtttttatgcttgtaattggtttatttattcatagctgtctccaagaaagaaatttcatccgctttgagtgtgagtttagatgtgctaattgtagtccaattctatcgtaaaaacatttttatgtgtactttgacaaatggaacctgagcataaaacctggagttttattgtttcaggtgttgagacaaaggtattyrctgtccctctraaaaagtgtaagaaatttagatatgcagatccagagagcaaaactgcagggttctgttgttgcctggagcacaccagcatgctttcttagctcattgttgaagaaaagaacaatctgactgtgtgctagctggyratatgcagtgtaaatagctctgtatttcatcagtttcattcaacagtttatacccaccttaaccagcaaagaatgttagctgagacacagaagtgtsaggcagcatagtaaataaatgcagggcagtaaatactgtgttctcaatttacctct

SEQ ID NO: 31207 - DNA, 600 bp, Chicken  19866894253374_2
aaggcagttctttgtcaagactgttgttttttgtattgtgaagcgtttgtgtcctgttttgttatcttttcattgtttttttttcttatttgggtggtttttgtttttatgcttgtaattggtttatttattcatagctgtctccaagaaagaaatttcatccgctttgagtgtgagtttagatgtgctaattgtagtccaattctatcgtaaaaacatttttatgtgtactttgacaaatggaacctgagcataaaacctggagttttattgtttcaggtgttgagacaaaggtattyrctgtccctctraaaaagtgtaagaaatttagatatgcagatccagagagcaaaactgcagggttctgttgttgcctggagcacaccagcatgctttcttagctcattgttgaagaaaagaacaatctgactgtgtgctagctggyratatgcagtgtaaatagctctgtatttcatcagtttcattcaacagtttatacccaccttaaccagcaaagaatgttagctgagacacagaagtgtsaggcagcatagtaaataaatgcagggcagtaaatactgtgttctcaatttacctctg

SEQ ID NO: 31208 - DNA, 600 bp, Chicken  19866894253374_3
ttgtcaagactgttgttttttgtattgtgaagcgtttgtgtcctgttttgttatcttttcattgtttttttttcttatttgggtggtttttgtttttatgcttgtaattggtttatttattcatagctgtctccaagaaagaaatttcatccgctttgagtgtgagtttagatgtgctaattgtagtccaattctatcgtaaaaacatttttatgtgtactttgacaaatggaacctgagcataaaacctggagttttattgtttcaggtgttgagacaaaggtattyrctgtccctctraaaaagtgtaagaaatttagatatgcagatccagagagcaaaactgcagggttctgttgttgcctggagcacaccagcatgctttcttagctcattgttgaagaaaagaacaatctgactgtgtgctagctggyratatgcagtgtaaatagctctgtatttcatcagtttcattcaacagtttatacccaccttaaccagcaaagaatgttagctgagacacagaagtgtsaggcagcatagtaaataaatgcagggcagtaaatactgtgttctcaatttacctctgagtttttttca

SEQ ID NO: 31209 - DNA, 600 bp, Chicken  19866894253374_4
aagaaagaaatttcatccgctttgagtgtgagtttagatgtgctaattgtagtccaattctatcgtaaaaacatttttatgtgtactttgacaaatggaacctgagcataaaacctggagttttattgtttcaggtgttgagacaaaggtattyrctgtccctctraaaaagtgtaagaaatttagatatgcagatccagagagcaaaactgcagggttctgttgttgcctggagcacaccagcatgctttcttagctcattgttgaagaaaagaacaatctgactgtgtgctagctggyratatgcagtgtaaatagctctgtatttcatcagtttcattcaacagtttatacccaccttaaccagcaaagaatgttagctgagacacagaagtgtsaggcagcatagtaaataaatgcagggcagtaaatactgtgttctcaatttacctctgagtttttttcagtcatttggattagagacaaaaagctgctgttaggaaaggtgacaagtcctaacattactgtgtatttcgaaacctcaaatagtaagtattgattacttcaggaagagaggggaaaggtcagttgttatttcgt

SEQ ID NO: 31210 - DNA, 600 bp, Chicken  19866894253374_5
agaaagaaatttcatccgctttgagtgtgagtttagatgtgctaattgtagtccaattctatcgtaaaaacatttttatgtgtactttgacaaatggaacctgagcataaaacctggagttttattgtttcaggtgttgagacaaaggtattyrctgtccctctraaaaagtgtaagaaatttagatatgcagatccagagagcaaaactgcagggttctgttgttgcctggagcacaccagcatgctttcttagctcattgttgaagaaaagaacaatctgactgtgtgctagctggyratatgcagtgtaaatagctctgtatttcatcagtttcattcaacagtttatacccaccttaaccagcaaagaatgttagctgagacacagaagtgtsaggcagcatagtaaataaatgcagggcagtaaatactgtgttctcaatttacctctgagtttttttcagtcatttggattagagacaaaaagctgctgttaggaaaggtgacaagtcctaacattactgtgtatttcgaaacctcaaatagtaagtattgattacttcaggaagagaggggaaaggtcagttgttatttcgtg

SEQ ID NO: 31211 - DNA, 600 bp, Chicken  19866894253374_6
aacctgagcataaaacctggagttttattgtttcaggtgttgagacaaaggtattyrctgtccctctraaaaagtgtaagaaatttagatatgcagatccagagagcaaaactgcagggttctgttgttgcctggagcacaccagcatgctttcttagctcattgttgaagaaaagaacaatctgactgtgtgctagctggyratatgcagtgtaaatagctctgtatttcatcagtttcattcaacagtttatacccaccttaaccagcaaagaatgttagctgagacacagaagtgtsaggcagcatagtaaataaatgcagggcagtaaatactgtgttctcaatttacctctgagtttttttcagtcatttggattagagacaaaaagctgctgttaggaaaggtgacaagtcctaacattactgtgtatttcgaaacctcaaatagtaagtattgattacttcaggaagagaggggaaaggtcagttgttatttcgtgtgcagcaggatgtttttgttttaaggtctaattaccaaattagatcataagcttgaaaattaaagaataatgaagcagtagttcaggaattaggttt

SEQ ID NO: 31212 - DNA, 600 bp, Chicken  19866894253377_1
ttctagcacggctttaaccttgctgtgaagtgttcaggctggggtatgatttctggcattaaatgaagctccgtcataacttttctgaccatggagttaccaaaagtgtggaaacttcaatcttctataactcacagaagtggatggaaagtcgattcagttaagctagtggctgtaatctgaccatgcaggtggtgttcaaatagtaactgcatcttcacactgtaacaaactgttagcagtggtttaattcaggcagccttagttcaaacacttggactgaagcagcggttcatctcrtaacagagatgatgaacaaagtagtcccaagctgtgcagttgttgaactttgtgaaagttctgtattggcagttctgtatagcagccaggagagaactgtgttatactttcatttttcagaccattatgatctcttagcttaaactggtgtaagaaagtgtgcgttgcggacagaaggctgctacagctggagagctgccttccacccaggagtgcaaaagtcaaataggtgaaataatttgtaaaatataacttaatgtaaggagtgttctgaggagttgcttgctgtacctctggaac

SEQ ID NO: 31213 - DNA, 600 bp, Chicken  19866894253377_2
ctcttagcttaaactggtgtaagaaagtgtgcgttgcggacagaaggctgctacagctggagagctgccttccacccaggagtgcaaaagtcaaataggtgaaataatttgtaaaatataacttaatgtaaggagtgttctgaggagttgcttgctgtacctctggaactgcttttcatgagccatgtggtttctcctgtgtcctcatggcctggatctgtaacactctggggaccgattgcaagtgtgtctgctgttctgtctttcagtgtgttcagaaaattgcttgctctgttcagktggtggrtgtcttytgctcacctaaactgcaaggtccgtacagagcttgggcccgttttctctttgctgcacttgagcattcccaaagagtgtcttttagatggcaccttccaactgtggtggtctgttggggcactagcacttgtgaactgtgttgtctgttgaattgcttcagaagactgtgagcaaccaatatgattgtgaagtcggccctcatttgagcaggtgtaggtctagatgaactccaaagaaaccttccaacccaacttttccttaccctgtggtttgtaacggcatatg

SEQ ID NO: 31214 - DNA, 600 bp, Chicken  19866894253377_3
cttaaactggtgtaagaaagtgtgcgttgcggacagaaggctgctacagctggagagctgccttccacccaggagtgcaaaagtcaaataggtgaaataatttgtaaaatataacttaatgtaaggagtgttctgaggagttgcttgctgtacctctggaactgcttttcatgagccatgtggtttctcctgtgtcctcatggcctggatctgtaacactctggggaccgattgcaagtgtgtctgctgttctgtctttcagtgtgttcagaaaattgcttgctctgttcagktggtggrtgtcttytgctcacctaaactgcaaggtccgtacagagcttgggcccgttttctctttgctgcacttgagcattcccaaagagtgtcttttagatggcaccttccaactgtggtggtctgttggggcactagcacttgtgaactgtgttgtctgttgaattgcttcagaagactgtgagcaaccaatatgattgtgaagtcggccctcatttgagcaggtgtaggtctagatgaactccaaagaaaccttccaacccaacttttccttaccctgtggtttgtaacggcatatgattgtgc

SEQ ID NO: 31215 - DNA, 600 bp, Chicken  19866894253377_4
tggtgtaagaaagtgtgcgttgcggacagaaggctgctacagctggagagctgccttccacccaggagtgcaaaagtcaaataggtgaaataatttgtaaaatataacttaatgtaaggagtgttctgaggagttgcttgctgtacctctggaactgcttttcatgagccatgtggtttctcctgtgtcctcatggcctggatctgtaacactctggggaccgattgcaagtgtgtctgctgttctgtctttcagtgtgttcagaaaattgcttgctctgttcagktggtggrtgtcttytgctcacctaaactgcaaggtccgtacagagcttgggcccgttttctctttgctgcacttgagcattcccaaagagtgtcttttagatggcaccttccaactgtggtggtctgttggggcactagcacttgtgaactgtgttgtctgttgaattgcttcagaagactgtgagcaaccaatatgattgtgaagtcggccctcatttgagcaggtgtaggtctagatgaactccaaagaaaccttccaacccaacttttccttaccctgtggtttgtaacggcatatgattgtgcattgagt

SEQ ID NO: 31216 - DNA, 600 bp, Chicken  19866894253379_1
acaggccaggaaggcaatgtggcagagctgctttttatgtgagagaataactggaatgtatcaagctctgctgcaggatgaatgatgaatgagtggagaactaatgggtgagaattaaggggcaagataatatgggtgacgcctttgtgggtgtttactgcagccatctggttaggagcaggaagttgaggaagcattctacaggtagctgaaaggtgttaaggggcctggagcatcttttatatgaggaaagactgagagacctggggcagttcagcttggagaagaggaggctgagakgggtcttatcaatgcctacaaacaactaatggatgagagtcaagtgtatggggccaggctcttttcagtggtgtccagcaacagagcaaggggcaatgggcccaaactgaaacataggaagctccatatgaacatgagaaaaggtttctttacttcagcagaacactggaactggttgcccagagaagctgtggagtctccttctctggagatgtttaaaacccagctggatgctttcctgtgtaacttgctgtagtaactgctttggagaggttgggcttggatgatctccagacatcc

SEQ ID NO: 31217 - DNA, 600 bp, Chicken  19866894253382_1
agtttcagctcttaaaggtgtttatttttttggtgaaagctggagattgagcgtaataaatctagatgttataattgagagagaaattagtagactcagcagtctttgatggcaaagtattctttgggagaggtaaaggtttgaaattgttagtttgaggaagaggaaaggacctgtaggaagacaaaagagcatacacccactaaaaaaagcatcctaacttcaataaaccctaaagcctcccaaaacattcttcagagaaatgcttttcctccaagtctttaaactggttaggcctckttttttttgttcagacagtaggtgttgtgcagatgaggtgttggaattgcaaggtgtcttcagatactgtatgcataaaagatgtaggagcttaaggrtatatcactgaaaaaggacctktaatagcacagagaacatgatgctggagaactgtgatttgctaagagccatttagaatgctactgcaaaaatgttgtttaatttaggattttgttgtaattgaaataaaaataagtggatggaggcaggaagatcttttctgggaggccaatgtagctatgtgataccacctgaaataag

SEQ ID NO: 31218 - DNA, 600 bp, Chicken  19866894253382_2
gtttcagctcttaaaggtgtttatttttttggtgaaagctggagattgagcgtaataaatctagatgttataattgagagagaaattagtagactcagcagtctttgatggcaaagtattctttgggagaggtaaaggtttgaaattgttagtttgaggaagaggaaaggacctgtaggaagacaaaagagcatacacccactaaaaaaagcatcctaacttcaataaaccctaaagcctcccaaaacattcttcagagaaatgcttttcctccaagtctttaaactggttaggcctctktttttttgttcagacagtaggtgttgtgcagatgaggtgttggaattgcaaggtgtcttcagatactgtatgcataaaagatgtaggagcttaaggrtatatcactgaaaaaggacctktaatagcacagagaacatgatgctggagaactgtgatttgctaagagccatttagaatgctactgcaaaaatgttgtttaatttaggattttgttgtaattgaaataaaaataagtggatggaggcaggaagatcttttctgggaggccaatgtagctatgtgataccacctgaaataagt

SEQ ID NO: 31219 - DNA, 557 bp, Chicken  19866894253382_3
gcagtctttgatggcaaagtattctttgggagaggtaaaggtttgaaattgttagtttgaggaagaggaaaggacctgtaggaagacaaaagagcatacacccactaaaaaaagcatcctaacttcaataaaccctaaagcctcccaaaacattcttcagagaaatgcttttcctccaagtctttaaactggttaggcctctttttttttgttcagacagtaggtgttgtgcagatgaggtgttggaattgcaaggtgtcttcagatactgtatgcataaaagatgtaggagcttaaggrtatatcactgaaaaaggacctktaatagcacagagaacatgatgctggagaactgtgatttgctaagagccatttagaatgctactgcaaaaatgttgtttaatttaggattttgttgtaattgaaataaaaataagtggatggaggcaggaagatcttttctgggaggccaatgtagctatgtgataccacctgaaataagtcagaatttttaatattttaacacgatttcagtttaaaaggcttcttgttcccat

SEQ ID NO: 31220 - DNA, 535 bp, Chicken  19866894253382_4
tctttgggagaggtaaaggtttgaaattgttagtttgaggaagaggaaaggacctgtaggaagacaaaagagcatacacccactaaaaaaagcatcctaacttcaataaaccctaaagcctcccaaaacattcttcagagaaatgcttttcctccaagtctttaaactggttaggcctctttttttttgttcagacagtaggtgttgtgcagatgaggtgttggaattgcaaggtgtcttcagatactgtatgcataaaagatgtaggagcttaaggrtatatcactgaaaaaggacctktaatagcacagagaacatgatgctggagaactgtgatttgctaagagccatttagaatgctactgcaaaaatgttgtttaatttaggattttgttgtaattgaaataaaaataagtggatggaggcaggaagatcttttctgggaggccaatgtagctatgtgataccacctgaaataagtcagaatttttaatattttaacacgatttcagtttaaaaggcttcttgttcccat

SEQ ID NO: 31221 - DNA, 600 bp, Chicken  19866894253383_1
cagaccattttccattcctcattctttccctcacttcaaatcacactttgggatcatctttgattttgacaaatgtcatcttcaaatcaagcttgtatatacttgcggattttctgttttcaacttcaaccatggatacaatggcagtttggtattcccttgcagtactatttccaggattaagaatagaattattttcacctatcctcctcctttggaaaattgctaaaaaagtctattctgtcttcctcttttcccatttctatactgtttgtttgtttttggtttttattttttttycttctccattaaatcaaatgtactctacttgtttttattcccatgtctgtgtacggtcatatttaaaaagaaaattttgacttctcataattaaattcaatgttttagtacctattatttttagtaggatagtagatgtcttgaccttattttaaatacatcttaaaaacatttattttcagagatatctctaggagcatgaaaatgtaacacttctgttgcctgatgatcactatctctcattttcttgtgcagttacaattgactgcctccagtttttgtttgctatataccataagc

SEQ ID NO: 31222 - DNA, 600 bp, Chicken  19866894253386_1
tggatatgtgagcgctatggaacagcagcgctgcaaggaaggccacgctgcggccagagatggctgctgtaccctgagacattcaggtgatggctcagctatcttctgagtggagcctgggggatttaactgctattttttggggtgttagcctattttctccccagtgcctaaaacaagagctctattcacagcactgcctgcaggctcgcctgcccagcctggagaaaacatctgagcacgttgcctaacccaaccacaggcagcagagccatcagctgacaatccccagacctcacrgcaggatgggagagagccagacaccatcccatcaacagaccaaccacttggcagcagcaggcctgccctatctgacgggctgtgcccacagaggtcacgcagaccccacatgtgtgcacgtgccccatgcccagcaccagcagtggtccctgggggctcgtttctgccctcaccttccacctccatcacgtgttatttgggtgaattgcagcagggagcccaccacatgactaacaaacacaagaacttccctgcttttgtctccctgctccctctcaggacctctgttgttttggtttt

SEQ ID NO: 31223 - DNA, 600 bp, Chicken  19866894253386_2
cttttgtctccctgctccctctcaggacctctgttgttttggttttttccccttgcatcaacatcaaaccctctcccttagcctgtgattactgcataggaacccctcagcaatgcaaccatccctttgggctctccagcttgagaagctggctgcccacactgggtttatttggtgtttgtttgtttaatggcccagttaggaaactgggagcgggtgatggaggagatgcacgcataccgtggtgagccctggctaaagcctggaacctctgcagcctaaaccaggcagtgtcaggcygtgctgacaycacatccttcacaatgaaaacatggggatatcactccattcctccctgagaaagccagctgtgggggagcaccaagctgaacctcagactgggacagcagcacagctcctggccttggttcctccacaggagcacacgtaatgggctgcagccccaggagtgagctttgctgcccggatttccacctgcctccttcctgcagcatcrggggggggtcagtctgacatccataagctctgtaaagctgtccatggttaatcacaacaaacycacagactttgccccagcrc

SEQ ID NO: 31224 - DNA, 600 bp, Chicken  19866894253386_3
cctgctccctctcaggacctctgttgttttggttttttccccttgcatcaacatcaaaccctctcccttagcctgtgattactgcataggaacccctcagcaatgcaaccatccctttgggctctccagcttgagaagctggctgcccacactgggtttatttggtgtttgtttgtttaatggcccagttaggaaactgggagcgggtgatggaggagatgcacgcataccgtggtgagccctggctaaagcctggaacctctgcagcctaaaccaggcagtgtcaggcygtgctgacaycacatccttcacaatgaaaacatggggatatcactccattcctccctgagaaagccagctgtgggggagcaccaagctgaacctcagactgggacagcagcacagctcctggccttggttcctccacaggagcacacgtaatgggctgcagccccaggagtgagctttgctgcccggatttccacctgcctccttcctgcagcatcrggggggggtcagtctgacatccataagctctgtaaagctgtccatggttaatcacaacaaacycacagactttgccccagcrcagacactgct

SEQ ID NO: 31225 - DNA, 600 bp, Chicken  19866894253386_4
tgatggaggagatgcacgcataccgtggtgagccctggctaaagcctggaacctctgcagcctaaaccaggcagtgtcaggcygtgctgacaycacatccttcacaatgaaaacatggggatatcactccattcctccctgagaaagccagctgtgggggagcaccaagctgaacctcagactgggacagcagcacagctcctggccttggttcctccacaggagcacacgtaatgggctgcagccccaggagtgagctttgctgcccggatttccacctgcctccttcctgcagcatcrggggggggtcagtctgacatccataagctctgtaaagctgtccatggttaatcacaacaaacycacagactttgccccagcrcagacactgctgctcctccaccttttatcccttctatagaagaaactgtgcagatgatgtagggatcaactgtgcaacttctcagttttatgtaaacagaaactctcctgagggacgccctggctgctgtagttttgtattacattgcatacagcagcacagtcgacacagaatacagaacctggcccacagcaagtacgagaagcagacacaaagga

SEQ ID NO: 31226 - DNA, 600 bp, Chicken  19866894253386_5
gatggaggagatgcacgcataccgtggtgagccctggctaaagcctggaacctctgcagcctaaaccaggcagtgtcaggcygtgctgacaycacatccttcacaatgaaaacatggggatatcactccattcctccctgagaaagccagctgtgggggagcaccaagctgaacctcagactgggacagcagcacagctcctggccttggttcctccacaggagcacacgtaatgggctgcagccccaggagtgagctttgctgcccggatttccacctgcctccttcctgcagcatcrrgggggggtcagtctgacatccataagctctgtaaagctgtccatggttaatcacaacaaacycacagactttgccccagcrcagacactgctgctcctccaccttttatcccttctatagaagaaactgtgcagatgatgtagggatcaactgtgcaacttctcagttttatgtaaacagaaactctcctgagggacgccctggctgctgtagttttgtattacattgcatacagcagcacagtcgacacagaatacagaacctggcccacagcaagtacgagaagcagacacaaaggag

SEQ ID NO: 31227 - DNA, 600 bp, Chicken  19866894253386_6; identical to SEQ ID NO: 31226

SEQ ID NO: 31228 - DNA, 600 bp, Chicken  19866894253386_7
aaaccaggcagtgtcaggcygtgctgacaycacatccttcacaatgaaaacatggggatatcactccattcctccctgagaaagccagctgtgggggagcaccaagctgaacctcagactgggacagcagcacagctcctggccttggttcctccacaggagcacacgtaatgggctgcagccccaggagtgagctttgctgcccggatttccacctgcctccttcctgcagcatcrggggggggtcagtctgacatccataagctctgtaaagctgtccatggttaatcacaacaaacycacagactttgccccagcrcagacactgctgctcctccaccttttatcccttctatagaagaaactgtgcagatgatgtagggatcaactgtgcaacttctcagttttatgtaaacagaaactctcctgagggacgccctggctgctgtagttttgtattacattgcatacagcagcacagtcgacacagaatacagaacctggcccacagcaagtacgagaagcagacacaaaggagagcgtctctgtcaacttcccctgcttagctttcagatcatggcagagcaagcagagccagag

SEQ ID NO: 31229 - DNA, 600 bp, Chicken  19866894253386_8
ygtgctgacaycacatccttcacaatgaaaacatggggatatcactccattcctccctgagaaagccagctgtgggggagcaccaagctgaacctcagactgggacagcagcacagctcctggccttggttcctccacaggagcacacgtaatgggctgcagccccaggagtgagctttgctgcccggatttccacctgcctccttcctgcagcatcrggggggggtcagtctgacatccataagctctgtaaagctgtccatggttaatcacaacaaacycacagactttgccccagcrcagacactgctgctcctccaccttttatcccttctatagaagaaactgtgcagatgatgtagggatcaactgtgcaacttctcagttttatgtaaacagaaactctcctgagggacgccctggctgctgtagttttgtattacattgcatacagcagcacagtcgacacagaatacagaacctggcccacagcaagtacgagaagcagacacaaaggagagcgtctctgtcaacttcccctgcttagctttcagatcatggcagagcaagcagagccagagacagatttctcttccagcc

SEQ ID NO: 31230 - DNA, 600 bp, Chicken  19866894253397_1
gattgagtcactgtccctggtggtgttcaaggaatattaaatgttgtacttaagggcatgatttagtggggaaatattagtggtatgtggacagtcggtcttgatggtcatggaggtcttttccatccttagtgactctacaactctatgtcattgtcccaggtttaatttttcctcagggaaaaccctttttcaagcttttctacagtgatcaataattctactgaagttctctctgcagatagcttattcaagttattcattgtacttacttttacaaactatcttgatattagaacrtcctgcactttaatgtcatcacttcttatctacawaggtatagaaaaatggttgttttctctgttgctgtaaaggagaacactaraagaggaaatcaactgttagagatgtgtaaaaatgaattacagatgttgcatgttagcatgaataatatggttatactagcatgactaatccattttaatagttctccttttcattcctttaccaatcccttgagctactgcaaagcccaaataaaatacttaggtcaacaaagcatgacaaataagtactctctcaagactgtactttctcttt

SEQ ID NO: 31231 - DNA, 600 bp, Chicken  19866894253397_2
attaaatgttgtacttaagggcatgatttagtggggaaatattagtggtatgtggacagtcggtcttgatggtcatggaggtcttttccatccttagtgactctacaactctatgtcattgtcccaggtttaatttttcctcagggaaaaccctttttcaagcttttctacagtgatcaataattctactgaagttctctctgcagatagcttattcaagttattcattgtacttacttttacaaactatcttgatattagaacrtcctgcactttaatgtcatcacttcttatctacawaggtatagaaaaatggttgttttctctgttgctgtaaaggagaacactaraagaggaaatcaactgttagagatgtgtaaaaatgaattacagatgttgcatgttagcatgaataatatggttatactagcatgactaatccattttaatagttctccttttcattcctttaccaatcccttgagctactgcaaagcccaaataaaatacttaggtcaacaaagcatgacaaataagtactctctcaagactgtactttctctttttagcatggccaagaaggacaccagtctgaatttg

SEQ ID NO: 31232 - DNA, 600 bp, Chicken  19866894253397_3
tgtggacagtcggtcttgatggtcatggaggtcttttccatccttagtgactctacaactctatgtcattgtcccaggtttaatttttcctcagggaaaaccctttttcaagcttttctacagtgatcaataattctactgaagttctctctgcagatagcttattcaagttattcattgtacttacttttacaaactatcttgatattagaacrtcctgcactttaatgtcatcacttcttatctacawaggtatagaaaaatggttgttttctctgttgctgtaaaggagaacactaraagaggaaatcaactgttagagatgtgtaaaaatgaattacagatgttgcatgttagcatgaataatatggttatactagcatgactaatccattttaatagttctccttttcattcctttaccaatcccttgagctactgcaaagcccaaataaaatacttaggtcaacaaagcatgacaaataagtactctctcaagactgtactttctctttttagcatggccaagaaggacaccagtctgaatttgaattctttttcatgttytttactgatccaactatttcatgcattcctatt

SEQ ID NO: 31233 - DNA, 600 bp, Chicken  19866894253397_4
tgttttctctgttgctgtaaaggagaacactaraagaggaaatcaactgttagagatgtgtaaaaatgaattacagatgttgcatgttagcatgaataatatggttatactagcatgactaatccattttaatagttctccttttcattcctttaccaatcccttgagctactgcaaagcccaaataaaatacttaggtcaacaaagcatgacaaataagtactctctcaagactgtactttctctttttagcatggccaagaaggacaccagtctgaatttgaattctttttcatgttytttactgatccaactatttcatgcattcctattgaccactcagaaagaaagcagtatgtagtatttggtgtaacataagagaggagattctaagaacaaagaatcatagaaccacctaatcataaaagggcttgaaagcaccttaaagatctagtttgatccctctgctgtgggtagggttgccagtcactgaatcaatctgcctagggcctcatcctgcccttgaacacctctggggatggggcacccacaacctcttcctcagcatactatgagtaaagaatttcctactaagatcta

SEQ ID NO: 31234 - DNA, 600 bp, Chicken  19866894253398_1
tcacagcttctcctcatcaatatttattttccagggacacccccgtgcggcagggctctgccctgtgcctgggatcagcttttcaatgggtttgggcacatggcagggatgtccccatgggccccgtaggtaaccagtgctccaggaccaccttctcccactgtccctgctccctgctgggcaagcccatccctcgcagcttgggctcatacttcctttactctctcaatattagttttacatccatttttctctattgctggctccgagactatttcaaacaggttttcaaaacctgcwatcatgaggctccaaaacttaatttactgcctcccatagcaccttagcatgaatattaggcaaaactaagtaatgttttccatatacttctgttataaagtgctgctctttttgggtaactttcaaaattcttcaaacatatccacttttcttgctgaagatagatcctaaagaggacgtcaatatctcactgatttttgagtcagctttgagtgtaattcatcccattcctcatttctaccggatctgccttatttccacagttactcagtcctggtatattagtccatgttttttaaa

SEQ ID NO: 31235 - DNA, 599 bp, Chicken  19866894253401_1
  misc_feature (1)..(143): n is any nucleotide
nnnnnnnnnnnnnnnnnnnnnnnnnnnnnnnnnnnnnnnnnnnnnnnnnnnnnnnnnnnnnnnnnnnnnnnnnnnnnnnnnnnnnnnnnnnnnnnnnnnnnnnnnnnnnnnnnnnnnnnnnnnnnnnnnnnnnnnnnnnnnnnatgcacgttttcctatcagaatttttttttgcgtggttgtaccatttctgatttattgttgaggaattctctcagttctaaacaaatactactcccatttaaataagagaaataatcatcatctgcatcgtccccagagaggccaacagcctatcarttagaatagtatatgggaaagtcaagcacaaatacccacgcatctcacttaactcaaaccattatcgtgaatcacatccaatctatcacatccattatctatcacatccaaactaagctgcaaaacagcagtctgttctgagactgcataacacgatttaccaacagagtgtttttacatagttttctcttgtattcagaatgtggctttctaaccagattcccttaaaattgtgcatattagaggaaattgcttattttgttcccttatctaggttraattcagatctccatttattc

SEQ ID NO: 31236 - DNA, 585 bp, Chicken  19866894253401_2
agagaggccaacagcctatcarttagaatagtatatgggaaagtcaagcacaaatacccacgcatctcacttaactcaaaccattatcgtgaatcacatccaatctatcacatccattatctatcacatccaaactaagctgcaaaacagcagtctgttctgagactgcataacacgatttaccaacagagtgtttttacatagttttctcttgtattcagaatgtggctttctaaccagattcccttaaaattgtgcatattagaggaaattgcttattttgttcccttatctaggttraattcagatctccatttattccacccacatcagaattccccatctgcctgtctactacaaattaaatggaagctcatactatgagattctgctttaggkaacacaactgccaactacaagctgagctgtgactaaacttttcttcattttactattctttgtctaacaacttaaatttattcagggtttttacccatgtcgtcttccctcagcttcctctgcttaactgacgagcacttctttgcttcagtctttccagatcctaactcatctcctgagagaaag

SEQ ID NO: 31237 - DNA, 486 bp, Chicken  19866894253401_3
ccaatctatcacatccattatctatcacatccaaactaagctgcaaaacagcagtctgttctgagactgcataacacgatttaccaacagagtgtttttacatagttttctcttgtattcagaatgtggctttctaaccagattcccttaaaattgtgcatattagaggaaattgcttattttgttcccttatctaggttraattcagatctccatttattccacccacatcagaattccccatctgcctgtctactacaaattaaatggaagctcatactatgagattctgctttaggkaacacaactgccaactacaagctgagctgtgactaaacttttcttcattttactattctttgtctaacaacttaaatttattcagggtttttacccatgtcgtcttccctcagcttcctctgcttaactgacgagcacttctttgcttcagtctttccagatcctaactcatctcctgagagaaag

SEQ ID NO: 31238 - DNA, 543 bp, Chicken  19866894253403_1
  misc_feature (1)..(178): n is any nucleotide
nnnnnnnnnnnnnnnnnnnnnnnnnnnnnnnnnnnnnnnnnnnnnnnnnnnnnnnnnnnnnnnnnnnnnnnnnnnnnnnnnnnnnnnnnnnnnnnnnnnnnnnnnnnnnnnnnnnnnnnnnnnnnnnnnnnnnnnnnnnnnnnnnnnnnnnnnnnnnnnnnnnnnnnnnnnnnnnnnncgctataccggcctcgcgggcagcgctttgaatcccagccctcccctccctgcacccacaccccacggtcggtgcccccgtcgccttgcagctgcaccgcggggcgttgggctctgctcggygctgccgtgtcggagcggcccggcggggccgtgaggcagacaaaacaagcccagtgcagtttgtctcctgttacgagacggccgcgctgccaaaacacacaagccgctgagctcacccagatgtaccagcgaggggaggggggatcccggctcccgctccccactcacatctgactttaatttcgggaggcgggcgccgggccgggcgctacctgcgggcggggcagcggcaccgagcggcgc

SEQ ID NO: 31239 - DNA, 599 bp, Chicken  19866894253413_1
  misc_feature (1)..(145): n is any nucleotide
nnnnnnnnnnnnnnnnnnnnnnnnnnnnnnnnnnnnnnnnnnnnnnnnnnnnnnnnnnnnnnnnnnnnnnnnnnnnnnnnnnnnnnnnnnnnnnnnnnnnnnnnnnnnnnnnnnnnnnnnnnnnnnnnnnnnnnnnnnnnnnnnnccagcagccccgcgtacagcttggccgtgcccgcgtccgccatctcctgcacgtacacacctgtggggagaggtgcaggcagctgagctgccaggtgacccaccagcccccagcacgcgaaacccatatgggtgatggtcttagataaggtcccytcctacttaagctggtctaccaytccrtggccacggtacctgtgtcaggccggccatggccggaggtgacctggaagccgaaggagccgtgtggcggccgttgtatctccagcaggctggtgccatcggggaacacctccaccacgcggcccaccgtgcgcagccggtcgggtgcaccratgtcctccacgctcagcgagtgccgcggccccgaggccgccttcctgcagggagatgctgtgagcccagcacggcaccgccaggccagggctaagcgtggccgtgtccccgtcccacct

SEQ ID NO: 31240 - DNA, 599 bp, Chicken  19866894253413_2
  misc_feature (1)..(122): n is any nucleotide
nnnnnnnnnnnnnnnnnnnnnnnnnnnnnnnnnnnnnnnnnnnnnnnnnnnnnnnnnnnnnnnnnnnnnnnnnnnnnnnnnnnnnnnnnnnnnnnnnnnnnnnnnnnnnnnnnnnnnnnnnnccagcagccccgcgtacagcttggccgtgcccgcgtccgccatctcctgcacgtacacacctgtggggagaggtgcaggcagctgagctgccaggtgacccaccagcccccagcacgcgaaacccatatgggtgatggtcttagataaggtcccytcctacttaagctggtctaccaytccrtggccacggtacctgtgtcaggccggccatggccggaggtgacctggaagccgaaggagccgtgtggcggccgttgtatctccagcaggctggtgccatcggggaacacctccaccacgcggcccaccgtgcgcagccggtcgggtgcaccratgtcctccacgctcagcgagtgccgcggccccgaggccgccttcctgcagggagatgctgtgagcccagcacggcaccgccaggccagggctaagcgtggccgtgtccccgtcccacctgtccccatcccctggctggggca

SEQ ID NO: 31241 - DNA, 599 bp, Chicken  19866894253413_3
  misc_feature (1)..(118): n is any nucleotide
nnnnnnnnnnnnnnnnnnnnnnnnnnnnnnnnnnnnnnnnnnnnnnnnnnnnnnnnnnnnnnnnnnnnnnnnnnnnnnnnnnnnnnnnnnnnnnnnnnnnnnnnnnnnnnnnnnnnnnccagcagccccgcgtacagcttggccgtgcccgcgtccgccatctcctgcacgtacacacctgtggggagaggtgcaggcagctgagctgccaggtgacccaccagcccccagcacgcgaaacccatatgggtgatggtcttagataaggtcccytcctacttaagctggtctaccaytccrtggccacggtacctgtgtcaggccggccatggccggaggtgacctggaagccgaaggagccgtgtggcggccgttgtatctccagcaggctggtgccatcggggaacacctccaccacgcggcccaccgtgcgcagccggtcgggtgcaccratgtcctccacgctcagcgagtgccgcggccccgaggccgccttcctgcagggagatgctgtgagcccagcacggcaccgccaggccagggctaagcgtggccgtgtccccgtcccacctgtccccatcccctggctggggcagcag

SEQ ID NO: 31242 - DNA, 600 bp, Chicken  19866894253413_4
gtccgccatctcctgcacgtacacacctgtggggagaggtgcaggcagctgagctgccaggtgacccaccagcccccagcacgcgaaacccatatgggtgatggtcttagataaggtcccytcctacttaagctggtctaccaytccrtggccacggtacctgtgtcaggccggccatggccggaggtgacctggaagccgaaggagccgtgtggcggccgttgtatctccagcaggctggtgccatcggggaacacctccaccacgcggcccaccgtgcgcagccggtcgggtgcaccratgtcctccacgctcagcgagtgccgcggccccgaggccgccttcctgcagggagatgctgtgagcccagcacggcaccgccaggccagggctaagcgtggccgtgtccccgtcccacctgtccccatcccctggctggggcagcaggtatgcgctggctcggggcgccctgcccagcaggctgtgcaggctctggacggaggcggctttttggggctggcggaatggtgacacctggaggagcgtgacactgagtgagacgtggcaccccccaatatccccagccgccagaaccctcca

SEQ ID NO: 31243 - DNA, 600 bp, Chicken  19866894253415_1
ctatacgcattttagtgttaactctgaggaacagagaaactttgcggacagctgaagtccatcatcatggtagctgtttatgtctgcgtaagccaactaggaaaaatgcacaccaagtgtggaaatcagaaatctccaacacattcacgtggtatagacactataagtgtaaagggagtagtattgtcaaggctggttacaatatgaggaaaaaaaagtaattcaaagatacttttgggttcagggcagtgtctcaaggccagcaatatctgtttgaacaggaatcatggcgcttggatrttgagtaacagggaaaaggaayatatatggcaaatggtctcactggaatgcacttcatcagcacatgttcattaggaaacttgtagctctataaataataccatccacagacacatgggcaatctctaacattcaggaagtgtcaaagagaagagagacaaaagagctgttagtcactttattgtgttaaatattatctgggttgatagtgaaaggacaaggggctttaaactgagacagggaggtttaggttggatattaggaggaagtttttcacacagagggcggtgacgcactgga

SEQ ID NO: 31244 - DNA, 600 bp, Chicken  19866894253415_2
tctgaggaacagagaaactttgcggacagctgaagtccatcatcatggtagctgtttatgtctgcgtaagccaactaggaaaaatgcacaccaagtgtggaaatcagaaatctccaacacattcacgtggtatagacactataagtgtaaagggagtagtattgtcaaggctggttacaatatgaggaaaaaaaagtaattcaaagatacttttgggttcagggcagtgtctcaaggccagcaatatctgtttgaacaggaatcatggcgcttggatrttgagtaacagggaaaaggaayatatatggcaaatggtctcactggaatgcacttcatcagcacatgttcattaggaaacttgtagctctataaataataccatccacagacacatgggcaatctctaacattcaggaagtgtcaaagagaagagagacaaaagagctgttagtcactttattgtgttaaatattatctgggttgatagtgaaaggacaaggggctttaaactgagacagggaggtttaggttggatattaggaggaagtttttcacacagagggcggtgacgcactggaacaggttgcccaaggaggttgt

SEQ ID NO: 31245 - DNA, 599 bp, Chicken  19866894253419_1
  misc_feature (1)..(73): n is any nucleotide
nnnnnnnnnnnnnnnnnnnnnnnnnnnnnnnnnnnnnnnnnnnnnnnnnnnnnnnnnnnnnnnnnnnnnnnnnggaaactgacagaaaagcaggctagcaaacctctgctgtcaaactgttggcttccaagtccccttaggtctccatctttttgttagcatgcacttcggcaatcagatttttgatccaaagaatggatgacatgagattaaaccatgtgaatgggttcagccgagcccagacatctcctgtcagctccaaaatcacatactcagtatgtgcatatctgcttgaagaaktctggttaaaagggtggaggcagcagacacaaagtaaggtgcactgtggcacagactctctggagtcggtaggacaaacagtggttttgctccaagaaaatgacaagaaccctagaatgttttcaggtcagatatcctccttttgcttgtgctgaattacagagcagtccccaggtgaaacacaacagacaacaaaggttttgtccttctgcagcccagcagactgcccacaacccaaagcaaactacagcaaaaaattaaatggtatcttacatctggcagggaaggtgtttgtttta

SEQ ID NO: 31246 - DNA, 600 bp, Chicken  19866894253422_1
cctggcttttttttgatggcagctttagaatggcctgatgttacttccagagagtaagaaacaaagtctgttttcattccagatcccttcgtatttcaaacttgtggcaagcttctaggaagctgacaacttcaaagcttgatttgtttcagttgtttcacaaagcgacattggtgtacttttcaggctttgcagagaaagagaaagaacaaatcattacgccatataaaggtatcaggtttattaaataatgcgctcatgtaaccagctctttgattgcaatatgataaatcatgcttycctaataagaaatgagtaacactgtttcagatatagtcctactcttcttgtaaggattaagccaactttgtcgtttacmgaaggctccaaactgaatattactatggtggagtttttttggtaatggtagttttcttttttctttttcttttttttaatgacattccaaattctaatttaagtttagtttgaatatttatgtgaagtaggtagcaaaaataatcttttaaaagaaatgaagtctgaaaaggataggctgtatgtttctgtggaatacactggaagtatatacatacacca

SEQ ID NO: 31247 - DNA, 600 bp, Chicken  19866894253422_2
cagatcccttcgtatttcaaacttgtggcaagcttctaggaagctgacaacttcaaagcttgatttgtttcagttgtttcacaaagcgacattggtgtacttttcaggctttgcagagaaagagaaagaacaaatcattacgccatataaaggtatcaggtttattaaataatgcgctcatgtaaccagctctttgattgcaatatgataaatcatgcttycctaataagaaatgagtaacactgtttcagatatagtcctactcttcttgtaaggattaagccaactttgtcgtttacmgaaggctccaaactgaatattactatggtggagtttttttggtaatggtagttttcttttttctttttcttttttttaatgacattccaaattctaatttaagtttagtttgaatatttatgtgaagtaggtagcaaaaataatcttttaaaagaaatgaagtctgaaaaggataggctgtatgtttctgtggaatacactggaagtatatacatacaccactttcacaaagataaattttgttacattcctgtgagtgagagacttctcaggtggttacataaaaccaatcattcataa

SEQ ID NO: 31248 - DNA, 600 bp, Chicken  19866894253426_1
aatcagctaacacaactggattactgcctgcagattgttgggagcagtaagcaaccagcaagcagtgcaggcagtgatatggtgcttactcagattctgaaaaaaattgtggcattttcatgtagcaattgtcacaattagtattacttcactgagaaaagaaatctttggtcaaaagttattaaataaagcatctgtggaccagggtgcaaataaatgtgttttcctttctgtccttaaaaggcccaaggatatttttccccagtgagactgggcattaaacaccaattttcaggtgaygatgttatctacttcccatacgtagaattttgattctggggctgagatcttacactgagagtttttcattttgttctttctgtaaaaagaaattgatccagttggcatttttatatattttagtaggaattaattagaaaatatttgtcttagaaacttgggatgtttggttaaaatcaattgcagttcagggaaggagacagaagttaagctagtccagcatccttgtgcatgccaagacaaaggattttaaagccagtgggaagactgcattttcatattttattttttatacacaat

SEQ ID NO: 31249 - DNA, 600 bp, Chicken  19866894253426_2
agatctgtaagatgtgctgctgtacgtgtgttgtgggtatggagttaatgtgctggaaattcagcacagacttccaagatagaacatgcttctgtatcaatattttagtgtgggaaatggaaaatctcatacctagttcaggactcatttagatttcatatcacctttgaagcttacaactacagcattgccttcaagtcaatagtgtcaaagtattttattaggctgttacatcaatgccacctttgaaaatgtgcttagtgactgaaattattgctgatcatctcacagctgctgttkgagcagcattaagtcccaccccttctctgttgcaggaaatttacagtggcttctggatcgcagtggtacaatttttacccaaactttctgatttttttgaatttgaccaattatacaaggtggcaggcaaaatgcttttaacttctgctgaccactgttgttctcatgtactgcttgatgggggaagtgttcctccttgtcacaaccagctgatttactcgagtcattctatctcactcagctgatgcagaaacaaagagtttagtgcaggctgaggtccatagcactgcctttcatttc

SEQ ID NO: 31250 - DNA, 600 bp, Chicken  19866894253444_1
acttctctagtgctgctcatgtctccttccttcttgccataaagtagttaaattttccattctcagtaacattacactgtccagaaactctaactttatatattagacacaatctgtacaaaagtattttgtataccctcagctggatcagcttaattatgtgtcaaagtgcaaaatacgttttcactattttctagcttctcaagtacatactcacctgctgaattaaactgccagtaagattctcaaaagagaattttgacaaggagaaattgtcagtgtatgaaaatattgagtaaygaatctagataytacagtaaatcaacagagttcagaacttcaattatgtttaagttttgtctggaattactgttactttgtctcccaaggcatctgaagtttctgacatagacaaacttcccacagcaacacagayrtttctcctaaaatgcaaatcacagtgccactgaaggtttcaaagtagtccatattcaagaacatattctgttaatttttacaaggcttgttataaattgcacattttcctcaacaattaaactctgaaacactttacagttatgaacattccagcagycaaat

SEQ ID NO: 31251 - DNA, 600 bp, Chicken  19866894253444_2
ctgctcatgtctccttccttcttgccataaagtagttaaattttccattctcagtaacattacactgtccagaaactctaactttatatattagacacaatctgtacaaaagtattttgtataccctcagctggatcagcttaattatgtgtcaaagtgcaaaatacgttttcactattttctagcttctcaagtacatactcacctgctgaattaaactgccagtaagattctcaaaagagaattttgacaaggagaaattgtcagtgtatgaaaatattgagtaaygaatctagataytacagtaaatcaacagagttcagaacttcaattatgtttaagttttgtctggaattactgttactttgtctcccaaggcatctgaagtttctgacatagacaaacttcccacagcaacacagayrtttctcctaaaatgcaaatcacagtgccactgaaggtttcaaagtagtccatattcaagaacatattctgttaatttttacaaggcttgttataaattgcacattttcctcaacaattaaactctgaaacactttacagttatgaacattccagcagycaaatgcttcatgtact

SEQ ID NO: 31252 - DNA, 600 bp, Chicken  19866894253444_3
cctcagctggatcagcttaattatgtgtcaaagtgcaaaatacgttttcactattttctagcttctcaagtacatactcacctgctgaattaaactgccagtaagattctcaaaagagaattttgacaaggagaaattgtcagtgtatgaaaatattgagtaaygaatctagataytacagtaaatcaacagagttcagaacttcaattatgtttaagttttgtctggaattactgttactttgtctcccaaggcatctgaagtttctgacatagacaaacttcccacagcaacacagayrtttctcctaaaatgcaaatcacagtgccactgaaggtttcaaagtagtccatattcaagaacatattctgttaatttttacaaggcttgttataaattgcacattttcctcaacaattaaactctgaaacactttacagttatgaacattccagcagycaaatgcttcatgtactaaccactcacggcaggtccagcaacasggagagaccttaaggccaacctatgcagcatacaagtaaaggtcatacatacataarcaacttataaatgacttttaactttgctgataaatacgtt

SEQ ID NO: 31253 - DNA, 600 bp, Chicken  19866894253444_4
ctcagctggatcagcttaattatgtgtcaaagtgcaaaatacgttttcactattttctagcttctcaagtacatactcacctgctgaattaaactgccagtaagattctcaaaagagaattttgacaaggagaaattgtcagtgtatgaaaatattgagtaaygaatctagataytacagtaaatcaacagagttcagaacttcaattatgtttaagttttgtctggaattactgttactttgtctcccaaggcatctgaagtttctgacatagacaaacttcccacagcaacacagayrtttctcctaaaatgcaaatcacagtgccactgaaggtttcaaagtagtccatattcaagaacatattctgttaatttttacaaggcttgttataaattgcacattttcctcaacaattaaactctgaaacactttacagttatgaacattccagcagycaaatgcttcatgtactaaccactcacggcaggtccagcaacasggagagaccttaaggccaacctatgcagcatacaagtaaaggtcatacatacataarcaacttataaatgacttttaactttgctgataaatacgttg

SEQ ID NO: 31254 - DNA, 600 bp, Chicken  19866894253444_5
gtaaygaatctagataytacagtaaatcaacagagttcagaacttcaattatgtttaagttttgtctggaattactgttactttgtctcccaaggcatctgaagtttctgacatagacaaacttcccacagcaacacagayrtttctcctaaaatgcaaatcacagtgccactgaaggtttcaaagtagtccatattcaagaacatattctgttaatttttacaaggcttgttataaattgcacattttcctcaacaattaaactctgaaacactttacagttatgaacattccagcagycaaatgcttcatgtactaaccactcacggcaggtccagcaacasggagagaccttaaggccaacctatgcagcatacaagtaaaggtcatacatacataarcaacttataaatgacttttaactttgctgataaatacgttgacattaggtgctttctacagctgttgtgggtctttttggttttttttcttgctttttctacactgttttttgttgggtttttttgtttgtttgtttgtttgtttgttttggktttttttccaccttttattggatgaaaatctgattgaaaaggtcag

SEQ ID NO: 31255 - DNA, 600 bp, Chicken  19866894253444_6
tcaattatgtttaagttttgtctggaattactgttactttgtctcccaaggcatctgaagtttctgacatagacaaacttcccacagcaacacagayrtttctcctaaaatgcaaatcacagtgccactgaaggtttcaaagtagtccatattcaagaacatattctgttaatttttacaaggcttgttataaattgcacattttcctcaacaattaaactctgaaacactttacagttatgaacattccagcagycaaatgcttcatgtactaaccactcacggcaggtccagcaacasggagagaccttaaggccaacctatgcagcatacaagtaaaggtcatacatacataarcaacttataaatgacttttaactttgctgataaatacgttgacattaggtgctttctacagctgttgtgggtctttttggttttttttcttgctttttctacactgttttttgttgggtttttttgtttgtttgtttgtttgtttgttttggktttttttccaccttttattggatgaaaatctgattgaaaaggtcaggaagtttaatttaatttacagttggggcaagcatatatttaaag

SEQ ID NO: 31256 - DNA, 600 bp, Chicken  19866894253444_7
aagtttctgacatagacaaacttcccacagcaacacagayrtttctcctaaaatgcaaatcacagtgccactgaaggtttcaaagtagtccatattcaagaacatattctgttaatttttacaaggcttgttataaattgcacattttcctcaacaattaaactctgaaacactttacagttatgaacattccagcagycaaatgcttcatgtactaaccactcacggcaggtccagcaacasggagagaccttaaggccaacctatgcagcatacaagtaaaggtcatacatacataarcaacttataaatgacttttaactttgctgataaatacgttgacattaggtgctttctacagctgttgtgggtctttttggttttttttcttgctttttctacactgttttttgttgggtttttttgtttgtttgtttgtttgtttgttttggktttttttccaccttttattggatgaaaatctgattgaaaaggtcaggaagtttaatttaatttacagttggggcaagcatatatttaaaggaacttaactcccctattaatagatccaaatattcagtgtccagcagtcctggacaa

SEQ ID NO: 31257 - DNA, 600 bp, Chicken  19866894253444_8
acaattaaactctgaaacactttacagttatgaacattccagcagycaaatgcttcatgtactaaccactcacggcaggtccagcaacasggagagaccttaaggccaacctatgcagcatacaagtaaaggtcatacatacataarcaacttataaatgacttttaactttgctgataaatacgttgacattaggtgctttctacagctgttgtgggtctttttggttttttttcttgctttttctacactgttttttgttgggtttttttgtttgtttgtttgtttgtttgttttggktttttttccaccttttattggatgaaaatctgattgaaaaggtcaggaagtttaatttaatttacagttggggcaagcatatatttaaaggaacttaactcccctattaatagatccaaatattcagtgtccagcagtcctggacaaaagtctacaatgcatatgtccaggttgcattttcctttttcatatttgctgtgtggtccacttgcacaaaccatacaagtctgaagagcagcaagagcagtttgatttactgggagcttacaggcaggtagcatcactgcaacagtcttactg

SEQ ID NO: 31258 - DNA, 600 bp, Chicken  19866894253454_1
cagagatctatgtttactcagtttctgtaataaagtagtgtaatatatacattttcttctagactgtggcaccaaaagaatggtggtgttgatgtttaatactactgctctctaagaaccttctcagacatgaactccatctctcatatttttaaatgtgaagtaagccagaagactgctctcctggattctctacccatctcccaaactctgctgctgacaatatgaaagactgcttttaatgatatgtatatacacacatacaaactctcacacatctgcattcagaaggcaaaggaraaaatgaagttagtagatccagctactaaaggtttaacataattatagaaggtcaagtctgagataccagttagataaggaagtcagtagttcaaaagtgttctgctatgttcagaatgaaattataacagctaaaaatgggatcctttgatcattcatgttccatgccagtgtagcggtatgtaaaagttatcttgggggtttaaaaaaaaaaaaaaaaaaaaaagtaataataataattgaagaattatgtaggaaattgctatgtttggtaattttttttaaaaaaaacattcttat

SEQ ID NO: 31259 - DNA, 600 bp, Chicken  19866894253457_1
atgacaacagatgctatcactgttacttttcatgaacgtactgtagagtcaacagcaggagtgtgagtacactggattaagtgtcctcaaaaataaattgcctttacacagttgtttttaaaagtattccagaacagatacgttcattgctaatgtgctcactaaaaatatttttgctatgaataattatgctgtatctttttgttaaataacagctggttacctatacaaaagatgtgagttctgtatttgagcactatgccttggatttcaggctgtcaggtttcctaacatatgctwcarttgacgcatccctttcttgtgctgcagcaagcagctaactggaagcacaaagagaaacactgaccatacttaatattgatatccaccatatattaaataacttcaagagtaaaatgtgttgtactgaccagtgcactccacttctgaaagyttttaactgtctataaatgacacactccattttctagcaggcattaacaggattgttttctaaaaagmaaagcttcggctattcagccatgtagtagcaggtactgctacttgaaaataacttgaatttcttttagttgctggttg

SEQ ID NO: 31260 - DNA, 600 bp, Chicken  19866894253457_2
acaacagatgctatcactgttacttttcatgaacgtactgtagagtcaacagcaggagtgtgagtacactggattaagtgtcctcaaaaataaattgcctttacacagttgtttttaaaagtattccagaacagatacgttcattgctaatgtgctcactaaaaatatttttgctatgaataattatgctgtatctttttgttaaataacagctggttacctatacaaaagatgtgagttctgtatttgagcactatgccttggatttcaggctgtcaggtttcctaacatatgctwcarttgacgcatccctttcttgtgctgcagcaagcagctaactggaagcacaaagagaaacactgaccatacttaatattgatatccaccatatattaaataacttcaagagtaaaatgtgttgtactgaccagtgcactccacttctgaaagyttttaactgtctataaatgacacactccattttctagcaggcattaacaggattgttttctaaaaagmaaagcttcggctattcagccatgtagtagcaggtactgctacttgaaaataacttgaatttcttttagttgctggttgttc

SEQ ID NO: 31261 - DNA, 600 bp, Chicken  19866894253457_3
gtgctcactaaaaatatttttgctatgaataattatgctgtatctttttgttaaataacagctggttacctatacaaaagatgtgagttctgtatttgagcactatgccttggatttcaggctgtcaggtttcctaacatatgctwcarttgacgcatccctttcttgtgctgcagcaagcagctaactggaagcacaaagagaaacactgaccatacttaatattgatatccaccatatattaaataacttcaagagtaaaatgtgttgtactgaccagtgcactccacttctgaaagyttttaactgtctataaatgacacactccattttctagcaggcattaacaggattgttttctaaaaagmaaagcttcggctattcagccatgtagtagcaggtactgctacttgaaaataacttgaatttcttttagttgctggttgttctatyaataacaacaacagaaaaaaagtaaataaaaccacagaccaaaatcagaagactcctctgtgttgcccatcagcttggccagcacacaatgacaatggaaggagaagcagacactgtttcaagtaggcaaatagaaagacaaaagaa

SEQ ID NO: 31262 - DNA, 600 bp, Chicken  19866894253457_4
cctatacaaaagatgtgagttctgtatttgagcactatgccttggatttcaggctgtcaggtttcctaacatatgctwcarttgacgcatccctttcttgtgctgcagcaagcagctaactggaagcacaaagagaaacactgaccatacttaatattgatatccaccatatattaaataacttcaagagtaaaatgtgttgtactgaccagtgcactccacttctgaaagyttttaactgtctataaatgacacactccattttctagcaggcattaacaggattgttttctaaaaagmaaagcttcggctattcagccatgtagtagcaggtactgctacttgaaaataacttgaatttcttttagttgctggttgttctatyaataacaacaacagaaaaaaagtaaataaaaccacagaccaaaatcagaagactcctctgtgttgcccatcagcttggccagcacacaatgacaatggaaggagaagcagacactgtttcaagtaggcaaatagaaagacaaaagaaaacacttcctttttttccagtatagaaatcaacctcaatttcacaccatctatacagtgataaagaga

SEQ ID NO: 31263 - DNA, 600 bp, Chicken  19866894253457_5
cgcatccctttcttgtgctgcagcaagcagctaactggaagcacaaagagaaacactgaccatacttaatattgatatccaccatatattaaataacttcaagagtaaaatgtgttgtactgaccagtgcactccacttctgaaagyttttaactgtctataaatgacacactccattttctagcaggcattaacaggattgttttctaaaaagmaaagcttcggctattcagccatgtagtagcaggtactgctacttgaaaataacttgaatttcttttagttgctggttgttctatyaataacaacaacagaaaaaaagtaaataaaaccacagaccaaaatcagaagactcctctgtgttgcccatcagcttggccagcacacaatgacaatggaaggagaagcagacactgtttcaagtaggcaaatagaaagacaaaagaaaacacttcctttttttccagtatagaaatcaacctcaatttcacaccatctatacagtgataaagagacacatacaccacatcacatattaacgagtcctccccacctttagttaaaccccaaatgatgctctctctgtatttttccttgaca

SEQ ID NO: 31264 - DNA, 600 bp, Chicken  19866894253459_1
cgaattgaattctgtggaaaataaactgaccttttttacatttttgtttaaatcaaccaagttgagcaggaagatgtggtcttttgccccgactagcagccggcccctctcctcatctagcagcagggttcgaaaatctagcccctctgtagagcccaggaatgggatgcagctgtttgaaagcagcaagtctgtgggaaaatgaagaaaatctttataatcaaaatgtttacatatgactcattggtgtctttcataaatatatgcaaccagcatggagtatgttggtaagataactgmagtcttgaagcatgtctttccaaggtcatagtataattcctgttaaccttagtcttcctggagggtggggaatggtatcattccaaattgggtaatatttactcttgcraagactcttctgtatgaaactttcttaataagttatccctatgacataaaggaatcattcttcagcagcacttggaaaaacaaaaacaaaaacaaaaaagtgctatatcttattgcattgaaagaaaaccaacatgcatttatataatcatattcatggatacatgcagggaaggatcagtatgttaccat

SEQ ID NO: 31265 - DNA, 600 bp, Chicken  19866894253459_2
tcctcatctagcagcagggttcgaaaatctagcccctctgtagagcccaggaatgggatgcagctgtttgaaagcagcaagtctgtgggaaaatgaagaaaatctttataatcaaaatgtttacatatgactcattggtgtctttcataaatatatgcaaccagcatggagtatgttggtaagataactgmagtcttgaagcatgtctttccaaggtcatagtataattcctgttaaccttagtcttcctggagggtggggaatggtatcattccaaattgggtaatatttactcttgcraagactcttctgtatgaaactttcttaataagttatccctatgacataaaggaatcattcttcagcagcacttggaaaaacaaaaacaaaaacaaaaaagtgctatatcttattgcattgaaagaaaaccaacatgcatttatataatcatattcatggatacatgcagggaaggatcagtatgttaccatattcgctgctctacatataaagaaacaaggaaggcaaatgaaaactaaatatcaaggagcagaaaacagcagatgtggcagttatataaggataagaagaactatgaaa

SEQ ID NO: 31266 - DNA, 600 bp, Chicken  19866894253464_1
gctggcatcttcacctcgtagcatataacttatgcgagatattcctcattttgtaatggtgaggattaaacaaagatttaatcagaaacacaaatctgtgctataccatcagcatggaacttaaaaatgtatacagttgggcttttaatgagataactcacttggatctgacttcttacttttctacatctgctttagctcttgagattatgacctcaaatgcagctgaatttccagtgcatgttttccaggcgtgctgataatcacaaacagcacagtgagtgacaatgaagtcacacrcccatgcgcacattgcaccatggttttattctctctaataaatatggaaatctacatcagtataactatattgaagctaagcaaatcattttaattggcgtgggaccttttaatgaatgtatattttcagtcatttttaatatatttgcaattctctgcagattaaaattgaataaaattcttcaagaacgggtcaggccatttatttcaattagaaatagtaatgaaattccagtaaactattaaatgtcacttaatctgtattcaagacaaatagaatacttaatttctcttgacgtg

SEQ ID NO: 31267 - DNA, 600 bp, Chicken  19866894253468_1
cacaatatgatagggtacggtgtaaatcccaaacaaacatcaataccaacaacttactcttgcccaatatacaagaattttattctcatatttaaagaaatttaaactatccagtattttttctggataggttggatgactgacagccagatggtatgacatgtgccatacacaaacacagcttcacataaggctttaaaccaacacaacacattttaaaaccattatgagattacaaaataagatcaggagaaaagcaacatactttacacataaactcacagttgggctgtatttttwaatgttggtttatagccatccagatttttggtgcatcttaacattaaggttacggagttcacaggttcctacacattatttctaattaactttactctttctgtgacagtttaaaacacaaagcatggaaacatcactgtagatctttctagctacttacccaggtggcattccaggcataaccggaggcattccaggcatcatgggtgggacacctgccattaatggtggtataccttaagaaaataaaaaatgaattttaaacaacaccaagaacgtacactcatcaccaaatcaatt

SEQ ID NO: 31268 - DNA, 439 bp, Chicken  19866894253474_1
atgatgatcatcatatatattcaaggatgtgatccagtccatgaccttcactgttacgttatattcatcctacttccagaagtactccagtggtcaaggtaatttaattcttcctacaagaaattctgatcttccgctgtattaagatgattaccaacttcctcctagtgctacattttattaaacagaactccattttcatttgcaagtatcaccagtgaatgctttagttcagggtcagtcttcatctccttgaggaactctagcctagcagcttcattttcaccttaactcatcctscttactttatagttctcactaaactggaaaagatattttagtagaatacttctccagatatgaaaatcaaaagacatgaaggcaaaatccttatagcatgcttagtactttatatatattttttgagttaaaaaataaa

SEQ ID NO: 31269 - DNA, 599 bp, Chicken  19866894253478_1
  misc_feature (1)..(118): n is any nucleotide
nnnnnnnnnnnnnnnnnnnnnnnnnnnnnnnnnnnnnnnnnnnnnnnnnnnnnnnnnnnnnnnnnnnnnnnnnnnnnnnnnnnnnnnnnnnnnnnnnnnnnnnnnnnnnnnnnnnnnnttactgtgttaaaaaatactgtttcccagctaagaatttgctctatcaagtagtgttattgttctctttcttctagtttccgtagaggaagttaggaagcaatacttctgaagtgatctacatattaccataaacactggaccttgtcttggttttgtactgttgtggtagggagttactgkgtctatatttaaagacctgaacatgttttgtcttcactgtagctgtccataactgttcactgtarctgtctcttgaaaaaaacaaaacaagcaaacaaaaaacttctaaaactcattgtttagaattgatctgttattgttgatctttaatggaaattttactattgcttttgttggtatatttttatatgtataatgtacctatacatgcaaatatataatatcacagaatcacagaattgtaagggctgtttatcattgtcttaaagatacatttacatttgtatgtatgtaagagt

SEQ ID NO: 31270 - DNA, 599 bp, Chicken  19866894253478_2
  misc_feature (1)..(53): n is any nucleotide
nnnnnnnnnnnnnnnnnnnnnnnnnnnnnnnnnnnnnnnnnnnnnnnnnnnnnttactgtgttaaaaaatactgtttcccagctaagaatttgctctatcaagtagtgttattgttctctttcttctagtttccgtagaggaagttaggaagcaatacttctgaagtgatctacatattaccataaacactggaccttgtcttggttttgtactgttgtggtagggagttactgkgtctatatttaaagacctgaacatgttttgtcttcactgtagctgtccataactgttcactgtarctgtctcttgaaaaaaacaaaacaagcaaacaaaaaacttctaaaactcattgtttagaattgatctgttattgttgatctttaatggaaattttactattgcttttgttggtatatttttatatgtataatgtacctatacatgcaaatatataatatcacagaatcacagaattgtaagggctgtttatcattgtcttaaagatacatttacatttgtatgtatgtaagagtcagaaaacctgtagttcagaaagccccacattttatgtttcttcctattcttttatggattttca

SEQ ID NO: 31271 - DNA, 600 bp, Chicken  19866894253478_3
gtatatttttatatgtataatgtacctatacatgcaaatatataatatcacagaatcacagaattgtaagggctgtttatcattgtcttaaagatacatttacatttgtatgtatgtaagagtcagaaaacctgtagttcagaaagccccacattttatgtttcttcctattcttttatggattttcagcccttaaaaatctgaaccagaatttcagctgttgatgctcaaaaagggcaacttacaagctctctatttacagatgagtatagctacgcagataatgaagggtgaaatctrcaaacatttatttaaatgaaacattgcattttccatggcaatattctaactcattttgttctcactttgcaagaatattataggaaattaatttactgagcagctgcttaaaatatgtgtttttactgaatggtggattataccagtgaacatcatagttggaattctaatatacaattattgaaaatgaacaataagctattagttttaagttcttctctgccctgcggagaacaaaaagtgtggctgctggttgtatgctagctgcaatactttacctctaatcttcttttcccctta

SEQ ID NO: 31272 - DNA, 600 bp, Chicken  19866894253484_1
tcctgtccttttattaacacagcatctctactgcagctgagagagaactgctggtgaagcctccagctttcctcccagtgaaagcaccaaagggagaagctgttgcctggacacaatgggcagaacagtttaaggttgcccactgcaaagtttgactgtaattacaattcacatcattccaactcaataacccattacctttgttttttaattactttgagacaaagaacacttaacgctaaagatctgtgctctggatgaaaataaatttgcattattagattttactataagccagtrgaggatctaaaaatgtcaaagaagtagctgagcagcaccgccacaacaactccattactcccttgctaccatttcatcaagaactgctttacaaggcagcacagcactgcccacaggggctgagrtgaacactttctgcaggctggagcagcccactcagctgtagcacaatgatccctcccttccatcctggtgtcctttgtcagcaaggctcttgttcttcaaaaaaataagctacaacaccgtaagagatcaaatttttgccagtgaactagaagtacatttgacactactgctatg

SEQ ID NO: 31273 - DNA, 600 bp, Chicken  19866894253484_2
cagtttaaggttgcccactgcaaagtttgactgtaattacaattcacatcattccaactcaataacccattacctttgttttttaattactttgagacaaagaacacttaacgctaaagatctgtgctctggatgaaaataaatttgcattattagattttactataagccagtrgaggatctaaaaatgtcaaagaagtagctgagcagcaccgccacaacaactccattactcccttgctaccatttcatcaagaactgctttacaaggcagcacagcactgcccacaggggctgagrtgaacactttctgcaggctggagcagcccactcagctgtagcacaatgatccctcccttccatcctggtgtcctttgtcagcaaggctcttgttcttcaaaaaaataagctacaacaccgtaagagatcaaatttttgccagtgaactagaagtacatttgacactactgctatgcctgagaatggccatccagccagccagacatttcaacctgcttttrgaagtgatacctttgcatcttagagttgctccatgctctccagtcatgcagtctgagtgacagcaggtccagcactgct

SEQ ID NO: 31274 - DNA, 600 bp, Chicken  19866894253484_3
caactccattactcccttgctaccatttcatcaagaactgctttacaaggcagcacagcactgcccacaggggctgagrtgaacactttctgcaggctggagcagcccactcagctgtagcacaatgatccctcccttccatcctggtgtcctttgtcagcaaggctcttgttcttcaaaaaaataagctacaacaccgtaagagatcaaatttttgccagtgaactagaagtacatttgacactactgctatgcctgagaatggccatccagccagccagacatttcaacctgcttttrgaagtgatacctttgcatcttagagttgctccatgctctccagtcatgcagtctgagtgacagcaggtccagcactgctgggcctcagacacctacagccgtgggattcccactcagtacratgcaaagtgtgaaaattggaagtcttcgttctcaccagcaaaccacggggccgggctggctttacttttttttttaatccacaaagaaggagaagaatttaatgtaacagccagctaccaaaattattcctgtgttacaagcaatggaggttgaaccttgaaacgtgttggattcctc

SEQ ID NO: 31275 - DNA, 600 bp, Chicken  19866894253484_4
acaatgatccctcccttccatcctggtgtcctttgtcagcaaggctcttgttcttcaaaaaaataagctacaacaccgtaagagatcaaatttttgccagtgaactagaagtacatttgacactactgctatgcctgagaatggccatccagccagccagacatttcaacctgcttttrgaagtgatacctttgcatcttagagttgctccatgctctccagtcatgcagtctgagtgacagcaggtccagcactgctgggcctcagacacctacagccgtgggattcccactcagtacratgcaaagtgtgaaaattggaagtcttcgttctcaccagcaaaccacggggccgggctggctttacttttttttttaatccacaaagaaggagaagaatttaatgtaacagccagctaccaaaattattcctgtgttacaagcaatggaggttgaaccttgaaacgtgttggattcctccatgctttgagaaagaggggtggggttgtgctttacaggtatccatgattaattcctatggttctaagtcaaagtgtctcagggagcctaagctctgcttcgtggtaagtgctgaatacag

SEQ ID NO: 31276 - DNA, 600 bp, Chicken  19866894253486_1
agataagattatttgagatttggaaaatgaagtccattctactcaatggaatattgtattgccaaggcaaataattgattatactttctgataacgcttttttcatctatttcaggtagtactattatcagaactgtaatgatttggagctataaatgatggaagatttatgtataggtacagtatctttttaaaaaagtgatctcatataatctgaaaaattgaaagctttagtacaagagcctttcatcaggttttgtattttaaacttgaaaaagagttaatatgtcatctgcaaarctgcttgaaaaagttgaaagaccaactttttcactcgccctattttaacgtggatctgtggagatcatcatcaagaatgagagtcaggttcatctcttacctattcagaccttgatttctgtgtttgcatctgttactagcatggatgctaactacatggcagattttctgtgtattagaaggagaactgaaagacactgctgactgacttcatgttgtaagtgatcgctctgggtaaacagcttcagccagggctgcccctgagctagctggcaaatgcagaagtgaaaagctatgtat

SEQ ID NO: 31277 - DNA, 600 bp, Chicken  19866894253486_2
aaatgtatattacaaaagaaataattaagtggcagaagggtattgaaagtcaggtacattattttgaatgagtagctattccaaatattctcatttgaattttaaataatgatgcttaaagtgatagacaacaggttaaggacgtatattcctttcagttttgttagcaagttcttcacaggtgaaaaattggtgagaacattattttttttactgtgaaaggtaatgacatcaatacccatgaagacattcaatagcttagaagttattgactctagatcataaactgcattacacttscagctgtattaagttttttaatgaaaccagccactttaatatcagaaaacgcacagtcaagtaaatgatgactgtaatgtctgctagattttttctttaaactgtgatttcagttttaattttttaagacttattatatggaagattaaagcaaattttttcagtgtatcatttaaatcagtcgtgaatatgctgataccagtgggcagtgtgtttgaatatttcattacaaagtgatggactgtcctatcttagcttgttaaagtgcttttactcactggtccattttgctcttttctt

SEQ ID NO: 31278 - DNA, 600 bp, Chicken  19866894253490_1
ggaggtaacaaccctgtattggatttacgggtccgggcggaggcaggattagcagaccactcacaaacaccgggcgggcttttatagctggtataaagctgagtcattccctgcagtaaaactttatttccttaacttttacagagttgataactttgacatttcactgttggtgaaatgcacctgcctggtggctgcgtgcccacacgtagctgtcccagtacaaacagggctctcctccgccctgcatgcagcctgtattgcattgctgcagcactgtctagttcatgcacagctaamttctcctctggttctcatgcagatcagtgcctagaaattaagcaggagtacgcaataagaaggatgagcagtgtgatgcatacaagccctgtttatgtggtaattgtaatygratgggaatacggtaggtcaatactaccaamgcattycaaggcagagatgaatgcatttttcagcccaagtgcagtctgacagatcaggctgatgagctctctcagtgccccagygatgtccccgcctcgtgtgccaggctgtctgggaacacagtgaygctggatgctggccttggagccaggcaca

SEQ ID NO: 31279 - DNA, 600 bp, Chicken  19866894253490_2
tgcagtaaaactttatttccttaacttttacagagttgataactttgacatttcactgttggtgaaatgcacctgcctggtggctgcgtgcccacacgtagctgtcccagtacaaacagggctctcctccgccctgcatgcagcctgtattgcattgctgcagcactgtctagttcatgcacagctaamttctcctctggttctcatgcagatcagtgcctagaaattaagcaggagtacgcaataagaaggatgagcagtgtgatgcatacaagccctgtttatgtggtaattgtaatygratgggaatacggtaggtcaatactaccaamgcattycaaggcagagatgaatgcatttttcagcccaagtgcagtctgacagatcaggctgatgagctctctcagtgccccagygatgtccccgcctcgtgtgccaggctgtctgggaacacagtgaygctggatgctggccttggagccaggcacagcactggccaggggccaggcacgcagcagtgctttctctgcatctctgagcatcccacatttgtcttcttttgccactcctgactcgagggaacctcacggcatcctagcc

SEQ ID NO: 31280 - DNA, 600 bp, Chicken  19866894253490_3
cagtaaaactttatttccttaacttttacagagttgataactttgacatttcactgttggtgaaatgcacctgcctggtggctgcgtgcccacacgtagctgtcccagtacaaacagggctctcctccgccctgcatgcagcctgtattgcattgctgcagcactgtctagttcatgcacagctaamttctcctctggttctcatgcagatcagtgcctagaaattaagcaggagtacgcaataagaaggatgagcagtgtgatgcatacaagccctgtttatgtggtaattgtaatygratgggaatacggtaggtcaatactaccaamgcattycaaggcagagatgaatgcatttttcagcccaagtgcagtctgacagatcaggctgatgagctctctcagtgccccagygatgtccccgcctcgtgtgccaggctgtctgggaacacagtgaygctggatgctggccttggagccaggcacagcactggccaggggccaggcacgcagcagtgctttctctgcatctctgagcatcccacatttgtcttcttttgccactcctgactcgagggaacctcacggcatcctagccag

SEQ ID NO: 31281 - DNA, 600 bp, Chicken  19866894253490_4
gagttgataactttgacatttcactgttggtgaaatgcacctgcctggtggctgcgtgcccacacgtagctgtcccagtacaaacagggctctcctccgccctgcatgcagcctgtattgcattgctgcagcactgtctagttcatgcacagctaamttctcctctggttctcatgcagatcagtgcctagaaattaagcaggagtacgcaataagaaggatgagcagtgtgatgcatacaagccctgtttatgtggtaattgtaatygratgggaatacggtaggtcaatactaccaamgcattycaaggcagagatgaatgcatttttcagcccaagtgcagtctgacagatcaggctgatgagctctctcagtgccccagygatgtccccgcctcgtgtgccaggctgtctgggaacacagtgaygctggatgctggccttggagccaggcacagcactggccaggggccaggcacgcagcagtgctttctctgcatctctgagcatcccacatttgtcttcttttgccactcctgactcgagggaacctcacggcatcctagccagaccccgcactatacactgaagacacatttg

SEQ ID NO: 31282 - DNA, 600 bp, Chicken  19866894253490_5
ataactttgacatttcactgttggtgaaatgcacctgcctggtggctgcgtgcccacacgtagctgtcccagtacaaacagggctctcctccgccctgcatgcagcctgtattgcattgctgcagcactgtctagttcatgcacagctaamttctcctctggttctcatgcagatcagtgcctagaaattaagcaggagtacgcaataagaaggatgagcagtgtgatgcatacaagccctgtttatgtggtaattgtaatygratgggaatacggtaggtcaatactaccaamgcattycaaggcagagatgaatgcatttttcagcccaagtgcagtctgacagatcaggctgatgagctctctcagtgccccagygatgtccccgcctcgtgtgccaggctgtctgggaacacagtgaygctggatgctggccttggagccaggcacagcactggccaggggccaggcacgcagcagtgctttctctgcatctctgagcatcccacatttgtcttcttttgccactcctgactcgagggaacctcacggcatcctagccagaccccgcactatacactgaagacacatttgtcccgt

SEQ ID NO: 31283 - DNA, 600 bp, Chicken  19866894253490_6
cagggctctcctccgccctgcatgcagcctgtattgcattgctgcagcactgtctagttcatgcacagctaamttctcctctggttctcatgcagatcagtgcctagaaattaagcaggagtacgcaataagaaggatgagcagtgtgatgcatacaagccctgtttatgtggtaattgtaatygratgggaatacggtaggtcaatactaccaamgcattycaaggcagagatgaatgcatttttcagcccaagtgcagtctgacagatcaggctgatgagctctctcagtgccccagygatgtccccgcctcgtgtgccaggctgtctgggaacacagtgaygctggatgctggccttggagccaggcacagcactggccaggggccaggcacgcagcagtgctttctctgcatctctgagcatcccacatttgtcttcttttgccactcctgactcgagggaacctcacggcatcctagccagaccccgcactatacactgaagacacatttgtcccgttcaaagtatgtttccaaagggaggcacgcactttggctcaggctccatagcaaaacctcagcatgttccccagcacag

SEQ ID NO: 31284 - DNA, 600 bp, Chicken  19866894253490_7
cagcactgtctagttcatgcacagctaamttctcctctggttctcatgcagatcagtgcctagaaattaagcaggagtacgcaataagaaggatgagcagtgtgatgcatacaagccctgtttatgtggtaattgtaatygratgggaatacggtaggtcaatactaccaamgcattycaaggcagagatgaatgcatttttcagcccaagtgcagtctgacagatcaggctgatgagctctctcagtgccccagygatgtccccgcctcgtgtgccaggctgtctgggaacacagtgaygctggatgctggccttggagccaggcacagcactggccaggggccaggcacgcagcagtgctttctctgcatctctgagcatcccacatttgtcttcttttgccactcctgactcgagggaacctcacggcatcctagccagaccccgcactatacactgaagacacatttgtcccgttcaaagtatgtttccaaagggaggcacgcactttggctcaggctccatagcaaaacctcagcatgttccccagcacagccatgtgcagtgtgattcatagcagccctgaagcttaaagtctg

SEQ ID NO: 31285 - DNA, 600 bp, Chicken  19866894253490_8
ggccaggcacgcagcagtgctttctctgcatctctgagcatcccacatttgtcttcttttgccactcctgactcgagggaacctcacggcatcctagccagaccccgcactatacactgaagacacatttgtcccgttcaaagtatgtttccaaagggaggcacgcactttggctcaggctccatagcaaaacctcagcatgttccccagcacagccatgtgcagtgtgattcatagcagccctgaagcttaaagtctgtgttggaaaagcttgcattctccacatgttacactttgackcttgcttggcttccccatttccaattctgcatcctgcagccaggagagcaccagccacactctgaccaacactttgcatccagcactggacacttgaagagaaggaggaatccactgctctgaaatttcctartggatgctcagggcctccaatgccatcctccctccatccccatgcagccattacatgcatagaaaactctcatagaatacaattacaagcaggaaccttgccagaaagcagcacgtcgatacagagaaccttttaaattctgctcctatgaaaaacacacctggtct

SEQ ID NO: 31286 - DNA, 600 bp, Chicken  19866894253490_9
ccgttcaaagtatgtttccaaagggaggcacgcactttggctcaggctccatagcaaaacctcagcatgttccccagcacagccatgtgcagtgtgattcatagcagccctgaagcttaaagtctgtgttggaaaagcttgcattctccacatgttacactttgackcttgcttggcttccccatttccaattctgcatcctgcagccaggagagcaccagccacactctgaccaacactttgcatccagcactggacacttgaagagaaggaggaatccactgctctgaaatttcctartggatgctcagggcctccaatgccatcctccctccatccccatgcagccattacatgcatagaaaactctcatagaatacaattacaagcaggaaccttgccagaaagcagcacgtcgatacagagaaccttttaaattctgctcctatgaaaaacacacctggtctcccagattctgcatcaacaaggccacgaagaaatgttagtaaatcactgctatgctttagttctgctaggcctcatgtatccctcaagtttcaacctgtgagtgctcctattgactaccaaattaatcatgtg

SEQ ID NO: 31287 - DNA, 599 bp, Chicken  19866894253492_1
  misc_feature (1)..(2): n is any nucleotide
nntcactcacacaaaggacacacttactgagagaacttcagaaacaagagccaaagccccagtatggggcacgagacacttactgcaggggctgtgcagaactcttctatcaacaaaccaaacaactggagaaggtcctgagtgctgtagactgagtgtggttctggcatacggagtgagaaatgagaaatgcatggatcctgtttgctttggatgttgcttcatatgggcccatccgacaacggacagggtgatgactccaggacaacctggagatgccggtctcctctggaaaagctwagaagaaacagcagcaggcatgggagtaccatggctttgcaactgcattttatcttctgtgcagtctgtcatttgtccctycccgataygttttctctgccataccaatcccayayaaagccaaccttggcaaagatgctcargtctggggttacaagtaatgacatcacccrtttcctgctgtaaaaacagctctccttctttttcattcacagcagattcctttatagtgtataacacggatgttatgagggctgctctgaaagtaatgcctcctatgttatgttggcccacgatgt

SEQ ID NO: 31288 - DNA, 600 bp, Chicken  19866894253492_2
actgcaggggctgtgcagaactcttctatcaacaaaccaaacaactggagaaggtcctgagtgctgtagactgagtgtggttctggcatacggagtgagaaatgagaaatgcatggatcctgtttgctttggatgttgcttcatatgggcccatccgacaacggacagggtgatgactccaggacaacctggagatgccggtctcctctggaaaagctwagaagaaacagcagcaggcatgggagtaccatggctttgcaactgcattttatcttctgtgcagtctgtcatttgtccctycccgataygttttctctgccataccaatcccayayaaagccaaccttggcaaagatgctcargtctggggttacaagtaatgacatcacccrtttcctgctgtaaaaacagctctccttctttttcattcacagcagattcctttatagtgtataacacggatgttatgagggctgctctgaaagtaatgcctcctatgttatgttggcccacgatgtcagaagaggatgttggtggtatggcagtaaaggttgaaccttcccatcaatattgtattccattttgttgccatgagacaga

SEQ ID NO: 31289 - DNA, 600 bp, Chicken  19866894253492_3
ggctgtgcagaactcttctatcaacaaaccaaacaactggagaaggtcctgagtgctgtagactgagtgtggttctggcatacggagtgagaaatgagaaatgcatggatcctgtttgctttggatgttgcttcatatgggcccatccgacaacggacagggtgatgactccaggacaacctggagatgccggtctcctctggaaaagctwagaagaaacagcagcaggcatgggagtaccatggctttgcaactgcattttatcttctgtgcagtctgtcatttgtccctycccgataygttttctctgccataccaatcccayayaaagccaaccttggcaaagatgctcargtctggggttacaagtaatgacatcacccrtttcctgctgtaaaaacagctctccttctttttcattcacagcagattcctttatagtgtataacacggatgttatgagggctgctctgaaagtaatgcctcctatgttatgttggcccacgatgtcagaagaggatgttggtggtatggcagtaaaggttgaaccttcccatcaatattgtattccattttgttgccatgagacagaaggcagca

SEQ ID NO: 31290 - DNA, 600 bp, Chicken  19866894253492_4
aaaccaaacaactggagaaggtcctgagtgctgtagactgagtgtggttctggcatacggagtgagaaatgagaaatgcatggatcctgtttgctttggatgttgcttcatatgggcccatccgacaacggacagggtgatgactccaggacaacctggagatgccggtctcctctggaaaagctwagaagaaacagcagcaggcatgggagtaccatggctttgcaactgcattttatcttctgtgcagtctgtcatttgtccctycccgataygttttctctgccataccaatcccayayaaagccaaccttggcaaagatgctcargtctggggttacaagtaatgacatcacccrtttcctgctgtaaaaacagctctccttctttttcattcacagcagattcctttatagtgtataacacggatgttatgagggctgctctgaaagtaatgcctcctatgttatgttggcccacgatgtcagaagaggatgttggtggtatggcagtaaaggttgaaccttcccatcaatattgtattccattttgttgccatgagacagaaggcagcagagaggcaatgtgacagaatggtgt

SEQ ID NO: 31291 - DNA, 600 bp, Chicken  19866894253492_5
accaaacaactggagaaggtcctgagtgctgtagactgagtgtggttctggcatacggagtgagaaatgagaaatgcatggatcctgtttgctttggatgttgcttcatatgggcccatccgacaacggacagggtgatgactccaggacaacctggagatgccggtctcctctggaaaagctwagaagaaacagcagcaggcatgggagtaccatggctttgcaactgcattttatcttctgtgcagtctgtcatttgtccctycccgataygttttctctgccataccaatcccayayaaagccaaccttggcaaagatgctcargtctggggttacaagtaatgacatcacccrtttcctgctgtaaaaacagctctccttctttttcattcacagcagattcctttatagtgtataacacggatgttatgagggctgctctgaaagtaatgcctcctatgttatgttggcccacgatgtcagaagaggatgttggtggtatggcagtaaaggttgaaccttcccatcaatattgtattccattttgttgccatgagacagaaggcagcagagaggcaatgtgacagaatggtgtct

SEQ ID NO: 31292 - DNA, 600 bp, Chicken  19866894253492_6
gctgtagactgagtgtggttctggcatacggagtgagaaatgagaaatgcatggatcctgtttgctttggatgttgcttcatatgggcccatccgacaacggacagggtgatgactccaggacaacctggagatgccggtctcctctggaaaagctwagaagaaacagcagcaggcatgggagtaccatggctttgcaactgcattttatcttctgtgcagtctgtcatttgtccctycccgataygttttctctgccataccaatcccayayaaagccaaccttggcaaagatgctcargtctggggttacaagtaatgacatcacccrtttcctgctgtaaaaacagctctccttctttttcattcacagcagattcctttatagtgtataacacggatgttatgagggctgctctgaaagtaatgcctcctatgttatgttggcccacgatgtcagaagaggatgttggtggtatggcagtaaaggttgaaccttcccatcaatattgtattccattttgttgccatgagacagaaggcagcagagaggcaatgtgacagaatggtgtctgacaaagaagtggagatgaagtgaagg

SEQ ID NO: 31293 - DNA, 600 bp, Chicken  19866894253492_7
gagtgagaaatgagaaatgcatggatcctgtttgctttggatgttgcttcatatgggcccatccgacaacggacagggtgatgactccaggacaacctggagatgccggtctcctctggaaaagctwagaagaaacagcagcaggcatgggagtaccatggctttgcaactgcattttatcttctgtgcagtctgtcatttgtccctycccgataygttttctctgccataccaatcccayayaaagccaaccttggcaaagatgctcargtctggggttacaagtaatgacatcacccrtttcctgctgtaaaaacagctctccttctttttcattcacagcagattcctttatagtgtataacacggatgttatgagggctgctctgaaagtaatgcctcctatgttatgttggcccacgatgtcagaagaggatgttggtggtatggcagtaaaggttgaaccttcccatcaatattgtattccattttgttgccatgagacagaaggcagcagagaggcaatgtgacagaatggtgtctgacaaagaagtggagatgaagtgaaggtgtgtcctttaattcctccatgcagaaaaa

SEQ ID NO: 31294 - DNA, 600 bp, Chicken  19866894253493_1
tctgaaagagcagtcaggcactggaacaggctgcccagaaaggtagcagagtcactgtccctggaggcattcaagaatcacttacatgttatactaagggacatggtttaggggggttatactgatggtaggtagacagttggacatcatcttggaggtcttttccaacctcgggtgattctatgattctgaactgctgcagcaaacccaaggtccaaatggctttcattctcatactagcctgcagacaacagtaacgcaaccaagataatgccacagctttgctcaattgagtacgcrgcacacagctgaacaaacagctactgtgcacgctacacagtgaagaaagctccgcacctttcgtagggtgtaccacctcgactccacacaaacagacctagcttttgggcaagctttttctgaagaacacttttcagtccaaaaggtctaaaaccactaacacatgcatcctcactagatgccctcaagatgaagtgttttgctgtacaacactgtgttggatcatgagctcacttygaaaagatttatttaacgtcatacaaaatcactgyggagtaaaagactgtctaagccttcagt

SEQ ID NO: 31295 - DNA, 600 bp, Chicken  19866894253493_2
tagcctgcagacaacagtaacgcaaccaagataatgccacagctttgctcaattgagtacgcrgcacacagctgaacaaacagctactgtgcacgctacacagtgaagaaagctccgcacctttcgtagggtgtaccacctcgactccacacaaacagacctagcttttgggcaagctttttctgaagaacacttttcagtccaaaaggtctaaaaccactaacacatgcatcctcactagatgccctcaagatgaagtgttttgctgtacaacactgtgttggatcatgagctcacttygaaaagatttatttaacgtcatacaaaatcactgyggagtaaaagactgtctaagccttcagtttataaccagagaaataactaaacaaccaagtgttcctctttcaccagaagttgaaattacattcctgaagtwcatactgtccagcaggattaatgctcaggcagatccatcattagaagctatttcaaattgctccggggacactgaaatcagcacaccacaatatgcaatttaacctacatcaaaaccctcgccagctgtattcactcttcatgggccacctgcttatttataca

SEQ ID NO: 31296 - DNA, 600 bp, Chicken  19866894253493_3
gccacagctttgctcaattgagtacgcrgcacacagctgaacaaacagctactgtgcacgctacacagtgaagaaagctccgcacctttcgtagggtgtaccacctcgactccacacaaacagacctagcttttgggcaagctttttctgaagaacacttttcagtccaaaaggtctaaaaccactaacacatgcatcctcactagatgccctcaagatgaagtgttttgctgtacaacactgtgttggatcatgagctcacttygaaaagatttatttaacgtcatacaaaatcactgyggagtaaaagactgtctaagccttcagtttataaccagagaaataactaaacaaccaagtgttcctctttcaccagaagttgaaattacattcctgaagtwcatactgtccagcaggattaatgctcaggcagatccatcattagaagctatttcaaattgctccggggacactgaaatcagcacaccacaatatgcaatttaacctacatcaaaaccctcgccagctgtattcactcttcatgggccacctgcttatttatacaaaggttccacacagtttatggtctcagtcattctt

SEQ ID NO: 31297 - DNA, 600 bp, Chicken  19866894253493_4
cacctcgactccacacaaacagacctagcttttgggcaagctttttctgaagaacacttttcagtccaaaaggtctaaaaccactaacacatgcatcctcactagatgccctcaagatgaagtgttttgctgtacaacactgtgttggatcatgagctcacttygaaaagatttatttaacgtcatacaaaatcactgyggagtaaaagactgtctaagccttcagtttataaccagagaaataactaaacaaccaagtgttcctctttcaccagaagttgaaattacattcctgaagtwcatactgtccagcaggattaatgctcaggcagatccatcattagaagctatttcaaattgctccggggacactgaaatcagcacaccacaatatgcaatttaacctacatcaaaaccctcgccagctgtattcactcttcatgggccacctgcttatttatacaaaggttccacacagtttatggtctcagtcattcttaatcatgtacagtcccaatcatcgcaggatccaaagttgaaagataagatcacagcrgtcactccattccataagcaaaatatgtaaccctaatacttgtt

SEQ ID NO: 31298 - DNA, 477 bp, Chicken  19866894253493_5
agtgttcctctttcaccagaagttgaaattacattcctgaagtwcatactgtccagcaggattaatgctcaggcagatccatcattagaagctatttcaaattgctccggggacactgaaatcagcacaccacaatatgcaatttaacctacatcaaaaccctcgccagctgtattcactcttcatgggccacctgcttatttatacaaaggttccacacagtttatggtctcagtcattcttaatcatgtacagtcccaatcatcgcaggatccaaagttgaaagataagatcacagcrgtcactccattccataagcaaaatatgtaaccctaatacttgttattgctctatgtttactgtgtttacttagctacacttgaaccaaaaccccacctaagcagcaaagtatgaggtagaaacctgtcactgtgtagtaacatataaaggggtggcaagctcacacattacttgcaa

SEQ ID NO: 31299 - DNA, 600 bp, Chicken  19866894253495_1
aaatctcatttggtgacatcaattatttcattacttcaagcaagaacaatcaacaacttgtgcgggaactatatcacaccacaaaaaaaaaaaaaaaaaaatcaacagaagtactgggaggactgtttatcctcttacctggctaattaacactatccatcacagtctcaagtcaacaaaaacactgatgggttttaaagctggaagggataaccgtaatcatctgcaattgctttcctccctgcacagcctccagacccctgcctggtgccatgatgagctgctggggagtggaggcascaccgttaagaaatgcactcagccttgaatttcagatctcaaacatggcaaatccattatagtcttaaatcaaytgtgtcagctactaattgtcctcagtgttcaaaccatgcgccttatctatgccctgatttcccatcaattcagtttccagccactgactgcacttttaaaaccttacctgaaagatgaaaagagacctattaccaggaaacttcccatgttcatcagacatttccagctcttctaaacccttcttgtgctctctgctcagctcagatagttttccagacaatttct

SEQ ID NO: 31300 - DNA, 600 bp, Chicken  19866894253495_2
cacaccacaaaaaaaaaaaaaaaaaaatcaacagaagtactgggaggactgtttatcctcttacctggctaattaacactatccatcacagtctcaagtcaacaaaaacactgatgggttttaaagctggaagggataaccgtaatcatctgcaattgctttcctccctgcacagcctccagacccctgcctggtgccatgatgagctgctggggagtggaggcascaccgttaagaaatgcactcagccttgaatttcagatctcaaacatggcaaatccattatagtcttaaatcaaytgtgtcagctactaattgtcctcagtgttcaaaccatgcgccttatctatgccctgatttcccatcaattcagtttccagccactgactgcacttttaaaaccttacctgaaagatgaaaagagacctattaccaggaaacttcccatgttcatcagacatttccagctcttctaaacccttcttgtgctctctgctcagctcagatagttttccagacaatttctacaactcttttgcctatatatttatatatacagcagaacaggatccagtctaaaggatttttctgtgctgaaca

SEQ ID NO: 31301 - DNA, 599 bp, Chicken  19866894253504_1
  misc_feature (1)..(13): n is any nucleotide
nnnnnnnnnnnnntgtgaacttaatggcattaactgtagtatcttggagagttttgccaatgccaggtcaacctgaacgttctgagaaagtggaatggaaaatataaaagtagtttttactgatgtcagatttgcaaatagatgcaactcaacccatagtttgcgtttaacatttgaacatgtaagagcttataatatttttttgttgcagtggaacatctgttaaataatcagagcttgaattaatagggaactgaaaacagttagctgaaggtttcaaactaattagtataataatartaatattaaactagccctcccataacctaaattgcagagttttcatggtaaaaacacattattttaagggacctcaaaatcttcatttggagaaataggagtcaagaggaaatgtttttgtaaagttcaagagattacattgaactgaccaaggattgacaaataatttatatctatctgtctatgttttaaatagctttccattttgggttttagcttttttgtctcacatcaggtcaaaaagtggtgttttcactcttcgtatctgtacagtgaaatctccttggaaacaaatacag

SEQ ID NO: 31302 - DNA, 433 bp, Chicken  19866894253506_1
cgtctaagagaaacagtaaaacattacccgtgaaatagttgatagaaagaggcctcttctatgcactcaagtagatcgcttctcacagcaaaccatttcccattaactggtatctctacaagacttcaaatatgtaagtgctttcgagagtacttgtagtacagagagaggagataaattagaaataacatctcatatgttaattccatagtccactttgtggcttatgaggcaatagaattgcttttttgtattccattgctaaccacagtctgctccagttaaaaaaaaaaaaaaaaragagagagagagagagcacaaagaagacctccatggagatatagctgcaagtaaactgtaaaagaagcatccttgctttcctctgccttctataaaaatgcaacaagagagaaaaaaaatctcttctaatagc

SEQ ID NO: 31303 - DNA, 531 bp, Chicken  19866894253511_1
atcaatatttaagtcctctagattattgcttcctgctgtttaacagtgcacactgaaaaactattaagcaacatgtcatcccgcacagaaatgaacaaagcactagactttctcaatcccctcctgcaagtattacacatgattttttttttaattaactgaaggaaaagctttaataggtttagatttaggctgacctgtagccacaccgtacacatgtatcataagaagaggtggattttctctgttttccagatgagaaaggccacccgacccgagaagacagcagtattactgaaygaattctctcatgaaatctgctcttattactgaggtccaatagtgggccattttttaactccggtaatctcaactaggaaaatacttccgtgaatgttagtgttttatggagtagtgacagtttttaaatcccagctagacatgcttgaagttagcatttccttacttcttctggaagacagaaacctaagttttggttcttatctagacagaattttttctaacctactg

SEQ ID NO: 31304 - DNA, 600 bp, Chicken  19866894253515_1
taaagccaatgccatctattcagatggcatcacctattcacctagctggatctgtgctgaggttactgcagactcctatttgccttctcagcttcaatgtacatgacatgagagatgtcccacatgagcagctattttaaagaaaggagttcttacaggaatccataacttaccctacaaaaaccttgcattcaatggaaaaacaaggagatctaacagaaagcaaaaaattttacttctcggctcaaggagatattgtatcagtcaggatttcccttcctacctttgcctgtctttttrgaacaagctgttaattaatcatgggtggattacaggtgctgaattcatcaacacactaacagtcacccaacagctgctttgtaaaaccctgcctggcatataagcagttttaaatctttgcagctattgagatggaaatagagttaaaaaaaataaatcaaaatttggaactccccttaccacctccccagaagaaatgatgagtgtgttagggaggcttttcctttcttattcctgaaagttggcctagtttggccgtgatttgatattatgtggttaatttcattcacatgtaaatat

SEQ ID NO: 31305 - DNA, 600 bp, Chicken  19866894253519_1
gacaagtcattgttataaattaaaataactttccttcatatatgaaatcatatttgcacatgtttttttggtggggagatgggattgaaggaggcacctggttatgttgttgttgttgttgtcaatgaaatgaattgaaaatgagaaggttgggtcggatgatctccgtggtcttttcccacctccatgagcagtgtttgctttcccagctccttccccggcagcccacagcagacgtctggggggagcagcactgcttgcctcttggagggcgatttcatggccaggccgggaatgtgygccgcgtccctctgccacggggcagagatgctgctggaggaggttctgctcatctgctgtgctcctgagatgggcaccctctgctccgccaaggggcctgctgctggctctgagcgctgtgtgctgctggacagccggctgtgctcgtgctgtaggggtgccatgcggtttggcaaggggctgaacggcccccagcaccatctgcagcacagagcaggcgtgagaaccccagagccccagagctggygttgggcaaacagggaaacccaacccacagcgagccckgcgcatggacagggc

SEQ ID NO: 31306 - DNA, 600 bp, Chicken  19866894253519_2
gcagcactgcttgcctcttggagggcgatttcatggccaggccgggaatgtgygccgcgtccctctgccacggggcagagatgctgctggaggaggttctgctcatctgctgtgctcctgagatgggcaccctctgctccgccaaggggcctgctgctggctctgagcgctgtgtgctgctggacagccggctgtgctcgtgctgtaggggtgccatgcggtttggcaaggggctgaacggcccccagcaccatctgcagcacagagcaggcgtgagaaccccagagccccagagctggygttgggcaaacagggaaacccaacccacagcgagccckgcgcatggacagggctgtgcckggccatggccacaagcccaggtctgcgggagtggggacccaggtggaatgctgtgccatgtctgcatckgcagcaccacaaacacagcccatacacacatctgggcwttacrtggccccccgtggcttttgagggctgtgtcagctcagtgagcagctcctccagcttggggcatcctccttggggatgcagtcagtggcagggagaacaaacagacagcaccagggcaggtatggtgtg

SEQ ID NO: 31307 - DNA, 600 bp, Chicken  19866894253519_3
aggccgggaatgtgygccgcgtccctctgccacggggcagagatgctgctggaggaggttctgctcatctgctgtgctcctgagatgggcaccctctgctccgccaaggggcctgctgctggctctgagcgctgtgtgctgctggacagccggctgtgctcgtgctgtaggggtgccatgcggtttggcaaggggctgaacggcccccagcaccatctgcagcacagagcaggcgtgagaaccccagagccccagagctggygttgggcaaacagggaaacccaacccacagcgagccckgcgcatggacagggctgtgcckggccatggccacaagcccaggtctgcgggagtggggacccaggtggaatgctgtgccatgtctgcatckgcagcaccacaaacacagcccatacacacatctgggcwttacrtggccccccgtggcttttgagggctgtgtcagctcagtgagcagctcctccagcttggggcatcctccttggggatgcagtcagtggcagggagaacaaacagacagcaccagggcaggtatggtgtgtaaggtagaacccagggtggattcgggaacagatacag

SEQ ID NO: 31308 - DNA, 600 bp, Chicken  19866894253519_4
ccctctgccacggggcagagatgctgctggaggaggttctgctcatctgctgtgctcctgagatgggcaccctctgctccgccaaggggcctgctgctggctctgagcgctgtgtgctgctggacagccggctgtgctcgtgctgtaggggtgccatgcggtttggcaaggggctgaacggcccccagcaccatctgcagcacagagcaggcgtgagaaccccagagccccagagctggygttgggcaaacagggaaacccaacccacagcgagccckgcgcatggacagggctgtgcckggccatggccacaagcccaggtctgcgggagtggggacccaggtggaatgctgtgccatgtctgcatckgcagcaccacaaacacagcccatacacacatctgggcwttacrtggccccccgtggcttttgagggctgtgtcagctcagtgagcagctcctccagcttggggcatcctccttggggatgcagtcagtggcagggagaacaaacagacagcaccagggcaggtatggtgtgtaaggtagaacccagggtggattcgggaacagatacaggcagggagttgaaaggcacaca

SEQ ID NO: 31309 - DNA, 557 bp, Chicken  19866894253519_5
ccctctgctccgccaaggggcctgctgctggctctgagcgctgtgtgctgctggacagccggctgtgctcgtgctgtaggggtgccatgcggtttggcaaggggctgaacggcccccagcaccatctgcagcacagagcaggcgtgagaaccccagagccccagagctggygttgggcaaacagggaaacccaacccacagcgagccckgcgcatggacagggctgtgcckggccatggccacaagcccaggtctgcgggagtggggacccaggtggaatgctgtgccatgtctgcatckgcagcaccacaaacacagcccatacacacatctgggcwttacrtggccccccgtggcttttgagggctgtgtcagctcagtgagcagctcctccagcttggggcatcctccttggggatgcagtcagtggcagggagaacaaacagacagcaccagggcaggtatggtgtgtaaggtagaacccagggtggattcgggaacagatacaggcagggagttgaaaggcacacatggaggcgagagggagacattagttt

SEQ ID NO: 31310 - DNA, 519 bp, Chicken  19866894253519_6
cgctgtgtgctgctggacagccggctgtgctcgtgctgtaggggtgccatgcggtttggcaaggggctgaacggcccccagcaccatctgcagcacagagcaggcgtgagaaccccagagccccagagctggygttgggcaaacagggaaacccaacccacagcgagccckgcgcatggacagggctgtgcckggccatggccacaagcccaggtctgcgggagtggggacccaggtggaatgctgtgccatgtctgcatckgcagcaccacaaacacagcccatacacacatctgggcwttacrtggccccccgtggcttttgagggctgtgtcagctcagtgagcagctcctccagcttggggcatcctccttggggatgcagtcagtggcagggagaacaaacagacagcaccagggcaggtatggtgtgtaaggtagaacccagggtggattcgggaacagatacaggcagggagttgaaaggcacacatggaggcgagagggagacattagttt

SEQ ID NO: 31311 - DNA, 514 bp, Chicken  19866894253519_7
tgtgctgctggacagccggctgtgctcgtgctgtaggggtgccatgcggtttggcaaggggctgaacggcccccagcaccatctgcagcacagagcaggcgtgagaaccccagagccccagagctggygttgggcaaacagggaaacccaacccacagcgagccckgcgcatggacagggctgtgcckggccatggccacaagcccaggtctgcgggagtggggacccaggtggaatgctgtgccatgtctgcatckgcagcaccacaaacacagcccatacacacatctgggcwttacrtggccccccgtggcttttgagggctgtgtcagctcagtgagcagctcctccagcttggggcatcctccttggggatgcagtcagtggcagggagaacaaacagacagcaccagggcaggtatggtgtgtaaggtagaacccagggtggattcgggaacagatacaggcagggagttgaaaggcacacatggaggcgagagggagacattagttt

SEQ ID NO: 31312 - DNA, 600 bp, Chicken  19866894253521_1
gagaatgtgagtattaatacttattttatcaagtaatactatttatgcatctgttccatttaatgtttatattactttctaatttatggcacgtgtattattttcagtaaagctgttgggttggttccttgttcttgtctcaagagcagcactgaggaatggcacttctgctttaggaagtatttctgaaactgctcttaataaataacaaaataaaaattctaaagaagaacaactcctgtgactttaaaatgctgacatagctgtttatctgcatatcagacatggtggaaatgatgwggctttctttagattgtctgataaatcagcgaagcattgatttggaaggtccatttgtctcctgaagctgaaagataattcaatatctattggaggacacctgctgccctctaccatgccagaatttctctgtctgctgatatgccttgcttataaatgcattctccaatcagaccaacaagtcctaatcaaaatttattaaactaaagacttgagtcatacttgaggtggaaaagaagataaggagacaaaacaaataaacaacaaacaagctatttgttttataccacctcattcaac

SEQ ID NO: 31313 - DNA, 600 bp, Chicken  19866894253525_1
gttactacataactagaggtcgaagaagcaactcagcacaagaacggcgagatgagcatcaatagccccgcgttccctccccccttcccccagtatccagctaagatgttcgggcatagtgctgcatgcattgcctggcgaagttcagtggacttcacccaagtgcttgagacacgagaggagaaatccgcctcctgggcaccgcgttgaagcgcagaacaaagatgtttcaaaggttgctgctgctcagcccggcccgggaaggggcagcctcccatggccccgcttctccacccgccyggggctgaatgcagccaccgtccgatgtgggaaaagcccaagctcaacctgcggctggaaccagagaatcgtatttttctttttaaagttttctttgagcttgctcatttcagctgaggcaggagagaggtgcagtcaggcttcttgtgggctgtggagcctgggaagaaggggaagtgctgtgtctgctgctaagggctttgtgaaaaccaagtgtgctctcaactgctatgtatgtgctatatgggaagctgcatgctgtgaggagatgtgcagttttcactgccagaaaaacaaaca

SEQ ID NO: 31314 - DNA, 600 bp, Chicken  19866894253527_1
agtattttaccagtattcgcaaacgcctgtctcttgctagcctgctcagtgctggcttctctccccacgctggctggtgcgggcagaattgctcgcatgggccttgctgcagccagcaaggagggcttcggtcttggtttactctttacttcttgccctttgtgtgcagcagttggagcatcaattctaaaagacaagagctacaatcggaaaaaaattccacggcttccttctcaccctcaattttcttctctttcctgaactgtgctttattagcacaatcatcatagctattgtcayagaaaggaaaatagcgctcaagatacatctgccctgagactactctagtaatttaattgtcacttaacagaaaaaaatagctttgatggacaaaactatctcaaaggaacaatcctgaactggcagaaagcagacggcacacagaacgggtctcgcgcaaagcactgccaacagtctttgatttcttggatttgtcccatcaatacacaacagacatcacacattcccataacatatggaaaactgactcacaccacaggcttttttgcagaggcatttggactcagcacctcggaagat

SEQ ID NO: 31315 - DNA, 600 bp, Chicken  19866894253529_1
ggcttggatcatttcaagttcagaggaaaatacctcatgtgactgtggtgtcattcaccaaagaccatgttcccattatctaacctgctgtgctcttttccttcttcaagacaaacatcttccctgtgagaacgtcaggcttgaagcccagcacactgaagcagttgggccagtcagttctgcagccacccagtgctgaggagcgcaaggtacctgtggtttgttcttcaaatgcacattcttttctttggcatttttttccctaggcaagggatctgacctgagggatggaagatagartatgacagtgtagcagccttatgatgatggaatttgtggctgacggtttttatgaggtggctstgaagcagtgtgaattctagatggctgaggctaggaactgaactgctgttgctgttggacaaccctttggttggttgctttgaraacttcccagtagcttccagaagatgttacgaggtctggtagcattttgataatctgaaatgtaatactgaccttatactgagggagtctgtgaaagatgattgactaaagaagcaragcttgcaaatatgctygaatacttsygtttgaatt

SEQ ID NO: 31316 - DNA, 600 bp, Chicken  19866894253529_2
accatgttcccattatctaacctgctgtgctcttttccttcttcaagacaaacatcttccctgtgagaacgtcaggcttgaagcccagcacactgaagcagttgggccagtcagttctgcagccacccagtgctgaggagcgcaaggtacctgtggtttgttcttcaaatgcacattcttttctttggcatttttttccctaggcaagggatctgacctgagggatggaagatagartatgacagtgtagcagccttatgatgatggaatttgtggctgacggtttttatgaggtggctstgaagcagtgtgaattctagatggctgaggctaggaactgaactgctgttgctgttggacaaccctttggttggttgctttgaraacttcccagtagcttccagaagatgttacgaggtctggtagcattttgataatctgaaatgtaatactgaccttatactgagggagtctgtgaaagatgattgactaaagaagcaragcttgcaaatatgctygaatacttsygtttgaattgtgaagccttggtgtgcaaaacagtgttctgtaatccacggatattaatgaacatttctagat

SEQ ID NO: 31317 - DNA, 600 bp, Chicken  19866894253529_3
ccagcacactgaagcagttgggccagtcagttctgcagccacccagtgctgaggagcgcaaggtacctgtggtttgttcttcaaatgcacattcttttctttggcatttttttccctaggcaagggatctgacctgagggatggaagatagartatgacagtgtagcagccttatgatgatggaatttgtggctgacggtttttatgaggtggctstgaagcagtgtgaattctagatggctgaggctaggaactgaactgctgttgctgttggacaaccctttggttggttgctttgaraacttcccagtagcttccagaagatgttacgaggtctggtagcattttgataatctgaaatgtaatactgaccttatactgagggagtctgtgaaagatgattgactaaagaagcaragcttgcaaatatgctygaatacttsygtttgaattgtgaagccttggtgtgcaaaacagtgttctgtaatccacggatattaatgaacatttctagatttctagagaggacaaaaaaaaaaacttaatatgtatttgcttacaagatgtaagcattccattgtaggtatctcacaggtgttt

SEQ ID NO: 31318 - DNA, 588 bp, Chicken  19866894253529_4
aggcaagggatctgacctgagggatggaagatagartatgacagtgtagcagccttatgatgatggaatttgtggctgacggtttttatgaggtggctstgaagcagtgtgaattctagatggctgaggctaggaactgaactgctgttgctgttggacaaccctttggttggttgctttgaraacttcccagtagcttccagaagatgttacgaggtctggtagcattttgataatctgaaatgtaatactgaccttatactgagggagtctgtgaaagatgattgactaaagaagcaragcttgcaaatatgctygaatacttsygtttgaattgtgaagccttggtgtgcaaaacagtgttctgtaatccacggatattaatgaacatttctagatttctagagaggacaaaaaaaaaaacttaatatgtatttgcttacaagatgtaagcattccattgtaggtatctcacaggtgttttcttccgctttcaatgcagctccacagtgctttgaccaacagggcatcacaggttaaagtggtggaggtcaaaccggacgtcttcccttcctacaagtacagctg

SEQ ID NO: 31319 - DNA, 571 bp, Chicken  19866894253529_5
tgagggatggaagatagartatgacagtgtagcagccttatgatgatggaatttgtggctgacggtttttatgaggtggctstgaagcagtgtgaattctagatggctgaggctaggaactgaactgctgttgctgttggacaaccctttggttggttgctttgaraacttcccagtagcttccagaagatgttacgaggtctggtagcattttgataatctgaaatgtaatactgaccttatactgagggagtctgtgaaagatgattgactaaagaagcaragcttgcaaatatgctygaatacttsygtttgaattgtgaagccttggtgtgcaaaacagtgttctgtaatccacggatattaatgaacatttctagatttctagagaggacaaaaaaaaaaacttaatatgtatttgcttacaagatgtaagcattccattgtaggtatctcacaggtgttttcttccgctttcaatgcagctccacagtgctttgaccaacagggcatcacaggttaaagtggtggaggtcaaaccggacgtcttcccttcctacaagtacagctg

SEQ ID NO: 31320 - DNA, 562 bp, Chicken  19866894253529_6
gaagatagartatgacagtgtagcagccttatgatgatggaatttgtggctgacggtttttatgaggtggctstgaagcagtgtgaattctagatggctgaggctaggaactgaactgctgttgctgttggacaaccctttggttggttgctttgaraacttcccagtagcttccagaagatgttacgaggtctggtagcattttgataatctgaaatgtaatactgaccttatactgagggagtctgtgaaagatgattgactaaagaagcaragcttgcaaatatgctygaatacttsygtttgaattgtgaagccttggtgtgcaaaacagtgttctgtaatccacggatattaatgaacatttctagatttctagagaggacaaaaaaaaaaacttaatatgtatttgcttacaagatgtaagcattccattgtaggtatctcacaggtgttttcttccgctttcaatgcagctccacagtgctttgaccaacagggcatcacaggttaaagtggtggaggtcaaaccggacgtcttcccttcctacaagtacagctg

SEQ ID NO: 31321 - DNA, 561 bp, Chicken  19866894253529_7
aagatagartatgacagtgtagcagccttatgatgatggaatttgtggctgacggtttttatgaggtggctstgaagcagtgtgaattctagatggctgaggctaggaactgaactgctgttgctgttggacaaccctttggttggttgctttgaraacttcccagtagcttccagaagatgttacgaggtctggtagcattttgataatctgaaatgtaatactgaccttatactgagggagtctgtgaaagatgattgactaaagaagcaragcttgcaaatatgctygaatacttsygtttgaattgtgaagccttggtgtgcaaaacagtgttctgtaatccacggatattaatgaacatttctagatttctagagaggacaaaaaaaaaaacttaatatgtatttgcttacaagatgtaagcattccattgtaggtatctcacaggtgttttcttccgctttcaatgcagctccacagtgctttgaccaacagggcatcacaggttaaagtggtggaggtcaaaccggacgtcttcccttcctacaagtacagctg

SEQ ID NO: 31322 - DNA, 600 bp, Chicken  19866894253532_1
taagtcccttctcatgaatgtttcatcactagcagtaatgtgtctttgtacgtcagtgattttctacttgatccctctgattttcttccaaattaagtaatattctcacttgcactattaccaaaatgccagctgtgcagagcagttcaggcatatctatactactgtcacatcactgcttttaaggcatccaggttttgcagaagaacttacgaatacgtgctaggcaacttacctccagcagatagataggtacgtggggaaggagtacagagagcaaagtggatcccaaaatgaccytacaatgcagacttagaaaagctgcatgtgggtgcagcctcatgaggctgcttgactctcagatgaatacctatgtgagcctggcttccagggctccgatctcttgcatcactggagctgacgtgctctctttggctgtgggtaatcatctaactgtttctcctgtactactgagcctttcatttgctaggcagataactttcctcaaaactgaggawaaaaagtctgaattcagaagccttctcttccattaaaaaaatacacattttaaatgatttttagatacttcttaggagaggg

SEQ ID NO: 31323 - DNA, 600 bp, Chicken  19866894253532_2
cgtgctaggcaacttacctccagcagatagataggtacgtggggaaggagtacagagagcaaagtggatcccaaaatgaccytacaatgcagacttagaaaagctgcatgtgggtgcagcctcatgaggctgcttgactctcagatgaatacctatgtgagcctggcttccagggctccgatctcttgcatcactggagctgacgtgctctctttggctgtgggtaatcatctaactgtttctcctgtactactgagcctttcatttgctaggcagataactttcctcaaaactgaggawaaaaagtctgaattcagaagccttctcttccattaaaaaaatacacattttaaatgatttttagatacttcttaggagagggtagtaggttatgattatttagagtaccattaattacttagctgtcacatacctgtggatatggaagtccratatctagaacaagagactataacaaagtgcttagcctgaagactgaaactcatctggggacctggtacgtgaaccagagcagcagtagcaaacgtggaagccccagtctgaacttygtaaatttaaaagacactttccaaacaagca

SEQ ID NO: 31324 - DNA, 600 bp, Chicken  19866894253532_3
ctatgtgagcctggcttccagggctccgatctcttgcatcactggagctgacgtgctctctttggctgtgggtaatcatctaactgtttctcctgtactactgagcctttcatttgctaggcagataactttcctcaaaactgaggawaaaaagtctgaattcagaagccttctcttccattaaaaaaatacacattttaaatgatttttagatacttcttaggagagggtagtaggttatgattatttagagtaccattaattacttagctgtcacatacctgtggatatggaagtccratatctagaacaagagactataacaaagtgcttagcctgaagactgaaactcatctggggacctggtacgtgaaccagagcagcagtagcaaacgtggaagccccagtctgaacttygtaaatttaaaagacactttccaaacaagcaggaatttttatcacttggaattttagttgtaagctcttgttgtccccggccatgaacattcctgttgctttttgtttgttttttttaatctagcttcctcatcttactcacaggttctctaaaggaatgttacttttcaaataggatccagt

SEQ ID NO: 31325 - DNA, 600 bp, Chicken  19866894253532_4
taggcagataactttcctcaaaactgaggawaaaaagtctgaattcagaagccttctcttccattaaaaaaatacacattttaaatgatttttagatacttcttaggagagggtagtaggttatgattatttagagtaccattaattacttagctgtcacatacctgtggatatggaagtccratatctagaacaagagactataacaaagtgcttagcctgaagactgaaactcatctggggacctggtacgtgaaccagagcagcagtagcaaacgtggaagccccagtctgaacttygtaaatttaaaagacactttccaaacaagcaggaatttttatcacttggaattttagttgtaagctcttgttgtccccggccatgaacattcctgttgctttttgtttgttttttttaatctagcttcctcatcttactcacaggttctctaaaggaatgttacttttcaaataggatccagtcttagataactgagcagtccaatgcttacaggtcaccccatggatttgttagggatgaatcaatgaattatatatttggggggagcgggtggggagaaggcggcacacaaacaaact

SEQ ID NO: 31326 - DNA, 599 bp, Chicken  19866894253534_1
  misc_feature (1)..(229): n is any nucleotide
nnnnnnnnnnnnnnnnnnnnnnnnnnnnnnnnnnnnnnnnnnnnnnnnnnnnnnnnnnnnnnnnnnnnnnnnnnnnnnnnnnnnnnnnnnnnnnnnnnnnnnnnnnnnnnnnnnnnnnnnnnnnnnnnnnnnnnnnnnnnnnnnnnnnnnnnnnnnnnnnnnnnnnnnnnnnnnnnnnnnnnnnnnnnnnnnnnnnnnnnnnnnnnnnnnnnnnnnnnnnnnnnnnnnnctgacaggtgtggtgagattcatatgaatgcagtagaatcagtgttttacagttatgtacattatttttcracaagaattttacacagatttttttttttttgatgcaacaagctagaaaattcatgtttaaagtcccttacttgtayctgagccttctaagccatttcagttagygaggcaactaaatgaattaatttagttaggcagctatttgcatggaaatggcagaagatcttaaatgcagccatcctgttactgattccttttgaagagytttgcttaaattattcttctgtttctcttctccaggagagtatacaaggaaagattaggacttcctccaaagatagtgattggttatcagtccc

SEQ ID NO: 31327 - DNA, 599 bp, Chicken  19866894253534_2
  misc_feature (1)..(152): n is any nucleotide
nnnnnnnnnnnnnnnnnnnnnnnnnnnnnnnnnnnnnnnnnnnnnnnnnnnnnnnnnnnnnnnnnnnnnnnnnnnnnnnnnnnnnnnnnnnnnnnnnnnnnnnnnnnnnnnnnnnnnnnnnnnnnnnnnnnnnnnnnnnnnnnnnnnnnnnnctgacaggtgtggtgagattcatatgaatgcagtagaatcagtgttttacagttatgtacattatttttcracaagaattttacacagatttttttttttttgatgcaacaagctagaaaattcatgtttaaagtcccttacttgtayctgagccttctaagccatttcagttagygaggcaactaaatgaattaatttagttaggcagctatttgcatggaaatggcagaagatcttaaatgcagccatcctgttactgattccttttgaagagytttgcttaaattattcttctgtttctcttctccaggagagtatacaaggaaagattaggacttcctccaaagatagtgattggttatcagtcccatgcagacacagctactaagagcggctccaccactaaaaataggtttgttgtttaagaagacaccttctgagtattc

SEQ ID NO: 31328 - DNA, 599 bp, Chicken  19866894253534_3
  misc_feature (1)..(124): n is any nucleotide
nnnnnnnnnnnnnnnnnnnnnnnnnnnnnnnnnnnnnnnnnnnnnnnnnnnnnnnnnnnnnnnnnnnnnnnnnnnnnnnnnnnnnnnnnnnnnnnnnnnnnnnnnnnnnnnnnnnnnnnnnnnnctgacaggtgtggtgagattcatatgaatgcagtagaatcagtgttttacagttatgtacattatttttcracaagaattttacacagatttttttttttttgatgcaacaagctagaaaattcatgtttaaagtcccttacttgtayctgagccttctaagccatttcagttagygaggcaactaaatgaattaatttagttaggcagctatttgcatggaaatggcagaagatcttaaatgcagccatcctgttactgattccttttgaagagytttgcttaaattattcttctgtttctcttctccaggagagtatacaaggaaagattaggacttcctccaaagatagtgattggttatcagtcccatgcagacacagctactaagagcggctccaccactaaaaataggtttgttgtttaagaagacaccttctgagtattctttcataggagactgcgtcaagcaatcg

SEQ ID NO: 31329 - DNA, 599 bp, Chicken  19866894253534_4
  misc_feature (1)..(24): n is any nucleotide
nnnnnnnnnnnnnnnnnnnnnnnnctgacaggtgtggtgagattcatatgaatgcagtagaatcagtgttttacagttatgtacattatttttcracaagaattttacacagatttttttttttttgatgcaacaagctagaaaattcatgtttaaagtcccttacttgtayctgagccttctaagccatttcagttagygaggcaactaaatgaattaatttagttaggcagctatttgcatggaaatggcagaagatcttaaatgcagccatcctgttactgattccttttgaagagytttgcttaaattattcttctgtttctcttctccaggagagtatacaaggaaagattaggacttcctccaaagatagtgattggttatcagtcccatgcagacacagctactaagagcggctccaccactaaaaataggtttgttgtttaagaagacaccttctgagtattctttcataggagactgcgtcaagcaatcgagatttgggagctgaaccaaagcctcttcaaaagcagagtggactacatttaaatttgatttccatctaaatgttgctaagatttgtgagaagtctaatt

SEQ ID NO: 31330 - DNA, 600 bp, Chicken  19866894253537_1
aagcaatacattaattatttcttcatcaaaaggggccttaagcagtacatgcaagcagtggtgtaaagaagcatgcactggcatgctgacacagatgctttttatggtccctggacaatgccttggctatttctctgtcagtgaaactaaaggcactcagatttgctcattatctaatgcatccaaatgagtttcatgagttcaggagactgaaagcacatttgtaaattagcagctactgacctgtgattggccttcaacgcgtgtgatcaatagtgtggacagtaccagagaggattraagactgaaattcttcgagcaagtccagtgagatcaatcacatcatgatcagaagtccccaaactattttacaacaacagatttccttttaaatacagcttttccttagacttgttttttggccacctgttactcaaggccttttaactaaaaatctgctgtaaactgaacaagcacaaggcatgggccgtcacactgctcagatcatccaccacatccattacgtttccatgcaaggggctctgtaagacaatcactgttcccaaagcaacaagtttggaactggtatccttctgccaa

SEQ ID NO: 31331 - DNA, 600 bp, Chicken  19866894253537_2
cccaaactattttacaacaacagatttccttttaaatacagcttttccttagacttgttttttggccacctgttactcaaggccttttaactaaaaatctgctgtaaactgaacaagcacaaggcatgggccgtcacactgctcagatcatccaccacatccattacgtttccatgcaaggggctctgtaagacaatcactgttcccaaagcaacaagtttggaactggtatccttctgccaacacaaataacctgccaacacaaatgctcatacttgtgttcagacccaatatcagaaraagtgacagaaaaatataaatgatcctcttttccaaaacattacatttacacaaataagaagtttaaattagatatgcctcaggaccatagatcattaagataatgtcccctgtctttgtaaagtgtgccgtaggaaatgagctggcactgcaatttccgttctcatctgaaatgccccaggcagaggttactaattctgatacatttcccaagactgaggtttataatcattagtttgctttttctttctttatttccattcaactattcatagccatattctcggtatcatcccaaat

SEQ ID NO: 31332 - DNA, 599 bp, Chicken  19866894253548_1
  misc_feature (1)..(71): n is any nucleotide
nnnnnnnnnnnnnnnnnnnnnnnnnnnnnnnnnnnnnnnnnnnnnnnnnnnnnnnnnnnnnnnnnnnnnnntcaatgctatggggtaagcagcttcttgcttgctgtggggttaaaatgtgattaaatggggcgccagcagacagagccagggatgaggtggacaacatgcagatgtggggagcaccagtgcagcagatctgcactgagcaaacaccttaggctccccgcagcagcagcacaggagccacactccgcagggcaggacgtcctttccccttggtgggacagctgtaatcayatcgcattaacattttcctgctcgttttctgcctgcaaggaggggggtctgctgcctaatgctagagacacggtgtgggacaaagccaacccagaggcaacgtgaggactggcttttgtgacagaacttggctcaatgaaaaataaatttgcacggcctttaagagaccttctgcctcctccaagtattggctccaaactgatatagagcagggcttgtgcggcaggattctcctcttcctgtcttaaaagtattatgaaagatcagtgcctgctgtcaccatggtttgcaggcatgtt

SEQ ID NO: 31333 - DNA, 600 bp, Chicken  19866894253548_2
cggcctttaagagaccttctgcctcctccaagtattggctccaaactgatatagagcagggcttgtgcggcaggattctcctcttcctgtcttaaaagtattatgaaagatcagtgcctgctgtcaccatggtttgcaggcatgttattgttattaattacgcttattaccgcagcacagatccacgcagcatctggcccacaggctgcctgcaggaacaggaccgccagcactgccagctgtgcaggtcagtggccaaaatgtggcagaggacagctggacagatgggacagagggacrgacaagacagatggacggacaggrccggcagcacggtggcttcagctgtatgtgatgctgctccgtttcctggcaaaagcggaggagagagcacggggaaaatgcttggggagggtgcagggctctcgtgtgctggttgtggaggtgggggargctgttggctctttgtttcctccgtttgaagggaaacggaggggggaaagggaaaaagcaaacgtgccaaattggaacgtgagggctggaagctttgctgaaaagcaaaggataaaacctccccttgtggcccttccccgggggaag

SEQ ID NO: 31334 - DNA, 600 bp, Chicken  19866894253548_3
cctccaagtattggctccaaactgatatagagcagggcttgtgcggcaggattctcctcttcctgtcttaaaagtattatgaaagatcagtgcctgctgtcaccatggtttgcaggcatgttattgttattaattacgcttattaccgcagcacagatccacgcagcatctggcccacaggctgcctgcaggaacaggaccgccagcactgccagctgtgcaggtcagtggccaaaatgtggcagaggacagctggacagatgggacagagggacrgacaagacagatggacggacaggrccggcagcacggtggcttcagctgtatgtgatgctgctccgtttcctggcaaaagcggaggagagagcacggggaaaatgcttggggagggtgcagggctctcgtgtgctggttgtggaggtgggggargctgttggctctttgtttcctccgtttgaagggaaacggaggggggaaagggaaaaagcaaacgtgccaaattggaacgtgagggctggaagctttgctgaaaagcaaaggataaaacctccccttgtggcccttccccgggggaagaatgaaaggaaacatggtgaaatc

SEQ ID NO: 31335 - DNA, 600 bp, Chicken  19866894253548_4
ttaattacgcttattaccgcagcacagatccacgcagcatctggcccacaggctgcctgcaggaacaggaccgccagcactgccagctgtgcaggtcagtggccaaaatgtggcagaggacagctggacagatgggacagagggacrgacaagacagatggacggacaggrccggcagcacggtggcttcagctgtatgtgatgctgctccgtttcctggcaaaagcggaggagagagcacggggaaaatgcttggggagggtgcagggctctcgtgtgctggttgtggaggtgggggargctgttggctctttgtttcctccgtttgaagggaaacggaggggggaaagggaaaaagcaaacgtgccaaattggaacgtgagggctggaagctttgctgaaaagcaaaggataaaacctccccttgtggcccttccccgggggaagaatgaaaggaaacatggtgaaatcaaagagtttgcagaaatgtaaatccccagtagctgccatggttgtgaatatataactccagttgtacccggcagctcagccctggggggctctgctgtgtcttggagccctgtgatgtgggacccccat

SEQ ID NO: 31336 - DNA, 600 bp, Chicken  19866894253548_5
acgtgccaaattggaacgtgagggctggaagctttgctgaaaagcaaaggataaaacctccccttgtggcccttccccgggggaagaatgaaaggaaacatggtgaaatcaaagagtttgcagaaatgtaaatccccagtagctgccatggttgtgaatatataactccagttgtacccggcagctcagccctggggggctctgctgtgtcttggagccctgtgatgtgggacccccatgtgtgtgtgccctgcggcgagcctgcagacgccctgctccacagggctttgggtttgttgygacttacagtcggtactgctctgatgggaatggctttcaagaatgggcaccttccttgctgcagcaccagccccagacagagcagtttcccccaggaggggctaccgatgggctcagcaggaccctgctcttgggcaggagagccaacacagacttcatcgagatggaaagaggagtatttgctgagaaacctgctgagcatgagggctgagcatgctttgggcatcgcataactaccaggcaatcactcagcacagccgtggagcctgcaagatcctaagcccagcctcatttgtctcc

SEQ ID NO: 31337 - DNA, 600 bp, Chicken  19866894253552_1
ttaaaatttcgtatgtttccagctcatcctagaatagccctgttgtttatgcagtagtaacatagctgaggagggcttttcacacctgttgatcaacatctgaagagtccagataacaagcatgtgaagtcacacttactgtctttctcttcatctaaaaataaatgccatagctctccctagcttgcaatatatatataaagactggacacagctgaccagcatagtagtgttacaatgtcttgatttagtgggtatgccattcttaagccagcagataaagtggatcattctttagcwgaacactttgtatgtgagggatttgtgccaataagccctgacacccgccagaggtaaagaatgtggcctcgagcacgctacagagaggactgttgcatctttctcycatatttaaatctctgaatttaatatcttcagactgaagagaaggtaggatgtgatttccaattcttctctatcaggatcaaagatttttgaatctgaatggattgaacattgatgtttcttttgtattacagtggtgtaaaggttttcacataggttggtacttgcaattagataggttttcaagttctatta

SEQ ID NO: 31338 - DNA, 600 bp, Chicken  19866894253552_2
gtccagataacaagcatgtgaagtcacacttactgtctttctcttcatctaaaaataaatgccatagctctccctagcttgcaatatatatataaagactggacacagctgaccagcatagtagtgttacaatgtcttgatttagtgggtatgccattcttaagccagcagataaagtggatcattctttagcwgaacactttgtatgtgagggatttgtgccaataagccctgacacccgccagaggtaaagaatgtggcctcgagcacgctacagagaggactgttgcatctttctcycatatttaaatctctgaatttaatatcttcagactgaagagaaggtaggatgtgatttccaattcttctctatcaggatcaaagatttttgaatctgaatggattgaacattgatgtttcttttgtattacagtggtgtaaaggttttcacataggttggtacttgcaattagataggttttcaagttctattaaaatcacctctgacctcaaacctctcaaaatagcaccatgtcatgatgtaatgccactgaacttcactcaaggatttgtcatcaggtcatgttctctggctttctt

SEQ ID NO: 31339 - DNA, 490 bp, Chicken  19866894253557_1
tccacaaaatctgcagccttgcaagactcagagtatttctatttactgctgatagcccctagatttgggattttgctgtcaggattattacttactcatttctgggtgtttcctaaaattaacatttcctgtgatctgttgtacttatttttactatgtcctgggactcccagtctatctctgagactctgaggtaatgaaaatcatcatggggaggatggcacttctgccatcatataatccagacatttctctttcagagacagtgctttgctatctagttcaggtcattaaaaaaaygaaacaaaacaaaacaaacaaacaaacaaaacaaccacaacaagacagagaataaagtcatcctccatccatatagctgtacccaaggcctcattcctcaactagcatactctggttcttctgagagttcatgttgttgctcaaaaatccttcaacaaagaacaagatcacagaaagattaagaaggata

SEQ ID NO: 31340 - DNA, 600 bp, Chicken  19866894253560_1
tagcataaaaatgtatttgtttgttctttccttaccgttatggagaggaaatcacttcagtccttcttgtcttccttaagttccagctgaccagtcagggtgcaaagtctgcctgatacaggtgatggattgtattacttgatcaacagatagacaaaaaaaacttgccaagcaacacgtaagctgaaaaacccttctctctgctacttagtgctcagttacagacacatacatgtgattcatgcttgatttacaacaaattattgatttaaaagagatagaggagacactgccttcacrgtgaatcgtctgagacttctgataacttctgtggtgaaatgctgtcagatgcagaactgctgacaaaatattttcgtgaacctaattttgctggctattattcacagaacactctttctcataagcatatggtaccttttaaagataatgattctccttccaagaaatgctgcattagattacaataataaattaagttcacagaataccttagctagcaacagagcagcgtttctatacacagtcctcagtgtggatttatgaagaaatgccccaccacaaaaaagaccaatattggag

SEQ ID NO: 31341 - DNA, 600 bp, Chicken  19866894253560_2
ctccttccaagaaatgctgcattagattacaataataaattaagttcacagaataccttagctagcaacagagcagcgtttctatacacagtcctcagtgtggatttatgaagaaatgccccaccacaaaaaagaccaatattggagataggtttgctgaggcagtgcgttcatcagaggctgattttgttgttgcccacctgaggattacagccaacctcatttcctatggataaagcagggaagcacttaacagctgctgctctttgacttgtgcagtcatcatcctctttgaaaccragagggagaaagcctgttgcactcaggtctcaccaagttagttcaattgaaaggagacatgcatgacaatgggggacattgtagccagtccccagcttggcgacacagccgtagcccatgggtgggccttgggaccaggcgtggaagtcttcctcctggctctagcagaacaaaaggygttagatgctttcacacatgctctgtgctccttgatcacaaattgcaaactttgtgtatacatgctagcagggcagaagcagtctggctgagctccaaaatcaatgttaaaaacaacaatgt

SEQ ID NO: 31342 - DNA, 600 bp, Chicken  19866894253560_3
ggctgattttgttgttgcccacctgaggattacagccaacctcatttcctatggataaagcagggaagcacttaacagctgctgctctttgacttgtgcagtcatcatcctctttgaaaccragagggagaaagcctgttgcactcaggtctcaccaagttagttcaattgaaaggagacatgcatgacaatgggggacattgtagccagtccccagcttggcgacacagccgtagcccatgggtgggccttgggaccaggcgtggaagtcttcctcctggctctagcagaacaaaaggygttagatgctttcacacatgctctgtgctccttgatcacaaattgcaaactttgtgtatacatgctagcagggcagaagcagtctggctgagctccaaaatcaatgttaaaaacaacaatgtatgttttatacagctgaacagctcaggaacccaagctgttctcactgtgctatcatccagtccaatatatgacacagagcatgtgcttacacttttatgaagttgtttgccagtaatacaaaataagggtgacactcgatcagttctaaaatatgtttgagaagggatgacaggggtc

SEQ ID NO: 31343 - DNA, 600 bp, Chicken  19866894253567_1
caaagcaaagagcactgttatgtcaactgtcatatttaagaattcagcatttccataggcacagtaaagatacagaagccaaatgcatgggatgtctggttctgttgtctggggataacagttcatagagtgccaaaggtggcagtcactcatcaccctgtaagttattttatggctaccactgagttctttggttttctgatgtttaaacttgtgagtgaataatttgtttattttaacattcaggtagataagatacaaaatagaagttaattctccagaaaatgaggataccacccrgatgtttaataaaatcatggattctgtaaacagactgagtaattgcagaataatctactgctattttgctttcagattattctgcctgtaggcaatttacccrtgttgtatctgcagcaacacactgcacctctgcagctttcattgctatagcagaacactgctgtataccaaaaacctctcattagcaatcatggttttgttggttttttttgtaatagcaggcaacaacctgagttgatgtaaatagataatcacctacaaccctgttcagattgaaattcccagattcctcaggca

SEQ ID NO: 31344 - DNA, 600 bp, Chicken  19866894253567_2
gttgtctggggataacagttcatagagtgccaaaggtggcagtcactcatcaccctgtaagttattttatggctaccactgagttctttggttttctgatgtttaaacttgtgagtgaataatttgtttattttaacattcaggtagataagatacaaaatagaagttaattctccagaaaatgaggataccacccrgatgtttaataaaatcatggattctgtaaacagactgagtaattgcagaataatctactgctattttgctttcagattattctgcctgtaggcaatttacccrtgttgtatctgcagcaacacactgcacctctgcagctttcattgctatagcagaacactgctgtataccaaaaacctctcattagcaatcatggttttgttggttttttttgtaatagcaggcaacaacctgagttgatgtaaatagataatcacctacaaccctgttcagattgaaattcccagattcctcaggcaaataacctttacattaccattacatacacatctggtgcctgtattgcccattacatctcaggctatctcatctcattctgttccctaagagtgtttttttgaa

SEQ ID NO: 31345 - DNA, 600 bp, Chicken  19866894253570_1
ttaaatttccattttgtcctgcatttatgtcaattgtggtattcattgttgcaaacaaacggacaaatcctttagctgatagccataataggaaaagaaaaacattttcagggccatttaggagattgcaggcactctaaccacacttaggctacttcaagatcagtgatcacacattcaactgtgaaacaggaaacctgatctactgatctactacagaacgtgagccctgacctgctgaaaccaagaccactagctatatatgcaacagtgaggtgcagaacaaagcaaccttgcatrctttaacagaaaggattccatctcttagtgataaatagcctttatatgcttctggaagaatgcaaacgtgtgcttgatcctactccagtgtttatgtttttcaaaaaatcagagtcaccaacagtatggcacaaaagaaacactaaaaaagaacaagataaattgattgcttatgacaacatagtagaatactcaatgattctttgacaagtgtaattaagaatggcattacaaatgaagctattaaagactgcaattagagaaaaatgcactaagtccgcaggcctggatagcaattgt

SEQ ID NO: 31346 - DNA, 599 bp, Chicken  19866894253574_1
  misc_feature (1)..(4): n is any nucleotide
nnnngggaaaatcagagaggcacttttggctggtttttgataatttctgtggtattttccaactgaagcttctttgaaagtgacatgtataataaatgtatcaggatgaatatagggtgttggcatcaagtatctaggtactttacagaagaaaactgtatgccaactctgctgtttttcacagtttccctgccatttggccctgtgctatttctcttccatcccacactaagtgtattcctaccctgcagctggaaggaaggctgtattacttccttctcccataaaagcacccccctyccccccccagccttatagcactttggaaaatgctggctttttctctcatcttgaatttaggtaatgtgaaaaccagattgtttaatcttgatttttacctataaaacacacatrgagaaaaacagtaacatgacacctgactctgtctgatttgctttttcatgtctactccttgatggaaacataacaaatgacccagaagggcctaagattttagttttgcttttgaggattttttttgtgtagttgtggaaactacaatgatagcattttaaataaagttcttatccagctacagc

SEQ ID NO: 31347 - DNA, 600 bp, Chicken  19866894253574_2
gggtgttggcatcaagtatctaggtactttacagaagaaaactgtatgccaactctgctgtttttcacagtttccctgccatttggccctgtgctatttctcttccatcccacactaagtgtattcctaccctgcagctggaaggaaggctgtattacttccttctcccataaaagcacccccctyccccccccagccttatagcactttggaaaatgctggctttttctctcatcttgaatttaggtaatgtgaaaaccagattgtttaatcttgatttttacctataaaacacacatrgagaaaaacagtaacatgacacctgactctgtctgatttgctttttcatgtctactccttgatggaaacataacaaatgacccagaagggcctaagattttagttttgcttttgaggattttttttgtgtagttgtggaaactacaatgatagcattttaaataaagttcttatccagctacagcaaagatactgtaggtaaggtgccacagtacaagatcctgtgtgcgctctcgactgtaataataggtttggaagaggtctttgctggtagctggatccattcacccagtcagttct

SEQ ID NO: 31348 - DNA, 580 bp, Chicken  19866894253575_1
agatctggagctaaagctaagtgattaagccaagttatcctgcagagaaatgaactgcaagagatgtttaaaatatcatgctctatatactcttcaagtcattttaaactgttcatcttaaggtaattaagctgggtcctttgggtgaatattaactacaagtaggaaattagaagctaaactgagatttacagaagattcttttttttttttttaatttatttagaagatcctcatgctaagaaatcagcttggaaaaaatacttcatctctggaaagactttttgcattggataaagsgtatctggcatccatgagcaaattttcctatattaaactgcatctgattttgtggggacttagcagaagaaccagaaacccattttcagttcttctttttatgttaaaatccccaaataaacaaacaaaaaaaattgtaagtgatttttagttctggttactgcaggtggatcttccctgtgaaaactttatattccatgatttcctgatttttatgtcaacatccttttgctgacatttgattgattgaagaatttcaggtaccagcttacgcaagtta

SEQ ID NO: 31349 - DNA, 549 bp, Chicken  19866894253581_1
cgcagggcattgttggcttgctttctttacaggctgtttctgttggcaggctccattgcttcgcctgtgtttcagaaaacaaaagtacattgctgcctttttttgttgtttcagttgagtcaatctaagagagaatttaatatacatttattccaaattgtacacaggaggtgcctgcatccaagcgtgctctgctcagttttggaaccgaagcatctcctttaccctcccaacacaactcaaagtcggtgactttgaacccttcgtttaatgagactgcttcacagcacagcatggagraaaccacaaagtacttgagagccccttttgagaggtggttctatgaaacttgctcagtccacaagaagtgtaaggatacacttggccatgctgtgagttgttgtgtacaaagcttttgagcctcatgctttggtgctgacagcctgccggctgggcagctccatgttgtcctgcctctgccaggctggtgctgctgggttcctctaggtgagatgggaccttcatgtcacctccatcactgacttcagc

SEQ ID NO: 31350 - DNA, 599 bp, Chicken  19866894253585_1
  misc_feature (1)..(134): n is any nucleotide
nnnnnnnnnnnnnnnnnnnnnnnnnnnnnnnnnnnnnnnnnnnnnnnnnnnnnnnnnnnnnnnnnnnnnnnnnnnnnnnnnnnnnnnnnnnnnnnnnnnnnnnnnnnnnnnnnnnnnnnnnnnnnnnnnnnnnngaaatcctttgtcgatttgaggctttgtaagtctatgtttgtttaggtctgacaaagcgctgtcgagagccaatagtgctgccctacagcttgcccttaaaggtcagtcctaaatcagaggaagagggacagcggctagaggtcagcagctttgtaaggcaccctygatagagatgcacagagccaaagagagcagtcattttcctcctcctttgcaataaaagccaggacacactactgagacagcaggacatcgagtccatgttagtaaaacatttacttctaaagtttaagctgtatttacattgatgacttcatttattcaagacctctgagcacgggtgcctttaattcagatttaagttcttacaataacagagaaaaagacaatcagaaagtcatgctggacaaaatattccttagtatatatgaccaggagaattaggcagtccttatcaagtatca

SEQ ID NO: 31351 - DNA, 600 bp, Chicken  19866894253585_2
catcgagtccatgttagtaaaacatttacttctaaagtttaagctgtatttacattgatgacttcatttattcaagacctctgagcacgggtgcctttaattcagatttaagttcttacaataacagagaaaaagacaatcagaaagtcatgctggacaaaatattccttagtatatatgaccaggagaattaggcagtccttatcaagtatcaccttaaataaagtcagtgcagatcactaagcagctctgtatctcagttttcttactctaacattcattaattgacagtttgggaamaaccgaactaccttacttattactaaagctatccttaataacagatggaattaataacactacctctgagctccaccacaccacataagcataagcacaatttaacttcactccccattcctaatgtcctttccaagaaaggaattctccacagaatactgtatagagcaatacaacctccagaacacagagaggaaaaaacaaagtgcccttacctgattcctatcacgtgcacttgtgtacctgatcttctggatgaagtaaaatattaaccacgctgaagaaattatcatcaaaaca

SEQ ID NO: 31352 - DNA, 472 bp, Chicken  19866894253586_1
aaggagtggctggaaagctgcctgacagaaagggaccttggtgtactgatggacaactggctgaatatgagccagcagtgtgcccaggtggccaagaaggccaatggcatcctggcttgtatcaggaatagtgtggtgagcaggaccagggaagtaatcctgcccctgtactcgacactggtgtggcccaaccttcagtacattgttcagctttgggcacctcagtacagaaagtacatatggaggtgctggagcaggtccaaagaagggcagaaaggcttgtgaagggcttggagaatrtgccctatgagcagagactgaaggaactggggctgtttagtctggggaagaggaggctgaggggagaccttattgctctcttccaatatctaaaagrtgcttgcagygagagcagggttggtctcttctcactgctgacaggatgagggggaaatggcctcaagttgtgcca

SEQ ID NO: 31353 - DNA, 375 bp, Chicken  19866894253586_2
aggccaatggcatcctggcttgtatcaggaatagtgtggtgagcaggaccagggaagtaatcctgcccctgtactcgacactggtgtggcccaaccttcagtacattgttcagctttgggcacctcagtacagaaagtacatatggaggtgctggagcaggtccaaagaagggcagaaaggcttgtgaagggcttggagaatrtgccctatgagcagagactgaaggaactggggctgtttagtctggggaagaggaggctgaggggagaccttattgctctcttccaatatctaaaagrtgcttgcagygagagcagggttggtctcttctcactgctgacaggatgagggggaaatggcctcaagttgtgcca

SEQ ID NO: 31354 - DNA, 365 bp, Chicken  19866894253586_3
catcctggcttgtatcaggaatagtgtggtgagcaggaccagggaagtaatcctgcccctgtactcgacactggtgtggcccaaccttcagtacattgttcagctttgggcacctcagtacagaaagtacatatggaggtgctggagcaggtccaaagaagggcagaaaggcttgtgaagggcttggagaatrtgccctatgagcagagactgaaggaactggggctgtttagtctggggaagaggaggctgaggggagaccttattgctctcttccaatatctaaaagrtgcttgcagygagagcagggttggtctcttctcactgctgacaggatgagggggaaatggcctcaagttgtgcca

SEQ ID NO: 31355 - DNA, 600 bp, Chicken  19866894253589_1
ggacaaatccatgaatatatgtgtaaaccactggccattaaaaacagcagccatatatactctgtactcagaccagcagtgctagtggctgtatcctgttcctctctctgtctgttcaatcccattagtggaacttatgtacagaaatatgttctgggtttgtttagtctggaggaaatgggggagacctttatagatctctacaactacctgaaagaagcttgtagagaggggtgcattggcctcttctcatgggtcactagttataggatgagatgtaatggccttaaggtgttgccrgggaggttcaagttgaatattaggaaacatttcttctcaggaagagtggtgaggcatcggaacaggctgcccagggaggtagtggagtcaataaatgtgtagatgtggccctgtgggacatggtttagtgggcaaggtggggatgggttgatggttggactagatgatcttagaggtcttttccaaagtttggttctgttattctgtgtgaatctctctggtacgttggcttatacactagctagccaccactggatcccacttcccagtctccccagtaactggcatctggatgtgtgc

SEQ ID NO: 31356 - DNA, 600 bp, Chicken  19866894253600_1
tctcctcaccaataacccgagcagattctcaaggatttgttcctaaacaactttattccttgaggttttaagtacacagaaagcatgttgaccatgcttctccggtgtacatgcttctacctgtgtacagctcccctgcagagctccttcgagctcatttttggacagggcatttgtagagttctggcgaccacaaacattgaccaggcggaatcatctagcaccttttgatcctccttgtgcagaaaggcagttttggaggattcccttcaaggaacttcataagtcacagtaggagcwggttggatttttaatgttattgtagaaaacagagtccatcgcttgaactctggctttggaatttgcaattggattcagttcagtgttttctcttatcaagaaacagtgtgcagaatggtggaaggaagaaacacaggcctgaaatagattatttggtaatgaagataagcccctcatagctacagaaaaatagatgtttggtccaggattgtccagatatttgccttccacgtggtctccacaggccatgagccctaaagagactatgattttgtgttgtgagtccaaaagccacaaatg

SEQ ID NO: 31357 - DNA, 599 bp, Chicken  19866894253603_1
  misc_feature (1)..(5): n is any nucleotide
nnnnncccaaagcagcccactccacttaatggtagaggaaaccgatacgtagcacagtgacctcactgggcagcaaggcaccattcaacagcccttcagaagggccaggacaccaagcagaggacatgcttgtctctctagggtctccctgaacccaatctggggctaggagaggtggaattagagtgctagtcttcttctccgctgcttagaactcctcaaggcaccagggagacaagggatgttgacactcctgaaaggagagtagaggttcctggggtgagacgaagattgctcccygcttaaactgcagttcaactccctttcaaatcagcttgccggacaggagggactgaaccaggctggctgcagcatgcaattgcatctgtcaaatttgtcagcgcacacacrgtcctgaacatgtgcaagatgtggaaggacaaacaacactggagccagcatcaaactaaagcggtgcagacagatwacacccactgcaacataaaccttgccagcagagagttaagccaacgttgttttctaaacaaatctgaaccggtggagtgagttcatactggatcagcattttccaccatgta

SEQ ID NO: 31358 - DNA, 600 bp, Chicken  19866894253603_2
accaagcagaggacatgcttgtctctctagggtctccctgaacccaatctggggctaggagaggtggaattagagtgctagtcttcttctccgctgcttagaactcctcaaggcaccagggagacaagggatgttgacactcctgaaaggagagtagaggttcctggggtgagacgaagattgctcccygcttaaactgcagttcaactccctttcaaatcagcttgccggacaggagggactgaaccaggctggctgcagcatgcaattgcatctgtcaaatttgtcagcgcacacacrgtcctgaacatgtgcaagatgtggaaggacaaacaacactggagccagcatcaaactaaagcggtgcagacagatwacacccactgcaacataaaccttgccagcagagagttaagccaacgttgttttctaaacaaatctgaaccggtggagtgagttcatactggatcagcattttccaccatgtagccgcagcagttttgacccgacaccaagctccctagagctggatttattgtcttgtccaccccgagtccgtgccaaagtcatgccctgagagggctgaggaatttaaccaat

SEQ ID NO: 31359 - DNA, 600 bp, Chicken  19866894253603_3
gctagtcttcttctccgctgcttagaactcctcaaggcaccagggagacaagggatgttgacactcctgaaaggagagtagaggttcctggggtgagacgaagattgctcccygcttaaactgcagttcaactccctttcaaatcagcttgccggacaggagggactgaaccaggctggctgcagcatgcaattgcatctgtcaaatttgtcagcgcacacacrgtcctgaacatgtgcaagatgtggaaggacaaacaacactggagccagcatcaaactaaagcggtgcagacagatwacacccactgcaacataaaccttgccagcagagagttaagccaacgttgttttctaaacaaatctgaaccggtggagtgagttcatactggatcagcattttccaccatgtagccgcagcagttttgacccgacaccaagctccctagagctggatttattgtcttgtccaccccgagtccgtgccaaagtcatgccctgagagggctgaggaatttaaccaatgccagaaaggctccatccgggaggagcttgctttctgtaaactcctcaataacaacaccaaacgtgaccgtgcggt

SEQ ID NO: 31360 - DNA, 600 bp, Chicken  19866894253614_1
gtaaaactccacaaaactagtgctgtgattttaactgagttgaaaaaatacaacatgaagtgcaatttttgttcaggaccatgtgttagcttttgaaaacaaaaaggaaataaatgatccgagtcacacaaagcatgcgcccacaaaataatgataaaacgtatattgttttatactggagctcataagtgtggttattaattcttgctgctgttgtggctggaggcttttgctgcgtaaaaaaagcccatattacaatgcagaatgattttgatttctgctgtatctggaataatacartcttcttgcaataactcagtgggtactgagctcttcagttgagggaatgctggaagcttgcagaaatacattgtttggtcctgctggctgtggcacagatcagctattgacccactcaggatatgaacctgacctttggtggacaaaatcctaagctctgagatggtccaaagggagcggtcagcatgtgttcagctgaatgtaagtactctcataacgggagtgctggcactgtgccctgaagttgccttgttaaaaaagccatgtgagaagctgtgtgtttttcttcttcttcctgtg

SEQ ID NO: 31361 - DNA, 492 bp, Chicken  19866894253614_2
agtgcagcagtggtgcatcgctgtctttgaaggcaagatattcagggcatgggccaagagtacaacattgtaattagttttttcttgttgagcatgagctcatattgtaagtacatatgttcagctgtcagcttggttcttgcaacaaaagggaaaacaaactggtaataaatagagaagttgcataagccaatcttcaaataatggcattgggtggaacacgtgaaataggagctgtggctacaaagcagattactgcttcatgttcttcctatgagcacaaaataaattacagctgtytaaaatgatgcagcaaccaaggaaaatactgaaatcctaaagatgcctctccatctgtcctgctattcttgttgcaggatttcacactgagaaatgaagaacwgagctccaagcctcattctcttctagtgcaaatgaagtgattatgctccggtgtatgagcaacagcattgcaacctcatgtttgtattt

SEQ ID NO: 31362 - DNA, 389 bp, Chicken  19866894253614_3
attgtaagtacatatgttcagctgtcagcttggttcttgcaacaaaagggaaaacaaactggtaataaatagagaagttgcataagccaatcttcaaataatggcattgggtggaacacgtgaaataggagctgtggctacaaagcagattactgcttcatgttcttcctatgagcacaaaataaattacagctgtytaaaatgatgcagcaaccaaggaaaatactgaaatcctaaagatgcctctccatctgtcctgctattcttgttgcaggatttcacactgagaaatgaagaacwgagctccaagcctcattctcttctagtgcaaatgaagtgattatgctccggtgtatgagcaacagcattgcaacctcatgtttgtattt

SEQ ID NO: 31363 - DNA, 600 bp, Chicken  19866894253615_1
gcatttagaaaccaagtggttactctttgatctttgctactgattaaataccacgtctctgtacctcccaaagaaaataaaagaatcctttcattgtttgggcttgagtcaaactttttactgcctttagttgatattccaaataaaatcacttcagttgtaactagaaacaagaaagtcaaaatttatgagttaggacaccaacaaagaaacgttccagtttatttccagagaaagaggaacaagtagcacgagaaattccaagttttcaattaaagaaacctacaaataattctttcyaagaatttctacatatggtctagccatctaatggcacacaatgccaacataattggggtaggtggaaaaagtagagaaatgtatttttttattataacagttacttgttttttgttataacacttatttacatgtatttttattattccacaaacgcattaggtcaagatataagataacgcatacaacatcagtgccacaatacatatgccttattttcagccagctccactgataattactttatcttgcagcaatatctctcagatgtacattaagcatcaagtttggtacagcgag

SEQ ID NO: 31364 - DNA, 600 bp, Chicken  19866894253615_2
gtagagaaatgtatttttttattataacagttacttgttttttgttataacacttatttacatgtatttttattattccacaaacgcattaggtcaagatataagataacgcatacaacatcagtgccacaatacatatgccttattttcagccagctccactgataattactttatcttgcagcaatatctctcagatgtacattaagcatcaagtttggtacagcgagaggttatccaattgataggctgttgattattaacacaggactacaaaaataaataaatgaaaatccaatscaaatcagtctttgattgctgaaatttcaaaatgtaaacactcatttgtaagttgtgccggtgctgctgagcctctcaagaagagttaaaagtccttcagaatttttaggatacattccttcttgggaaggtacaattcctgctacctttgttagattttgctctcatacattacattgaataccagagcataacccagattttcatagaatatgctctaagaatctccaaatacattttcctgactctttcctgggtgcttacacaaaaattagacaagattgaaatatgtgtattaat

SEQ ID NO: 31365 - DNA, 600 bp, Chicken  19866894253627_1
ttctgcagtgtatctttccgtagctgagctgtcgttcattatactgtacctttgtgcagccagattcttctgatatctgtctagatcagcctttcagtaaacatgttcagacgaaaggttggtttattccttgaaactgcaagttagacagttttccaggtccccatcctggcatgcaatctacctgataacctattctcagtgacactgtatggactttatttcctttctctgtacaatcatgttaaccatcctcttaaacaatcagatacatttcaatagtagcacttttttaatttrgaaaaataagtggaaattattagggctctggaaatatatggaaaaatactgtgatgcttctgaatattacagaacagactggtaagaaaagagattggaaacaaataaactgagctgctagattaataatcttagtctaatcccctgctaagccgttttgctactcttttgttactaattacagtcaaaatctcattcasatttttttcctatggattttacttccctaagccaagcagaaagacacattctttgaagttgcaggcagggcagatatgaaatcttttaccatttctggaa

SEQ ID NO: 31366 - DNA, 600 bp, Chicken  19866894253627_2
agtgacactgtatggactttatttcctttctctgtacaatcatgttaaccatcctcttaaacaatcagatacatttcaatagtagcacttttttaatttrgaaaaataagtggaaattattagggctctggaaatatatggaaaaatactgtgatgcttctgaatattacagaacagactggtaagaaaagagattggaaacaaataaactgagctgctagattaataatcttagtctaatcccctgctaagccgttttgctactcttttgttactaattacagtcaaaatctcattcasatttttttcctatggattttacttccctaagccaagcagaaagacacattctttgaagttgcaggcagggcagatatgaaatcttttaccatttctggaaattgtgtgcagtacagcagagtgcagaatcttgcatatatacctcagaaatttgctagtaataatacacgaggatgaagataaaaggttgctttcttctcaggcagaaggtagatcagatcagaaggcatctgctgtcttatttttcagtatctggggtgcattcaaatacaacagtgaagcctgcctttataactgtat

SEQ ID NO: 31367 - DNA, 599 bp, Chicken  19866894253632_1
  misc_feature (1)..(55): n is any nucleotide
nnnnnnnnnnnnnnnnnnnnnnnnnnnnnnnnnnnnnnnnnnnnnnnnnnnnnnntggaggatattacctcagaattaaacacatccaaaaaaagatacaactccagggtgaaagtagctattagtaccacaagcagtgcaagcagtataaaccaaaaaaaccatctgtaaacattggatgactttggcagtggccctaactcacagaagagaacatgacagcgactctttagctcaaggtttcatagattggcctgagctggcttagcagagatgaatgcagtcactgtgcgatctatygaaggcactgaatgaaaggaagcagagcaagtgaggaatatctccccattttccataatckgtggattgggcttttctttctttctttctttatttcctatctacaaaatcaataccctactagcaaacctgaggagacctggcagaaaggcacacaaaactggtatttactgtttcaacagctgcattactgtataacagagtataacttctgtacaaagggataaaaataattgaatttcatattggygaagatatttttttcttccaaaataacagaactgatagttcaaccgact

SEQ ID NO: 31368 - DNA, 600 bp, Chicken  19866894253632_2
atattacctcagaattaaacacatccaaaaaaagatacaactccagggtgaaagtagctattagtaccacaagcagtgcaagcagtataaaccaaaaaaaccatctgtaaacattggatgactttggcagtggccctaactcacagaagagaacatgacagcgactctttagctcaaggtttcatagattggcctgagctggcttagcagagatgaatgcagtcactgtgcgatctatygaaggcactgaatgaaaggaagcagagcaagtgaggaatatctccccattttccataatckgtggattgggcttttctttctttctttctttatttcctatctacaaaatcaataccctactagcaaacctgaggagacctggcagaaaggcacacaaaactggtatttactgtttcaacagctgcattactgtataacagagtataacttctgtacaaagggataaaaataattgaatttcatattggygaagatatttttttcttccaaaataacagaactgatagttcaaccgacttttgagaagtctttgaaatcaggagctgccacaaaccacaatctaaaaagtaagattttatg

SEQ ID NO: 31369 - DNA, 543 bp, Chicken  19866894253632_3
tggcctgagctggcttagcagagatgaatgcagtcactgtgcgatctatygaaggcactgaatgaaaggaagcagagcaagtgaggaatatctccccattttccataatckgtggattgggcttttctttctttctttctttatttcctatctacaaaatcaataccctactagcaaacctgaggagacctggcagaaaggcacacaaaactggtatttactgtttcaacagctgcattactgtataacagagtataacttctgtacaaagggataaaaataattgaatttcatattggygaagatatttttttcttccaaaataacagaactgatagttcaaccgacttttgagaagtctttgaaatcaggagctgccacaaaccacaatctaaaaagtaagattttatgcttttctctaagaaaacgacatactgaaacacagatgttaatttttaccttttgattaattcaccagttcgatgcaacatatattttcaactcctgcagctgctggtttatagcctctcatgcagcttaaaa

SEQ ID NO: 31370 - DNA, 600 bp, Chicken  19866894253640_1
acttctttgtcctctctcctagtgctgtttgcattacttgatgcacgcaaaatgctccgcttggtactacggggttgaggagctgaggctgggagatgaaataaccatgagggcactcctgatacacaacccattatatggaactagcgaagtggtgaatattaatgttcttttaaatttttaatttttaagtctttgtctttaaaaaaaaaaaaaagaaaagaaagctggagggaagaattcctctcagaacaatggtgcagtctgttatctgctcctctgcgctgtaaagcactgaaygttcagccaatatagtgctctggttggcttagcattcttaaccttaattttgaatagaaggtgccttgtgctgctgacgtaattggggccttttgtaaatcactgttgcaggcagtgctgttgyatctcactgcatttctctgagggatgcagggcgaaagtgtcaggctaactttctgaaccccactgcaggctaagtgatttcattattgcagtgcttttttttcagaatgagctctgcttcatttttctttgtagatactaagttccaagcaaattttgcaagtgaaataatacttc

SEQ ID NO: 31371 - DNA, 600 bp, Chicken  19866894253640_2
cacaacccattatatggaactagcgaagtggtgaatattaatgttcttttaaatttttaatttttaagtctttgtctttaaaaaaaaaaaaaagaaaagaaagctggagggaagaattcctctcagaacaatggtgcagtctgttatctgctcctctgcgctgtaaagcactgaaygttcagccaatatagtgctctggttggcttagcattcttaaccttaattttgaatagaaggtgccttgtgctgctgacgtaattggggccttttgtaaatcactgttgcaggcagtgctgttgyatctcactgcatttctctgagggatgcagggcgaaagtgtcaggctaactttctgaaccccactgcaggctaagtgatttcattattgcagtgcttttttttcagaatgagctctgcttcatttttctttgtagatactaagttccaagcaaattttgcaagtgaaataatacttctgatggaagaagtttgaatggggaacacttcatgtttttaagtggtaaaaaaaacaagcggggggggatgatagggagtgtgtgagggttggattgagccaactcacttcaagacccctctgct

SEQ ID NO: 31372 - DNA, 600 bp, Chicken  19866894253642_1
gcactttatcctcacttgcatttctgtttagttacttacagtaggcagatatcaacagtggcttctgcagcagttgtacatggctaagaacaaattggcagtcattctcacagctcttgtgacagtgacatccttggtatataatttcatggcctgttctattaaaacgtaaaaatgagaagaaaatgagaacaaaacactgaaactaaagggggaaaaaaatgaaaaccagaacagctctaagctattacttatttaaaaacactttgaaatgaaatgaagcttttcaaagatgaatgrgtttcttttggctccaaaacaaacaataacaaaatccaagcttgcttgtgcagcaatgatttagatggtgaatggggaggagatggtcatagtgggctgagctgaataaaacatgctagcaagttcttgaaaaaaccatgtaggagggagtcctgctgcaaatatgtagtgatatgactcagcttcatccagataaggttttcatagggaaataagagacaaaacttctgatcttggttgctgtcgtataaaacagggttataaatggtcctgatagtgtcttaatcatagcctacaagt

SEQ ID NO: 31373 - DNA, 600 bp, Chicken  19866894253645_1
tggcatttaacgtgtgtgctcccaggctggtgtcatttttgaacgcagaggcaggtcacaaaccaaggcagacacatcctcagggtgaggccagaggcggtgtgttgactacaggcagagcggcttctctttgctgcaggttctttagcattctgtaagcatcctctaagggagtcatttctagccctggctcttgaactgtcctcatctcattatgcttttgcataagagtgagatggaatttgcactgtgtttatagaggcccaagtgatagaaatcggtttgagcaaatgcttgcasgtgaaggcttcagctggttagagatcttcatttccaccagcagaagtaaatcacttagctgttcacttctctgaaaacttcaaccatccygaagttagggcaggacagggcagaagactcccactgcatttgcacctgtgggattgccaccatctcacagaggtgagacctaaaccaaagcrttactctggagtctgtccattgcccttcctctggcrgtgccacagcctcttgatgtaagcccttaatcctgggaagaytgtgcagtaacaccttcaggctgaaaatggattacgtccc

SEQ ID NO: 31374 - DNA, 600 bp, Chicken  19866894253645_2
ccagaggcggtgtgttgactacaggcagagcggcttctctttgctgcaggttctttagcattctgtaagcatcctctaagggagtcatttctagccctggctcttgaactgtcctcatctcattatgcttttgcataagagtgagatggaatttgcactgtgtttatagaggcccaagtgatagaaatcggtttgagcaaatgcttgcasgtgaaggcttcagctggttagagatcttcatttccaccagcagaagtaaatcacttagctgttcacttctctgaaaacttcaaccatccygaagttagggcaggacagggcagaagactcccactgcatttgcacctgtgggattgccaccatctcacagaggtgagacctaaaccaaagcrttactctggagtctgtccattgcccttcctctggcrgtgccacagcctcttgatgtaagcccttaatcctgggaagaytgtgcagtaacaccttcaggctgaaaatggattacgtcccgcttcaaaggtactcaggctgcgatcccacttttgccttgggaaagaccagcaaagtggcccaatccctcctgtgaaagcacctgcaggc

SEQ ID NO: 31375 - DNA, 600 bp, Chicken  19866894253645_3
agccctggctcttgaactgtcctcatctcattatgcttttgcataagagtgagatggaatttgcactgtgtttatagaggcccaagtgatagaaatcggtttgagcaaatgcttgcasgtgaaggcttcagctggttagagatcttcatttccaccagcagaagtaaatcacttagctgttcacttctctgaaaacttcaaccatccygaagttagggcaggacagggcagaagactcccactgcatttgcacctgtgggattgccaccatctcacagaggtgagacctaaaccaaagcrttactctggagtctgtccattgcccttcctctggcrgtgccacagcctcttgatgtaagcccttaatcctgggaagaytgtgcagtaacaccttcaggctgaaaatggattacgtcccgcttcaaaggtactcaggctgcgatcccacttttgccttgggaaagaccagcaaagtggcccaatccctcctgtgaaagcacctgcaggcaattcctgcagctggtgcctagcaacgtgctctgagctgctccaacaacagctcaaattcaacgtcatttcatccttcttccccagaggagc

SEQ ID NO: 31376 - DNA, 600 bp, Chicken  19866894253645_4
ttttgcataagagtgagatggaatttgcactgtgtttatagaggcccaagtgatagaaatcggtttgagcaaatgcttgcasgtgaaggcttcagctggttagagatcttcatttccaccagcagaagtaaatcacttagctgttcacttctctgaaaacttcaaccatccygaagttagggcaggacagggcagaagactcccactgcatttgcacctgtgggattgccaccatctcacagaggtgagacctaaaccaaagcrttactctggagtctgtccattgcccttcctctggcrgtgccacagcctcttgatgtaagcccttaatcctgggaagaytgtgcagtaacaccttcaggctgaaaatggattacgtcccgcttcaaaggtactcaggctgcgatcccacttttgccttgggaaagaccagcaaagtggcccaatccctcctgtgaaagcacctgcaggcaattcctgcagctggtgcctagcaacgtgctctgagctgctccaacaacagctcaaattcaacgtcatttcatccttcttccccagaggagcagctcttgagtcatcaccagaggagatgggatgtgt

SEQ ID NO: 31377 - DNA, 600 bp, Chicken  19866894253645_5
ggcccaagtgatagaaatcggtttgagcaaatgcttgcasgtgaaggcttcagctggttagagatcttcatttccaccagcagaagtaaatcacttagctgttcacttctctgaaaacttcaaccatccygaagttagggcaggacagggcagaagactcccactgcatttgcacctgtgggattgccaccatctcacagaggtgagacctaaaccaaagcrttactctggagtctgtccattgcccttcctctggcrgtgccacagcctcttgatgtaagcccttaatcctgggaagaytgtgcagtaacaccttcaggctgaaaatggattacgtcccgcttcaaaggtactcaggctgcgatcccacttttgccttgggaaagaccagcaaagtggcccaatccctcctgtgaaagcacctgcaggcaattcctgcagctggtgcctagcaacgtgctctgagctgctccaacaacagctcaaattcaacgtcatttcatccttcttccccagaggagcagctcttgagtcatcaccagaggagatgggatgtgtctcccactcggcttgctataaatgagtggtatgtgaggggct

SEQ ID NO: 31378 - DNA, 600 bp, Chicken  19866894253645_6
gcagctcttgagtcatcaccagaggagatgggatgtgtctcccactcggcttgctataaatgagtggtatgtgaggggctgctctctgcctcttaagtgcgtgcactgctgccagctgaaatgctgtctccactgagcatgcagaacagctgcaggttcaggagatttggtgaactgttgttttcttccccttcctagctcattttctgctcccaaaagcctctgctttttcagagctctctgcaggaaagctgcttgccaggtagggttggtatcccatgtttccatgctcagcacacrctgctgaaagcatccaaccaaggatggatctttgttaagcactatctttgttttgcctgggcaaaccccaagccgtgtgcttgctacccaccacagcraacacacagataggtacaagctcagggctgtggtgggcactctctaaattagacacacaagaagtctgagatcgcctgcgtgatggttgcagacatccctcagttcaaaagatcgtcgtgggraacagcgaatatcagtgaggaaagatgcactggaagccaagcttgtttgtggggctggaatcctcggtgaggggatgag

SEQ ID NO: 31379 - DNA, 600 bp, Chicken  19866894253645_7
gcgtgcactgctgccagctgaaatgctgtctccactgagcatgcagaacagctgcaggttcaggagatttggtgaactgttgttttcttccccttcctagctcattttctgctcccaaaagcctctgctttttcagagctctctgcaggaaagctgcttgccaggtagggttggtatcccatgtttccatgctcagcacacrctgctgaaagcatccaaccaaggatggatctttgttaagcactatctttgttttgcctgggcaaaccccaagccgtgtgcttgctacccaccacagcraacacacagataggtacaagctcagggctgtggtgggcactctctaaattagacacacaagaagtctgagatcgcctgcgtgatggttgcagacatccctcagttcaaaagatcgtcgtgggraacagcgaatatcagtgaggaaagatgcactggaagccaagcttgtttgtggggctggaatcctcggtgaggggatgaggcaaatggcggacagctcaggcagaacgtcgcagcgtgtgtctgtgggagcgtggtttcttacagagccatctatagcttgggtggcctccacatgga

SEQ ID NO: 31380 - DNA, 600 bp, Chicken  19866894253645_8
tctgctttttcagagctctctgcaggaaagctgcttgccaggtagggttggtatcccatgtttccatgctcagcacacrctgctgaaagcatccaaccaaggatggatctttgttaagcactatctttgttttgcctgggcaaaccccaagccgtgtgcttgctacccaccacagcraacacacagataggtacaagctcagggctgtggtgggcactctctaaattagacacacaagaagtctgagatcgcctgcgtgatggttgcagacatccctcagttcaaaagatcgtcgtgggraacagcgaatatcagtgaggaaagatgcactggaagccaagcttgtttgtggggctggaatcctcggtgaggggatgaggcaaatggcggacagctcaggcagaacgtcgcagcgtgtgtctgtgggagcgtggtttcttacagagccatctatagcttgggtggcctccacatggaaaaggaagacaaggtgtcttgcagggtttgtcctagctccgaggagaacgtgcttgactctttgagcaagcctgagatctgggtggatttcctaatgggagactgtgtggaaatctcagtgac

SEQ ID NO: 31381 - DNA, 592 bp, Chicken  19866894253655_1
gaacacaccaaaaggaattggattcaaaggaaacatctccaatacctcaacaacccttcctttctcttctctagatctacctacatgctctgttcaggctgtagctgccacagaacagtctcccttctggtcatcaccttgttgtctttgtcccttgatggatggatgctgacactgtgacagctgaaggacctgagctgggaatgaacagaaatgctctatctagaaagtgcagaggactgactggttatctgtgtagcttgattaacttgcaagcaatcagcagaatcagcatttcartattttcatatgaagtggatgtcagatccagacaagaaagaaaggctcgaggaagaagagagatttgctgtctgatgccttcaagatgaagctggaggtctgcctacaagttaaatgagtcttcatgaagagatcagaaatagagtaaaccaaaaaacccaaataagaaatcatatgagctcttctcagagaaaaagaaaagaagaaaaaaaagatggcaaagctgccctttaaggaaatcatctgaaatacagaacaatttctgctctcgggcacacatgcataaacctaa

SEQ ID NO: 31382 - DNA, 600 bp, Chicken  19866894253656_1
ttgatggttctgttttctgatagttttcctcttctctggctccataatgatcttcttgtatttaggattgatacatttatcccagaaaaagatggacaggagatcttctgagcctacagcgcagctttttgcttggataaataaacagccaagtgaagcaaaaccatctttttcataataaacagtgtgtgtaggaatgtcgcccagtgacaggaacaaaacatcagaactcaatagtgggtccaatctctcccacatggtcaaagcagagaaatccccaaatgacatttgatcaataamcgactgccagtttccaggcaaagaaacactctttagcaaactcagaaaacttctgaagtcagaacgcagagcttcataaagtgatatttcctgtaaattatacagcatatccttaatgatagraaatacttatctgtggaattaaacaacaatgctcaggaagactacatgccagctctttcagatttattatagccagaggttaaaccaaaggctgagtccgtctctgctgagcaacaagccatgtatataaggctcacatctggagtctttaatttctctgtttagatcaggttgtac

SEQ ID NO: 31383 - DNA, 538 bp, Chicken  19866894253656_2
gctttttgcttggataaataaacagccaagtgaagcaaaaccatctttttcataataaacagtgtgtgtaggaatgtcgcccagtgacaggaacaaaacatcagaactcaatagtgggtccaatctctcccacatggtcaaagcagagaaatccccaaatgacatttgatcaataamcgactgccagtttccaggcaaagaaacactctttagcaaactcagaaaacttctgaagtcagaacgcagagcttcataaagtgatatttcctgtaaattatacagcatatccttaatgatagraaatacttatctgtggaattaaacaacaatgctcaggaagactacatgccagctctttcagatttattatagccagaggttaaaccaaaggctgagtccgtctctgctgagcaacaagccatgtatataaggctcacatctggagtctttaatttctctgtttagatcaggttgtacactgagctcactgaactccacatgtgttggcattctctagcagatgtgagagaaagctagt

SEQ ID NO: 31384 - DNA, 600 bp, Chicken  19866894253664_1
cctaagggcagaaaggcttcagcctgccctcctggcgcaggtccctgctttctgtgtcgaatggagaaggggtgcaggggccgaatgccttcttattgagcagcagctgatgcagcaggcagggtgagctcagcaaagccattcccacgtcctgagcatcccctgccctcaggcaggatggacttagctcctctggaggccaccggggctgtgagcaggaggcacagtgtccctgcaatttgctccaagagggctctgtgttccagacagggaacagaatattctgtctgtgctatgccrtcttttaaacatgtagtgtgaagagagataggaaaaattctaaacgttattatcgtcttcatgttgtagtgaagtatgaagcacacgtatttcttctagtcttctagttccttaccatcagctctgggttcatttgctgtatctgtttcagatcctttccctctcccagagttgggctgtttgttttctttccactggggtgcagttttcacttttatgcaggactgcagctttccgggcacagtgtttgctggtttcatgcagttcccagctgtcactcacttctggagattaaatcat

SEQ ID NO: 31385 - DNA, 600 bp, Chicken  19866894253676_1
gaaaggtgcacagaaactggtatattttatttttattttttattttttttacacagtttctctgagcctcttttactttaaacagaagagctgcagtagagagcatcactgcatttgttctgttttacctttaaaaatctctcttaaaaattcgacttaatagaaaaaaagagtgttttccatatctataagggaagaaattgatcctattttaagaagcatggcagtttttgtatattttacttgaaatttcttaaagtttgatgttagccaaatgaatctcagaactttttgaagggwaggtatgtcttgcaggtgttatttagtttaattagatgagcaaagaaaatgctaactctcatttagtgcaattgcatgagctgatctctggcatccacccctgagtatcttagcaagacaatttactttaaataggccaatattcacagtaaaacaaatcacaacaaaaataaaacatacccaaatctttttagcttyatggaaaagtactgtgcaaagcaaaaggctgatagggatttagtttggtttcaattaatgttgcaaagcctgaaaacaattcagaaccttactgaaaaaaat

SEQ ID NO: 31386 - DNA, 600 bp, Chicken  19866894253676_2
aattgatcctattttaagaagcatggcagtttttgtatattttacttgaaatttcttaaagtttgatgttagccaaatgaatctcagaactttttgaagggwaggtatgtcttgcaggtgttatttagtttaattagatgagcaaagaaaatgctaactctcatttagtgcaattgcatgagctgatctctggcatccacccctgagtatcttagcaagacaatttactttaaataggccaatattcacagtaaaacaaatcacaacaaaaataaaacatacccaaatctttttagcttyatggaaaagtactgtgcaaagcaaaaggctgatagggatttagtttggtttcaattaatgttgcaaagcctgaaaacaattcagaaccttactgaaaaaaatactcaacttctttggtaggatttgtatgaacaaataaagacatttagcaaagatccgacaaactgatttctccaaccatgctgattgctctctactgactaaataaaaagtcaaagatgactactactgatttagccttccccactatggacatctcaaaccatgagaaacaaattccacatttaatatctgcagcgt

SEQ ID NO: 31387 - DNA, 600 bp, Chicken  19866894253676_3
aagtcaaagatgactactactgatttagccttccccactatggacatctcaaaccatgagaaacaaattccacatttaatatctgcagcgtaaattcacaacactcaattgaagatatgcttgaggttttaaaaaacgtgttttaaatacagtcatggtactgtacatttcagaagttaaaatatatttcactgaaccagattcagtctattaactttttataaattcaccaggaaatagataattacaagaatagcttgtttgcaaggggcaagtttcagggaggtaatgaggacaaayaataattcatatactcagctggtgtttattatctaaaaagatgaagagagtttttctaaaatactttgagagtctacaagaattctcataaaatgtcccttatactacacaaaataagaatacttttcttttgaatattctttagtgccatttacagatcactctacaacagagtaggacacttgtagtctcttaaaatgtaagtccacaaaaatgcaaattttaatttattatatatatatcatcctctattattagcttggagaattttcttctgtgtttatatttctttttcagcac

SEQ ID NO: 31388 - DNA, 600 bp, Chicken  19866894253679_1
ctacatcactgctagccaaagtttagagatactatgaactgaatttgtctttccttgatcaagtcaaggacatttcctttgccttacatcttcccagactatgaactgcttattcattgtcttggttgccataagtacatccatttgattttcacagcaatttaagttctgggggcaccaggcaatttaaattccctggaggcatccaaggccaggctggatgtggctctgggcagcctgatctagtgattggtgaccctgcacatagcacgggggttgaaactagatgatcattgtggyccttctcaacccaggacattctatgattcattctgtgattctgatgcagctgctgtactaaggaagaaacaagcattgtgatttcctcattgctcattaagaaggtatcaattaccagagggaattattggcctctttgtaattcttttcataaagctgtggacagaaagacatatttcactagttctcttgaataaggtaattggaataggtatctctgatgagcaaggcaagattatcctgttgagagctgatttctctgttttttaattagcacaggaatggagactgcctttgaac

SEQ ID NO: 31389 - DNA, 600 bp, Chicken  19866894253683_1
tcctgataattagggttttgaccttgtgaatcttgaatggatagcaggagttactgtagagagccccaggctaccacaggcttactaggtgcaacgttgaaaagccagcagtagaataaggcagtgtggtcatgagatgttattttgcacagggagaccctggtccagtatgatcccagtaagagagcggcacttggatgagaagacatttcttaagacacaacattctcaatcattccttaatcatactgagtaaaatgtagatactgttttaattttgggaaggtttctccacatttrcatttcatttcatttccgatttttcagctgcatgctaaaaaatatttatgtaaggtttgtgaaccacgatccatattcatttttgcaaaatattctttaagcgcctgttattgctctgataagcttgttggatttgatcatcccgtttgagaacttttatcaagatactatttatattttttgcaattatcctgagctctattcatcttaaaaaacttgacccatctcaacaataatactactactaatatatataaccatatataaaatatataccccactcttgcaaccagagatctt

SEQ ID NO: 31390 - DNA, 600 bp, Chicken  19866894253685_1
gatgtctcattttgtcattgagctgttgctgttggtttgaaaaaatgtatgacagtgattatggtgtagaactggtttgtgctttcttgctgtgcgtataaaagatggatagcatgattttgagaaggaacaagtcaattgaactactggtttctgaatgtggtctctttatgtacatcttccatcgcattgtggcaaaaaacaccagtgtttttagcagaaacatggaaacagcacttttgggaaaatgttaaaaatttgttgtgcgaatctctgagatctaacatggtgtcaaggctyacagatgcctgaaygagcaggtagtcactctgaactttttgttccaaattatcctatccatcaatgtgcacagaaaatgctgtatttttatataatcaattaatgaggatatatttatttttttcattcatgttctggtagtttctaaacaaaagcaggcagaaaaaccccaacccctaaggtatgacagtgtgtgctctttctggttcatttgatttttgcagtcgtccaactccacagaagagatgaacagggaatatcttagatatgtccattttttagctagtaatgtgtattgcc

SEQ ID NO: 31391 - DNA, 600 bp, Chicken  19866894253685_2
tcattgagctgttgctgttggtttgaaaaaatgtatgacagtgattatggtgtagaactggtttgtgctttcttgctgtgcgtataaaagatggatagcatgattttgagaaggaacaagtcaattgaactactggtttctgaatgtggtctctttatgtacatcttccatcgcattgtggcaaaaaacaccagtgtttttagcagaaacatggaaacagcacttttgggaaaatgttaaaaatttgttgtgcgaatctctgagatctaacatggtgtcaaggctyacagatgcctgaaygagcaggtagtcactctgaactttttgttccaaattatcctatccatcaatgtgcacagaaaatgctgtatttttatataatcaattaatgaggatatatttatttttttcattcatgttctggtagtttctaaacaaaagcaggcagaaaaaccccaacccctaaggtatgacagtgtgtgctctttctggttcatttgatttttgcagtcgtccaactccacagaagagatgaacagggaatatcttagatatgtccattttttagctagtaatgtgtattgccactgaaaagaaaag

SEQ ID NO: 31392 - DNA, 600 bp, Chicken  19866894253695_1
gctgatcccagctcaggcactgcaccctaaggaggtgtctgtgctgctcctctgaccaggtggggtctcttcacttgaagtgtttatgttcttcctttgaacactgtctggtgacaaagataggctgttggggtgggttatttggtctgacctggtttggtatttctcgtgaaaggatcctttatttctgttctctgcagggtttttctagggaggtcagaaattccctgtcctttctgctttctctgctctttctctactagaatcactcaggtatatttctctattagctgaaaagcrcttgcttcagtccctgcaaaattgtccacagagtgaggaccaatttcctgtaccttcttactctactgaatggtcatcctaccagaacgtggccccaagcacatcagctctcctgactgcttccagcccctggcagcacgacccagctgcctttcttcaggtttccagcatgatcaaggtaggcctacgggccctatttgaatgcggttcaagatacatagttctgcctcatttccagtctcacagcttcattctccagcctgtcgtccctcgtctcctgttcctgtaccctacagcact

SEQ ID NO: 31393 - DNA, 600 bp, Chicken  19866894253696_1
ttgggctttttcagtatcattgtgctcctgtgacctgcaagttaattgcaagccatgagatacggaagggcttttacaatgacaaaggaaggatatttgctgtgatttgaaagctgctacttgtacatggaacagtgttttctgtggtcgctgggagttgtgtggataggtagaaatcccgatggctctgtagactttcctccagatgtggtttatttttcatgttatatgggcaccagtgggacttgcttgcattcagatcacaaggacagccattgccatgaatttagcaaaacactyaccggctactttgtgagtttaaagtagcttaaaaaaaaatgctttttatattctgttttgctaaattaagagatcagcttatgcatacaagttgagaaagtggcatgccatcaagggagagagcctggctctggaagaggttcctacctgtgtccatatcatcttctggaaagcagccctgtggagtacttacatgttctcttcccttctcctcggcagtctcaaagacgtaactatttctcacaaagatcctccgggcattccttagcttttgggcaggccactgtgctacctccctgg

SEQ ID NO: 31394 - DNA, 600 bp, Chicken  19866894253703_1
ctgtcatttggttttgatcttccaaccaaattattatccaatgaacagtcctcccttcaaatccatctcacacatctctccatagagataaggatgtgacgtggaaccatgccaaaggcctttcagaagtccaggtagatttttgtaccggtctgtgtaactgatgtattgtcaaagtgtacacattatcattctgaccataaagaaccacaaaaaattaatgaagccttagcaaaatactgatttcccatttagatcctgaaaacactgacttaacaaaacacaataaatctcaggacwgatgttgtgctacagtaaaatacatcttcttactgcacacacaaagaaattctttattggattgtttctttgcttacagctggcacctggtrgataagtgtgtttctgtaacacagcaaccttcacttcggtatccagagatctcttcttggaatggtctggagttcagcagtgaccaaagcattcagaagtgaatccttacccgagctgcagtgacacaacagacggggtgtgacagcaagaacaggarttacagactggtaaagaggggtaatttagggagttatagataaataatag

SEQ ID NO: 31395 - DNA, 600 bp, Chicken  19866894253703_2
gatgtgacgtggaaccatgccaaaggcctttcagaagtccaggtagatttttgtaccggtctgtgtaactgatgtattgtcaaagtgtacacattatcattctgaccataaagaaccacaaaaaattaatgaagccttagcaaaatactgatttcccatttagatcctgaaaacactgacttaacaaaacacaataaatctcaggacwgatgttgtgctacagtaaaatacatcttcttactgcacacacaaagaaattctttattggattgtttctttgcttacagctggcacctggtrgataagtgtgtttctgtaacacagcaaccttcacttcggtatccagagatctcttcttggaatggtctggagttcagcagtgaccaaagcattcagaagtgaatccttacccgagctgcagtgacacaacagacggggtgtgacagcaagaacaggarttacagactggtaaagaggggtaatttagggagttatagataaataataggaaaggaggtcaggagatgagacaacaaaactgaagtacaaacataggaaatcacttcagttacagtaaataggtgaggaatgagagggatg

SEQ ID NO: 31396 - DNA, 600 bp, Chicken  19866894253703_3
tttagatcctgaaaacactgacttaacaaaacacaataaatctcaggacwgatgttgtgctacagtaaaatacatcttcttactgcacacacaaagaaattctttattggattgtttctttgcttacagctggcacctggtrgataagtgtgtttctgtaacacagcaaccttcacttcggtatccagagatctcttcttggaatggtctggagttcagcagtgaccaaagcattcagaagtgaatccttacccgagctgcagtgacacaacagacggggtgtgacagcaagaacaggarttacagactggtaaagaggggtaatttagggagttatagataaataataggaaaggaggtcaggagatgagacaacaaaactgaagtacaaacataggaaatcacttcagttacagtaaataggtgaggaatgagagggatgtgaaatcttaactgactctgagctgatttctgtgttggaamtctttcaaattacataaaatattagtcaaaggcactgtaggttaggtgtagttccaagtaatatactaaggtggacgggatgctgcattcagagctgttcccaagtgtgcagaaaaa

SEQ ID NO: 31397 - DNA, 600 bp, Chicken  19866894253703_4
tccagagatctcttcttggaatggtctggagttcagcagtgaccaaagcattcagaagtgaatccttacccgagctgcagtgacacaacagacggggtgtgacagcaagaacaggarttacagactggtaaagaggggtaatttagggagttatagataaataataggaaaggaggtcaggagatgagacaacaaaactgaagtacaaacataggaaatcacttcagttacagtaaataggtgaggaatgagagggatgtgaaatcttaactgactctgagctgatttctgtgttggaamtctttcaaattacataaaatattagtcaaaggcactgtaggttaggtgtagttccaagtaatatactaaggtggacgggatgctgcattcagagctgttcccaagtgtgcagaaaaacctgcatttgatgtgcagccattaacacacacactttgttgtcagttggtttaagcaaggaaagaataaagtgctttttgcctcaacccaggaattctttaagtgtgctttctcccccatcctgttgaggaggggcagtggcagagcagcatagggggcacctgggagccgggcaaggtgagc

SEQ ID NO: 31398 - DNA, 600 bp, Chicken  19866894253718_1
tggctacagtgtcatttccttcctgtcctttgggttgtttgtctgtaaccttggctaaatattatcatttcttcagatactttgagtgctcgcgcgcatgcccgtgtgtgtgttcttgggacaaaaatgcaagcctgtgctgccaaaaatgctgaatgttgttacatgcagcttgtgttccagaaggtggtattcctaattgagagacccggtaaagcaaatattaacagggttccaaaatccctacagacgcttcagagacaactgtgaaagacagaatcagatgtaatttccattgcrcagagcccttgcactgaaagtacttgctaaagaataacagaggcattgaagtttcatagatgatggttagcttctgtttgaggggcttgtgtcaggttgtccctctgccagtgcctgtgtcctggttatgtagatacctctgtggtcatgcagaatatctgactgtggaattgaatgggctttgcatttccctctcacccttaccttaaccttgccagtttgccagcacaagcgaacgcctgatcacatacgtgcttgtacagacacaggagaaacaaacactcaggaacaggcaaccca

SEQ ID NO: 31399 - DNA, 600 bp, Chicken  19866894253731_1
aatgaggatctagaggtaaatctgttgaaaaccctggcatcatttgaactgattaaccagagtttaagaaaagttctgcagaacagataattttttttaatagtaacttataatctatgttgtatttaataggccttaataaagtcatctaccctcctaaggcaaagaaaaaccttaaaatgttttgatacagcaatacaggtattaaatgtgtagaggtacataggggaagaattaggtgttatagcagtacagaagcaaaagtggttatttctctctattcatcagggtagggtgcaytgggatagagcaagtaatgaatacaagtcagaattcagtgaaatctaatcagatgtttttttcattgcggagatggtcaaatgttggaaaatgttgcccttggttgttatgaattctccatcactggaggtgcttaaaacaaaaatagatctaattggacctcatttaggaaggaaattaaatctacaattactatgattttctctctctctctcttcttttttttttttgtacttttaagatacttaacaaagaagtctgttaaaagacaaactttgaaataattccttttcaaattga

SEQ ID NO: 31400 - DNA, 600 bp, Chicken  19866894253736_1
caatttggtaaaatcttagatgttgaaattatttttaatgagcgaggctcaaaggtaagcagtttaattcacccaaaaatattttttagtttgttgaatgtacttttaatgagtaaaaggaaacaactgcactaatgtaaaaaataataatactaataagcaagatctgaaactccatgttattgaaaagtgcattcagatttagtttgctaagcagaaagaaaatcatttggactcattttatatgttttaaaagaggtaatattaactactccaaactgtcatttgttttatgggaaygttgatttctgctttccttattattcaatgatcattaccatgtgtattttataagatgagtccattcttaaagatatttttcggtgagtttgtattagtgtagattttttcctattgaaatgaaagatgataatacctactagccatcttgttcagtaatcaagtaagaaaatatgattgtttcagattatttaagtgcagatgttttcctctttagtaaaagcttagtacaccaaccctttgagtgtttgatcacttatttgattaagagagttctcattatactgaaaacgttttaat

SEQ ID NO: 31401 - DNA, 600 bp, Chicken  19866894253743_1
tcatggcatactttagtctgtgcctttgacaaatctgagactgatttgcacaaaatgcataccacctctattagagtaatataatttacttaagtgataatgttggaagtgtgcattgctggctgctgaatcaccatagcatgaacctgctctaagcaggctagaattctgtgctgggctctgccacgtcatacatcccctacacaattcagtgtggctgaagtggtactggtgaacaggactctctgaaaaccagttctgtgaagaaggctcttattctcaggtttctgagatgtgcasgtgtactgatgtgcattctgttatgtcacaaaccatggagtggtgaaggatgtgggaagcagtatgaaatttcagaagcaaactagccatatatttcttcagaagtaccagttgtaaatgtgggtaagtggggcagtggtccacatttgcatcatttagctctttttccagattgcctgcagattcaggaagattttataatcccaatgtaacttctaaggttttatctgcaaagagaaataatttttaaaatgatatgtggacgtgttctttcccctagccttgtccctagctttccct

SEQ ID NO: 31402 - DNA, 514 bp, Chicken  19866894253748_1
gttgaccagggatgccagcagagaccaaatacaaaaccagtatcatccggtgtaagtagctacaaggcagggaaagacttcaatgtgtatttaaagcatattcaaatgcaaatccatcttggatactaatgtattctacaagaaaatggaaagaatttgaaatgctttagggcttcttgttttttttttttcctttttttttttcccctcttttctattaggcaagctcaagcatcccattgagaaacaccacctatattaggtggttaaaggcatggtggaaggagaggtgggatgcaraaggaaggagaacagtatctgaagaacattagctttgtttcagaagaggaaacaacccatgtgacatgcaaaagcaatgagttttaatagcatttaatatgtttttaaacatttccatcactcctctacgttttcagacacagcttggcaataaatcaaagtaaaaacaaacacacgcatccaagctagccattaagctgaaacagaaataaaa

SEQ ID NO: 31403 - DNA, 599 bp, Chicken  19866894253750_1
  misc_feature (1)..(50): n is any nucleotide
nnnnnnnnnnnnnnnnnnnnnnnnnnnnnnnnnnnnnnnnnnnnnnnnnnagcttgtgtataaaagcttcagtcttgcagtttttcagacttaaggatatttcctatgtatttgatctcgtgcacttctttttacggaattggcagtattttattgcagaggagaaagtattggcaaaaagatgattagtggtaaaacatctatcacctgctgggtgacaactgagagggtttgaatgcagatgtgtggtgcttggttctatgccaagatactgttcaatttcaatcatgtgaaggcacrtgtacatatgtataattactgcttgacacaatccagaggtcaggttccttaaggtaggtggcacactggccagaaggatgggacagatgtgatgcattcctgatgtccacgtactgttgaagaggcttagtatatgtatagatttaaagtagtttgtgaactccaccttcgagcataccatcagtctgaaaggagcccaagagaaaactggggaggcaaggatgtatggtcatagaaaagaaagcagcaagtgggcagggtaaaaccaagcatgctagctgtcttatccagaragcgcc

SEQ ID NO: 31404 - DNA, 600 bp, Chicken  19866894253750_2
aggcacrtgtacatatgtataattactgcttgacacaatccagaggtcaggttccttaaggtaggtggcacactggccagaaggatgggacagatgtgatgcattcctgatgtccacgtactgttgaagaggcttagtatatgtatagatttaaagtagtttgtgaactccaccttcgagcataccatcagtctgaaaggagcccaagagaaaactggggaggcaaggatgtatggtcatagaaaagaaagcagcaagtgggcagggtaaaaccaagcatgctagctgtcttatccagaragcgcctgtgggaagagaaacgtaagaggtatgcaaacaaacttagattgtatatatactaacaggccatttttgcagtttaaatttaaaagatcatttggtttttctacatttaataggcatatgtttttgtcacaaggggacacaaatgatactgttgaagttagaaaaagtaataagcaaaaaggggttaggatagggttttgcttaggttataggttacaagggtttagtttaaccaaaactgaaagaaatatggcacaaaatataatgagaaataccacagcaagcaaattctgt

SEQ ID NO: 31405 - DNA, 600 bp, Chicken  19866894253750_3
gggttaggatagggttttgcttaggttataggttacaagggtttagtttaaccaaaactgaaagaaatatggcacaaaatataatgagaaataccacagcaagcaaattctgtttagctttcagtaatcgtggtaactctgtgaaatatgtatttgccttctgttttttgagggtggctaagattatggtttaggaacttgaattttcttatgtttacaagtacatgaaggacacatttgtgacattgctgtagaatgagtagttgtgccttctttgtctgaactcttccatttgtcatkaagttctgaagggctcatagtagcacatcatagtaaagtaattctgaaaacaaaagtggtatctttcctttctgtattcagtgactgggtttgaatattgtatttaaaaataaaagtataattttgagcacactaattttatggatgcttgtttgattcaccacccaagtgcatctgaatattcacatttcttttgtattgctgcatgccattcctttcccttcctcataaccgtattgtacacagaatggctgagagatcttaaagtcatgtgtttaccctctaacaagtgtaatatag

SEQ ID NO: 31406 - DNA, 600 bp, Chicken  19866894253764_1
tacacatagaaagtactttagaaatcaatagctgatagtaaatgcagaaattggctaactcatttgtgaaacatcatctgggacctggcataggaagacagggctttagtcaaccatagccttttactgttgattgcctgaagaacagaataagtgtgctgtaagatgtgctacgttacaaaacagttccaggctgctgggagaaggagagtccataagcacttcacacagaaattctggctaggagtttggtggatggcacgccttcatacagaagctggtcttgaagccttctcaaawaattttctgacattgctaattaatgtgtcatttcacttctttgaaatctggcttgatgtgctaggaattgcttgcttgctcggaaagctgcacttcattcttggaggctctaatgattttagttccttcccccctttgcccttttcttccaccgctttgaatagacatgggaggagctcttgcatattaatcttgttaagtgtgctggagctggcagtctaaaatctaaactgcttgatttacctgccagaggtaagtttcctccttatttaacctccctctagagactgatgaactgct

SEQ ID NO: 31407 - DNA, 599 bp, Chicken  19866894253766_1
  misc_feature (1)..(77): n is any nucleotide
nnnnnnnnnnnnnnnnnnnnnnnnnnnnnnnnnnnnnnnnnnnnnnnnnnnnnnnnnnnnnnnnnnnnnnnnnnnnnaggagctgaaattggatttttgacaaagataggctttacagaaatattacataaaacttaagcttgtttataatgagtcagtgtaaaccaaccacctgcttctgaacctgtagaatcatagaatcaccaaggttggaaaaggtccacagggtcacccagtccaaccattcacccatcaccaatggttctcactaaaccatgtccctcaacataatgtccaaaygttccttgaacaccaccagggtcggtgactccaccacctctctggacagcccattccagtgcctgaccactctttcagagaagtaatatttcctaacttccagcctgaaccttccctggtgcagcttgaagccattccctstagtcctatcactagtcacccgagagaagaggctgacccccagctcactacaacctcccttcaggtagttatagagagcaataaggtctcccctgagcctcctcttctctagactgaacaatcctagctccttcagctgcttctcataaggcctgtgc

SEQ ID NO: 31408 - DNA, 600 bp, Chicken  19866894253766_2
tgtttataatgagtcagtgtaaaccaaccacctgcttctgaacctgtagaatcatagaatcaccaaggttggaaaaggtccacagggtcacccagtccaaccattcacccatcaccaatggttctcactaaaccatgtccctcaacataatgtccaaaygttccttgaacaccaccagggtcggtgactccaccacctctctggacagcccattccagtgcctgaccactctttcagagaagtaatatttcctaacttccagcctgaaccttccctggtgcagcttgaagccattccctstagtcctatcactagtcacccgagagaagaggctgacccccagctcactacaacctcccttcaggtagttatagagagcaataaggtctcccctgagcctcctcttctctagactgaacaatcctagctccttcagctgcttctcataaggcctgtgctccagacccattttgtatttattgttattgtcaccatgcttttcataaatatttgtgaaagaagattataggtatagataaacagacatgctgtastctgaagtaaatacaagacttcaagacacagtatgaaatacttctt

SEQ ID NO: 31409 - DNA, 600 bp, Chicken  19866894253766_3
acttccagcctgaaccttccctggtgcagcttgaagccattccctstagtcctatcactagtcacccgagagaagaggctgacccccagctcactacaacctcccttcaggtagttatagagagcaataaggtctcccctgagcctcctcttctctagactgaacaatcctagctccttcagctgcttctcataaggcctgtgctccagacccattttgtatttattgttattgtcaccatgcttttcataaatatttgtgaaagaagattataggtatagataaacagacatgctgtastctgaagtaaatacaagacttcaagacacagtatgaaatacttctttcctttttaattcaatctgtttaaaaactgtggtaactggaactcttgttcagccattgttctgtagtgatttctttttctttattttccttacttgccatcttaagtaattaagccagtgatgttttagactctcgcttctagtattttacattaaagcatcaaaactcttttccataaagaagataatatttctattatagctgccttcatacccagccagatctttatgatgccattcaggttcttgaaga

SEQ ID NO: 31410 - DNA, 599 bp, Chicken  19866894253768_1
  misc_feature (1)..(70): n is any nucleotide
nnnnnnnnnnnnnnnnnnnnnnnnnnnnnnnnnnnnnnnnnnnnnnnnnnnnnnnnnnnnnnnnnnnnnntgttttgaagcatatttcaagagggtgcaaagggtcctcatttcaatcaattaatgttactgtgcataaagctaactcagaaaatagcagctatgcttcagtgtaccacagcttacgactgcatgtgtacatcccaacctgtgggccttattgagcaaacctttgcaggatttttcccagttttcaagttctgctcttatatgaccatttgctataaaaggctgcaccargccacagcgaaggagatgcagttgcacaggtgaaaaggtttccccagcaycaccattgtaactgacaaggatttcaatcacaggatattgctgtgctaaaaattacctcctgatttttcttatgaatatcagagagataggaaggaagatggataggcaggaaatgagaaagcccgtgttgccttggtgagggacaaggagcaaacactctcagaagaaaytgtttgattgtgtaccttaatgtcacagctgctttgtaaatcagaactaccttycaaggcttcctcccccattgctcc

SEQ ID NO: 31411 - DNA, 599 bp, Chicken  19866894253768_2
  misc_feature (1)..(20): n is any nucleotide
nnnnnnnnnnnnnnnnnnnntgttttgaagcatatttcaagagggtgcaaagggtcctcatttcaatcaattaatgttactgtgcataaagctaactcagaaaatagcagctatgcttcagtgtaccacagcttacgactgcatgtgtacatcccaacctgtgggccttattgagcaaacctttgcaggatttttcccagttttcaagttctgctcttatatgaccatttgctataaaaggctgcaccargccacagcgaaggagatgcagttgcacaggtgaaaaggtttccccagcaycaccattgtaactgacaaggatttcaatcacaggatattgctgtgctaaaaattacctcctgatttttcttatgaatatcagagagataggaaggaagatggataggcaggaaatgagaaagcccgtgttgccttggtgagggacaaggagcaaacactctcagaagaaaytgtttgattgtgtaccttaatgtcacagctgctttgtaaatcagaactaccttycaaggcttcctcccccattgctccttgtctgggctctgccaacagcatcatgaagggtgaggaagaggaggaag

SEQ ID NO: 31412 - DNA, 600 bp, Chicken  19866894253768_3
tgagcaaacctttgcaggatttttcccagttttcaagttctgctcttatatgaccatttgctataaaaggctgcaccargccacagcgaaggagatgcagttgcacaggtgaaaaggtttccccagcaycaccattgtaactgacaaggatttcaatcacaggatattgctgtgctaaaaattacctcctgatttttcttatgaatatcagagagataggaaggaagatggataggcaggaaatgagaaagcccgtgttgccttggtgagggacaaggagcaaacactctcagaagaaaytgtttgattgtgtaccttaatgtcacagctgctttgtaaatcagaactaccttycaaggcttcctcccccattgctccttgtctgggctctgccaacagcatcatgaagggtgaggaagaggaggaagcctcgagcactggaaccagcctttaaaccagtggtgtttccttggcactggggggagaccagcactcaccacaggccggaagggctttccttagacccccagctgctaagcattacacatagccagttagttatttgtattaaaagcctactaaatctgaaaaaaaaaccat

SEQ ID NO: 31413 - DNA, 600 bp, Chicken  19866894253768_4
catttgctataaaaggctgcaccargccacagcgaaggagatgcagttgcacaggtgaaaaggtttccccagcaycaccattgtaactgacaaggatttcaatcacaggatattgctgtgctaaaaattacctcctgatttttcttatgaatatcagagagataggaaggaagatggataggcaggaaatgagaaagcccgtgttgccttggtgagggacaaggagcaaacactctcagaagaaaytgtttgattgtgtaccttaatgtcacagctgctttgtaaatcagaactaccttycaaggcttcctcccccattgctccttgtctgggctctgccaacagcatcatgaagggtgaggaagaggaggaagcctcgagcactggaaccagcctttaaaccagtggtgtttccttggcactggggggagaccagcactcaccacaggccggaagggctttccttagacccccagctgctaagcattacacatagccagttagttatttgtattaaaagcctactaaatctgaaaaaaaaaccatcttgttcttaaggcatcttcatctttaggtgctcagtttgagctgttgcctgac

SEQ ID NO: 31414 - DNA, 600 bp, Chicken  19866894253770_1
aaacagagtacgaggtacgggagctggctgaaactgttaacataactgaaaccattgcatactgagtacacatttgccagatgagcaggttgatgcaccaatatcaaaatatgagtgacatttacctggaagagttgcaaatactgcagatgatgtatttattctcacaatccaataccatggaagtttgagatgatagaagcagaggctccagtcctggaaatacctatgtgtgtgttttatttcatttgtttcttgtggtctcaatgatatctgaggtcaattccatttgcaggagawccttttcagaatcaaagatttcctttattaacttsccatcaatattgaaaataaacatagagttcatcatcttttcattgcactacagagttgatctatggttctttatacagttataaaaaacttcaacagaaatccaaatcaattacacacatgctatcaaaatgctcacatttttaattcagcacatgtttaatatttgatcctatatgtgcaataaatgtctttatcgcatgcagtaattaatttctattcacagatatttatgtgtgaaattaaatatttcatacattcattaat

SEQ ID NO: 31415 - DNA, 600 bp, Chicken  19866894253770_2
gttaacataactgaaaccattgcatactgagtacacatttgccagatgagcaggttgatgcaccaatatcaaaatatgagtgacatttacctggaagagttgcaaatactgcagatgatgtatttattctcacaatccaataccatggaagtttgagatgatagaagcagaggctccagtcctggaaatacctatgtgtgtgttttatttcatttgtttcttgtggtctcaatgatatctgaggtcaattccatttgcaggagawccttttcagaatcaaagatttcctttattaacttsccatcaatattgaaaataaacatagagttcatcatcttttcattgcactacagagttgatctatggttctttatacagttataaaaaacttcaacagaaatccaaatcaattacacacatgctatcaaaatgctcacatttttaattcagcacatgtttaatatttgatcctatatgtgcaataaatgtctttatcgcatgcagtaattaatttctattcacagatatttatgtgtgaaattaaatatttcatacattcattaattttataattttagaagctagccactctgaggtgca

SEQ ID NO: 31416 - DNA, 600 bp, Chicken  19866894253772_1
taatttagatcagtgaagaatcaagtgtttgtgatttccttaaaacaaagttcaggctttatatgcatttgctcattaataccatacagatacagccaagttaatgttaggtaccgatgggttttggcttcttatttggaatgacaatggtgattcaatatgtttaggtgccaaaggtgagatgggcgtcatgggagcccctgggcctccagggcctcctgggactcctggaagaagtggccttcctggcttgaaaggtatggtttttccatgtccttcctgagtggaaagtggctttgyatgctaatgatacaaattaattactggggtccatgtrtgttatcttgacagttctgatgttcataattgctttccagttttaagccatagcattcagtcagctgcctttaatttatgtcatgaaatgttacctatttttaaaatgttatccttggattgatgggacccaggtaggactctctcagtgtgggtcacgcagacactcagtttcctctgagctgacaaactgccttcttgcagaacacagacatcccccatgtagtccacttactcagatttgttccagggcttaagttgctg

SEQ ID NO: 31417 - DNA, 600 bp, Chicken  19866894253772_2
ccttaaaacaaagttcaggctttatatgcatttgctcattaataccatacagatacagccaagttaatgttaggtaccgatgggttttggcttcttatttggaatgacaatggtgattcaatatgtttaggtgccaaaggtgagatgggcgtcatgggagcccctgggcctccagggcctcctgggactcctggaagaagtggccttcctggcttgaaaggtatggtttttccatgtccttcctgagtggaaagtggctttgyatgctaatgatacaaattaattactggggtccatgtrtgttatcttgacagttctgatgttcataattgctttccagttttaagccatagcattcagtcagctgcctttaatttatgtcatgaaatgttacctatttttaaaatgttatccttggattgatgggacccaggtaggactctctcagtgtgggtcacgcagacactcagtttcctctgagctgacaaactgccttcttgcagaacacagacatcccccatgtagtccacttactcagatttgttccagggcttaagttgctgtagaaaaccttccgtaaactgactgatcattcartga

SEQ ID NO: 31418 - DNA, 568 bp, Chicken  19866894253772_3
gtrtgttatcttgacagttctgatgttcataattgctttccagttttaagccatagcattcagtcagctgcctttaatttatgtcatgaaatgttacctatttttaaaatgttatccttggattgatgggacccaggtaggactctctcagtgtgggtcacgcagacactcagtttcctctgagctgacaaactgccttcttgcagaacacagacatcccccatgtagtccacttactcagatttgttccagggcttaagttgctgtagaaaaccttccgtaaactgactgatcattcartgaattcaaattccatgaataagtcatggccaacctatgtaagaaaaagaaataccttagcctaccttatggattgtattcttctcttctgttgtctttacctactataggtaataatggattgcctggcccaccagggcctcctggaccattaggacagaaaggtgttaaaggtgaagcaggcctgccaggtccacctggaacagttgatccaaaacagctaggagcaaaaggagaaaaaggcgagccgggtgttccaggtaaagaa

SEQ ID NO: 31419 - DNA, 600 bp, Chicken  19866894253773_1
gcacttacgaagtggcctttgccctccaggtaaggattctcttgtaccactggaggaatttttgagatcaaacccaactactatttttccccataatttagtgtttatttgtccaacatgctactacgagatttaaattatttccccccactctccaaagagccattaacacactggaacccagggaagtgctataaacagtgatctgctaaagtaaactagacttctcaaataattcaagtgctccattagagtttacggtttacttttgtttgaccccaaagttaatggagtcaaccrgagactttccaatggctttgctgggctttggctccacacccctatgagctcaggcaccgtggaaaggaggcagtgaattcctactgccaactttgtcttagaagatgaaaattttgctgggtttactcaaagtaaaacctgccagatagctcattttaacagacctgttttcaacctgttaaattcacagggatatgaaataacgtgccatrgggaacttggaaaatccctcagaactaccttaacctttaccaagcagaaaccaggctcacaaaaagtactccagcaacgtgtgcttcc

SEQ ID NO: 31420 - DNA, 600 bp, Chicken  19866894253773_2
agtaaactagacttctcaaataattcaagtgctccattagagtttacggtttacttttgtttgaccccaaagttaatggagtcaaccrgagactttccaatggctttgctgggctttggctccacacccctatgagctcaggcaccgtggaaaggaggcagtgaattcctactgccaactttgtcttagaagatgaaaattttgctgggtttactcaaagtaaaacctgccagatagctcattttaacagacctgttttcaacctgttaaattcacagggatatgaaataacgtgccatrgggaacttggaaaatccctcagaactaccttaacctttaccaagcagaaaccaggctcacaaaaagtactccagcaacgtgtgcttccactctgctgctatgggaggtttattgtkctctcctttactgtaaaattcacaccatcccctcatcgggtcacatcaatcagcaggaacagmgaagcaaacatttttgtcaacatgtactttagaggtggggaagctgttctctgggacagaactggcaggaatccaggacaaggcaccagcatgattttaatgaggctccgtgctaaaatca

SEQ ID NO: 31421 - DNA, 600 bp, Chicken  19866894253773_3
tggctccacacccctatgagctcaggcaccgtggaaaggaggcagtgaattcctactgccaactttgtcttagaagatgaaaattttgctgggtttactcaaagtaaaacctgccagatagctcattttaacagacctgttttcaacctgttaaattcacagggatatgaaataacgtgccatrgggaacttggaaaatccctcagaactaccttaacctttaccaagcagaaaccaggctcacaaaaagtactccagcaacgtgtgcttccactctgctgctatgggaggtttattgtkctctcctttactgtaaaattcacaccatcccctcatcgggtcacatcaatcagcaggaacagmgaagcaaacatttttgtcaacatgtactttagaggtggggaagctgttctctgggacagaactggcaggaatccaggacaaggcaccagcatgattttaatgaggctccgtgctaaaatcacagaaagcaacatggaaacgacagtaaaacaagcagtttagtcaacagtggaactaatagggactggtctcctagagaattttttctccctgttgattctgcaatacaaaaggaga

SEQ ID NO: 31422 - DNA, 600 bp, Chicken  19866894253773_4
tttgtcttagaagatgaaaattttgctgggtttactcaaagtaaaacctgccagatagctcattttaacagacctgttttcaacctgttaaattcacagggatatgaaataacgtgccatrgggaacttggaaaatccctcagaactaccttaacctttaccaagcagaaaccaggctcacaaaaagtactccagcaacgtgtgcttccactctgctgctatgggaggtttattgtkctctcctttactgtaaaattcacaccatcccctcatcgggtcacatcaatcagcaggaacagmgaagcaaacatttttgtcaacatgtactttagaggtggggaagctgttctctgggacagaactggcaggaatccaggacaaggcaccagcatgattttaatgaggctccgtgctaaaatcacagaaagcaacatggaaacgacagtaaaacaagcagtttagtcaacagtggaactaatagggactggtctcctagagaattttttctccctgttgattctgcaatacaaaaggagataaaagtgctaaaagctcacattagctctctgctctcgacttccctaaggtctaacaaaagat

SEQ ID NO: 31423 - DNA, 600 bp, Chicken  19866894253806_1
cccctcttgattataagcttgcttcaagtactagagcgaggtctccttggagccttctcttttcaaagctaactagatgatctttaaggttccctgcaacctaagccattctatcattctaagagtctttttcctagcaagatatcagttacagattctcttcagtccagcttaactttacaaattcagtgccactgtcattgcctctgttgaaaacagcagcagactgagtaatgaacaataaaacttccaggtctcctaaagacattaagaatgtgccagggaatggagtatacttcrttatctatctcaccttcacaaatctctcctgarttaaaacaccacccagttaacagaagtggtcttttcaaaatgtgactgaggctagggtgctctcaggaaggtgaagagctgccactatcaaaaactacttcagcttggaaatagacttgtttaatatccagaatgtgatgtcttacatcaacattttgagtgttatacaaagttaccatagagactgattttcaggaaagagaaagaggaacaaattacttcatttagttttacaaattaactctgacaaccttcccccatttccct

SEQ ID NO: 31424 - DNA, 600 bp, Chicken  19866894253806_2
gagcgaggtctccttggagccttctcttttcaaagctaactagatgatctttaaggttccctgcaacctaagccattctatcattctaagagtctttttcctagcaagatatcagttacagattctcttcagtccagcttaactttacaaattcagtgccactgtcattgcctctgttgaaaacagcagcagactgagtaatgaacaataaaacttccaggtctcctaaagacattaagaatgtgccagggaatggagtatacttcrttatctatctcaccttcacaaatctctcctgarttaaaacaccacccagttaacagaagtggtcttttcaaaatgtgactgaggctagggtgctctcaggaaggtgaagagctgccactatcaaaaactacttcagcttggaaatagacttgtttaatatccagaatgtgatgtcttacatcaacattttgagtgttatacaaagttaccatagagactgattttcaggaaagagaaagaggaacaaattacttcatttagttttacaaattaactctgacaaccttcccccatttccctaaggaggtggaggagtataccaagcgatgcttg

SEQ ID NO: 31425 - DNA, 600 bp, Chicken  19866894253812_1
tgcctatcttatggaaaaagcaaaagatggtgaagcagagagcaaggcaggctggaagagagccactcaagcagcatgctttctttgatgttcaaccctgaagaccaggggcatttgagccaggaagcaaatcgcaaagtgccaatttggagtgcagacagaggtcaaaatctgaaaactgatgaatagtggaaactgcaatgtttgtttttgagtatctgatcactttaaccactgctctgctcactcccactctgctcgcttctgttattgctatggagctggtggttatgggctgcrtggataatatcagagcaagagtgccaatctaaatcatatgtcaacccttcagtctagctttacatggaaaaactagtgctaggaaaatgccagttcaagggaggggcaggattttacttagattttcagaaatgcagggtaaatagttctgaaatcccaagcacttgagtattaccttttttgagaagtgaaatacggttcttatggtatttcagtcatcactaactctaaaataggatcctttataaactcagaaattcactgctaggttgctgcccactcacatggataacacaggct

SEQ ID NO: 31426 - DNA, 599 bp, Chicken  19866894253821_1
  misc_feature (1)..(82): n is any nucleotide
nnnnnnnnnnnnnnnnnnnnnnnnnnnnnnnnnnnnnnnnnnnnnnnnnnnnnnnnnnnnnnnnnnnnnnnnnnnnnnnnnnatgaggcctgcccctgttggattacatggaagatggaatcaccatttgatgttttcttctgcccagcattgtgtcatcgcaccagtaaaatgaatctcttggtcactctcaatgacttgtgtccagtacgcagacatcagtttagtaagtgtcctgatggtatatgcctggtttgctttcagtactggataggcctgcagtagctcacttgcagtgtyaacgcaggtcagggcagggcctgatgtaatcaacctgccattgttggagaggatagtgtcctctagcaagatgggctgttgtttcaggaaacgatctcaggcttatcttggagcaagtgtcacagtctcagcatgcttgggtgatgtcagatagctgtatgggcagcccccatgctttagcagctgcacrcactgtcttttgtccagcatgccatagtttctgatgtaaccaatgggcgatgctctcagatggtgaattctcaatccattgaacttgagccagcgtgtcagcttcgtca

SEQ ID NO: 31427 - DNA, 600 bp, Chicken  19866894253821_2
tcaatgacttgtgtccagtacgcagacatcagtttagtaagtgtcctgatggtatatgcctggtttgctttcagtactggataggcctgcagtagctcacttgcagtgtyaacgcaggtcagggcagggcctgatgtaatcaacctgccattgttggagaggatagtgtcctctagcaagatgggctgttgtttcaggaaacgatctcaggcttatcttggagcaagtgtcacagtctcagcatgcttgggtgatgtcagatagctgtatgggcagcccccatgctttagcagctgcacrcactgtcttttgtccagcatgccatagtttctgatgtaaccaatgggcgatgctctcagatggtgaattctcaatccattgaacttgagccagcgtgtcagcttcgtcatttcctggtgactgtaagggttggtaaccagaaatgtggtggacaygtacagtcctgtgtttaactgtattccatatgtctaaccacatctttgctccagattggtcgggcatgaatattccattcctaggtggctccactgtgcaatccaaagagtgagcccctggtacgcagcccaactatctgcgcag

SEQ ID NO: 31428 - DNA, 600 bp, Chicken  19866894253821_3
ggagaggatagtgtcctctagcaagatgggctgttgtttcaggaaacgatctcaggcttatcttggagcaagtgtcacagtctcagcatgcttgggtgatgtcagatagctgtatgggcagcccccatgctttagcagctgcacrcactgtcttttgtccagcatgccatagtttctgatgtaaccaatgggcgatgctctcagatggtgaattctcaatccattgaacttgagccagcgtgtcagcttcgtcatttcctggtgactgtaagggttggtaaccagaaatgtggtggacaygtacagtcctgtgtttaactgtattccatatgtctaaccacatctttgctccagattggtcgggcatgaatattccattcctaggtggctccactgtgcaatccaaagagtgagcccctggtacgcagcccaactatctgcgcagattttcaggataccgtcaccaggttccttggttatgaccatccatacagcttgcagttctgcccattggctgctctgaccatccccttcatcaatccagatcatctcagtggagggatggtatgctatcgctctccacttgctcacgttgccctt

SEQ ID NO: 31429 - DNA, 599 bp, Chicken  19866894253824_1
  misc_feature (1)..(79): n is any nucleotide
nnnnnnnnnnnnnnnnnnnnnnnnnnnnnnnnnnnnnnnnnnnnnnnnnnnnnnnnnnnnnnnnnnnnnnnnnnnnnnngttttgtctgggcaaagtagttgcattggctccaaacagcagtgctccagcacaagcagagtgttcccttcccacagcaaaccagtggcaaaattctggtgcaggaggtaagtgcatagctatgccccaaacgggcttggaaacagtgctagaaaatacaccttctgccaaaagaaaaagaagaaaaactgcatggacagatgaagcatttctacaagagkgcatggggtcatactggagccatcacgtatacccacagccccggtgggtgatggatttgcatgactttgaggcatgccacctcccaggcacgtccctgtgcgcccgtgatttcaattcccttccgtaaccagcttagatttccaaagcaaatcatttgcaactacaaagcggctccattttgacaatttcagaacataaaaacctattgcaatcaactcaaaaacgtcttcaaagtaacactgctgtcagtcaatcaccctcccccctacctgtgcagaggcactcagtggaatagaga

SEQ ID NO: 31430 - DNA, 599 bp, Chicken  19866894253826_1
  misc_feature (1)..(12): n is any nucleotide
nnnnnnnnnnnngaggcggagaggcgggagcagcagcagtgggtgagcctcgtgccgtccctggggcttttggggtgcagatgtcccctttgtttaccctctgcttcggggtccacgtggtggggccgtcactttcccctctggtgccgcagaaggagcagcagcaggcagaggagcacgaggccgggcagcgccgcagcgtccggaggagcgaatcagtggagaaagcccaggtgagaccacagccccacggccccgcagctgggggtccccccaccggacccccccaccctgagcccygctcygcacacaggaggcagcgtcgctcatcgcacagcgcccggggaacccgcgggacatctttgtgcagagggagcgggcggygcccggggacactgcggccgctgcacagccaggtgagggtctcatgggggggaatgtgggtgcccggtcccaaccaggggagggtctgcaggcagcgaccccacaagcagctcagttcggcgcttttcacgtcccgttgctttgcatgggtgcaccgcagcgcggtgggaacgctgcttgagcactggggttggtttgggggtgagcagtgccct

SEQ ID NO: 31431 - DNA, 599 bp, Chicken  19866894253826_2
  misc_feature (1)..(7): n is any nucleotide
nnnnnnngaggcggagaggcgggagcagcagcagtgggtgagcctcgtgccgtccctggggcttttggggtgcagatgtcccctttgtttaccctctgcttcggggtccacgtggtggggccgtcactttcccctctggtgccgcagaaggagcagcagcaggcagaggagcacgaggccgggcagcgccgcagcgtccggaggagcgaatcagtggagaaagcccaggtgagaccacagccccacggccccgcagctgggggtccccccaccggacccccccaccctgagcccygctcygcacacaggaggcagcgtcgctcatcgcacagcgcccggggaacccgcgggacatctttgtgcagagggagcgggcggygcccggggacactgcggccgctgcacagccaggtgagggtctcatgggggggaatgtgggtgcccggtcccaaccaggggagggtctgcaggcagcgaccccacaagcagctcagttcggcgcttttcacgtcccgttgctttgcatgggtgcaccgcagcgcggtgggaacgctgcttgagcactggggttggtttgggggtgagcagtgcccttatgg

SEQ ID NO: 31432 - DNA, 600 bp, Chicken  19866894253826_3
cccctttgtttaccctctgcttcggggtccacgtggtggggccgtcactttcccctctggtgccgcagaaggagcagcagcaggcagaggagcacgaggccgggcagcgccgcagcgtccggaggagcgaatcagtggagaaagcccaggtgagaccacagccccacggccccgcagctgggggtccccccaccggacccccccaccctgagcccygctcygcacacaggaggcagcgtcgctcatcgcacagcgcccggggaacccgcgggacatctttgtgcagagggagcgggcggygcccggggacactgcggccgctgcacagccaggtgagggtctcatgggggggaatgtgggtgcccggtcccaaccaggggagggtctgcaggcagcgaccccacaagcagctcagttcggcgcttttcacgtcccgttgctttgcatgggtgcaccgcagcgcggtgggaacgctgcttgagcactggggttggtttgggggtgagcagtgcccttatgggagctgacagcttttcagtgggtttccaaagagaggaagggcggcagtgcccgtctgtgcccaaaaccacccctggctgc

SEQ ID NO: 31433 - DNA, 600 bp, Chicken  19866894253827_1
cagagcatcctcctgttcccttctctgtccatccgtctgctttcccccaggtctcatctgaaagagacagaccatctttgggccacagcactctgttgatgtctgatccacattcactgcttcccaggggctttactctgcagaaagggctctgtctgagcagtgggagggggacttggcaaacttcatagaatcggtgctactgcctctacccacatccctctatctgcaatagcatggctatatttcctgctttaaaaaggcagataacagtttatgcaagaagtccaagtgagtacrtggtttagtagcactaggacttgttttgttaaattgtcatgagtttggtgagcctgaacagactctcagcaaactaaaacttaacttcagcacataagtccccagtgcttggtacccagttctcagggtttgctcacaaaatactgacaatccatgtgttacattgctactgctattttaacccacgtggtttcttttaaaaccctactctccactcagrtgtgcagctctgggaccatcttacaacttcagtgtcccaaggactatgggaatttgaatggctccctgaggagtttatct

SEQ ID NO: 31434 - DNA, 600 bp, Chicken  19866894253827_2
ctctatctgcaatagcatggctatatttcctgctttaaaaaggcagataacagtttatgcaagaagtccaagtgagtacrtggtttagtagcactaggacttgttttgttaaattgtcatgagtttggtgagcctgaacagactctcagcaaactaaaacttaacttcagcacataagtccccagtgcttggtacccagttctcagggtttgctcacaaaatactgacaatccatgtgttacattgctactgctattttaacccacgtggtttcttttaaaaccctactctccactcagrtgtgcagctctgggaccatcttacaacttcagtgtcccaaggactatgggaatttgaatggctccctgaggagtttatctayaaagggtgcccataggacttttcaacatcatttgatggtgggtttatcactygctggctttcagaactcagygcaggctttgcaatgtgctttaggggcaggtagctaacatctaccaatgttaattcatacctctgtaccatgcatcttagtccctttagcacaagggatctgatacccccttcctccaatctagtattatgcacctgtgggcaaag

SEQ ID NO: 31435 - DNA, 600 bp, Chicken  19866894253827_3
gtttagtagcactaggacttgttttgttaaattgtcatgagtttggtgagcctgaacagactctcagcaaactaaaacttaacttcagcacataagtccccagtgcttggtacccagttctcagggtttgctcacaaaatactgacaatccatgtgttacattgctactgctattttaacccacgtggtttcttttaaaaccctactctccactcagrtgtgcagctctgggaccatcttacaacttcagtgtcccaaggactatgggaatttgaatggctccctgaggagtttatctayaaagggtgcccataggacttttcaacatcatttgatggtgggtttatcactygctggctttcagaactcagygcaggctttgcaatgtgctttaggggcaggtagctaacatctaccaatgttaattcatacctctgtaccatgcatcttagtccctttagcacaagggatctgatacccccttcctccaatctagtattatgcacctgtgggcaaagctcctccaagaaagcctcctgcaacaaatcagtctgcttcctacacataaggatgaatgaggatgtgtatcatagccatagg

SEQ ID NO: 31436 - DNA, 600 bp, Chicken  19866894253827_4
tgaacagactctcagcaaactaaaacttaacttcagcacataagtccccagtgcttggtacccagttctcagggtttgctcacaaaatactgacaatccatgtgttacattgctactgctattttaacccacgtggtttcttttaaaaccctactctccactcagrtgtgcagctctgggaccatcttacaacttcagtgtcccaaggactatgggaatttgaatggctccctgaggagtttatctayaaagggtgcccataggacttttcaacatcatttgatggtgggtttatcactygctggctttcagaactcagygcaggctttgcaatgtgctttaggggcaggtagctaacatctaccaatgttaattcatacctctgtaccatgcatcttagtccctttagcacaagggatctgatacccccttcctccaatctagtattatgcacctgtgggcaaagctcctccaagaaagcctcctgcaacaaatcagtctgcttcctacacataaggatgaatgaggatgtgtatcatagccataggcatgataccttttctaaaggtgttgaatagccattgagctggaggagtgatg

SEQ ID NO: 31437 - DNA, 590 bp, Chicken  19866894253827_5
taaaacttaacttcagcacataagtccccagtgcttggtacccagttctcagggtttgctcacaaaatactgacaatccatgtgttacattgctactgctattttaacccacgtggtttcttttaaaaccctactctccactcagrtgtgcagctctgggaccatcttacaacttcagtgtcccaaggactatgggaatttgaatggctccctgaggagtttatctayaaagggtgcccataggacttttcaacatcatttgatggtgggtttatcactygctggctttcagaactcagygcaggctttgcaatgtgctttaggggcaggtagctaacatctaccaatgttaattcatacctctgtaccatgcatcttagtccctttagcacaagggatctgatacccccttcctccaatctagtattatgcacctgtgggcaaagctcctccaagaaagcctcctgcaacaaatcagtctgcttcctacacataaggatgaatgaggatgtgtatcatagccataggcatgataccttttctaaaggtgttgaatagccattgagctggaggagtgatgaggaaggcaa

SEQ ID NO: 31438 - DNA, 599 bp, Chicken  19866894253829_1
  misc_feature (1)..(19): n is any nucleotide
nnnnnnnnnnnnnnnnnnngctgtcctcgtggggctgaggttggtgcccccagtgctggccgtcaccaagtgctgctgcaggctgtccttgctttaacagaacagggtttcaatgcactgagcagcggggactgacttctcaaggctgtcttacatagcacttctttctaggtctctccttcgactgtcttttgttttttaaacaaaaattctttataattggggaagagaagaatttagtagaaccacgtgaggtttctgtacacctcgctctgtttctggaggagttgtgctcgccgwgtgcttaacaggacctcctctctggggctgacgctgcgtgcagctgcacaaaagctggccgtgctgctggcacgtgtgctgccctgctgtcccctggctgggacaggatagcagcagctccagagcagaaccctgcgtggatgaaggctttgcagcagctgcagagctttgctttctgcagggtgctctgaggccgcagctctgtgcagaactgagcgctggggcagatcctcagtccctgcacatcccttctcctccacccgcatttgtaacgttgctgtgctgaggcgtttgcagtc

SEQ ID NO: 31439 - DNA, 600 bp, Chicken  19866894253829_2
cgtggatgaaggctttgcagcagctgcagagctttgctttctgcagggtgctctgaggccgcagctctgtgcagaactgagcgctggggcagatcctcagtccctgcacatcccttctcctccacccgcatttgtaacgttgctgtgctgaggcgtttgcagtcaggatgtccgttctggtgagagcttttcttgtttattgtcgaatctactggttagatttctcgtccaaacagttgaaatattttttaagagcttattttgtttgtaaacgcgcacactcgggtgccagcgccggaygggattgcatacactgggaaagcagagttcctaccgcagtattttctacgctattaatctactaaaattgttttctatacagaatctatttacaaaatgaccaatgtagtgattaaagggtgaccttatttgaatgtatggcgggctctgtaggtcagtaacaatagggggagaaatgaaaggatttcatgtgcctcagtatttttgtactggcttccaataaagcaatgaatggcctcctgcctcgtgtgtgctttgggggctgtgcaggcttctccccagcaggaggctgtgggtacc

SEQ ID NO: 31440 - DNA, 600 bp, Chicken  19866894253830_1
agggctcatttagtgagcatattctgagggatgctttaactcttttgagaggttaggtcagctgtgtgtacgttacaacttggatgaagacaggagttctgctcacttttcaaattcaacatttacatgcttctgtttcctttttccatgcgctgttttctgttacttcagacttcagggaattttgttacattcaaggcttttccagtcgtgtggttcgaaatcagaaacagcccgtctatgcagaagattttaagatattatcgggcttttttctgcttgggttgcttggtaatttawaaagtcaggcagtttttctgaattcttagcttggcttagactgtctcatttctagtgatttattcagatagaaatggaaaaaaaaatactactggttttgctataaaggcatcagaagtcaactttcttattgtttttgtgtgtccaccagttcaatgttgatcacctttcattagaaataagtggagcgagtggatgacagaagcgcataggtattaaataggacctgctcaaataacatagttactctatagagtgtacagaatagtgtctcagcctacagcattgatccagtccttt

SEQ ID NO: 31441 - DNA, 600 bp, Chicken  19866894253832_1
agattgttacaagacagtgctgcagcaattcttttctgtcagcaagggaatcttcagccttttcaataggagtaccagggatagacaactctactttcagccagtttaacatcttctgcaggcagggtttcttaccctctatttctttccagttcttggtcacaaattactattcttgagtagttacagttttcctttaattaacaaatcaaaccaaaccatgttttctgtaaataaaagatcagaattcatacctgaaaaatactgcaggtgagatatgaatccacacaggagaaaccktctgtcatttaataaattcatagtgaccttggccaaatcatgaaattcctgagctgaaaatagcatcactttgggaaaatattatagaagtagatcatgcatatttaacatgttcttactttttccctaagcacatgtttattgattctgactgaaacaggatgcagaactggagatgcccccagtcatacccattctgatgagaaggagttcttattattcttttatttgtattgttctttttttctttttttcatctttatttaaatcagaacatgagatgcaaaagaatacacaact

SEQ ID NO: 31442 - DNA, 600 bp, Chicken  19866894253838_1
ctttgctcaatgaattaaaaaagttttggaactggaaatcccacttgatctaaggagtctgctgcacagtgtttccatattattcaccctaaagggtgaggggagtctggggctgagctgtgaaactcctcatgttagagaattaataaaagaaagtaggaatatttttgaaatgccaacatctataggtctaaagtgggaaatcagatcaataaaactagcaggagagcgtctatcttttgcaatttaaatgaaaaagaagcaaaaagttgtaagaagggcaacagccaaaatgaaaakgtgaagacagttactaagtgcaacatatcaggcagtgactgcaccatacgtacataaaggcacctgagttttaaatcattgctattattggataatatattgctaagattgctgtctccaggaaaagagaggtgaacaatgtgataagaccagtgatcattaaaaaataataataataatccagtttgatgttcagagcacagacygtgcttaggtgccggttaaaacgggaacccggcactctcttacgtactcaaattcttgcagtatcccattaagaagtttgagtcatactatttc

SEQ ID NO: 31443 - DNA, 600 bp, Chicken  19866894253838_2
gatcaataaaactagcaggagagcgtctatcttttgcaatttaaatgaaaaagaagcaaaaagttgtaagaagggcaacagccaaaatgaaaakgtgaagacagttactaagtgcaacatatcaggcagtgactgcaccatacgtacataaaggcacctgagttttaaatcattgctattattggataatatattgctaagattgctgtctccaggaaaagagaggtgaacaatgtgataagaccagtgatcattaaaaaataataataataatccagtttgatgttcagagcacagacygtgcttaggtgccggttaaaacgggaacccggcactctcttacgtactcaaattcttgcagtatcccattaagaagtttgagtcatactatttcacattttttaaagaacctcaaagtaacgatagtttccagaagctgtaacatcaatgacgtttgagtgcacatagaatctatgagaaaggtgttcctgcagagcagctcatcatgaagttttgaagcaagagatgtaacctgaccgtaatttaagaggcaactccttcacatcctaagcattaatagtgtaggaaagggtgcagctg

SEQ ID NO: 31444 - DNA, 600 bp, Chicken  19866894253849_1
aaatccagatttggtgctctgcatcctccgtagctctctcacaacggttcttccaggaacatcacgtgcttgccagctaattttagagcagaataattgttgaacatccttgggtgccgaaagccggcaggacggcaccgtgcatctgtcgtgttcctctgcagagagcagcccgcagccctgcatcgctgcccgaccccgagccccagccagggctgcacagtgcagggggttaacataggtagggaaggagaagcagaattagctcagcccattacaggtctgggtgcggaagatggrgtgaggatgcagggacttgcttaatgggcatgggtcagtggttggacttgatggccatagcagtcttttccaaccttaatgattctatgatcctagagtgaggatgctggaccgtagtagggttttctcacctctatcacaaggcttggggtggctatgagagcttgggctggtgtgaaggggatggagcagagttgtgagcagactgagactggtgttggggtggttgcagctgatgggaagctttcaagtccttgcatctccattgagaaccctggagagctgcacagggaaagactg

SEQ ID NO: 31445 - DNA, 600 bp, Chicken  19866894253851_1
tttcctgtaacaatgaactgttaggtgaagttcagtgtagtgcagccctgaaccagagatagtgttagctcgtgtgtaacagatggaacagacttggttgttgtatagagaaaacaatttataaatgctatggtctgtgcaacaactggtgctgaccatattggacacaggtgggatgaatcaaaactggttcatgcatgtaggtgtctgccctgtactcctaaattacttccaggctggaagcagttttgctccttatctcaggtgggctgatacttgggcagggtttctgtttccctwtggtaaaaccttacctgcatctctcacatgccagcttgttacaagaactgtcccttaggatggacaaggatcatgtaaggctggtttgttgcctctggctagccaagaactcccttcatcttagtacttcaggtgtagtatttggtgtgatttgttgcctcatctggaatatgtgacctgttggctcaaggtggctgtaaccgggcagttccacactgagctttgctgtagttagttgtgaggtaccaacataaaggcatactgcagtacctgggcactccaagaaggaatactagagag

SEQ ID NO: 31446 - DNA, 556 bp, Chicken  19866894253862_1
ggtgagctctgctatttgctttctgtctccgtttcctcccctgtaagatgaggtcttgtttaaagcctgtttgcagagcttgctgcaatgctcctggggcagctgctctcccagggctaagcggtctgcaaaatcccctactggcctgaagtaaagcagccaggaggctcggggcttgttgttcagcacacggtaagggatggttcctaccctggaggggctgcatctcatccagccccgtggcagggagcggagcagcagggctgcgtgcagcgccctgctcagtgccccctgtgcagygcagcagatcattagcagagctacaagtagaaaaccagctcttccacaaagcccagcaaataccctgagaaaagcctcgctgtttccttcccacccacttctcccccaggccggctctgctggaaaatcccatcctccctcctccgcagcacagagcgggctttgcacggttcctggaagaaaatgttttaaccacacgcttgcacctgcagcacccggcctcaagtgtccccgaattcagaattaagtagcacag

SEQ ID NO: 31447 - DNA, 600 bp, Chicken  19866894253863_1
taggcacttgttcccttgcagaggaagcttcttcctcccagccagctgaggtcatttcctatcccttgctgtatcgaagtagccatcttcagtaggaaatagagttggagatccaccgggaaatctccatcctttggattatgtgaaactttgctttcgaggctgtacaaatgagcatagctagaaaattatacgtttggttacctgctgtcacttttgtgactgccttggggcaaggcttggcttgcgctgcataaacatgctaggtgttgtgcagatgatgcattttcttgtgcttcrctgtagccccatggcttctttccagaaagccacagtgcaaactgcagtgtgtggctctcacccaggtgggtgcagcaggctcctctacgtctggagctgcttcccayggcctcccatgcctggcctgagacatccgatgtgacctcggtgggctgtgtgaaccgttctcccgagcggtcctgccgtgccatttcatcttgtccgtagcagaagtaaggaggtcagaatacagagacttagcccacatccataaatatcttttgaacaggtaaaaagtaattacagatagctggaggctgc

SEQ ID NO: 31448 - DNA, 600 bp, Chicken  19866894253863_2
gagatccaccgggaaatctccatcctttggattatgtgaaactttgctttcgaggctgtacaaatgagcatagctagaaaattatacgtttggttacctgctgtcacttttgtgactgccttggggcaaggcttggcttgcgctgcataaacatgctaggtgttgtgcagatgatgcattttcttgtgcttcrctgtagccccatggcttctttccagaaagccacagtgcaaactgcagtgtgtggctctcacccaggtgggtgcagcaggctcctctacgtctggagctgcttcccayggcctcccatgcctggcctgagacatccgatgtgacctcggtgggctgtgtgaaccgttctcccgagcggtcctgccgtgccatttcatcttgtccgtagcagaagtaaggaggtcagaatacagagacttagcccacatccataaatatcttttgaacaggtaaaaagtaattacagatagctggaggctgctgtcttctgccagacgcggctgcactgcaaagtaggagagtgagttgtgtgtgcacacacgagtttcaaggacgctgccggtctgatttagggttcccgagctggag

SEQ ID NO: 31449 - DNA, 599 bp, Chicken  19866894253864_1
  misc_feature (1)..(86): n is any nucleotide
nnnnnnnnnnnnnnnnnnnnnnnnnnnnnnnnnnnnnnnnnnnnnnnnnnnnnnnnnnnnnnnnnnnnnnnnnnnnnnnnnnnnnnccccctccacccacagcccagatgcttccctttggctaatccattatgcagatgcttgctaaacagctgtgaaaaatttgtttgcatttgtcagctttcagaccagcttgaaccacaacgagcacagctgctcccaccgctccccagctccaggagcaccaccagcaccacccgacccatcacctcctctcgggccactgacaacagtgaaagsccccacgtgggctgtgcccatctctggggatggccccgacccatcctggccagggaaggttttctcaagatctgtctttcatgcaaagttttgtggtttttttttccttctttaaacgtgtcagtttaaatttgctctaatgctttcatcttcaaaacagtgtcacaattccccctcagcattttcataacaatgctgccctttctgcttcaaaatatcttttctaacttattgttcacacacacacacccaactttaaagccctgcgctgaggagttgtgataaaactggaacacatc

SEQ ID NO: 31450 - DNA, 600 bp, Chicken  19866894253865_1
aaaaaaaaaaaaacccacaaaaaaaaaaaaatccacaggatacaggacggaaagctgaagaagatgcagcaagtttgtttctagactggggatctgtgtttggttagacactttggttagaccagggacaaaaccagatgctgtgccctactgctgcccagactgagtgactctattctcatgttgacacttctccatctactttcatagctggataaaattcctggttctgctgctaacacagtactgatccttccactatgcgggggaagaggcacagaaagaagtgcactatgagargaaatattttctcccagattatacacaaaggagtgctatgtcctttatctggacaagactcacggtacatctttatgtcactcctgtgttctgttattgcagcttcttagcatttcagccatgacaaatagttaataatatttaataactatgatacgttgcctaacttttctctggcatggacattaaaaatatttaagtaaccatcaaaacatagaccttgaaggaactttcagaatggggagcactgagaagtatgaaagcagcttcaaagctgtatagtgaattcttgtgtccaag

SEQ ID NO: 31451 - DNA, 600 bp, Chicken  19866894253866_1
gcactaaatgttttaacatgttcagtgcttttctccattgacacttcactgagagacatagtgaagcctcctgagataggcctctaagtatggctttcagatacagcccagaaaggggagagaagcattcaaggtattcagattccccttgaaagtcttcaggaggctcacagagccatatgccagcagaatggaaaatgtaaatacctcctattgagatgagggacttggggctcaggaagactaagagggaaatgaagaggaaagagcagatggcagtggggcagatggggaaaaggraatatttctgtggtatttctgccataagggccaaaggatccyatgggtgacraattaaayatgttattattcctgggcaggacgttgtcatttttgtctgctgaggctcccagttctcaatccacttctctccaatagctggccaacaygagragcaattttggctaagttaaactttgggaggaaaagattctcaagaggtctcatgtgtagcatgcaaggagttggggtagacaatgggtaggtggccctggagtcctatggagacaagaaggacgataaatgagagacctctcttcc

SEQ ID NO: 31452 - DNA, 600 bp, Chicken  19866894253866_2
acttcactgagagacatagtgaagcctcctgagataggcctctaagtatggctttcagatacagcccagaaaggggagagaagcattcaaggtattcagattccccttgaaagtcttcaggaggctcacagagccatatgccagcagaatggaaaatgtaaatacctcctattgagatgagggacttggggctcaggaagactaagagggaaatgaagaggaaagagcagatggcagtggggcagatggggaaaaggraatatttctgtggtatttctgccataagggccaaaggatccyatgggtgacraattaaayatgttattattcctgggcaggacgttgtcatttttgtctgctgaggctcccagttctcaatccacttctctccaatagctggccaacaygagragcaattttggctaagttaaactttgggaggaaaagattctcaagaggtctcatgtgtagcatgcaaggagttggggtagacaatgggtaggtggccctggagtcctatggagacaagaaggacgataaatgagagacctctcttccctcaaagagaggggtttatgaatcatgcacggagttgtgggg

SEQ ID NO: 31453 - DNA, 600 bp, Chicken  19866894253866_3
gagacatagtgaagcctcctgagataggcctctaagtatggctttcagatacagcccagaaaggggagagaagcattcaaggtattcagattccccttgaaagtcttcaggaggctcacagagccatatgccagcagaatggaaaatgtaaatacctcctattgagatgagggacttggggctcaggaagactaagagggaaatgaagaggaaagagcagatggcagtggggcagatggggaaaaggraatatttctgtggtatttctgccataagggccaaaggatccyatgggtgacraattaaayatgttattattcctgggcaggacgttgtcatttttgtctgctgaggctcccagttctcaatccacttctctccaatagctggccaacaygagragcaattttggctaagttaaactttgggaggaaaagattctcaagaggtctcatgtgtagcatgcaaggagttggggtagacaatgggtaggtggccctggagtcctatggagacaagaaggacgataaatgagagacctctcttccctcaaagagaggggtttatgaatcatgcacggagttgtggggcacaccactt

SEQ ID NO: 31454 - DNA, 600 bp, Chicken  19866894253866_4
gtgaagcctcctgagataggcctctaagtatggctttcagatacagcccagaaaggggagagaagcattcaaggtattcagattccccttgaaagtcttcaggaggctcacagagccatatgccagcagaatggaaaatgtaaatacctcctattgagatgagggacttggggctcaggaagactaagagggaaatgaagaggaaagagcagatggcagtggggcagatggggaaaaggraatatttctgtggtatttctgccataagggccaaaggatccyatgggtgacraattaaayatgttattattcctgggcaggacgttgtcatttttgtctgctgaggctcccagttctcaatccacttctctccaatagctggccaacaygagragcaattttggctaagttaaactttgggaggaaaagattctcaagaggtctcatgtgtagcatgcaaggagttggggtagacaatgggtaggtggccctggagtcctatggagacaagaaggacgataaatgagagacctctcttccctcaaagagaggggtttatgaatcatgcacggagttgtggggcacaccacttaaagcatc

SEQ ID NO: 31455 - DNA, 600 bp, Chicken  19866894253866_5
tgaaagtcttcaggaggctcacagagccatatgccagcagaatggaaaatgtaaatacctcctattgagatgagggacttggggctcaggaagactaagagggaaatgaagaggaaagagcagatggcagtggggcagatggggaaaaggraatatttctgtggtatttctgccataagggccaaaggatccyatgggtgacraattaaayatgttattattcctgggcaggacgttgtcatttttgtctgctgaggctcccagttctcaatccacttctctccaatagctggccaacaygagragcaattttggctaagttaaactttgggaggaaaagattctcaagaggtctcatgtgtagcatgcaaggagttggggtagacaatgggtaggtggccctggagtcctatggagacaagaaggacgataaatgagagacctctcttccctcaaagagaggggtttatgaatcatgcacggagttgtggggcacaccacttaaagcatctctggacaaagccatcgtatcatggtgagcagggcagtgcaataatagggcagagcacgggattctgcctttgtttgaagaaaatggct

SEQ ID NO: 31456 - DNA, 600 bp, Chicken  19866894253866_6
agtcttcaggaggctcacagagccatatgccagcagaatggaaaatgtaaatacctcctattgagatgagggacttggggctcaggaagactaagagggaaatgaagaggaaagagcagatggcagtggggcagatggggaaaaggraatatttctgtggtatttctgccataagggccaaaggatccyatgggtgacraattaaayatgttattattcctgggcaggacgttgtcatttttgtctgctgaggctcccagttctcaatccacttctctccaatagctggccaacaygagragcaattttggctaagttaaactttgggaggaaaagattctcaagaggtctcatgtgtagcatgcaaggagttggggtagacaatgggtaggtggccctggagtcctatggagacaagaaggacgataaatgagagacctctcttccctcaaagagaggggtttatgaatcatgcacggagttgtggggcacaccacttaaagcatctctggacaaagccatcgtatcatggtgagcagggcagtgcaataatagggcagagcacgggattctgcctttgtttgaagaaaatggctcacg

SEQ ID NO: 31457 - DNA, 600 bp, Chicken  19866894253870_1
agtcagaggatcttttatggacatgtatactgctgctgtcctctgtacttgcctctagctgctgtagctggaggtaacacagcatttgtagcatccagtctgaacgtgagggttcccatgcaacatcatgaagagggtcagggattcacagccatgaagctgctgttacagatgttgggtgcttacagggtggatgaaggcttagctgattataacagctaagattcataactaaaaaataaaacataactttcccgtatacctcttcagagctgtcactgaaagacttaatggaaaatyttttcagaagttgtcttgaagaattctgagctatcaaaacgttctgaaagacagaaataactttactstgcagaytgacttgatattcctctgaactgttttagaggcacagagctacacagtttctcttctaagagagttatatattggactatctgaaatgctttaacctgtcttgataatatttgtctcgaaatatatgaacggtttgtatgaagtagcagaagacactactacacagaattctgagcaaggccgacttttagagcaacctcaccttggaatagcaggtctctttaa

SEQ ID NO: 31458 - DNA, 600 bp, Chicken  19866894253870_2
tggaggtaacacagcatttgtagcatccagtctgaacgtgagggttcccatgcaacatcatgaagagggtcagggattcacagccatgaagctgctgttacagatgttgggtgcttacagggtggatgaaggcttagctgattataacagctaagattcataactaaaaaataaaacataactttcccgtatacctcttcagagctgtcactgaaagacttaatggaaaatyttttcagaagttgtcttgaagaattctgagctatcaaaacgttctgaaagacagaaataactttactstgcagaytgacttgatattcctctgaactgttttagaggcacagagctacacagtttctcttctaagagagttatatattggactatctgaaatgctttaacctgtcttgataatatttgtctcgaaatatatgaacggtttgtatgaagtagcagaagacactactacacagaattctgagcaaggccgacttttagagcaacctcaccttggaatagcaggtctctttaacatctttgttcatgatatggacagtaggatcaaaagtgcaccctcagcatgtttgtggacggcaccaa

SEQ ID NO: 31459 - DNA, 600 bp, Chicken  19866894253870_3
aacacagcatttgtagcatccagtctgaacgtgagggttcccatgcaacatcatgaagagggtcagggattcacagccatgaagctgctgttacagatgttgggtgcttacagggtggatgaaggcttagctgattataacagctaagattcataactaaaaaataaaacataactttcccgtatacctcttcagagctgtcactgaaagacttaatggaaaatyttttcagaagttgtcttgaagaattctgagctatcaaaacgttctgaaagacagaaataactttactstgcagaytgacttgatattcctctgaactgttttagaggcacagagctacacagtttctcttctaagagagttatatattggactatctgaaatgctttaacctgtcttgataatatttgtctcgaaatatatgaacggtttgtatgaagtagcagaagacactactacacagaattctgagcaaggccgacttttagagcaacctcaccttggaatagcaggtctctttaacatctttgttcatgatatggacagtaggatcaaaagtgcaccctcagcatgtttgtggacggcaccaaactgtat

SEQ ID NO: 31460 - DNA, 600 bp, Chicken  19866894253871_1
actcaactaacaaaaaggctttttaaatacatttcgttgtgcttttcctttttataggggtataactgcatgatacgttatttcaagcacgtaagcagcgaatatgaccctttatattattttgttgtctttaaaatacttgtttagaatttcagagacttattttctttgccagtttctgcagcatagtttttatgagccagtcagctcagacagtctatctttttggatgccaaggtcttgtattgtttcctatgttaccaggcaagcacagtgctaaatgtctctgctgcaattaayaacaaacaaacaacttgtatctgccaagacaagcagctttgactttgtgcacacctacataatataatgagtattctcagattataaatagtaatcagtgagatgctcagtgatggcatctgacccatatacattgaagagaaacttcaaaagcaaataaaataaaattgrgagtgtgtttatctatgtctagataagttacatacctttattttctcatttaactttaacattcaaatctctatggtctatattctattaggataactggaaagcactagctcttccacagcaatggga

SEQ ID NO: 31461 - DNA, 600 bp, Chicken  19866894253871_2
ctcaactaacaaaaaggctttttaaatacatttcgttgtgcttttcctttttataggggtataactgcatgatacgttatttcaagcacgtaagcagcgaatatgaccctttatattattttgttgtctttaaaatacttgtttagaatttcagagacttattttctttgccagtttctgcagcatagtttttatgagccagtcagctcagacagtctatctttttggatgccaaggtcttgtattgtttcctatgttaccaggcaagcacagtgctaaatgtctctgctgcaattaaayacaaacaaacaacttgtatctgccaagacaagcagctttgactttgtgcacacctacataatataatgagtattctcagattataaatagtaatcagtgagatgctcagtgatggcatctgacccatatacattgaagagaaacttcaaaagcaaataaaataaaattgrgagtgtgtttatctatgtctagataagttacatacctttattttctcatttaactttaacattcaaatctctatggtctatattctattaggataactggaaagcactagctcttccacagcaatgggaa

SEQ ID NO: 31462 - DNA, 600 bp, Chicken  19866894253871_3
tcaactaacaaaaaggctttttaaatacatttcgttgtgcttttcctttttataggggtataactgcatgatacgttatttcaagcacgtaagcagcgaatatgaccctttatattattttgttgtctttaaaatacttgtttagaatttcagagacttattttctttgccagtttctgcagcatagtttttatgagccagtcagctcagacagtctatctttttggatgccaaggtcttgtattgtttcctatgttaccaggcaagcacagtgctaaatgtctctgctgcaattaaaaycaaacaaacaacttgtatctgccaagacaagcagctttgactttgtgcacacctacataatataatgagtattctcagattataaatagtaatcagtgagatgctcagtgatggcatctgacccatatacattgaagagaaacttcaaaagcaaataaaataaaattgrgagtgtgtttatctatgtctagataagttacatacctttattttctcatttaactttaacattcaaatctctatggtctatattctattaggataactggaaagcactagctcttccacagcaatgggaag

SEQ ID NO: 31463 - DNA, 600 bp, Chicken  19866894253871_4
ccagtttctgcagcatagtttttatgagccagtcagctcagacagtctatctttttggatgccaaggtcttgtattgtttcctatgttaccaggcaagcacagtgctaaatgtctctgctgcaattaaaaacaaacaaacaacttgtatctgccaagacaagcagctttgactttgtgcacacctacataatataatgagtattctcagattataaatagtaatcagtgagatgctcagtgatggcatctgacccatatacattgaagagaaacttcaaaagcaaataaaataaaattgrgagtgtgtttatctatgtctagataagttacatacctttattttctcatttaactttaacattcaaatctctatggtctatattctattaggataactggaaagcactagctcttccacagcaatgggaagagatactttttattccctagaaatgaacctggaggcctacttggtgcaaaggtccaaataggcctaaacacattctaattatgtcagcatctaaagatgttaattctgtttgatgttaacagatatttttgtacagactagtgaatcttagaatatttgttagctggaa

SEQ ID NO: 31464 - DNA, 599 bp, Chicken  19866894253873_1
  misc_feature (1)..(34): n is any nucleotide
nnnnnnnnnnnnnnnnnnnnnnnnnnnnnnnnnnatggcatggatgttagcagttcctcctgcttccaggatagcccggaattatgaaacatgaaggcaaagtcaagcagcttgcagagacaatattttctggtttccatggagtaaaattagaagaaaagagcaactgcttgctgtagtagcctggtaaaagaaagcagaggcagtataataacagcaaatatgacacagaagtacagaaacatagtgtgagaagtgctgagaacaaatccaatctatttcagatacaagttgctaaaygcaagcaattcttagcaaaaaggactaatgatggtgagatcttatccccttgaaaacagaaacctttcagtcgggaagcatggcccattggtttatcagcccttgaactgaatttgtcctactcgaaacagttttgcagcagtttgcatcctcagatgcagagattgcctgtccccagggagctcttgcagatgcaggaggttgtcacagatggaatcactttgccgaaggcatgtggatcaggttcaaataaaccctggatgttgttgaccagcatgtgacagaacgatcacactggt

SEQ ID NO: 31465 - DNA, 599 bp, Chicken  19866894253875_1
  misc_feature (1)..(105): n is any nucleotide
nnnnnnnnnnnnnnnnnnnnnnnnnnnnnnnnnnnnnnnnnnnnnnnnnnnnnnnnnnnnnnnnnnnnnnnnnnnnnnnnnnnnnnnnnnnnnnnnnnnnnnnnnatcgtcacataaatcacgacaaggaatggctgtaaaacattcaaatctgacaactgaactgcaggaaaatccatgaccacagtgaattctgccatgaggcagaacagagcttctatatctgtgtaaaaacatactggttttgtaaccagggtcacattctgctctcgtgcacgcagacctcatactggtatcacrgttcttctgtgatggagtgcctacagatgttcactgtgagttaaatgactgccagaacaaagctgtagaattccagtacaacagcacttcttgggttaaattataaagaaagccaccaaacaaacatacagcacttaatattgggcttataatttacaaattgttgtaaaagcagtgataaatcactaggaaataaaatatgtacatattttcacattttccatactgtcaagagattttattggtagggagttctgccactaaaatactacatttgctggtttcctataaaagaaagg

SEQ ID NO: 31466 - DNA, 600 bp, Chicken  19866894253875_2
acatttgctggtttcctataaaagaaaggagataggcaacaattttgttagaaatcggaacgacaaacaggaacggcatttattctttaaaactccacaaattaaaaacatctgtctgctttccttttgaggaacctgtccctttgggtatatattaacaacaacaacaaaacagagggatctacagtcccaccagatggttggcacatggaccctttgcaaggaattgctcaagaaaatggatatttttttttcaggtaacaggaaaaaaaagctctctaaaacctttcccattgtcamtgcctgatgttatttcatctcagactttaagggaagagtggagctacaaacacattacagcttacagcctcccaaattaaaaataagtacgcgccacccctacccaagaagtcatggtttgaagctttgaacatcttttgcaaaacgacagttattaaaaacaacaaacatgcacaacagtgagtcatctggtttccaacttctgagtcaaaaggggctgattccacacaaagtgaaacctggctctccgactacttgcatgtttaacgatttgtatctctgcaccacagcttcagaaca

SEQ ID NO: 31467 - DNA, 599 bp, Chicken  19866894253880_1
  misc_feature (1)..(118): n is any nucleotide
nnnnnnnnnnnnnnnnnnnnnnnnnnnnnnnnnnnnnnnnnnnnnnnnnnnnnnnnnnnnnnnnnnnnnnnnnnnnnnnnnnnnnnnnnnnnnnnnnnnnnnnnnnnnnnnnnnnnnnctgaaagcagcagtcctgactattaggggtggtgaatgatacctggtaacaaaaggacaaccatggaagtaaaaccaaggctaagtgaaggatggtggtggaaggaaggatggaggcagcattccagaaatttcaaggtgctgctgatatgggtgagggtgccatggatgggtgcccatgtycagcaccaaagrcaggagcagcaccaagtcccagggcaagccctctaccctccaaagaggaatttggcaaaatggcagcaacaaacttcccagtgtcagagcgcgtttagaagagccagtaacagggtaaagggttcagtattttggacatgctatgttggtatctgttacatttaggacacctttacgacacattgcttttgaaagattgaaagcagacctgtggcagtcctacagagtgtatgaagcctcgcagttcttccagggccaccatgctgggcatcatggacacacctcag

SEQ ID NO: 31468 - DNA, 599 bp, Chicken  19866894253880_2
  misc_feature (1)..(106): n is any nucleotide
nnnnnnnnnnnnnnnnnnnnnnnnnnnnnnnnnnnnnnnnnnnnnnnnnnnnnnnnnnnnnnnnnnnnnnnnnnnnnnnnnnnnnnnnnnnnnnnnnnnnnnnnnnctgaaagcagcagtcctgactattaggggtggtgaatgatacctggtaacaaaaggacaaccatggaagtaaaaccaaggctaagtgaaggatggtggtggaaggaaggatggaggcagcattccagaaatttcaaggtgctgctgatatgggtgagggtgccatggatgggtgcccatgtycagcaccaaagrcaggagcagcaccaagtcccagggcaagccctctaccctccaaagaggaatttggcaaaatggcagcaacaaacttcccagtgtcagagcgcgtttagaagagccagtaacagggtaaagggttcagtattttggacatgctatgttggtatctgttacatttaggacacctttacgacacattgcttttgaaagattgaaagcagacctgtggcagtcctacagagtgtatgaagcctcgcagttcttccagggccaccatgctgggcatcatggacacacctcaggataagctgtgc

SEQ ID NO: 31469 - DNA, 499 bp, Chicken  19866894253880_3
caaaatggcagcaacaaacttcccagtgtcagagcgcgtttagaagagccagtaacagggtaaagggttcagtattttggacatgctatgttggtatctgttacatttaggacacctttacgacacattgcttttgaaagattgaaagcagacctgtggcagtcctacagagtgtatgaagcctcgcagttcttccagggccaccatgctgggcatcatggacacacctcaggataagctgtgcgttaagcagctctggctgtgacaagtcagtaggtgctggcacacagatcaagcccrtaaaagttgctagaagaaaccatatagcaatttgcatggatgtgggccaggtctgcagggaggaagtgtttggaggaggtatggtgaaaccagtttgtaggtacctgggtatggtgctagctgcagctgaagtgctgcatttgttttcttaccagtaaaccagcccagatttacaagcctggagccctttccatatttc

SEQ ID NO: 31470 - DNA, 600 bp, Chicken  19866894253885_1
ctggcaaaactacatcagcacaagtcttaaacaaggatgctggtgtgcatctccttgtgcaactatattcttttttcacctggtaaaaatgcaatgtaaagatatataccaccagaagtctacagtggtagcaataactgtgtacatttacagaattttcagtggaaaagaaacacaggatatccctccctggatttcacatttaaaggatgatgtgcaaatagacaatgctaaaatgaagtgtattataggtaggacaagattaccaaagcaataccaacagtgaagtattatgctttmaaatgtgaacttcacactgtgcagcactgtggcctagataataatgctttattgtattcaccttcaaatggacaaatacttgtctttgtaggagcagaatatataaagtttatggagtmtttaaaaaacattggcttgaatttgttactgttctggtctttgtcagaagtgaaccgtctactttgtgcactggtgttgtttgtcactatgtaggactgsttgaaagccccttgagacctgcacctccagggacagcaaagctcccagaaaaaaagacaacttcacaaccttctaaatttc

SEQ ID NO: 31471 - DNA, 600 bp, Chicken  19866894253885_2
ctacagtggtagcaataactgtgtacatttacagaattttcagtggaaaagaaacacaggatatccctccctggatttcacatttaaaggatgatgtgcaaatagacaatgctaaaatgaagtgtattataggtaggacaagattaccaaagcaataccaacagtgaagtattatgctttmaaatgtgaacttcacactgtgcagcactgtggcctagataataatgctttattgtattcaccttcaaatggacaaatacttgtctttgtaggagcagaatatataaagtttatggagtmtttaaaaaacattggcttgaatttgttactgttctggtctttgtcagaagtgaaccgtctactttgtgcactggtgttgtttgtcactatgtaggactgsttgaaagccccttgagacctgcacctccagggacagcaaagctcccagaaaaaaagacaacttcacaaccttctaaatttcatcagaaggactggcatctgcaaayagttcagctagcttcaccagcacaccacatgctttcccattactgctgttctccctcctcttgcccgcagccattcctcctctgctggtcagga

SEQ ID NO: 31472 - DNA, 600 bp, Chicken  19866894253885_3
aatagacaatgctaaaatgaagtgtattataggtaggacaagattaccaaagcaataccaacagtgaagtattatgctttmaaatgtgaacttcacactgtgcagcactgtggcctagataataatgctttattgtattcaccttcaaatggacaaatacttgtctttgtaggagcagaatatataaagtttatggagtmtttaaaaaacattggcttgaatttgttactgttctggtctttgtcagaagtgaaccgtctactttgtgcactggtgttgtttgtcactatgtaggactgsttgaaagccccttgagacctgcacctccagggacagcaaagctcccagaaaaaaagacaacttcacaaccttctaaatttcatcagaaggactggcatctgcaaayagttcagctagcttcaccagcacaccacatgctttcccattactgctgttctccctcctcttgcccgcagccattcctcctctgctggtcaggaaaacataaaggcagtcctcaccacatactgagcagatgttgtggcatctaaaccaacagtaaggggtcctaccaaaaacagaactgccagtcatttatga

SEQ ID NO: 31473 - DNA, 592 bp, Chicken  19866894253885_4
actgtggcctagataataatgctttattgtattcaccttcaaatggacaaatacttgtctttgtaggagcagaatatataaagtttatggagtmtttaaaaaacattggcttgaatttgttactgttctggtctttgtcagaagtgaaccgtctactttgtgcactggtgttgtttgtcactatgtaggactgsttgaaagccccttgagacctgcacctccagggacagcaaagctcccagaaaaaaagacaacttcacaaccttctaaatttcatcagaaggactggcatctgcaaayagttcagctagcttcaccagcacaccacatgctttcccattactgctgttctccctcctcttgcccgcagccattcctcctctgctggtcaggaaaacataaaggcagtcctcaccacatactgagcagatgttgtggcatctaaaccaacagtaaggggtcctaccaaaaacagaactgccagtcatttatgagtgttacgcttatttttaatgtaagttttgttctactttttaacatcttaaactaacctctttaaaactaaaaaaaaaaaagaaaaagaaaaagaaaa

SEQ ID NO: 31474 - DNA, 600 bp, Chicken  19866894253894_1
cgcgctgcctcatggaatggggggaagaactctttatatgtagtatacttcatacttattttgatgaagtattagataggaaaaagcacattgtaaaaccgtgctcccaaagcctacatctttgcccttgctgagaaacacaggatgccttcaagaactgctgtctcagtaactgcctggatggaggtttccaactatgactacggagagcagtaagcagaggatcaaaacaagaacccaaaaactgtctacatttgttttaggattttgttttgcctcctttcctcctgcccatccctstgccaacccaagggaacgctgcctgaatacacacaaatatcaccaacaagagatggggatgtgacatttcaagtccacgatggataagaagggatctggcttttgctcaggttaaaagcattccattcagagaatatgtactgaagtgacagggctattccatatgcatttgtgaaaaaaatcatcaaattaagtatagcacacggctgcaagttgcaattctatttctaaagggacgcagaacaaatattttcaaagttcacaagcctcagaggcgcagtttcctactgcaaatgtatt

SEQ ID NO: 31475 - DNA, 600 bp, Chicken  19866894253896_1
caacttttagtggatttgagttggattaaatttatcaaaatgtattattttgtcaagtaaatacgtaaggcccatttttcctatctgcaatgagctgcaatatagatacgtgtgcccaaaggtgaaacctccattgcagtattcttacatgtcttgtcaaatgcttcctttaaggaaactttgctatctattactaaaaatactccttaattgtattaaccttgagggaaatacgtcattccttaatgttaagtggaacaagacttacaaaggcttgatctgaagttcagtgagccaagwgggaattctgcgctgacaccaatgggctatgaaacctcagtagctgccctcycacaaagagaacctcattcggcctgtttctggggcatagaagctttaagttctgcttctgtgtttttttttttcyccttggtgatcgtgtagcttcactcactgagtacaccaccagctttgcactctcagctttcatcctctttcayagggtttcctttcgactccagcctctgcggccraggagaagctgctttgtgaggagagtcaggaatgatgaagcttatagcaaaactgcaagttggagca

SEQ ID NO: 31476 - DNA, 600 bp, Chicken  19866894253896_2
tcaagtaaatacgtaaggcccatttttcctatctgcaatgagctgcaatatagatacgtgtgcccaaaggtgaaacctccattgcagtattcttacatgtcttgtcaaatgcttcctttaaggaaactttgctatctattactaaaaatactccttaattgtattaaccttgagggaaatacgtcattccttaatgttaagtggaacaagacttacaaaggcttgatctgaagttcagtgagccaagwgggaattctgcgctgacaccaatgggctatgaaacctcagtagctgccctcycacaaagagaacctcattcggcctgtttctggggcatagaagctttaagttctgcttctgtgtttttttttttcyccttggtgatcgtgtagcttcactcactgagtacaccaccagctttgcactctcagctttcatcctctttcayagggtttcctttcgactccagcctctgcggccraggagaagctgctttgtgaggagagtcaggaatgatgaagcttatagcaaaactgcaagttggagcaacaccgaagtcagccctacaaaaccggggctagggatgcttgttttgatgct

SEQ ID NO: 31477 - DNA, 600 bp, Chicken  19866894253896_3
ccaaaggtgaaacctccattgcagtattcttacatgtcttgtcaaatgcttcctttaaggaaactttgctatctattactaaaaatactccttaattgtattaaccttgagggaaatacgtcattccttaatgttaagtggaacaagacttacaaaggcttgatctgaagttcagtgagccaagwgggaattctgcgctgacaccaatgggctatgaaacctcagtagctgccctcycacaaagagaacctcattcggcctgtttctggggcatagaagctttaagttctgcttctgtgyttttttttttcyccttggtgatcgtgtagcttcactcactgagtacaccaccagctttgcactctcagctttcatcctctttcayagggtttcctttcgactccagcctctgcggccraggagaagctgctttgtgaggagagtcaggaatgatgaagcttatagcaaaactgcaagttggagcaacaccgaagtcagccctacaaaaccggggctagggatgcttgttttgatgctggggatggttgtttttgttgttgtcgttggatgctacacctgctttttctgacacgcagcaaa

SEQ ID NO: 31478 - DNA, 600 bp, Chicken  19866894253896_4
cctccattgcagtattcttacatgtcttgtcaaatgcttcctttaaggaaactttgctatctattactaaaaatactccttaattgtattaaccttgagggaaatacgtcattccttaatgttaagtggaacaagacttacaaaggcttgatctgaagttcagtgagccaagwgggaattctgcgctgacaccaatgggctatgaaacctcagtagctgccctcycacaaagagaacctcattcggcctgtttctggggcatagaagctttaagttctgcttctgtgtttttttttttcyccttggtgatcgtgtagcttcactcactgagtacaccaccagctttgcactctcagctttcatcctctttcayagggtttcctttcgactccagcctctgcggccraggagaagctgctttgtgaggagagtcaggaatgatgaagcttatagcaaaactgcaagttggagcaacaccgaagtcagccctacaaaaccggggctagggatgcttgttttgatgctggggatggttgtttttgttgttgtcgttggatgctacacctgctttttctgacacgcagcaaaacagaagcagct

SEQ ID NO: 31479 - DNA, 594 bp, Chicken  19866894253896_5
tactccttaattgtattaaccttgagggaaatacgtcattccttaatgttaagtggaacaagacttacaaaggcttgatctgaagttcagtgagccaagwgggaattctgcgctgacaccaatgggctatgaaacctcagtagctgccctcycacaaagagaacctcattcggcctgtttctggggcatagaagctttaagttctgcttctgtgtttttttttttcyccttggtgatcgtgtagcttcactcactgagtacaccaccagctttgcactctcagctttcatcctctttcayagggtttcctttcgactccagcctctgcggccraggagaagctgctttgtgaggagagtcaggaatgatgaagcttatagcaaaactgcaagttggagcaacaccgaagtcagccctacaaaaccggggctagggatgcttgttttgatgctggggatggttgtttttgttgttgtcgttggatgctacacctgctttttctgacacgcagcaaaacagaagcagctctgtctgcgatgtcggagtttggccagacatcctgctatcacggcagcagcacaggaggtaaagcaa

SEQ ID NO: 31480 - DNA, 561 bp, Chicken  19866894253896_6
cgtcattccttaatgttaagtggaacaagacttacaaaggcttgatctgaagttcagtgagccaagwgggaattctgcgctgacaccaatgggctatgaaacctcagtagctgccctcycacaaagagaacctcattcggcctgtttctggggcatagaagctttaagttctgcttctgtgtttttttttttcyccttggtgatcgtgtagcttcactcactgagtacaccaccagctttgcactctcagctttcatcctctttcayagggtttcctttcgactccagcctctgcggccraggagaagctgctttgtgaggagagtcaggaatgatgaagcttatagcaaaactgcaagttggagcaacaccgaagtcagccctacaaaaccggggctagggatgcttgttttgatgctggggatggttgtttttgttgttgtcgttggatgctacacctgctttttctgacacgcagcaaaacagaagcagctctgtctgcgatgtcggagtttggccagacatcctgctatcacggcagcagcacaggaggtaaagcaa

SEQ ID NO: 31481 - DNA, 600 bp, Chicken  19866894253902_1
gccctcctggagacgtttgagcataagcacagcatgctctgcgtttgaacttgtgagaacccataccactgcttaataacttaatacatatgtatagcctccttcagacagcccactaggaggcagaagcagggggaggtgctattagtgcataggctgcagggctctatgtaaatgcattttgacaaggataccttgccgaataaaaagaccagctccttagtgctgggctggtgctgatttaggtcggaacgcatgttttataggaatctgtacaaatgagagctcatatggatctgstggagaatgcttaaggtatctagcaactttgcttggagcatttgaatacattgatacataccccacagattgttcttcaagaactgaaaatagggctggttctttgtcctctctattggtaccttccctgaacagctcctcataagtcacccaatccagtctcatgtaactaccacaataagagaattctgtttccccatgtgagaagtgccaaacagctaatagctcagagtggtaaccagcagatagaagtggactgcgagttcttgctaaaaaaaacatctttcattgcaaagtagc

SEQ ID NO: 31482 - DNA, 600 bp, Chicken  19866894253903_1
agacccatggtgcaggaggtatatttacatgtgtactgtcagtaacatagatatagatataacaagaaaacaatatatacatgtataaacacactttctgtttttgggtaacatatatatcagcacataaatacagctcagttctaaggctcaaagactttcattgctcttttccttaaattgcctgtattttttgtatttactcctaaatagacgtcattattaataggcataatttattactgtgaaacagcaacatggaaagatccatttgactgtgtggcaatgacaccaagactrtattgatcaattacctttttttaagagatgctcagaagatgatgttctattgctgttagattctgctaattaaaacccctcaaatacagagttattagaaaaaaaatagctatttctcacaatataaatgtgaatgttggacttctattacgtgaatcaattatgaataactgacagcaaaaggcattccagttyacagcactggaacaaaattatctaagccacgtttaggagatttccatggaacaattctctctgctgcttcaagagcagttatgtcatttttcattcagtagttgt

SEQ ID NO: 31483 - DNA, 600 bp, Chicken  19866894253903_2
gtatttactcctaaatagacgtcattattaataggcataatttattactgtgaaacagcaacatggaaagatccatttgactgtgtggcaatgacaccaagactrtattgatcaattacctttttttaagagatgctcagaagatgatgttctattgctgttagattctgctaattaaaacccctcaaatacagagttattagaaaaaaaatagctatttctcacaatataaatgtgaatgttggacttctattacgtgaatcaattatgaataactgacagcaaaaggcattccagttyacagcactggaacaaaattatctaagccacgtttaggagatttccatggaacaattctctctgctgcttcaagagcagttatgtcatttttcattcagtagttgtttctttatagatgagttccaacagaagttcattagataggactttagaggctgattcaaatgagccattccagagcaatatggtttgtacagcaaaaataaaggtcgttacagaagtggccagaagttacaggatattacaaaaagctttagccaaaagtttcagcagccatctgtaaaatggaagagacttttc

SEQ ID NO: 31484 - DNA, 560 bp, Chicken  19866894253903_3
agcaatatggtttgtacagcaaaaataaaggtcgttacagaagtggccagaagttacaggatattacaaaaagctttagccaaaagtttcagcagccatctgtaaaatggaagagacttttccaatgtgttttgccgtaggggtaaatgacatacctgctctgcagactttcatataagcagcaccatacgttcagaaggtctacagctcgcatcacctcttgtcaaaagacaaagttgttttattattattattattattattattttgtagcatgacagattgagcttctaagtatcwgttccaaacaagatttctagctgagccagattgagtgaacagaatacaacctgacttgctccgatcagaaacaacgtggtatgcaacagcctgcaagcagaacggagtttcctgattgccacgtgttggccaaatgtttcttcttaattcctacttatatttgctttcttttagttccagagaattatagatacccatgtgatgcctggtgcatcatgttacatgcctggtaacatacagtttcttcagttcaagaaaaa

SEQ ID NO: 31485 - DNA, 550 bp, Chicken  19866894253910_1
ggcttacaatgcagaagtcacctgttggccaaagcatacggaactgaaggaactctggaaccaaaatcataagccatggcttgacctgatgagcaataggaactgtaagagcaccttgcctcttcaggctaagtgcttcatacaaggggtagaggagcatgcagctgtttctcaaagatagctcacaagaccgttataaatccttcagatgcaatgcttgttgcttttgtagtttggtaagtactccatgccaaaatagggggatagagaaattttatctacacctataattaaaaaaawatatatatatatatatatagggctgctctggtggagcccctgtaggggcaaataatggtaaagtaacttcagagaaaaagaattggaacacaaaataagtgctttgtttggaggctctttcagttcaaaggctttaaatcaaggtggagactggcctgcagggtatcgtagtggtgttttcatagcatgaaaccaaagttatgggttacgtgtgggcgtaagaggcagaagtagctgagactttcatata

SEQ ID NO: 31486 - DNA, 600 bp, Chicken  19866894253912_1
gctcctttccggaaacaaatgcagtcctttaactacagaacagccaaagtaaatctagtcctttaacacgagaatgggcaccaaaccatcctttgctttacttttctaggtaaaaggagacacaagccaggaatgctcacgctgttatcttcagatgtcacatcaaagtccgcttgacctggcaaacatccataggaaaggaaaacagattcccaaaccttatcaataggcaggctaccttttaaattcatgagcagcaatgaatacaagccttccaagttattaatttcaccttcaaastcaygtaaaaagacagggcacactatttttcaagcgagcgtagatattcacacaggaattccttttgaaacagaagagcatggttcccaaggagcagccatgatgagcaaaccagcttttctctaagagaacgtgacacggggtcaagtttgtgcacggatttgatggctatatttgaacgctgcttgattcttctgtgcaggaagaaatcatctctggaaggggttgccagcacactcaacaattgtactacatttgtgtagtgtgttcaaaggattctttcagatcacgaatggaacc

SEQ ID NO: 31487 - DNA, 600 bp, Chicken  19866894253912_2
ctttccggaaacaaatgcagtcctttaactacagaacagccaaagtaaatctagtcctttaacacgagaatgggcaccaaaccatcctttgctttacttttctaggtaaaaggagacacaagccaggaatgctcacgctgttatcttcagatgtcacatcaaagtccgcttgacctggcaaacatccataggaaaggaaaacagattcccaaaccttatcaataggcaggctaccttttaaattcatgagcagcaatgaatacaagccttccaagttattaatttcaccttcaaastcaygtaaaaagacagggcacactatttttcaagcgagcgtagatattcacacaggaattccttttgaaacagaagagcatggttcccaaggagcagccatgatgagcaaaccagcttttctctaagagaacgtgacacggggtcaagtttgtgcacggatttgatggctatatttgaacgctgcttgattcttctgtgcaggaagaaatcatctctggaaggggttgccagcacactcaacaattgtactacatttgtgtagtgtgttcaaaggattctttcagatcacgaatggaaccattt

SEQ ID NO: 31488 - DNA, 600 bp, Chicken  19866894253916_1
cggggcgcagcaggaccctctcctccccattgggatgggtgcctgaaatgcccccactgccatccgtagagcaccacgacccacagatgtcagcctgatgggttaattaatttccttcttcttcaggctgttatcagatgggatacgacgtcacctgagactgttaattgggctaattattccaggttcaggttttgaataattagttactgttgtctccagccttacttccactattcttcacaaaggtcaggcagttgccagctcccaaagtgccagcaggggagggggggggttgtrgtggggacatgttgagccccccaggctgcctggggacagcgggcacagggacagcacctgaagctgtccccatgctccagcacttgctgagggtgacatccccgcctgactggggacagaagaacccacccaaggaacgctgcactgcctcatcccccgctattattagccctcgctagcctccctgggagccatttgcatatttgattgcaactccgaggcggggcagggcccttcaatcagccgctcccgcagcctcatttgcatggcgtcacattttgtgcccggagcgctgacact

SEQ ID NO: 31489 - DNA, 600 bp, Chicken  19866894253916_2
gaacctgacgtcctcatggaggtgggggctcctgagcttcagcgcagccccacgagggacacacagacacgccgtgggttgtcccacgaccagatggccgcaccgggcacagcaccgcggacagctcccggccacctccgagccgccgctacggccactgtcaaaccgctgagatgtcaccatcacagccaccgttatggccaccacaacgccctgcagcccatcgcagccctcagccccccccagcccctcttgcaccccaggacacagaggctccaggtggctgcgggtggagccagrsagccccagggccctgagcactcaggtaggaccggcgcgggcgctgctacaggccatgtcccgggacrccctcatctcggcatcatggggtgcaggctcagcaagagcaaacaactcggggtgaggggtgggaccgagcctgaggacggcggggatcgagagagagctctgctgcatccctccctcctgcctcggtttcccttcctggagcacacgccggaggtacaggcatggtgtaaggagaaagctgcacagagggacctggctgccatcaagaggagtgaagtggagacaggcaga

SEQ ID NO: 31490 - DNA, 600 bp, Chicken  19866894253916_3
aacctgacgtcctcatggaggtgggggctcctgagcttcagcgcagccccacgagggacacacagacacgccgtgggttgtcccacgaccagatggccgcaccgggcacagcaccgcggacagctcccggccacctccgagccgccgctacggccactgtcaaaccgctgagatgtcaccatcacagccaccgttatggccaccacaacgccctgcagcccatcgcagccctcagccccccccagcccctcttgcaccccaggacacagaggctccaggtggctgcgggtggagccagrsagccccagggccctgagcactcaggtaggaccggcgcgggcgctgctacaggccatgtcccgggacrccctcatctcggcatcatggggtgcaggctcagcaagagcaaacaactcggggtgaggggtgggaccgagcctgaggacggcggggatcgagagagagctctgctgcatccctccctcctgcctcggtttcccttcctggagcacacgccggaggtacaggcatggtgtaaggagaaagctgcacagagggacctggctgccatcaagaggagtgaagtggagacaggcagag

SEQ ID NO: 31491 - DNA, 600 bp, Chicken  19866894253916_4
acgccgtgggttgtcccacgaccagatggccgcaccgggcacagcaccgcggacagctcccggccacctccgagccgccgctacggccactgtcaaaccgctgagatgtcaccatcacagccaccgttatggccaccacaacgccctgcagcccatcgcagccctcagccccccccagcccctcttgcaccccaggacacagaggctccaggtggctgcgggtggagccagrsagccccagggccctgagcactcaggtaggaccggcgcgggcgctgctacaggccatgtcccgggacrccctcatctcggcatcatggggtgcaggctcagcaagagcaaacaactcggggtgaggggtgggaccgagcctgaggacggcggggatcgagagagagctctgctgcatccctccctcctgcctcggtttcccttcctggagcacacgccggaggtacaggcatggtgtaaggagaaagctgcacagagggacctggctgccatcaagaggagtgaagtggagacaggcagagctcgaggcgcagctgtcggcaccggctgtgctcctcacggcagcggggccgtctggcaggtgggcag

SEQ ID NO: 31492 - DNA, 600 bp, Chicken  19866894253916_5
gctcccggctccatgcatggaaccagagcacatggcagagtgcagcgctatcacccagacacaggaatctgctgctagagaaggaaaacccctccaggatgcaccgggtgggcaaacacaccccttcccaacacacattgggccgcccactcccacggcacctccaaacgtgcagcacagcctctcacacgcacagccccctccctcccgccctgcaccaccagcagcacagcacgaggatgcccagcacaatgtggcacagagagggctcacctgaacatcctcatggagagcaccgtstctgcacgggggagcacacctcgtgcccacgggcgagctcagagcccggccccgacacacacagccccagcacagcgcagggctgcaggggaagggagggaggagaacccggcttgtctgggcgagggctggctgggagccacgcgctgcacaccgaggtgagccggctgccagcaaaggggattcggccaggaaagggttaggggcagcgctgcagggggttgcgggctcccgctcggcacccagacccagcaccccatcctccctccccgcaccccactcaccgatcccagctgctaa

SEQ ID NO: 31493 - DNA, 600 bp, Chicken  19866894253917_1
gatcgagatgctcttcatttcatggtgacagctgtgcatggctgctggaatatgccttgtctttcatgtcgatatcaccactgctgaaacgtaccaccctctacctcactgtgctgacatccactgtttgatctctaaccattcagcaagcattgatgaacattagtgggtgtcaatttttctgcacagagaaattcaattccacacctttgcttcagatgcacttctatgtcagacaccattctgtcaaactgcttctctgctgctgtcagtttcacagcaacaaagtgcaacagaacrttggttagaaggttcaatctctactgccataccaccagcatccgcctctgatgttgtgggccaacataataaaataggaggcattactttcagagcagtcaatgtaatttaattaagcacagaatacagaggcaaaagcaaccaccagactactgtgagaagttctaaccttatgcacacagagatgcatactgggattataatatcaagaaaataattgccctgttgacaaagagatgatgtcaacgaagctgcctgagcagattctactttgacaagttctcttcctttgagctttca

SEQ ID NO: 31494 - DNA, 600 bp, Chicken  19866894253918_1
ctcctggggacctactttactctgcttgtgcagtgttaggatgataggcagtgagtgtgttagagcactagagcaggttgcttgccaaggctgtgcaagctctgaagttattgatgaaaactcaacttgacaaagccctgggtgatctgctcgaagttagactgaggggagtaggatggttgtagcagatggccattccaacctaaattatcatatgattctattctggtagcagctaggatttcttctgatgaatttatgtactcactattagcagaaacacaggaaatcagtaaaagstctgcattttttgatttaaataatgattctacttgctaaggtaatgggaaggagtagctcctcactcttacataagcagttcctctgatttgaagaccactcatctacttacagccaagaatrgatgacaaaccctgtaagatcacaaaaatatcttaagtcctttgggatttgtcagggctctaagcaacgtgatctagctgtagatgtccctgttcattgcaggggagttgggctagatgacctttgaaggcccccttgaactcaaacagttgtgtgattctatgatttatatttctt

SEQ ID NO: 31495 - DNA, 600 bp, Chicken  19866894253918_2
aacttgacaaagccctgggtgatctgctcgaagttagactgaggggagtaggatggttgtagcagatggccattccaacctaaattatcatatgattctattctggtagcagctaggatttcttctgatgaatttatgtactcactattagcagaaacacaggaaatcagtaaaagstctgcattttttgatttaaataatgattctacttgctaaggtaatgggaaggagtagctcctcactcttacataagcagttcctctgatttgaagaccactcatctacttacagccaagaatrgatgacaaaccctgtaagatcacaaaaatatcttaagtcctttgggatttgtcagggctctaagcaacgtgatctagctgtagatgtccctgttcattgcaggggagttgggctagatgacctttgaaggcccccttgaactcaaacagttgtgtgattctatgatttatatttcttgaggagatatcggagaagttgaaagtgctcattattttgtaattccttgagtttagttttgataagttttctaaactataaatattagtcctatcaatttctagcatatctgctttctgcatc

SEQ ID NO: 31496 - DNA, 424 bp, Chicken  19866894253921_1
ggtttacaacaattcaatattattatatgccaatataactatatttaatctgttataactctgattgaatcaatattattcaccacctcaaataaaacaataactgtactaacactcaaacatttagatataaggaaaatagggatagaacctggatgggacaaatccacatgaaatcacattcatttgtatgctgcataagctctacctgaacactttactacgaaaatgccaatgctaactacttcacacccttccattagtcttaaaaactaacaagtatatatctaaaacaagtgyatgctacaagtcaaagagttttcacgataatctgttgattatattgaaacacaaaagaagattcaccatgtgctgaaaactgatgctgagttttaatctcttaatgcattatttctttttcata

SEQ ID NO: 31497 - DNA, 599 bp, Chicken  19866894253922_1
  misc_feature (1)..(143): n is any nucleotide
nnnnnnnnnnnnnnnnnnnnnnnnnnnnnnnnnnnnnnnnnnnnnnnnnnnnnnnnnnnnnnnnnnnnnnnnnnnnnnnnnnnnnnnnnnnnnnnnnnnnnnnnnnnnnnnnnnnnnnnnnnnnnnnnnnnnnnnnnnnnnnnaaaatgttcctatggagccacaaacacagcccagcacttcagtgcctctaaccagacaacaacagtttcattttgtttcaaaacaagggagtaagcccccctcccctccagacacaccacttagttggtcgggtttgtttttgtggcagagggggaygcagcacaggtgtttgtttttgaaatatccagcaggcaggcactacaagattttctaaggatttcctgatcaccccctgtgctgcagctgtctctcaggctgctycacaagtttctccgacctagcttgggtgcagaaagcagaacacgtcaaatctctgccctgccttgcgtttccccttggtcaaatatttttcaggaagtagttgatctggcctgcaggatatgaaaaccaaggtcaaccacatcactagatggctggtaagaaaagaaaataacagcatgtctgaagggagacca

SEQ ID NO: 31498 - DNA, 599 bp, Chicken  19866894253922_2
  misc_feature (1)..(38): n is any nucleotide
nnnnnnnnnnnnnnnnnnnnnnnnnnnnnnnnnnnnnnaaaatgttcctatggagccacaaacacagcccagcacttcagtgcctctaaccagacaacaacagtttcattttgtttcaaaacaagggagtaagcccccctcccctccagacacaccacttagttggtcgggtttgtttttgtggcagagggggaygcagcacaggtgtttgtttttgaaatatccagcaggcaggcactacaagattttctaaggatttcctgatcaccccctgtgctgcagctgtctctcaggctgctycacaagtttctccgacctagcttgggtgcagaaagcagaacacgtcaaatctctgccctgccttgcgtttccccttggtcaaatatttttcaggaagtagttgatctggcctgcaggatatgaaaaccaaggtcaaccacatcactagatggctggtaagaaaagaaaataacagcatgtctgaagggagaccaagagaattaatttgaaggggaagttatttaagaagaagctctgaaaaatgggaaaagtattgctattacatttcccaaggctattgtcagaatcaaagatactgc

SEQ ID NO: 31499 - DNA, 585 bp, Chicken  19866894253924_1
aaagccggagcagtctgaccttattttcctccagggctggctacattaacacacttactggaggaggggatactaatgatccagccagtacttttcagggcaaaattagtgatgatacacaatcctcatggttttacagtaaggagctccagtcctaagagaagtcctggtaatgccctgctttaaagtccgagtgaaatccctgtatgtgaccctccaaaacagcttagcattaaaacatatcccagaacctgacccagaaccagctccgaacgttcagtgtttatatattaatatagygasataccggagccctctgtgcagttctgaaggattgatcatgtggaaatctgttgagaaaggtcaaaaatcggaaaacggggatttttttcgaagttctaatgatgcagagctgcataataatctccccgtgaaccataaacataataaaagctgaggccatttctaacataatctctatcagcaagatgccagcgcttttccagatttcctaacgggtccctgctaattccatgccaaaactagcagtggatttcttccttttaatctcccctaatgccttat

SEQ ID NO: 31500 - DNA, 582 bp, Chicken  19866894253924_2
gccggagcagtctgaccttattttcctccagggctggctacattaacacacttactggaggaggggatactaatgatccagccagtacttttcagggcaaaattagtgatgatacacaatcctcatggttttacagtaaggagctccagtcctaagagaagtcctggtaatgccctgctttaaagtccgagtgaaatccctgtatgtgaccctccaaaacagcttagcattaaaacatatcccagaacctgacccagaaccagctccgaacgttcagtgtttatatattaatatagygasataccggagccctctgtgcagttctgaaggattgatcatgtggaaatctgttgagaaaggtcaaaaatcggaaaacggggatttttttcgaagttctaatgatgcagagctgcataataatctccccgtgaaccataaacataataaaagctgaggccatttctaacataatctctatcagcaagatgccagcgcttttccagatttcctaacgggtccctgctaattccatgccaaaactagcagtggatttcttccttttaatctcccctaatgccttat

SEQ ID NO: 31501 - DNA, 576 bp, Chicken  19866894253925_1
atttttgttcataataaaaaaaaaatctgtatctttccagtttctttcttgcaataattcactgctaacatttctgtctaaactgatggagtgactaagtagtaaaatcatatctacaaataccatatacacaaacaatatataccgctgtcttatggacagaatcactattataaatcacggctggtattattatttcaattttcctgctagcatgtcagacattttggcagtataattcattttaaattttctgagtcagcagaatttcctttgacttataattcttgctattttctwgtaaatatatttctattttctagaaattttgttcaaaaaatataccttcttcaagttaaatttatttaaatttcacattttcaattatatccacctgaaggtgcagaatatctacctttttatctcctttccttcccttctttcttatccagaaaaaaagttaaagcatccaaagctgatatgcagaccaggagtttcttggttatttggatcctcactctcatccccctactgtgtcccaaatactgcacctctaagggaccaataaattaactt

SEQ ID NO: 31502 - DNA, 599 bp, Chicken  19866894253926_1
  misc_feature (1)..(106): n is any nucleotide
nnnnnnnnnnnnnnnnnnnnnnnnnnnnnnnnnnnnnnnnnnnnnnnnnnnnnnnnnnnnnnnnnnnnnnnnnnnnnnnnnnnnnnnnnnnnnnnnnnnnnnnnnntattaagggctgatgtggtaattccccccctattctgcagaagcaggctgggctctactagactaaacttgggtgttttatttctctctgctggccataaaacaaagtagaaaatctgaatttgattgcccagtcatattttgattatcacagaatggcttgtgttggaaggaaccttagagatcatctgtttycaaatcccttgccacgggcaggttgccacccactagatcaggttgcccagtgatgcttacatctcctttttagaaatcacaggaactctctagacttaatcttcaggcactcaagttgagagtccagccatggcagtatgaaacaatagtacctgggcattcagttgttatatgttgtggtcacatattccaaggagtggaaaacaacacaggggagaaggctccagatgttctggtggtggtgattgtccccagctgcatgtttctgactcttaggcaggaaaaaaatagggcaggag

SEQ ID NO: 31503 - DNA, 548 bp, Chicken  19866894253926_2
tgccacgggcaggttgccacccactagatcaggttgcccagtgatgcttacatctcctttttagaaatcacaggaactctctagacttaatcttcaggcactcaagttgagagtccagccatggcagtatgaaacaatagtacctgggcattcagttgttatatgttgtggtcacatattccaaggagtggaaaacaacacaggggagaaggctccagatgttctggtggtggtgattgtccccagctgcatgtttctgactcttaggcaggaaaaaaatagggcaggagtgtctgtaaygatcataaagtttttaatctttatgagtaagttyattggacacagaagaccctgaagctctcgttgactcatgcatcctggaacagtcagtgtaatgcctaatgctagcctagaagaagggctgtaccataggtcactgaatcatttagcagtagcaatggaattgtgcacccagcaaagcctgctcctcagagactttccaaattgtagtgcaattgcctgggctattcctgtcccctttctcttca

SEQ ID NO: 31504 - DNA, 514 bp, Chicken  19866894253926_3
tgcccagtgatgcttacatctcctttttagaaatcacaggaactctctagacttaatcttcaggcactcaagttgagagtccagccatggcagtatgaaacaatagtacctgggcattcagttgttatatgttgtggtcacatattccaaggagtggaaaacaacacaggggagaaggctccagatgttctggtggtggtgattgtccccagctgcatgtttctgactcttaggcaggaaaaaaatagggcaggagtgtctgtaaygatcataaagtttttaatctttatgagtaagttyattggacacagaagaccctgaagctctcgttgactcatgcatcctggaacagtcagtgtaatgcctaatgctagcctagaagaagggctgtaccataggtcactgaatcatttagcagtagcaatggaattgtgcacccagcaaagcctgctcctcagagactttccaaattgtagtgcaattgcctgggctattcctgtcccctttctcttca

SEQ ID NO: 31505 - DNA, 600 bp, Chicken  19866894253934_1
cgttccgatggtctgaggctgaagggcaggagcagcgaggccggtcttgggcaacgagagggtgcaggtaccgggtgggtccaggaagaagccgcagagtaagcccaggaggaagcagcaggtctcaggtagcaggcccagggaagtctgtcagcatacggtccgtagagaaggatctgaagacagaaacctcgagtccgtcgtggtgagggatctgatggcagaaacccttctctcagtctgtcgtggtgagagatcagatggcagaaaaccctccagtccgctgtggttgttggaccytcttttatcctccattttctcctgcctacgtgacaaccctgggtgcttgagcaagagtcatgtgcataccttctgagatggccatcttcctcgagataagtccacacaaaaagaccgtttcctggccattaccagcagcttatctctctctcattgcccctggccttgtccatctgtgctccttagaggatttcacaatccttagccaggacctgtccatcagtgtcctcaagacaaaagatttctctacctttgcccaggacttgcctggacttgttcctcagcaaactttgagtcaat

SEQ ID NO: 31506 - DNA, 599 bp, Chicken  19866894253939_1
  misc_feature (1)..(76): n is any nucleotide
nnnnnnnnnnnnnnnnnnnnnnnnnnnnnnnnnnnnnnnnnnnnnnnnnnnnnnnnnnnnnnnnnnnnnnnnnnnngaaaactcagctccaaacagcattacaccagatatttctgcatttggaaaatatttagcaggagctattaccattcactgtgttgaaaaagtagcaatctgtgcaataaggattcctcctataaactactttggtctgcagtactattttacactgcagtatgtctgtattctgggtttttcacatatattgtgcacgctgtttccaagccacatcaacatgaytctgacaaagatgcacccagtgccttctgacagtctgtagacaaatactcaatgcttccagcacwtcttcatatcatttgggcaaatttgcagtccatgcttgggcagtgcagaaatgacacaattatactgatagacacacaccatgactgagaacatctgtgcacactgctaacaacctgtaattaggtattgctgactcacttgccttgcacaggtgggggaatatccttaaattggcttcactcatgctattagctttcccagagggtcacgttaagcaactacccttaatggtg

SEQ ID NO: 31507 - DNA, 599 bp, Chicken  19866894253939_2
  misc_feature (1)..(11): n is any nucleotide
nnnnnnnnnnngaaaactcagctccaaacagcattacaccagatatttctgcatttggaaaatatttagcaggagctattaccattcactgtgttgaaaaagtagcaatctgtgcaataaggattcctcctataaactactttggtctgcagtactattttacactgcagtatgtctgtattctgggtttttcacatatattgtgcacgctgtttccaagccacatcaacatgaytctgacaaagatgcacccagtgccttctgacagtctgtagacaaatactcaatgcttccagcacwtcttcatatcatttgggcaaatttgcagtccatgcttgggcagtgcagaaatgacacaattatactgatagacacacaccatgactgagaacatctgtgcacactgctaacaacctgtaattaggtattgctgactcacttgccttgcacaggtgggggaatatccttaaattggcttcactcatgctattagctttcccagagggtcacgttaagcaactacccttaatggtgtgtgctgaaatactgcaaaaaccacttccagttttcctcaattactgcggatgacgttaaaacac

SEQ ID NO: 31508 - DNA, 600 bp, Chicken  19866894253942_1
tgtatggctttgtgaggtaatgaattctacagtttaattacactttgtgtagaattccgttgtttgcttttgatctgcagcttggtaatttcttttgatatttcctgtagctcttgtaagaagtaatgaattattccctattcatgactttacaacccttgtcacattgccttcctcaattatatgttttccatgctgaaaggccctagattcacctaatccctgcttgtacagaagctgtttatgcatttaccttgttgtcctgtgcctactatttctacaaaatatattctgaaaggkaagttgatacaaacggaaaattagaaaatcttcaccattatcttgaatagccagtctgttaagctcaatggcacaagcagggataacctctattttccatgtctayacaggttttcctgaatgaaaattattttcttcccacaaatctctgttcactgacttctatagttgcaatgaatcagatcayggccttcaaaatgcttccttccctctgcacagcctcaaaagagcccatcacctaaataaatyacagattatgtagctgaagcataggcctgtgcccaaagataattcttactg

SEQ ID NO: 31509 - DNA, 600 bp, Chicken  19866894253942_2
gtagctcttgtaagaagtaatgaattattccctattcatgactttacaacccttgtcacattgccttcctcaattatatgttttccatgctgaaaggccctagattcacctaatccctgcttgtacagaagctgtttatgcatttaccttgttgtcctgtgcctactatttctacaaaatatattctgaaaggkaagttgatacaaacggaaaattagaaaatcttcaccattatcttgaatagccagtctgttaagctcaatggcacaagcagggataacctctattttccatgtctayacaggttttcctgaatgaaaattattttcttcccacaaatctctgttcactgacttctatagttgcaatgaatcagatcayggccttcaaaatgcttccttccctctgcacagcctcaaaagagcccatcacctaaataaatyacagattatgtagctgaagcataggcctgtgcccaaagataattcttactggaagcaaccagatcaaggytgcagagataagaaatgccaagattaagataaactgtcatctgcttgtctgtggtgtgtacaaattcyaaattttcttctcttcaac

SEQ ID NO: 31510 - DNA, 600 bp, Chicken  19866894253942_3
tttccatgctgaaaggccctagattcacctaatccctgcttgtacagaagctgtttatgcatttaccttgttgtcctgtgcctactatttctacaaaatatattctgaaaggkaagttgatacaaacggaaaattagaaaatcttcaccattatcttgaatagccagtctgttaagctcaatggcacaagcagggataacctctattttccatgtctayacaggttttcctgaatgaaaattattttcttcccacaaatctctgttcactgacttctatagttgcaatgaatcagatcayggccttcaaaatgcttccttccctctgcacagcctcaaaagagcccatcacctaaataaatyacagattatgtagctgaagcataggcctgtgcccaaagataattcttactggaagcaaccagatcaaggytgcagagataagaaatgccaagattaagataaactgtcatctgcttgtctgtggtgtgtacaaattcyaaattttcttctcttcaactgtaacctctccagaaaatmcattctataatcacagaaagacagaggttgaaagatactcctgccagccttcaagtccagc

SEQ ID NO: 31511 - DNA, 600 bp, Chicken  19866894253942_4
ttaccttgttgtcctgtgcctactatttctacaaaatatattctgaaaggkaagttgatacaaacggaaaattagaaaatcttcaccattatcttgaatagccagtctgttaagctcaatggcacaagcagggataacctctattttccatgtctayacaggttttcctgaatgaaaattattttcttcccacaaatctctgttcactgacttctatagttgcaatgaatcagatcayggccttcaaaatgcttccttccctctgcacagcctcaaaagagcccatcacctaaataaatyacagattatgtagctgaagcataggcctgtgcccaaagataattcttactggaagcaaccagatcaaggytgcagagataagaaatgccaagattaagataaactgtcatctgcttgtctgtggtgtgtacaaattcyaaattttcttctcttcaactgtaacctctccagaaaatmcattctataatcacagaaagacagaggttgaaagatactcctgccagccttcaagtccagccacctcctccaagccaatgcagtactgaagctaaatcaggttgcccaagtccatgtccagac

SEQ ID NO: 31512 - DNA, 600 bp, Chicken  19866894253942_5
attagaaaatcttcaccattatcttgaatagccagtctgttaagctcaatggcacaagcagggataacctctattttccatgtctayacaggttttcctgaatgaaaattattttcttcccacaaatctctgttcactgacttctatagttgcaatgaatcagatcayggccttcaaaatgcttccttccctctgcacagcctcaaaagagcccatcacctaaataaatyacagattatgtagctgaagcataggcctgtgcccaaagataattcttactggaagcaaccagatcaaggytgcagagataagaaatgccaagattaagataaactgtcatctgcttgtctgtggtgtgtacaaattcyaaattttcttctcttcaactgtaacctctccagaaaatmcattctataatcacagaaagacagaggttgaaagatactcctgccagccttcaagtccagccacctcctccaagccaatgcagtactgaagctaaatcaggttgcccaagtccatgtccagacatgtctttgtcttcagtgacagaaatttctctagtgactgtcgttagcacagaaatttcaccatctctct

SEQ ID NO: 31513 - DNA, 600 bp, Chicken  19866894253942_6
ctctattttccatgtctayacaggttttcctgaatgaaaattattttcttcccacaaatctctgttcactgacttctatagttgcaatgaatcagatcayggccttcaaaatgcttccttccctctgcacagcctcaaaagagcccatcacctaaataaatyacagattatgtagctgaagcataggcctgtgcccaaagataattcttactggaagcaaccagatcaaggytgcagagataagaaatgccaagattaagataaactgtcatctgcttgtctgtggtgtgtacaaattcyaaattttcttctcttcaactgtaacctctccagaaaatmcattctataatcacagaaagacagaggttgaaagatactcctgccagccttcaagtccagccacctcctccaagccaatgcagtactgaagctaaatcaggttgcccaagtccatgtccagacatgtctttgtcttcagtgacagaaatttctctagtgactgtcgttagcacagaaatttcaccatctctcttgacagtctgttctacttgcttaaccagctccactgtgatcgttttgttggttttttttaatagaatc

SEQ ID NO: 31514 - DNA, 600 bp, Chicken  19866894253942_7
attattttcttcccacaaatctctgttcactgacttctatagttgcaatgaatcagatcayggccttcaaaatgcttccttccctctgcacagcctcaaaagagcccatcacctaaataaatyacagattatgtagctgaagcataggcctgtgcccaaagataattcttactggaagcaaccagatcaaggytgcagagataagaaatgccaagattaagataaactgtcatctgcttgtctgtggtgtgtacaaattcyaaattttcttctcttcaactgtaacctctccagaaaatmcattctataatcacagaaagacagaggttgaaagatactcctgccagccttcaagtccagccacctcctccaagccaatgcagtactgaagctaaatcaggttgcccaagtccatgtccagacatgtctttgtcttcagtgacagaaatttctctagtgactgtcgttagcacagaaatttcaccatctctcttgacagtctgttctacttgcttaaccagctccactgtgatcgttttgttggttttttttaatagaatctgagctacctcattattaaatcttgtgataaaagatttg

SEQ ID NO: 31515 - DNA, 600 bp, Chicken  19866894253947_1
acactttttaagctactgcaatgtcctcatttcttctttaataagaacgtctgaatttgcaaaaagaagaaacttgcaaatttatgccttagaaattttctatcattgctccagctcttttcctccaaaccaaattttaaccacattctacggttttatttcaccaagtacttcataaaccaggacttctctgtcttttacaagccaatgtttcctttatttacactggaaagaatggaaggttcagtgtgtaaagcaggctcaaagttagtttcgacagtgaagttcaaaaacaacacrctaaaagcaccaactcscagcactgttggatggtccttcattgctgtgtaacctgggtgccctaacacaccaagtcaaccagaagacaaatccccacaaggagttctaagggatgtaagaggttcccaggcagtttcacctctaagagaagcattcacagcataactctggggaagcacactactgaggtaagaactgtaataattctttgactctgttctgtaagtacatctggtcaaccgctgaggtagaagcggtaactgaaaggagtaccaaacagaattctgagcagccattatc

SEQ ID NO: 31516 - DNA, 600 bp, Chicken  19866894253947_2
gcaatgtcctcatttcttctttaataagaacgtctgaatttgcaaaaagaagaaacttgcaaatttatgccttagaaattttctatcattgctccagctcttttcctccaaaccaaattttaaccacattctacggttttatttcaccaagtacttcataaaccaggacttctctgtcttttacaagccaatgtttcctttatttacactggaaagaatggaaggttcagtgtgtaaagcaggctcaaagttagtttcgacagtgaagttcaaaaacaacacrctaaaagcaccaactcscagcactgttggatggtccttcattgctgtgtaacctgggtgccctaacacaccaagtcaaccagaagacaaatccccacaaggagttctaagggatgtaagaggttcccaggcagtttcacctctaagagaagcattcacagcataactctggggaagcacactactgaggtaagaactgtaataattctttgactctgttctgtaagtacatctggtcaaccgctgaggtagaagcggtaactgaaaggagtaccaaacagaattctgagcagccattatcactcaggacagcaagtt

SEQ ID NO: 31517 - DNA, 600 bp, Chicken  19866894253949_1
ctgcagggcagcccaagcaagggtaaggggctcacagaggtctcacaaatggtatctggcccacagcacagacagatgggccatgctgatgtacagcactgcaccagagccaaaaaagggaaactcttttggctttgcagattcacgcagcatttaaaagaatgagcaaaattaattactatttataccaacatattctgccatttcaagataatttttaaaaaagatatcttacataaaagcctgaaagccatagttctcaaagaaataaaaaaccacactccttttcactccaaaagstataaaaagcactactgtggcagcaaggtctactagaaaccacaagtgctcatcagtgcttttaatttctgtattttccttacgtttcagaggtaaaatgattaaagttagctgtatgttttctctttctttacaaagacttttagatgattttatctttcaaaagacgtgacacaaggctcagtgtatttggtctggttttactttcactgatagctgtagcagtggttaaattgcacatcttcaacaagagatctaagcacatgcaggttactggtattatcagaaggaagatgatac

SEQ ID NO: 31518 - DNA, 600 bp, Chicken  19866894253949_2
ttctttacaaagacttttagatgattttatctttcaaaagacgtgacacaaggctcagtgtatttggtctggttttactttcactgatagctgtagcagtggttaaattgcacatcttcaacaagagatctaagcacatgcaggttactggtattatcagaaggaagatgatacttgttttgatgaggtaagaaaagagactgatttaacagcaactcttcagactgaagaactgaaatacagttttgtacttttatgcagacactgtattgcttttggctttgagaagaagttatacaraagtgtttccttaaacttatacacaaggatttctgttttgtgacattctggtaatggtagtagaactccagaaaagattacagaaggaaaatataagtatgtgcagtgtgatgtgtgacctgttttacaaattaacagacaatcaggtggatgtacrttacrttagcagtaattcaaacgtggctcagctgaaaacagatctgacagactgctctaatgctgggtaattatcacttagsaaaatacccagcacttcaaaagcatcaatgcagcacttcaaaaaattgtatgttcatttaa

SEQ ID NO: 31519 - DNA, 600 bp, Chicken  19866894253949_3
cagaaggaagatgatacttgttttgatgaggtaagaaaagagactgatttaacagcaactcttcagactgaagaactgaaatacagttttgtacttttatgcagacactgtattgcttttggctttgagaagaagttatacaraagtgtttccttaaacttatacacaaggatttctgttttgtgacattctggtaatggtagtagaactccagaaaagattacagaaggaaaatataagtatgtgcagtgtgatgtgtgacctgttttacaaattaacagacaatcaggtggatgtacrttacrttagcagtaattcaaacgtggctcagctgaaaacagatctgacagactgctctaatgctgggtaattatcacttagsaaaatacccagcacttcaaaagcatcaatgcagcacttcaaaaaattgtatgttcatttaaaataattaagttttaaaagactaaaaacccaactgagccatttgttacccgaagaacttacacttctagccctgtcagctctctttagattcaattgagcagacgagagggctgagttgagcaactgagttttccagactttgttaagttttcactc

SEQ ID NO: 31520 - DNA, 600 bp, Chicken  19866894253949_4
ggaagatgatacttgttttgatgaggtaagaaaagagactgatttaacagcaactcttcagactgaagaactgaaatacagttttgtacttttatgcagacactgtattgcttttggctttgagaagaagttatacaraagtgtttccttaaacttatacacaaggatttctgttttgtgacattctggtaatggtagtagaactccagaaaagattacagaaggaaaatataagtatgtgcagtgtgatgtgtgacctgttttacaaattaacagacaatcaggtggatgtacrttacrttagcagtaattcaaacgtggctcagctgaaaacagatctgacagactgctctaatgctgggtaattatcacttagsaaaatacccagcacttcaaaagcatcaatgcagcacttcaaaaaattgtatgttcatttaaaataattaagttttaaaagactaaaaacccaactgagccatttgttacccgaagaacttacacttctagccctgtcagctctctttagattcaattgagcagacgagagggctgagttgagcaactgagttttccagactttgttaagttttcactcccaac

SEQ ID NO: 31521 - DNA, 600 bp, Chicken  19866894253949_5
acagttttgtacttttatgcagacactgtattgcttttggctttgagaagaagttatacaraagtgtttccttaaacttatacacaaggatttctgttttgtgacattctggtaatggtagtagaactccagaaaagattacagaaggaaaatataagtatgtgcagtgtgatgtgtgacctgttttacaaattaacagacaatcaggtggatgtacrttacrttagcagtaattcaaacgtggctcagctgaaaacagatctgacagactgctctaatgctgggtaattatcacttagsaaaatacccagcacttcaaaagcatcaatgcagcacttcaaaaaattgtatgttcatttaaaataattaagttttaaaagactaaaaacccaactgagccatttgttacccgaagaacttacacttctagccctgtcagctctctttagattcaattgagcagacgagagggctgagttgagcaactgagttttccagactttgttaagttttcactcccaacagctgtgtctcttcacctactcaggcactcagagacttttgaaggcatttcaaatactcctgttgaaaatttgaaca

SEQ ID NO: 31522 - DNA, 600 bp, Chicken  19866894253954_1
tctaaattaagcaactttattggtgaatctgaaaagagtgcatgcaaaaactgatactatggcctcaaaagatcttaaatgataccttagtgaagttgcagcaagacaccttgtctcttcagataactgtgaaagtaaatttcataaaagatctgaagatagcatttctaatgataactaaatctacaagtaactgctaatgcatagaattaaattcacacaggaaaaaaggaaaagaaaaagaaacaataacaaaaagcccatcaagacaaaacatcaagacatacaacagaagctagstataaagctgttttgtagggattcaaagatcaactgtaaataagagatattgagttttctagaagatctcagtaggtgagggtttgaaaacttaatgaggaaggaattaactgatgaaaaaaaaattaaaagattattagcaaacaaataattagccatcaagctagattcccccagcagattttctttctaaaagcaggtcaaactaaaaacatgcagaactctgcaacagttcaagagatgaaagatttctcctcagctgaaaagccttacacaaaaaagcatttcatccaatggatt

SEQ ID NO: 31523 - DNA, 600 bp, Chicken  19866894253958_1
agaaaagtaatcctctcaatctattgttttagtgctgagaatttctatggtcttggtgtcaggaggctgagtgacagtgaaccagagcgagttacaaatgactgctttttacatttatgattaccatagctataaaccacagagcagccaacactacctggaatctgacacgctgtatttgtttttcaagagtagttaagcatggggcttaatttgatgagaaatctccaaaaagtagtccttaaaccagatactccactggaaacatgcatgcagaagttagaaaatacaacaatgggycatcatgccttgtcacttttgtgtgggctactgtatgattacaaacctgtaacagcaactttacagcatagtttagccttcatctgcaaggtgctgaatagcaattaagtgcttcagagggcaaccagaaaacattaattaatgttccaacagcaaaggaatgctttttgctgtctccaataaaaatgtccactttcagaataacgaaaagtcaccactaaagacatactctatattttaaaaagatgtttctcaaatccattgatccaatcaacaaaatagtcacagaacatctttctt

SEQ ID NO: 31524 - DNA, 600 bp, Chicken  19866894253968_1
tttagtaagacaattaccaatggacaatattattttcttaaacaatggcaaatgattgctgctatctttaagacctctgaaaaccaacagcatccttctcaccttttgcctattaaggaataataaataaatcattaaatacatctttattgtgaaaaagtcaagcaggaagaagaaggagagactaggacacagacagcagcaaggtgaaccagaaatggtggtgtgtctcattctatacagtgcagtccagtgttgagcctgtgaatgaccaaaaaatgatggattattttagaaaarctaactttccatcatcaaatgactgctggttgcctagacttccattttcaggaggagtataatttgcatgtaatgataagacttccagagctggaagaaacactgatcatttatgtataggcagaaacagagtgagagctaacattagaattgagtggaagaaactcagatggctgtagtgggaagagcaaatgcagttgtcaaacatctgtggcaaatataaaggtcatattaaatgtgttaaaaaatattttgtaaaacttactactttactgttttatatcctgctgttggcakagc

SEQ ID NO: 31525 - DNA, 600 bp, Chicken  19866894253968_2
aarctaactttccatcatcaaatgactgctggttgcctagacttccattttcaggaggagtataatttgcatgtaatgataagacttccagagctggaagaaacactgatcatttatgtataggcagaaacagagtgagagctaacattagaattgagtggaagaaactcagatggctgtagtgggaagagcaaatgcagttgtcaaacatctgtggcaaatataaaggtcatattaaatgtgttaaaaaatattttgtaaaacttactactttactgttttatatcctgctgttggcakagcaagtgcaaagggttaattccataaacttttcttatctctgtcttgctagctctttctaatgtggcaatgatctccagcaacctcttcttgaaaagtaccatctttggaaggcttacccatgttgaatttagcttcagcaggaaacagccatgaaaacaaaaagagcaccttactatttgaatttccctttttctgaagttctctctaccttatttaaacatctacagtaggtagaactaactaacagaagaactaacactttctcacttggtaattttttttcaaaaagatttcagt

SEQ ID NO: 31526 - DNA, 600 bp, Chicken  19866894253977_1
cccttctgacaccaactgggtgcgttgcagcgtgtcctatgttggcacacatccccttggatgttcctgtagcaccagaagccttgtgccagcccagggcacagctgccactgtcaaccacctgcaggctgtgctggctcttttggctctgctttgcatgaagaagagcactttaggagctgctccatggccgcccagcattgctggtgtggtattgccagccctggcatatgggcagccttcagccacgtctgctgcccctttggttgagttgtgatcattggaattatttactgctcygatcaataaataggataggcagggggctgtatttcatgaacacaacactatcctggtgcacaatgctgtatttcaagagcgtaaataatactggggcatcagcagaaatcaaaaccaaacagatagaacaatttataccccaaatctctcagtgtggcagggaaggaaggaggagcagctccacacggtgctgcggggctctgccctgtttaaccaaacccttctggttctgcctttacacccagcagggctcttcccctgcctctggcacaggcaatatggggcatgagacagccacct

SEQ ID NO: 31527 - DNA, 600 bp, Chicken  19866894253980_1
gttctgcagcagcgaaacaaaagtaacgtcttctgggtggagtgtttccaagtgcagccgccccgtattggtgagcgccgattctcctttaggtggagctgcgatgcgttgaggagaaacgagcaagaaaagcaaagccatgttgtgctgtgagatggtcccagcagcgctgctgtgacaaaatcgcctcttgcaattcatggaggtgtttacatttctccttgcttcaaacttcttttttcttttttttccttgaggttgagggatctgagaggtcttttccagcctttggggttccakcatccacccatggctcccttcgccccaagcagcctttggtcctgcactgacacacgtaggcagagtgaggatggctccgtgctaaggggaggaaggagatgcattcagaactccagaaatgaaaatgctgataacaatgtattatttgtaatgtggaaatgcagcttttcatttctgttgccaaaaaaaaaaaaaaaaaagagaggtttttgagggttacggtgcctggagttgttttgcagctgatacagctcagatgggtatccgaacttcttgaaccgaggaggggattttgtcacc

SEQ ID NO: 31528 - DNA, 600 bp, Chicken  19866894253984_1
caaaagctgttatggtaaattattgaccaggctgaggagggctaatagcccaggaatggcttcattatgtaacctattaaaagtggggctagcagagggaacatgacagaagtgactacagggtttttttattttaataccttgtactgcagagtaaatgggtattaacccccctcctggagtgaattatttaccaacattagcaggttacctataaaccacagcttagtggaggagggatggtggcaggtaggggtgcagtaaacgtggctgtgcagcatggagctgcccccctcctcrtgtcagggctctgtgagctcctttgctgcccaggacccgcatctatcccattagcaggtgcagtgagtgggcagtgtgcagtggggcaatgagcagagccaccargatgacctcagcagtggtcgctccaagcactttggctctggaacacttgaaattggttgaagcctttgtgtctacttggctatcttgtgtcctctgctttgtgatggccatgcagcacaaaaagccaatggcaggtgtataaagaaagcaagtaagacccaattaaaaacatgaggaattggcaaaactttcaaa

SEQ ID NO: 31529 - DNA, 600 bp, Chicken  19866894253984_2
acagaagtgactacagggtttttttattttaataccttgtactgcagagtaaatgggtattaacccccctcctggagtgaattatttaccaacattagcaggttacctataaaccacagcttagtggaggagggatggtggcaggtaggggtgcagtaaacgtggctgtgcagcatggagctgcccccctcctcrtgtcagggctctgtgagctcctttgctgcccaggacccgcatctatcccattagcaggtgcagtgagtgggcagtgtgcagtggggcaatgagcagagccaccargatgacctcagcagtggtcgctccaagcactttggctctggaacacttgaaattggttgaagcctttgtgtctacttggctatcttgtgtcctctgctttgtgatggccatgcagcacaaaaagccaatggcaggtgtataaagaaagcaagtaagacccaattaaaaacatgaggaattggcaaaactttcaaaaggtttagcaaacctagtagtgagcgcagggggtaaatctctctggccrrtggaaaactctaagcatgctgctsttgattttaaactacccttgtgggaacaaac

SEQ ID NO: 31530 - DNA, 397 bp, Chicken  19866894253984_3
attagcaggtgcagtgagtgggcagtgtgcagtggggcaatgagcagagccaccargatgacctcagcagtggtcgctccaagcactttggctctggaacacttgaaattggttgaagcctttgtgtctacttggctatcttgtgtcctctgctttgtgatggccatgcagcacaaaaagccaatggcaggtgtataaagaaagcaagtaagacccaattaaaaacatgaggaattggcaaaactttcaaaaggtttagcaaacctagtagtgagcgcagggggtaaatctctctggccrrtggaaaactctaagcatgctgctsttgattttaaactacccttgtgggaacaaacagcttggcagcagcaggggctgcggggctggggttgggggt

SEQ ID NO: 31531 - DNA, 396 bp, Chicken  19866894253984_4
ttagcaggtgcagtgagtgggcagtgtgcagtggggcaatgagcagagccaccargatgacctcagcagtggtcgctccaagcactttggctctggaacacttgaaattggttgaagcctttgtgtctacttggctatcttgtgtcctctgctttgtgatggccatgcagcacaaaaagccaatggcaggtgtataaagaaagcaagtaagacccaattaaaaacatgaggaattggcaaaactttcaaaaggtttagcaaacctagtagtgagcgcagggggtaaatctctctggccrrtggaaaactctaagcatgctgctsttgattttaaactacccttgtgggaacaaacagcttggcagcagcaggggctgcggggctggggttgggggt

SEQ ID NO: 31532 - DNA, 372 bp, Chicken  19866894253984_5
tgtgcagtggggcaatgagcagagccaccargatgacctcagcagtggtcgctccaagcactttggctctggaacacttgaaattggttgaagcctttgtgtctacttggctatcttgtgtcctctgctttgtgatggccatgcagcacaaaaagccaatggcaggtgtataaagaaagcaagtaagacccaattaaaaacatgaggaattggcaaaactttcaaaaggtttagcaaacctagtagtgagcgcagggggtaaatctctctggccrrtggaaaactctaagcatgctgctsttgattttaaactacccttgtgggaacaaacagcttggcagcagcaggggctgcggggctggggttgggggt

SEQ ID NO: 31533 - DNA, 600 bp, Chicken  19866894253985_1
gtgctggctgtcactgcagtgggtgagcgtccagttccagtaaggagaagttgcatcagtagatgcaagggctggacattccgatggctgtagagcaacgtgagcctcgtgcattttgtgaccaagcagaggatgtgttcgccacgtgtgggtcctgcgtcccagcatgcaatagtgcagctcttctttgagagagggaaagggggagaattggtcaaaatgtggatctttgaatgagatgggatggctgagagaacttgggtgcaccaaagcactgattttcattaaagcaggtatttwaaagattttatttggaaagctggcagtttcctttctgcttttaggtattcataaggcatatggatacagtgcagtgacagtgaggctgtgtaagtgtgtggatttgaggtttctcctcctgtcctcagtctgatactttatactctcagctggaaattctgtagcccttcatggaggaaaccgactgtattttacaagcagatcagcaaaggaggtttaaatttgtcaaccctttaatgaaacaaaaacaacttggtggtggaaaccaagcatattccagctgttttggcaggacattac

SEQ ID NO: 31534 - DNA, 600 bp, Chicken  19866894253988_1
agttattgtttttttcctacaaatgatgctgttaatctgctctgctctcagatgagcgccttattaaaatcttcagattttatggtgcccattagtcaaaatgtgaagtaagaaaattaccagccaaaattccctgtttattcaagtgtaaattgatacctacaagtgtgcgttgctttatagccaggattctgaaatactgcattgtcacatagggacataccacagtaacaagcaggcagtgtatttctggagaaagttcctttcctctcattccatttcaggtttttggtccatcaratgatacatcaaggttaaaagttacctcacttgaatgtacaatggagaaagaacaaattttgtttcaacccctttgttgtcagtaatatgtgcataaatttcatcaacttcaaaagaagcttaattatttcaattattattattaaatattattatctacttaattgctaatctatacgtgcgtgtataacaaattctttcctagcttaagaatcagcgtagtaatttcgaatattttgtgttgattaacttctcatttttgtgtaatttacataagcatttctcttgctggcttttcgt

SEQ ID NO: 31535 - DNA, 600 bp, Chicken  19866894253988_2
tgaatgtacaatggagaaagaacaaattttgtttcaacccctttgttgtcagtaatatgtgcataaatttcatcaacttcaaaagaagcttaattatttcaattattattattaaatattattatctacttaattgctaatctatacgtgcgtgtataacaaattctttcctagcttaagaatcagcgtagtaatttcgaatattttgtgttgattaacttctcatttttgtgtaatttacataagcatttctcttgctggcttttcgtacacttgtacataggttgacaaggaaagtcracttgcatttttggcaaagcaacggcacttactaatataggctaagcttgttggttttgtttttccttgcagagctggagtggaccagagaaattacttgctttagatgaactcattgacagttgtgaaccaacacaagtgaaacacatgatgcaagtgatagagccccagtttcaaagagacttcatttccttgctcccaaaagaggtgagaaatacgggttcaagtcgccaccttttaaatacttccttgctcattgtggcattcatttttttccaacatggtgatgtaaactgatgt

SEQ ID NO: 31536 - DNA, 600 bp, Chicken  19866894253988_3
tgcagagctggagtggaccagagaaattacttgctttagatgaactcattgacagttgtgaaccaacacaagtgaaacacatgatgcaagtgatagagccccagtttcaaagagacttcatttccttgctcccaaaagaggtgagaaatacgggttcaagtcgccaccttttaaatacttccttgctcattgtggcattcatttttttccaacatggtgatgtaaactgatgttaaaaaggtccctaagttgacatactgctgtgacatagtaaccgttatttcagagcaacacaccttyatgttttggttgcagttctgatatctggaaatacggatgactccttaaacaaaatcccagtagctttcaggtatctctgtatcttaattgggctggctttatttttatattgagaactagttctktcagagaatgcacacaaaaaaattccctacagctgcatgacctttctgcacagtattctggaagtataagcattaccatttaatgctttaagtagtgtgctttttgtgtgaatgttatttttaaaartttattttaaacaaactaagtcctaaagtctacatcaataaaccccac

SEQ ID NO: 31537 - DNA, 600 bp, Chicken  19866894253988_4
ttgctcccaaaagaggtgagaaatacgggttcaagtcgccaccttttaaatacttccttgctcattgtggcattcatttttttccaacatggtgatgtaaactgatgttaaaaaggtccctaagttgacatactgctgtgacatagtaaccgttatttcagagcaacacaccttyatgttttggttgcagttctgatatctggaaatacggatgactccttaaacaaaatcccagtagctttcaggtatctctgtatcttaattgggctggctttatttttatattgagaactagttctktcagagaatgcacacaaaaaaattccctacagctgcatgacctttctgcacagtattctggaagtataagcattaccatttaatgctttaagtagtgtgctttttgtgtgaatgttatttttaaaartttattttaaacaaactaagtcctaaagtctacatcaataaaccccaccaaaagtaagctcagaaaagcccttcytgctaaggataaagccaagccctaattaactggatatattgcagtaaatccttttctgcaaatcagatcatgttgtatcaggttaaagagaagctaag

SEQ ID NO: 31538 - DNA, 600 bp, Chicken  19866894253988_5
acatactgctgtgacatagtaaccgttatttcagagcaacacaccttyatgttttggttgcagttctgatatctggaaatacggatgactccttaaacaaaatcccagtagctttcaggtatctctgtatcttaattgggctggctttatttttatattgagaactagttctktcagagaatgcacacaaaaaaattccctacagctgcatgacctttctgcacagtattctggaagtataagcattaccatttaatgctttaagtagtgtgctttttgtgtgaatgttatttttaaaartttattttaaacaaactaagtcctaaagtctacatcaataaaccccaccaaaagtaagctcagaaaagcccttcytgctaaggataaagccaagccctaattaactggatatattgcagtaaatccttttctgcaaatcagatcatgttgtatcaggttaaagagaagctaagacttagatttgagtgtgtgtgattttcagcttgtgtaagtaagtaaatgttgtctgtagaagagtaattcttgatattctctcaagtagaacatggggtttgagatgaaagattatcaagccagtgt

SEQ ID NO: 31539 - DNA, 600 bp, Chicken  19866894253988_6
gaaatacggatgactccttaaacaaaatcccagtagctttcaggtatctctgtatcttaattgggctggctttatttttatattgagaactagttctktcagagaatgcacacaaaaaaattccctacagctgcatgacctttctgcacagtattctggaagtataagcattaccatttaatgctttaagtagtgtgctttttgtgtgaatgttatttttaaaartttattttaaacaaactaagtcctaaagtctacatcaataaaccccaccaaaagtaagctcagaaaagcccttcytgctaaggataaagccaagccctaattaactggatatattgcagtaaatccttttctgcaaatcagatcatgttgtatcaggttaaagagaagctaagacttagatttgagtgtgtgtgattttcagcttgtgtaagtaagtaaatgttgtctgtagaagagtaattcttgatattctctcaagtagaacatggggtttgagatgaaagattatcaagccagtgtgctacagstgttaaatgcattttagtacatttggaaattgtacttctgatattaattgattttagtgagtgggaa

SEQ ID NO: 31540 - DNA, 600 bp, Chicken  19866894253988_7
aaacaaactaagtcctaaagtctacatcaataaaccccaccaaaagtaagctcagaaaagcccttcytgctaaggataaagccaagccctaattaactggatatattgcagtaaatccttttctgcaaatcagatcatgttgtatcaggttaaagagaagctaagacttagatttgagtgtgtgtgattttcagcttgtgtaagtaagtaaatgttgtctgtagaagagtaattcttgatattctctcaagtagaacatggggtttgagatgaaagattatcaagccagtgtgctacagstgttaaatgcattttagtacatttggaaattgtacttctgatattaattgattttagtgagtgggaacttgttttgctgtctgaagtgaggaggaagtgcatcttctttggccatatctactatgtgctgagtttgccacgtgaaacttttcatcagggttgatgttggtacatcttcgtttactgatagatttgaaaacaagttcttcatagatgtgctggtgtttggttactgtgtttagtgtgctcttttttactgtgaagattgttctgtatctcttgttcttgacgttctttctg

SEQ ID NO: 31541 - DNA, 600 bp, Chicken  19866894253991_1
acaagggaaccacgggagctacgtgcctggccgcaataaggaacggaagccaagagccgtataatatttacatttaatacaatccgttgacatctgacatttttctggtaaattttactcgggccataaacacttctggagcactaagtaaattttaactgctctgatggtctttcctgctggtgtgcggcgaaatgtttcgctgccttcccccctaaacctgtgtccatccggatccgtcacagaatcacccatgagattcctgtgctcacacccctgcatgccaaacactgctctccygagcccacatcctcccccaccggggaaaagttggttgctgcatgcagactgtcctcttggctccggcagcactgcgtgttcctccagcaactggtgcccagctgccctgcgggtgtaatggtgtcaccagcaggcacctcttaaaaagcaataaaaactcaaaaaatggggaaagaaaattaatagcccagcaatcggtcaacccctggtgatgaaacagaaagcagagagacaacgagggctcgagtcgaacacgatggctccagtccttgtctcgagtctctccccctgcagccttgg

SEQ ID NO: 31542 - DNA, 600 bp, Chicken  19866894253991_2
gccctgcgggtgtaatggtgtcaccagcaggcacctcttaaaaagcaataaaaactcaaaaaatggggaaagaaaattaatagcccagcaatcggtcaacccctggtgatgaaacagaaagcagagagacaacgagggctcgagtcgaacacgatggctccagtccttgtctcgagtctctccccctgcagccttggacggagtccagcagagcggtgtggtatctgaaacagtacccgaccctgaagcagggatcaatttgtgctctgcagactattcacatttttgttaatcctcccygcgttattttacatcttgtcttcccttgtggagaacgagggttcayggcactgccagggtgrataatgctgggccccccaggagcgggggagcgctggagttgcagccaggtgcgggcattaatgggctccggyggtgctgccaacatagaattgccataaatcaggctgagctgggtggagacagttcgctctgttttgaagtccatttgcccttattgcttgttcagctccttaatgcattaatgataagatagcgtggggaatgcgcagcacggccgttcgccccaaaatcctgaag

SEQ ID NO: 31543 - DNA, 600 bp, Chicken  19866894253991_3
aataaaaactcaaaaaatggggaaagaaaattaatagcccagcaatcggtcaacccctggtgatgaaacagaaagcagagagacaacgagggctcgagtcgaacacgatggctccagtccttgtctcgagtctctccccctgcagccttggacggagtccagcagagcggtgtggtatctgaaacagtacccgaccctgaagcagggatcaatttgtgctctgcagactattcacatttttgttaatcctcccygcgttattttacatcttgtcttcccttgtggagaacgagggttcayggcactgccagggtgrataatgctgggccccccaggagcgggggagcgctggagttgcagccaggtgcgggcattaatgggctccggyggtgctgccaacatagaattgccataaatcaggctgagctgggtggagacagttcgctctgttttgaagtccatttgcccttattgcttgttcagctccttaatgcattaatgataagatagcgtggggaatgcgcagcacggccgttcgccccaaaatcctgaagtgatgaatcgatgctgcacttatccgcactgaccgcagaggagggg

SEQ ID NO: 31544 - DNA, 600 bp, Chicken  19866894253991_4
atggggaaagaaaattaatagcccagcaatcggtcaacccctggtgatgaaacagaaagcagagagacaacgagggctcgagtcgaacacgatggctccagtccttgtctcgagtctctccccctgcagccttggacggagtccagcagagcggtgtggtatctgaaacagtacccgaccctgaagcagggatcaatttgtgctctgcagactattcacatttttgttaatcctcccygcgttattttacatcttgtcttcccttgtggagaacgagggttcayggcactgccagggtgrataatgctgggccccccaggagcgggggagcgctggagttgcagccaggtgcgggcattaatgggctccggyggtgctgccaacatagaattgccataaatcaggctgagctgggtggagacagttcgctctgttttgaagtccatttgcccttattgcttgttcagctccttaatgcattaatgataagatagcgtggggaatgcgcagcacggccgttcgccccaaaatcctgaagtgatgaatcgatgctgcacttatccgcactgaccgcagaggagggggctgcaggttcagctg

SEQ ID NO: 31545 - DNA, 600 bp, Chicken  19866894253991_5
agggctcgagtcgaacacgatggctccagtccttgtctcgagtctctccccctgcagccttggacggagtccagcagagcggtgtggtatctgaaacagtacccgaccctgaagcagggatcaatttgtgctctgcagactattcacatttttgttaatcctcccygcgttattttacatcttgtcttcccttgtggagaacgagggttcayggcactgccagggtgrataatgctgggccccccaggagcgggggagcgctggagttgcagccaggtgcgggcattaatgggctccggyggtgctgccaacatagaattgccataaatcaggctgagctgggtggagacagttcgctctgttttgaagtccatttgcccttattgcttgttcagctccttaatgcattaatgataagatagcgtggggaatgcgcagcacggccgttcgccccaaaatcctgaagtgatgaatcgatgctgcacttatccgcactgaccgcagaggagggggctgcaggttcagctggaggctgaatgggcactgggggtctttttttcccaaggctcctttccctctgcccatctcagggggctgagc

SEQ ID NO: 31546 - DNA, 600 bp, Chicken  19866894253994_1
tatgccaaagataatgggtcaataaataagaagaaagagagtaaagacagaggttaaataaagttcctctgacaagtataacacaagatttccttcctgctgctgaacctggaggactgcacttggtttttgaataaaaaatctttttgcacatgcatcatcagctctcatgtccatctgatgactagtaaggattcgtttggagaaagacagctaattgttccaattatatttgtgtatgattctcatccatgactggagaagcccaggatgctctaatgacaaggatacatatagacrggatacagaccagaattcctagcacattwagtttgtgaggatgggatgatgcatctaaaaaataactgcatagtgggacccgtaaaactctcactgctagtgataatgcatccttcacctttctggccctggactcagattagtatcccacttgtaactgcaaataagtgcaaactacagatcagaatgtttcaagaaataacacaaggttaygcagggatttcaggagcacataatttataaaactacattacatgaaagaccagtaggtgtgagagtagytggcgtttgctctgttct

SEQ ID NO: 31547 - DNA, 600 bp, Chicken  19866894253994_2
gaagaaagagagtaaagacagaggttaaataaagttcctctgacaagtataacacaagatttccttcctgctgctgaacctggaggactgcacttggtttttgaataaaaaatctttttgcacatgcatcatcagctctcatgtccatctgatgactagtaaggattcgtttggagaaagacagctaattgttccaattatatttgtgtatgattctcatccatgactggagaagcccaggatgctctaatgacaaggatacatatagacrggatacagaccagaattcctagcacattwagtttgtgaggatgggatgatgcatctaaaaaataactgcatagtgggacccgtaaaactctcactgctagtgataatgcatccttcacctttctggccctggactcagattagtatcccacttgtaactgcaaataagtgcaaactacagatcagaatgtttcaagaaataacacaaggttaygcagggatttcaggagcacataatttataaaactacattacatgaaagaccagtaggtgtgagagtagytggcgtttgctctgttctttcattgcattgttcaaagaactggacta

SEQ ID NO: 31548 - DNA, 600 bp, Chicken  19866894253994_3
ctaattgttccaattatatttgtgtatgattctcatccatgactggagaagcccaggatgctctaatgacaaggatacatatagacrggatacagaccagaattcctagcacattwagtttgtgaggatgggatgatgcatctaaaaaataactgcatagtgggacccgtaaaactctcactgctagtgataatgcatccttcacctttctggccctggactcagattagtatcccacttgtaactgcaaataagtgcaaactacagatcagaatgtttcaagaaataacacaaggttaygcagggatttcaggagcacataatttataaaactacattacatgaaagaccagtaggtgtgagagtagytggcgtttgctctgttctttcattgcattgttcaaagaactggactaggtaaacaaayatctaaagaatggccaatttcaatctactctttcacaagtcccacatatttcttaactgtgagggtgatcaaatgcttgagcaggcttcctagagaggtggttgattccccaagcctgacacttttgaaagaagcattcagataatgccgttattaatatattgaagtggtca

SEQ ID NO: 31549 - DNA, 600 bp, Chicken  19866894253994_4
caaggatacatatagacrggatacagaccagaattcctagcacattwagtttgtgaggatgggatgatgcatctaaaaaataactgcatagtgggacccgtaaaactctcactgctagtgataatgcatccttcacctttctggccctggactcagattagtatcccacttgtaactgcaaataagtgcaaactacagatcagaatgtttcaagaaataacacaaggttaygcagggatttcaggagcacataatttataaaactacattacatgaaagaccagtaggtgtgagagtagytggcgtttgctctgttctttcattgcattgttcaaagaactggactaggtaaacaaayatctaaagaatggccaatttcaatctactctttcacaagtcccacatatttcttaactgtgagggtgatcaaatgcttgagcaggcttcctagagaggtggttgattccccaagcctgacacttttgaaagaagcattcagataatgccgttattaatatattgaagtggtcaggcactgtgctttatgatctttgttggtcctttccaacccaactattctattctaatctagtctcagga

SEQ ID NO: 31550 - DNA, 600 bp, Chicken  19866894253994_5
atgggatgatgcatctaaaaaataactgcatagtgggacccgtaaaactctcactgctagtgataatgcatccttcacctttctggccctggactcagattagtatcccacttgtaactgcaaataagtgcaaactacagatcagaatgtttcaagaaataacacaaggttaygcagggatttcaggagcacataatttataaaactacattacatgaaagaccagtaggtgtgagagtagytggcgtttgctctgttctttcattgcattgttcaaagaactggactaggtaaacaaayatctaaagaatggccaatttcaatctactctttcacaagtcccacatatttcttaactgtgagggtgatcaaatgcttgagcaggcttcctagagaggtggttgattccccaagcctgacacttttgaaagaagcattcagataatgccgttattaatatattgaagtggtcaggcactgtgctttatgatctttgttggtcctttccaacccaactattctattctaatctagtctcaggaaaatcagggtcccattcctcctgtctgaaataaaagttcagggagattcttgacatga

SEQ ID NO: 31551 - DNA, 600 bp, Chicken  19866894253995_1
aataatccttggggagtgaaggctacctagacagtctagattacaaaaggtgaatagactgtaaagtttcctgaatttgctttatgcagtcttaacaagacaaagccaacacttccctccacaatttcttaatacctgcagaaggaagaaggacacaaagcaggagggagaagtgcttcttttccacttccattggaatgagaaagacacagaagagaattacagttgggtcccattagatcagtggcatttttgacaagtcttaagagactctcttaaaaccacatgaagaaaatgtaytgaaaggaaatgctccagagggatccagatccctactacagatcatcagcaagctataaccatatcagtgagggagtccttaatagttctcaactgtgaagaagcagagatcaatagtaacacagactaagttatttaaacgtgatgatccatcatcataagtcacaagggagagcagggttctgttacatactgggcactatctgttaggaaaaacagcaattgtattcaacagggactgtaagataaatagaaaacaaataactctatatcacagctaagaaattgggcaatgataaa

SEQ ID NO: 31552 - DNA, 600 bp, Chicken  19866894253996_1
ctcagctaagtttaaggccttgctttctgagggagtttgagccagtgatcttcccttccagcctggacttgtttatgtttctaagtctctaatattcttttcccttataatttgcattttggctgctgacagataaaggattttcagctctctctgtttgttacccattcttaacttttgagagaatttcagtgaagatgcaagacttaaccatgtaaagaggaagaagtcaggcttctggtgtatgcgcgtcatttggcaaatttatcatctaaatgggaaaaacagtttgtttcttayagctttttctgtttgcctaatgttgagaacaccttagctgcttatgaggattggacaaaattgttttcacagtttctctgtgcagaaagtataactgactggaatctgatgcctgattactgacaacaacctctttctaaccaggcagcttataggctggtagttgtaaaattgttccttggagacaaatgatttaaattctaccaggttgaaaagagaactaaaacacacttcaggcatggctgagcatactacttactgagctattgtaataaaaaagccagaagaattattttcaaa

SEQ ID NO: 31553 - DNA, 600 bp, Chicken  19866894253998_1
aaaatatacaccatagagcaactctcataactcgctcgacacacgctatctgatgagttatagggcggtcttctatgtgcagagtgcatgtttcccctccacacaccgttatgaattttccatcccccatcattcatactgtgtcagaatatctattacaaaatcccgtttgcgagaagggcttctatttctcccccttcattttatcactgctcttaaattttcttctggacaccagcctggcatgctggcaatgccatgctggcatctgagaaaaaagttgtattcaaaaatcatacrtcagggccaaaacgtcacttcaaaagaaatgtccttttctagctaacagaaatactttgtaaaaacaaatgagacacaactgcattctgattgccgaaccctaccgcccagctgctaactactgcaaccatcttgtgaaacctggaagtctaaattatatctgataatgctttctgctgtcctgaacctttggaaatgttgagtcatcctgagaaaatgtcggcaatcatctttcacaaatgcctgagcgtggacgaggctctaactaaagcctggtgtgaaggatttagagccgagtgg

SEQ ID NO: 31554 - DNA, 600 bp, Chicken  19866894253999_1
actggtgctgttgaagtcaagaacctgcacggctctaggatgaatctgagtatatttcttatttctcaagttatctggaattctctatctgttggggagatatcctcatcctttgttctctagctgtgtgaattgtactgtatattgcaataagtaacatttaaagaaataaaattacacaatatttcttctttaaaatagcaattctccactattaagctacttggggggtgggggggaaacaacacaatttttcatggcagagcttttcctaaagaaacctcagttatttctaagtcrtrtgttctttaaagttgttgacagctagggcactattaaataaatataaatagatgtatgctctatataatacttgggtgtttggctgcatgcttaagtaacattatgaaatatacatgtggaaaggaaaactgactttgacatgttaaacatgttaggtaaaagcttatcgagggttgtaaagagtcctggtaatagcagtgggtagtattatgaataatctatcttgtttctagatagcagcttcattgttaggcagaataaatgattttgctctgaaatttaatgctgttaccacag

SEQ ID NO: 31555 - DNA, 600 bp, Chicken  19866894253999_2
tggtgctgttgaagtcaagaacctgcacggctctaggatgaatctgagtatatttcttatttctcaagttatctggaattctctatctgttggggagatatcctcatcctttgttctctagctgtgtgaattgtactgtatattgcaataagtaacatttaaagaaataaaattacacaatatttcttctttaaaatagcaattctccactattaagctacttggggggtgggggggaaacaacacaatttttcatggcagagcttttcctaaagaaacctcagttatttctaagtcrtrtgttctttaaagttgttgacagctagggcactattaaataaatataaatagatgtatgctctatataatacttgggtgtttggctgcatgcttaagtaacattatgaaatatacatgtggaaaggaaaactgactttgacatgttaaacatgttaggtaaaagcttatcgagggttgtaaagagtcctggtaatagcagtgggtagtattatgaataatctatcttgtttctagatagcagcttcattgttaggcagaataaatgattttgctctgaaatttaatgctgttaccacagtt

SEQ ID NO: 31556 - DNA, 600 bp, Chicken  19866894254002_1
tgcctgtattactggcacagctatggaagaggtgtgcaggcctctggccctgctccaaacagcctcttctgttacaattgccccagaagggcggccagctgtggtacagtgctgcacactgcctgccctgcctgcagacacagtggtgccaccgtacagacaacagcactgtcaccaattgcaccagaaccgagagcggacacaaatgcaaggacacaggagaacagttggaaactgtaaagagagcagcactgaaaagaccacgtcctgctgctgcccatggctgtggctccagggctycagaagcagcagcacaactcaaaggcagtagagtccccaccaggcactgacagacatccctcagggacactgctgctccgtgtggcatttgtttcttaggtcctgagcctcttcagatgacccagaccagacgggtgggaaaacaactaatctgctgttgattttgttctctcttcatgtaacctggttctataagtagaataggttaatcacatagaagtaaaaataggaaaacaacaagactgatgatgaatattatttaattggaattgaatttatcacaggtatgacaaactggca

SEQ ID NO: 31557 - DNA, 600 bp, Chicken  19866894254008_1
tattgctgctggcctggagcttctactccaccactatctgcattggtcataacccaggaatgatatttcatagaccagcaacctactttcttcctcatgttatggcataaaccagtgtccttcactctgatagtgtttgcattagctcatggattaagtgagttaggcttcttctagttatttgagattagcagattaactgtacataaccttcatctgaggactgacctgatgagtcttttcacactattcctttttaatttccatagtttggtggggacgttttcccaacgtgatggrtttcaccacagtgactgtgacctatacttgagtctttcaggctgagtttgacaacgatgacccaaaatggttcagggatgtttgtgtgtaatgagaataaggcaaagttactcggcttatcagtggccatttcagcactgggtcacctccagggatccactgacttgtctgggaggcatttagtgtgctgggttgggctgcagctacagggaccaagacaactgttggcagtgtactgccgtgagaccctcttcccaagatccatctgtggcttccagagggctctggtctcctgcagat

SEQ ID NO: 31558 - DNA, 600 bp, Chicken  19866894254011_1
tttcccccctctttcagtgcactggtctggggttcttctgttaaacacaacccccagaaagtgggcaaggaccacactctggaagatgaggatgtcattcagattgtgaagaaataaaactgctctcccacgctttgtcactgtgcctgacttttcattttgcaaatggcaaagaacagactacttctattaaacacagagaaaaggatattgctctttgtggtagtaaattattgcatggggaaaaaaaattgtttctggtgagcttgtattgcagcgttccattctagcagaacttaragatgaaaagctttacttaagtacttttcacaatggcaaaagaagctttgatgcctgtgatgacttcaaattggaagagttcacacagctgaaattactctgctctaatttagaacaagccaaaaagcagaggctggagaaccatagcttggaaggcagaactcaaggacataaaatgtgagctctggctgcctcaatttcagatgttcctgatagaatgcttcaaggctattaatagtcctgcagttatggaagaggtgctgggttttgattttgagtagttactttttcaattgttta

SEQ ID NO: 31559 - DNA, 600 bp, Chicken  19866894254015_1
atggagaggcagcacctggaaattagaaagttctgatactgtaatcaatgaactactcatttcagaggtattcacattgtcatctagtatgaatgcgtggactttccatgcaatcagtgaagcatctaacaagggtttacagacttgagaagatgttttgttttgttgcatggaatgtagaggcatttaaaataaatactgaaaatagactctgtgtggatatgccttcatgagtccaaatcagcattgctcacatcagtatgcatatatgatagtggtggtattcctattccattcctmatttcagtgaatctgtaaaactgtgtaagggttgagagaatatgtgaaggacgtgaatgttagcaaggagatacctgaaaaaatgagattaaaactttgacagattcttggggtttttttgtgctgaagttggcttcattttggagatgaactgctataatcctgccctggcaatactgataacattttcttgactgtccttgctaagtaataaaaattgttttaaggaaattataatttccttttggtggttatagaactggaaacagaattatgattcagatgattagattacaaaat

SEQ ID NO: 31560 - DNA, 543 bp, Chicken  19866894254015_2
ttagcaaggagatacctgaaaaaatgagattaaaactttgacagattcttggggtttttttgtgctgaagttggcttcattttggagatgaactgctataatcctgccctggcaatactgataacattttcttgactgtccttgctaagtaataaaaattgttttaaggaaattataatttccttttggtggttatagaactggaaacagaattatgattcagatgattagattacaaaatgccagcttgcgtggcacttctctgtgagaacagcttaaagtagcatcctgaccaggaaktctgaaaacaagcaatctctgatcrgaatttctaagctctgtttgcttcacttgactcagcaattttgtgagggtctttactttttttaattagaattcttggcgtcttcagtattagaagccatattttatgttgtaagattatttgtgtctataaccatggtccgacagatatgacagtaagatgcaggtcacagcacaatgcgggataaaggctgtccttaggaaaatggttcatctgca

SEQ ID NO: 31561 - DNA, 518 bp, Chicken  19866894254015_3
gagattaaaactttgacagattcttggggtttttttgtgctgaagttggcttcattttggagatgaactgctataatcctgccctggcaatactgataacattttcttgactgtccttgctaagtaataaaaattgttttaaggaaattataatttccttttggtggttatagaactggaaacagaattatgattcagatgattagattacaaaatgccagcttgcgtggcacttctctgtgagaacagcttaaagtagcatcctgaccaggaaktctgaaaacaagcaatctctgatcrgaatttctaagctctgtttgcttcacttgactcagcaattttgtgagggtctttactttttttaattagaattcttggcgtcttcagtattagaagccatattttatgttgtaagattatttgtgtctataaccatggtccgacagatatgacagtaagatgcaggtcacagcacaatgcgggataaaggctgtccttaggaaaatggttcatctgca

SEQ ID NO: 31562 - DNA, 600 bp, Chicken  19866894254017_1
tatgaatttgagcatggtgcactacaaatttgaccactgtagacagactctgcaatactaaaaaataattctgatatttgttgaaataaaatatgaattctcctcctcaaatcagctgtttctcaatggtatttatgcagctcaagctgtttctcaatggtatttacacagctcaagcttaatgatagaaactaacttgctaagaatacctctaccttaatgtaggtcccaaatgatgctaatattttcgtaagaaattagagtcaaacattttcaatcatcctttttgattctttttamttcaatgtgctattgatgaattctagcaccacttttattttttatttatttatttatttattttycacatgggtagtgaatttactgtaagatcatatgaatctcatgaaaactcttgtaaaatagttacataagccaggttagtaattggaggaaagaatgtcctgaaagtattgcaagaagcaggaaaatgagcaagaatcaagctgacaaacaacagggaggaaaaatatctattttaacatcatatatgtcatgtgcccttttcgaaatataaagcttaatcagccaaagtcatac

SEQ ID NO: 31563 - DNA, 585 bp, Chicken  19866894254017_2
gacagactctgcaatactaaaaaataattctgatatttgttgaaataaaatatgaattctcctcctcaaatcagctgtttctcaatggtatttatgcagctcaagctgtttctcaatggtatttacacagctcaagcttaatgatagaaactaacttgctaagaatacctctaccttaatgtaggtcccaaatgatgctaatattttcgtaagaaattagagtcaaacattttcaatcatcctttttgattctttttamttcaatgtgctattgatgaattctagcaccacttttatttmttatttatttatttatttattttycacatgggtagtgaatttactgtaagatcatatgaatctcatgaaaactcttgtaaaatagttacataagccaggttagtaattggaggaaagaatgtcctgaaagtattgcaagaagcaggaaaatgagcaagaatcaagctgacaaacaacagggaggaaaaatatctattttaacatcatatatgtcatgtgcccttttcgaaatataaagcttaatcagccaaagtcatacaaagtacaatgcctacgtatgctccc

SEQ ID NO: 31564 - DNA, 584 bp, Chicken  19866894254017_3
acagactctgcaatactaaaaaataattctgatatttgttgaaataaaatatgaattctcctcctcaaatcagctgtttctcaatggtatttatgcagctcaagctgtttctcaatggtatttacacagctcaagcttaatgatagaaactaacttgctaagaatacctctaccttaatgtaggtcccaaatgatgctaatattttcgtaagaaattagagtcaaacattttcaatcatcctttttgattctttttamttcaatgtgctattgatgaattctagcaccacttttattttmtatttatttatttatttattttycacatgggtagtgaatttactgtaagatcatatgaatctcatgaaaactcttgtaaaatagttacataagccaggttagtaattggaggaaagaatgtcctgaaagtattgcaagaagcaggaaaatgagcaagaatcaagctgacaaacaacagggaggaaaaatatctattttaacatcatatatgtcatgtgcccttttcgaaatataaagcttaatcagccaaagtcatacaaagtacaatgcctacgtatgctccc

SEQ ID NO: 31565 - DNA, 583 bp, Chicken  19866894254017_4
cagactctgcaatactaaaaaataattctgatatttgttgaaataaaatatgaattctcctcctcaaatcagctgtttctcaatggtatttatgcagctcaagctgtttctcaatggtatttacacagctcaagcttaatgatagaaactaacttgctaagaatacctctaccttaatgtaggtcccaaatgatgctaatattttcgtaagaaattagagtcaaacattttcaatcatcctttttgattctttttamttcaatgtgctattgatgaattctagcaccacttttatttttmatttatttatttatttattttycacatgggtagtgaatttactgtaagatcatatgaatctcatgaaaactcttgtaaaatagttacataagccaggttagtaattggaggaaagaatgtcctgaaagtattgcaagaagcaggaaaatgagcaagaatcaagctgacaaacaacagggaggaaaaatatctattttaacatcatatatgtcatgtgcccttttcgaaatataaagcttaatcagccaaagtcatacaaagtacaatgcctacgtatgctccc

SEQ ID NO: 31566 - DNA, 582 bp, Chicken  19866894254017_5
agactctgcaatactaaaaaataattctgatatttgttgaaataaaatatgaattctcctcctcaaatcagctgtttctcaatggtatttatgcagctcaagctgtttctcaatggtatttacacagctcaagcttaatgatagaaactaacttgctaagaatacctctaccttaatgtaggtcccaaatgatgctaatattttcgtaagaaattagagtcaaacattttcaatcatcctttttgattctttttamttcaatgtgctattgatgaattctagcaccacttttattttttmtttatttatttatttattttycacatgggtagtgaatttactgtaagatcatatgaatctcatgaaaactcttgtaaaatagttacataagccaggttagtaattggaggaaagaatgtcctgaaagtattgcaagaagcaggaaaatgagcaagaatcaagctgacaaacaacagggaggaaaaatatctattttaacatcatatatgtcatgtgcccttttcgaaatataaagcttaatcagccaaagtcatacaaagtacaatgcctacgtatgctccc

SEQ ID NO: 31567 - DNA, 561 bp, Chicken  19866894254017_6
taattctgatatttgttgaaataaaatatgaattctcctcctcaaatcagctgtttctcaatggtatttatgcagctcaagctgtttctcaatggtatttacacagctcaagcttaatgatagaaactaacttgctaagaatacctctaccttaatgtaggtcccaaatgatgctaatattttcgtaagaaattagagtcaaacattttcaatcatcctttttgattctttttamttcaatgtgctattgatgaattctagcaccacttttattttttatttatttatttatttattttycacatgggtagtgaatttactgtaagatcatatgaatctcatgaaaactcttgtaaaatagttacataagccaggttagtaattggaggaaagaatgtcctgaaagtattgcaagaagcaggaaaatgagcaagaatcaagctgacaaacaacagggaggaaaaatatctattttaacatcatatatgtcatgtgcccttttcgaaatataaagcttaatcagccaaagtcatacaaagtacaatgcctacgtatgctccc

SEQ ID NO: 31568 - DNA, 599 bp, Chicken  19866894254026_1
  misc_feature (1)..(61): n is any nucleotide
nnnnnnnnnnnnnnnnnnnnnnnnnnnnnnnnnnnnnnnnnnnnnnnnnnnnnnnnnnnnnagggcatcagtgagactctgtggaaccaatatgaacattacaggcaagatgtgggagacagacggagtacagaatgcaagacaaaatctgcactcatcttacaaaacctatgacacaagtctccaggaaggcttcaggatgggcatgtccacgtgtccacagtgaaattatacatgatgatgaatctcttcttggtaattacagcagccttaggaaagtaatgtgagtgcttcaaataytataaattttataggatacccagttttgagaaagtgctggtgaaaaactctccaaatgcttgtttctgcaaaatttgctgtgcattttatggatcaaaaaggtgtgagcgataagtattggacgaacatcagaaaaacacctgaaatcattcatttctacttccctccacaactcacattgcacatacattgttctatcccctgagtagaaagatatcagagtgcaaacaatccctgacagaagaaaggtgatttcattccattcagtgagatatggcacatttaatttaaattatgca

SEQ ID NO: 31569 - DNA, 600 bp, Chicken  19866894254042_1
tgattatttgaatgtttaaaacattaattttctctattctgaatgcatttattttgctatgaagatacactggagcacttctgttagttgtaattctataagcttcaatactgtgcttgttttttctgttgtcagttactatcctttgtgatgttagtctgaaattctgcagctttccaactgtgataagcatttgtaacagatgttgcagcaaagcagtttatgatattaactccctttagtaaataataattagttgaatcttttgatcttgattcaggttctcttttcaagcacttyttaatgaaatttgtttaatatgcgattgaggcctcaatttgaaaatacaatggatgaagcaaggattaaattctgtctgcattacaggttatggcagaactggaaatgtacagaaattaaagttcataacggaactccagatcagtttgcaaaataggrtagttgataatgcagcagttttgaaatgcaaaagaacaggtaaacttccctttttccacatataagaacgaagttatttttttactgtagcttgtgatgatgtctaactgcttgtctaagctatctcagtttgtattaagt

SEQ ID NO: 31570 - DNA, 600 bp, Chicken  19866894254042_2
tgaaattctgcagctttccaactgtgataagcatttgtaacagatgttgcagcaaagcagtttatgatattaactccctttagtaaataataattagttgaatcttttgatcttgattcaggttctcttttcaagcacttyttaatgaaatttgtttaatatgcgattgaggcctcaatttgaaaatacaatggatgaagcaaggattaaattctgtctgcattacaggttatggcagaactggaaatgtacagaaattaaagttcataacggaactccagatcagtttgcaaaataggrtagttgataatgcagcagttttgaaatgcaaaagaacaggtaaacttccctttttccacatataagaacgaagttatttttttactgtagcttgtgatgatgtctaactgcttgtctaagctatctcagtttgtattaagtttgctgttgtctatggtaactgttaaattagtatttgaacttgattctatatatttaaagttctgcagaggaacacatgttgcttggtatttagaaataatttctgtttatttttaagcatgtcatttccttcccagtgttggtgggtttgcaagaaga

SEQ ID NO: 31571 - DNA, 600 bp, Chicken  19866894254043_1
cagtctaaaacaacatctattttataatgctttaaagtctttttcttttttctttttttttctttctttttttaataggagatattaaaagataatgtgataaattttggtgtaatacttctacactattcacagagaaaaatctgtaagaaccaaattcccaggtacttgcatgcttgttcttatatagatgatacattcttgcatgaatctagtcatgcaataagataaatctgaattgccataaaaacaaactgaaggtttctgcctttatttctagcagttaattgaggcacccargttgatagcctagattaaatatactcctggtttaggtcttgcttatgtgctttaagttccatagtggaattaatcaaaattataaagtayccttagtaaatgacaccagaactgaattctacacagaatgtcaggaccatgttgaagatttaccagtaagtaatagctgctttgcatcacctcattaaaaaaaaaaattgatctatccttttttgtcattggcttttaacactgtagtgctagaagaaaaatgaggcttgcccttgatgcttgacttgtcgttcactggacagtattaaa

SEQ ID NO: 31572 - DNA, 600 bp, Chicken  19866894254043_2
gataatgtgataaattttggtgtaatacttctacactattcacagagaaaaatctgtaagaaccaaattcccaggtacttgcatgcttgttcttatatagatgatacattcttgcatgaatctagtcatgcaataagataaatctgaattgccataaaaacaaactgaaggtttctgcctttatttctagcagttaattgaggcacccargttgatagcctagattaaatatactcctggtttaggtcttgcttatgtgctttaagttccatagtggaattaatcaaaattataaagtayccttagtaaatgacaccagaactgaattctacacagaatgtcaggaccatgttgaagatttaccagtaagtaatagctgctttgcatcacctcattaaaaaaaaaaattgatctatccttttttgtcattggcttttaacactgtagtgctagaagaaaaatgaggcttgcccttgatgcttgacttgtcgttcactggacagtattaaaaaaaagaaatactgtagtcagctaaccactatgatttgttctccacttgttgatcataatgaatgtcagtttaagtcctatatatgcagg

SEQ ID NO: 31573 - DNA, 600 bp, Chicken  19866894254044_1
gaggtctatgctgtgaacaaacatgggtttaaagcaaaatggagaggagcaatgttctcttttagaaggattagctcttgtttatgttgtagctgcatttacagtcatactgacacaaacaaggaggtgctgctgccagaagctttgcaccaggaagctgtggcctaagttaaattctcaggattgtacaggaaatatgtgtcagagcaagaaatgaatcagaaatcttcaaattagactatgcactacattgtccttaggtcttatcttcaacttggtaatttcatattcacgtgtagyagttttttattcagatttactgcttcaccaatgggaaccttcattgtcccatgtgtgtgtcataccctttcccctttgggaaagaggctaggaggggcagctttgattactccagcagggcaccactactattctgagaacactaacacgcattttactctctagatttcttcttgagtattgctgttatgtataaccttcagggctggataggtctgtgaagccgctgtattattttcttctttttttccaaactgtagcctaaatttgatctatttgcctgtctttaatgctcataaa

SEQ ID NO: 31574 - DNA, 600 bp, Chicken  19866894254047_1
cacagtatgtaagtgatcttttttgggggtgttccctgatgaggaaagtcaagagattcattagcatctcttcatactgaatgggtgcatgatcactactgttgaagtgtatgacaggtttttggttattgcagggagaaaagattcttccttttcttaacctaagataattcaaatggttgaacaagctggaggatacatgatcaatgtctttgtacattaatttgataccatatcattgtactataagcatggattttgagtaagacagtaaaactaaattcttgttgagtttttttktttktttkttttttctcagtctggacttctgactgtgacttatggtgtcatcagtaaatggggtttactaagataaaaatactactggtggcagaagtggcctttaaataactaaaatgctcttatctgagaagcactttaccaactcagcatatgaacatatacttcaagggtacttgacagatttttgtgcttaaggtctgtgactgatgcatcaaatggactgatggctcaaatgagaaggcaggaagtacctttgttgggaatgcaaactgtcatgtcttagagagactttttgtc

SEQ ID NO: 31575 - DNA, 600 bp, Chicken  19866894254047_2
gtatgtaagtgatcttttttgggggtgttccctgatgaggaaagtcaagagattcattagcatctcttcatactgaatgggtgcatgatcactactgttgaagtgtatgacaggtttttggttattgcagggagaaaagattcttccttttcttaacctaagataattcaaatggttgaacaagctggaggatacatgatcaatgtctttgtacattaatttgataccatatcattgtactataagcatggattttgagtaagacagtaaaactaaattcttgttgagtttttttktttktttkttttttctcagtctggacttctgactgtgacttatggtgtcatcagtaaatggggtttactaagataaaaatactactggtggcagaagtggcctttaaataactaaaatgctcttatctgagaagcactttaccaactcagcatatgaacatatacttcaagggtacttgacagatttttgtgcttaaggtctgtgactgatgcatcaaatggactgatggctcaaatgagaaggcaggaagtacctttgttgggaatgcaaactgtcatgtcttagagagactttttgtcagtc

SEQ ID NO: 31576 - DNA, 600 bp, Chicken  19866894254047_3
gtaagtgatcttttttgggggtgttccctgatgaggaaagtcaagagattcattagcatctcttcatactgaatgggtgcatgatcactactgttgaagtgtatgacaggtttttggttattgcagggagaaaagattcttccttttcttaacctaagataattcaaatggttgaacaagctggaggatacatgatcaatgtctttgtacattaatttgataccatatcattgtactataagcatggattttgagtaagacagtaaaactaaattcttgttgagtttttttktttktttkttttttctcagtctggacttctgactgtgacttatggtgtcatcagtaaatggggtttactaagataaaaatactactggtggcagaagtggcctttaaataactaaaatgctcttatctgagaagcactttaccaactcagcatatgaacatatacttcaagggtacttgacagatttttgtgcttaaggtctgtgactgatgcatcaaatggactgatggctcaaatgagaaggcaggaagtacctttgttgggaatgcaaactgtcatgtcttagagagactttttgtcagtctttc

SEQ ID NO: 31577 - DNA, 600 bp, Chicken  19866894254047_4
aaaatactactggtggcagaagtggcctttaaataactaaaatgctcttatctgagaagcactttaccaactcagcatatgaacatatacttcaagggtacttgacagatttttgtgcttaaggtctgtgactgatgcatcaaatggactgatggctcaaatgagaaggcaggaagtacctttgttgggaatgcaaactgtcatgtcttagagagactttttgtcagtctttccagaccaccaaatgcaagatgacacaggtactgttgaacttgctattattcactagcagaaaaaggwgtgcaaatccacraaggagctagaagggttcctgtacaaatattaataacaaagatgtaaatggcttatgttgcatttttttcccattttatgctgaatggaaatagctgaatgaatatgtggattaaactatacaracagtactggcaacaaaagtatagcacagtattcactatgtcatttactaacttctgttcccaagctgatttcacattagcagctataacaacagaaggaaatattattaagcaagtagctaacatatrtaaagaaatatggatgtgtctctgggcagcctgg

SEQ ID NO: 31578 - DNA, 600 bp, Chicken  19866894254047_5
tggcagaagtggcctttaaataactaaaatgctcttatctgagaagcactttaccaactcagcatatgaacatatacttcaagggtacttgacagatttttgtgcttaaggtctgtgactgatgcatcaaatggactgatggctcaaatgagaaggcaggaagtacctttgttgggaatgcaaactgtcatgtcttagagagactttttgtcagtctttccagaccaccaaatgcaagatgacacaggtactgttgaacttgctattattcactagcagaaaaaggwgtgcaaatccacraaggagctagaagggttcctgtacaaatattaataacaaagatgtaaatggcttatgttgcatttttttcccattttatgctgaatggaaatagctgaatgaatatgtggattaaactatacaracagtactggcaacaaaagtatagcacagtattcactatgtcatttactaacttctgttcccaagctgatttcacattagcagctataacaacagaaggaaatattattaagcaagtagctaacatatrtaaagaaatatggatgtgtctctgggcagcctggtctagtggttggt

SEQ ID NO: 31579 - DNA, 600 bp, Chicken  19866894254047_6
catcaaatggactgatggctcaaatgagaaggcaggaagtacctttgttgggaatgcaaactgtcatgtcttagagagactttttgtcagtctttccagaccaccaaatgcaagatgacacaggtactgttgaacttgctattattcactagcagaaaaaggwgtgcaaatccacraaggagctagaagggttcctgtacaaatattaataacaaagatgtaaatggcttatgttgcatttttttcccattttatgctgaatggaaatagctgaatgaatatgtggattaaactatacaracagtactggcaacaaaagtatagcacagtattcactatgtcatttactaacttctgttcccaagctgatttcacattagcagctataacaacagaaggaaatattattaagcaagtagctaacatatrtaaagaaatatggatgtgtctctgggcagcctggtctagtggttggtgaccctgcccacagcagggggattgaaattagatgatctttgaggtccttttcatcccagacaattctatgattctatgaaatatatcttgttatacctgcatgtaggtatgagatccattttc

SEQ ID NO: 31580 - DNA, 600 bp, Chicken  19866894254047_7
ttgaacttgctattattcactagcagaaaaaggwgtgcaaatccacraaggagctagaagggttcctgtacaaatattaataacaaagatgtaaatggcttatgttgcatttttttcccattttatgctgaatggaaatagctgaatgaatatgtggattaaactatacaracagtactggcaacaaaagtatagcacagtattcactatgtcatttactaacttctgttcccaagctgatttcacattagcagctataacaacagaaggaaatattattaagcaagtagctaacatatrtaaagaaatatggatgtgtctctgggcagcctggtctagtggttggtgaccctgcccacagcagggggattgaaattagatgatctttgaggtccttttcatcccagacaattctatgattctatgaaatatatcttgttatacctgcatgtaggtatgagatccattttcattcatttgtccagacatcagtggattttcaagcatttgcaaacaaatgtcctgagaaatatgagcgtgaaaccaaaaagaaggaacaggatagaaaatgaatgttgaagacagaggtacatcccattg

SEQ ID NO: 31581 - DNA, 600 bp, Chicken  19866894254048_1
ccacagcagggggattgaaattagatgatctttgaggtccttttcatcccagacaattctatgattctatgaaatatatcttgttatacctgcatgtaggtatgagatccattttcattcatttgtccagacatcagtggattttcaagcatttgcaaacaaatgtcctgagaaatatgagcgtgaaaccaaaaagaaggaacaggatagaaaatgaatgttgaagacagaggtacatcccattgggatctattattaaagtacattagtaaaaaagagaatggtcttcttttcttcacwggaaaactggaacgccacacttctgtagaatatgaagtctataacacatgcagtctacagatcactcagatctaartgagaaaggacatttctaagagaaacttttattaggaattgttaatcaacaactgttggaaacaccatattgtttagaactcctgctaagttctaaacacaaaattcctgtataatttttaaaggctatgctagtgtcttcactagttgcagatatgatgtaagcacaccagcaagtggagacaaatgcagtagctgccagctaattaacagacacttgtgaaa

SEQ ID NO: 31582 - DNA, 600 bp, Chicken  19866894254048_2
tatcttgttatacctgcatgtaggtatgagatccattttcattcatttgtccagacatcagtggattttcaagcatttgcaaacaaatgtcctgagaaatatgagcgtgaaaccaaaaagaaggaacaggatagaaaatgaatgttgaagacagaggtacatcccattgggatctattattaaagtacattagtaaaaaagagaatggtcttcttttcttcacwggaaaactggaacgccacacttctgtagaatatgaagtctataacacatgcagtctacagatcactcagatctaartgagaaaggacatttctaagagaaacttttattaggaattgttaatcaacaactgttggaaacaccatattgtttagaactcctgctaagttctaaacacaaaattcctgtataatttttaaaggctatgctagtgtcttcactagttgcagatatgatgtaagcacaccagcaagtggagacaaatgcagtagctgccagctaattaacagacacttgtgaaatttttgttcttctgtaagtagtatactgataatatttatgggactattagataaccaaagttttaaatagtgtggg

SEQ ID NO: 31583 - DNA, 599 bp, Chicken  19866894254060_1
  misc_feature (1)..(44): n is any nucleotide
nnnnnnnnnnnnnnnnnnnnnnnnnnnnnnnnnnnnnnnnnnnntggaagggtctttcacaaattgaagccagatgaggtttcctgacaggctggagttgcagagccccgctgatgccctgtctttaaggtctcgtgctagcactttgcaacatttgcagcacagctcacagccctgggatggaaggatggcatgactgctctcagggccactggtgttcatccccacctcgtattttgctgttagtctaattaatgactgcatggataccacagcaacataaccaccatggctgcaagrctcacagcttgttaagagcaaagattcattttacttcagagagcttgagcctagcttcaagcatggcttsacagatgcaacagtttgaagatgattcaggcatagtcaacatgatggatagactaaaggaaagccaccacagatcaagaaggaaggatggaaaacggtagctgttcttcacaactcataaattaattcagatgttagtactgacaactttaatttcttcctctgctattctgacccttttaattggcctcctctgtggtggctgagaatgctcacacatagaaaaccaa

SEQ ID NO: 31584 - DNA, 600 bp, Chicken  19866894254060_2
cagatgaggtttcctgacaggctggagttgcagagccccgctgatgccctgtctttaaggtctcgtgctagcactttgcaacatttgcagcacagctcacagccctgggatggaaggatggcatgactgctctcagggccactggtgttcatccccacctcgtattttgctgttagtctaattaatgactgcatggataccacagcaacataaccaccatggctgcaagrctcacagcttgttaagagcaaagattcattttacttcagagagcttgagcctagcttcaagcatggcttsacagatgcaacagtttgaagatgattcaggcatagtcaacatgatggatagactaaaggaaagccaccacagatcaagaaggaaggatggaaaacggtagctgttcttcacaactcataaattaattcagatgttagtactgacaactttaatttcttcctctgctattctgacccttttaattggcctcctctgtggtggctgagaatgctcacacatagaaaaccaatcaatgttctcaagttattgatgacttcagtagatttaaaatatcctgtcaaggtttttcccttggtttgg

SEQ ID NO: 31585 - DNA, 462 bp, Chicken  19866894254060_3
gtcaacatgatggatagactaaaggaaagccaccacagatcaagaaggaaggatggaaaacggtagctgttcttcacaactcataaattaattcagatgttagtactgacaactttaatttcttcctctgctattctgacccttttaattggcctcctctgtggtggctgagaatgctcacacatagaaaaccaatcaatgttctcaagttattgatgacttcagtagatttaaaatatcctgtcaaggtttttcccttggtttggcataaggagtctgaagaaaaagtccctccttacrctggactagttctgacttcakgtagggatttcactgaatacaacaaaagagcccctcgctacagtccatgaaaaacaataccactgaccctgagatgctcttttcttcatctcagtagtcagtagtaatgtgaattagatgtctgttaaagatggtaaaaat

SEQ ID NO: 31586 - DNA, 441 bp, Chicken  19866894254060_4
aaggaaagccaccacagatcaagaaggaaggatggaaaacggtagctgttcttcacaactcataaattaattcagatgttagtactgacaactttaatttcttcctctgctattctgacccttttaattggcctcctctgtggtggctgagaatgctcacacatagaaaaccaatcaatgttctcaagttattgatgacttcagtagatttaaaatatcctgtcaaggtttttcccttggtttggcataaggagtctgaagaaaaagtccctccttacrctggactagttctgacttcakgtagggatttcactgaatacaacaaaagagcccctcgctacagtccatgaaaaacaataccactgaccctgagatgctcttttcttcatctcagtagtcagtagtaatgtgaattagatgtctgttaaagatggtaaaaat

SEQ ID NO: 31587 - DNA, 600 bp, Chicken  19866894254073_1
agctttttgtactacactgatttcacatcagtttgattcatttccatcaaactcacaaagtggacgtgttactgaaactctgtgtgtaaggctttcctttacttttcaaaagataattatcattaagattctgggcagtttatacagtctctacagtaaaactaaggaagattcaagaaatgtttcaatgcctaaataactatacttgctttttaataataccaccggtatcaatgggatatgttaatatgtgactgaacctcctcaagagaacgaatgctgtgtgcaggacatggagawgtcagtgcttgcaaagactgtaaagacctaaactgctgtaagctgagcattgtatttggacagctctctttgagactagaactttgttctatgttctttgtcaggcaaactttcaagtagagctactgcatgtgtgtttacagtagtaaatgaagagaatcgtccttgtattgttacgttagcaacagtgcatgaaaaatgctaattgaagtctggcaaaatatttaaacagaacttcatttgtaatgaacttaggaaagatccttcatgttgttcttaataatatccacttcgtggtga

SEQ ID NO: 31588 - DNA, 600 bp, Chicken  19866894254081_1
gactgccccaaggtaggacatcaatttttaccataaatcacttataggaacaataccataaagagaaaacaaaacaaaacaaaaccagtagaaggatgtctctatactctgtatttataacatcaatatgcctcattgcataaatctgtattccggcatgtgctgatcaaattcttatctcatgatatagctataaaagtaaacaaaaatttgaccaaattgcatttgttcaatatacttcctgagagaaaagcaagtagaacttacttggaaagcagagtattcactttataaaaaaamcagaagaaattggtgagtgatcttcasccccctccccccatcaggaataccaaggtcattactgcaaacttagagttggaaaagtacaacaggagggggagtaataagacctaccaagagacctacccacagccataagcaacaggcraatgctgaagctagaaataaaaaacaaacctcagtttccatgttttcaggcctattttatcatttgaggcagcatggcttagtatgtcttgtttatagtgaagaaattaaagtcaaataatgaaacaatcagtattacataactaatattcc

SEQ ID NO: 31589 - DNA, 600 bp, Chicken  19866894254081_2
ttaccataaatcacttataggaacaataccataaagagaaaacaaaacaaaacaaaaccagtagaaggatgtctctatactctgtatttataacatcaatatgcctcattgcataaatctgtattccggcatgtgctgatcaaattcttatctcatgatatagctataaaagtaaacaaaaatttgaccaaattgcatttgttcaatatacttcctgagagaaaagcaagtagaacttacttggaaagcagagtattcactttataaaaaaamcagaagaaattggtgagtgatcttcasccccctccccccatcaggaataccaaggtcattactgcaaacttagagttggaaaagtacaacaggagggggagtaataagacctaccaagagacctacccacagccataagcaacaggcraatgctgaagctagaaataaaaaacaaacctcagtttccatgttttcaggcctattttatcatttgaggcagcatggcttagtatgtcttgtttatagtgaagaaattaaagtcaaataatgaaacaatcagtattacataactaatattcctctttttcaatactgtgcttcgcagat

SEQ ID NO: 31590 - DNA, 600 bp, Chicken  19866894254081_3
tattccggcatgtgctgatcaaattcttatctcatgatatagctataaaagtaaacaaaaatttgaccaaattgcatttgttcaatatacttcctgagagaaaagcaagtagaacttacttggaaagcagagtattcactttataaaaaaamcagaagaaattggtgagtgatcttcasccccctccccccatcaggaataccaaggtcattactgcaaacttagagttggaaaagtacaacaggagggggagtaataagacctaccaagagacctacccacagccataagcaacaggcraatgctgaagctagaaataaaaaacaaacctcagtttccatgttttcaggcctattttatcatttgaggcagcatggcttagtatgtcttgtttatagtgaagaaattaaagtcaaataatgaaacaatcagtattacataactaatattcctctttttcaatactgtgcttcgcagatgaggatgggaagacagatgtrtttataatgttcgatctgctgaatctgaaaaataatgcttagactgcttaacctaaatacagtaatcaactcatggagttgccacagtattcagagtatc

SEQ ID NO: 31591 - DNA, 600 bp, Chicken  19866894254081_4
accaaggtcattactgcaaacttagagttggaaaagtacaacaggagggggagtaataagacctaccaagagacctacccacagccataagcaacaggcraatgctgaagctagaaataaaaaacaaacctcagtttccatgttttcaggcctattttatcatttgaggcagcatggcttagtatgtcttgtttatagtgaagaaattaaagtcaaataatgaaacaatcagtattacataactaatattcctctttttcaatactgtgcttcgcagatgaggatgggaagacagatgtrtttataatgttcgatctgctgaatctgaaaaataatgcttagactgcttaacctaaatacagtaatcaactcatggagttgccacagtattcagagtatctgccaagcagcaccactaaagattctgtaaagcagaattctgctgaatgtgctcataaatattagaatattcttgatatgctaggctgaaaacattccatctgagctgcaagcaaccagcaccgcatatcaatttttagaaaatgctagcatttgtatccagagatactaccagctacacaaagtgacaagatactgaaa

SEQ ID NO: 31592 - DNA, 600 bp, Chicken  19866894254082_1
aatgcacaagcaagattgggacttgcgcgaggctagcaaggggtgggtcacagtactgtgagtgtctgtaaggtatgcaaagcacatctggtaaatggataaaaaaaattaaagcagtggtggatgataaatgaaagtacattaaaaagagaagtttggcagggtgtctgacgcagctgcctttggtagagactgttttggactttatactaatgctctggtgaaagcactgctcaccaaagcacaacggatgggcctgtaaagtaggctggaggctctgagaggggttttcctcatttrggaatacaggggcagcagtccaaagagccatcctcacatcagcagtttgaaaagagagatttgctgatgtccaagcccaaaggagaaaggtcagactgtcacccagtgatccttatccaaagtgcccaagagccttcaagggctgtccctactggggacatacagcactgtatgcttacagaaatgcatccaagagtctttgatcgaatctatccttgagcagcactgtgcagaagcacatcacagcagagggaatataacaagagcagtgtctttacttgctgaccctctcacacgggc

SEQ ID NO: 31593 - DNA, 600 bp, Chicken  19866894254084_1
tcttcatgcactcgtacacacagctcccatgaagggggaggtacaacacagcagaaatagagacagtcacagcagagagggccaagcaaaagcattacttggcataaagtgttttattagactagtatctgaattaaggtctgtgcgctgttaaactctcacagaagatgctgagagcattccaattaattttagactccatttagtaacttgaaaccattgggcaagcaatcatcacaacatcctgcaaagaactttgcacagctcggcactacataacgcaagtactcaccctccaawgggaggtacaaagagygctgaagttgaccagtccttagctgtgaattcccagggtctggagccgcatgccaaggtcagaaggtttcacccaaactcagaggacaaggctgccatggcccctgcctgcaggcccaggcccctccctgaggctgcccagagaaagcatggaggtcagctcctgcatggtggcactgagagccaccagaggtctctgagagggatgtgtcactaatggaacccatagaagggacctgctgccatcttttcaggtaggatccacatcacagggcagtcagaggt

SEQ ID NO: 31594 - DNA, 600 bp, Chicken  19866894254084_2
cacacagctcccatgaagggggaggtacaacacagcagaaatagagacagtcacagcagagagggccaagcaaaagcattacttggcataaagtgttttattagactagtatctgaattaaggtctgtgcgctgttaaactctcacagaagatgctgagagcattccaattaattttagactccatttagtaacttgaaaccattgggcaagcaatcatcacaacatcctgcaaagaactttgcacagctcggcactacataacgcaagtactcaccctccaawgggaggtacaaagagygctgaagttgaccagtccttagctgtgaattcccagggtctggagccgcatgccaaggtcagaaggtttcacccaaactcagaggacaaggctgccatggcccctgcctgcaggcccaggcccctccctgaggctgcccagagaaagcatggaggtcagctcctgcatggtggcactgagagccaccagaggtctctgagagggatgtgtcactaatggaacccatagaagggacctgctgccatcttttcaggtaggatccacatcacagggcagtcagaggtgtgccaagatcaactg

SEQ ID NO: 31595 - DNA, 600 bp, Chicken  19866894254084_3
ccctccctgaggctgcccagagaaagcatggaggtcagctcctgcatggtggcactgagagccaccagaggtctctgagagggatgtgtcactaatggaacccatagaagggacctgctgccatcttttcaggtaggatccacatcacagggcagtcagaggtgtgccaagatcaactgtgacattcagggacaaccagcggcagacatttacccacagccccagtttgcaaggtgtatgtttctgcctgaaaccacagcacacaaaaccagcggtttccactgacatactgcaaccacrtgccagcacaacacaggaagtgcttacctccagttttccacctagtgggcctttacattgcctgttgccttgccttgtataatttttctggaaaaaaataacaacactgaatggccagcctgggaggacaggaagatcccagatggtgttagctgtcgtagctttacttcagtgccatgacgactcacagcagctgagggcctgctccactccattagatcacagtgactgttacgttatgtttgaatgcctgttttctggactcacgtagctccccagctgcagcagggaagctctgat

SEQ ID NO: 31596 - DNA, 599 bp, Chicken  19866894254086_1
  misc_feature (1)..(122): n is any nucleotide
nnnnnnnnnnnnnnnnnnnnnnnnnnnnnnnnnnnnnnnnnnnnnnnnnnnnnnnnnnnnnnnnnnnnnnnnnnnnnnnnnnnnnnnnnnnnnnnnnnnnnnnnnnnnnnnnnnnnnnnnnnctgggtggtaatattttatgagtagcactgagcaagctaaaagaaaaagaaggagaaaaaaagaaagcaggattaaaagcagaactttccccacttgtcctccggcataatcctcatggcattttcagtaagttaaaaaataataatttggaactgaacaaattcatttattgggccktagatttctgagagacatttgctgaaagcatcaatctgctcttcaatgcattatataatgtgatatctttatcctctctagcctagcactggcatgggatgtacgaagcctggattcgccttcctgttagtctctctctcataaatgcccaggaaaggatgaggcacaggtgttcacaacatggtccccttgttcagtatgctgtacaaacctcctgtctggtaaacgctcttcagaaaagagttgtgaacagaaawtatatatgtgggtgtttgcattcaagctggttatgtttgtgc

SEQ ID NO: 31597 - DNA, 600 bp, Chicken  19866894254086_2
aaaaataataatttggaactgaacaaattcatttattgggccktagatttctgagagacatttgctgaaagcatcaatctgctcttcaatgcattatataatgtgatatctttatcctctctagcctagcactggcatgggatgtacgaagcctggattcgccttcctgttagtctctctctcataaatgcccaggaaaggatgaggcacaggtgttcacaacatggtccccttgttcagtatgctgtacaaacctcctgtctggtaaacgctcttcagaaaagagttgtgaacagaaawtatatatgtgggtgtttgcattcaagctggttatgtttgtgcactacttctctttcaagatggtattgatctagtatgactttctagagaatatttttattctgatatggatcattggcacaaccaaggtggtgaaaaatggcatcgattaggatagagatctaatgttgcacagaatattttctgccagtgttcctggacagtgtaaaccatttraactttgtctgttaacaacctgttcctctccttgtctccattaattttgctagctgtaatcatacatccttaattccattcaga

SEQ ID NO: 31598 - DNA, 600 bp, Chicken  19866894254086_3
tcacaacatggtccccttgttcagtatgctgtacaaacctcctgtctggtaaacgctcttcagaaaagagttgtgaacagaaawtatatatgtgggtgtttgcattcaagctggttatgtttgtgcactacttctctttcaagatggtattgatctagtatgactttctagagaatatttttattctgatatggatcattggcacaaccaaggtggtgaaaaatggcatcgattaggatagagatctaatgttgcacagaatattttctgccagtgttcctggacagtgtaaaccatttraactttgtctgttaacaacctgttcctctccttgtctccattaattttgctagctgtaatcatacatccttaattccattcagatttctttcctctgagaaggtaggctagctggaaataaaaaataataataacaaaagaagtaaaaatgtcaccactaggtaaagtacctggagacttaacactttactatagaaaggagtaattgcaacaatatgaatctcattgctttgccaaacccaccaagacattaacaagtctttacccctctagagacaaaaatcttattttgatctgttg

SEQ ID NO: 31599 - DNA, 600 bp, Chicken  19866894254087_1
ccattaacgccacattccttagtacaacatctgaatgtttcttgaacacctccagggaaggtgactcaaccaccttcctgggcagcttgttccagtgcctgaccaatcttttggagaaatttttcctaatatgctacctgaacctcccctggtacaacttgtggccattccctcttatcctattactagttacgcaggaaaaaaagctgaccccaaccttgccacagcgttttctgtgagcctgctcttctccagactgaacaatcccagttccctcagctgttcctcataaggtctgtkctcctagcccctcaccagctttgctgcccttcaatggacatgctccagggcctcagtatctttcctgtagygaagggccccaaactgaaaacagtactcaaggtgtggcctcaccactgctgagtacaaggatatgtacttgtactctgctgtcaacactatttctgttacaagccaggatacccttggtcttctaggttgcctgggcacactgctggctcatgtttagctgatcatcaaccaacactgtcaggtccatttattccacacagtcctccagccgctctgcccgaagcctgt

SEQ ID NO: 31600 - DNA, 600 bp, Chicken  19866894254087_2
accttcctgggcagcttgttccagtgcctgaccaatcttttggagaaatttttcctaatatgctacctgaacctcccctggtacaacttgtggccattccctcttatcctattactagttacgcaggaaaaaaagctgaccccaaccttgccacagcgttttctgtgagcctgctcttctccagactgaacaatcccagttccctcagctgttcctcataaggtctgtkctcctagcccctcaccagctttgctgcccttcaatggacatgctccagggcctcagtatctttcctgtagygaagggccccaaactgaaaacagtactcaaggtgtggcctcaccactgctgagtacaaggatatgtacttgtactctgctgtcaacactatttctgttacaagccaggatacccttggtcttctaggttgcctgggcacactgctggctcatgtttagctgatcatcaaccaacactgtcaggtccatttattccacacagtcctccagccgctctgcccgaagcctgtagcgttgcctgaggttgttgtggccaaagtgcaggacccgacacttggtcttgttaaacttcatcccattg

SEQ ID NO: 31601 - DNA, 600 bp, Chicken  19866894254087_3
ggccccaaactgaaaacagtactcaaggtgtggcctcaccactgctgagtacaaggatatgtacttgtactctgctgtcaacactatttctgttacaagccaggatacccttggtcttctaggttgcctgggcacactgctggctcatgtttagctgatcatcaaccaacactgtcaggtccatttattccacacagtcctccagccgctctgcccgaagcctgtagcgttgcctgaggttgttgtggccaaagtgcaggacccgacacttggtcttgttaaacttcatcccattggcaycagcccataatctagcctgtccagatccctctgaagggtcttcctatccccaggcagcttgatacttcctcccagcttggcattatctgtgaacttactgaggatgcactcaacccctttatccagatcatcaatctgtattaaacagaacaggccccaataccgacccctgggccgtgccacttgtgactggtcaccagctggatttaactccattcatcatcactcaccgggtctggtcctccagccattattttacacagcaaagaacgtacctgtccaaacatgggctaccagttt

SEQ ID NO: 31602 - DNA, 533 bp, Chicken  19866894254087_4
tcatagaaggagattaggttggtcaaaccagacctgcttttcaagaacccatgcaggcagggcctgatccctcagttgtcccacctgtgctgtgtgatctcactcaaggtgatcagttccataatctttcctggcaccaagttcagactgacaatcctgtagttctctgaatactccttatgacccttcttgtatactggaaagcctctaatcctctcagatctctctaaatgaccagaaatgctgatagatggtggaaagcagcttgggaatcacttctgccagctctctcagcacccrcaggtggatcttatctgtccccacatacttgtgacagtccaggtggtgtagtaggcctgcaacagtttccatctgaatcacaggggaattattctgctccccatctgagacttccaggttgggggtagagtactccaaggataactggtctggcttttaaagacaggtgtaaagaaggcattgagaacctcagccttttccttaccgttggtggtcatgtttcccaccacatt

SEQ ID NO: 31603 - DNA, 600 bp, Chicken  19866894254091_1
caggattcactgccatagaaaggggctccccgctctcccggagatatttacttcccttcggggacggcattcctggagccgatagctcatcgtgaccctgtcctggagttaattagactactgtataatggggagattcacccggagattacatgcggcgatctctcaccacacacgctgtttgctgagcgctttggggctcttggcaagcacaaaagcacaaatgcaagcagtggtgaattgggcagggggtgggggctgagtcctcccgcatcccagccgtgcacgcatcagagagcrcaaatttggccgcggaggtgaaattagaagaactggagcaatgaggcagaacagacaggtgatggtcgctggtgttagctgcacactggtgtctcagctcaacgcatggcacagagatcaggcacctagccatcagccagtgtcttgtaggactacctctggtgtaccccagaacacatccaaggccttttcccagtactggagatccaggctctgccatgaattaaagccagactgtgcgtgtgagggggaaggcatccctgccaggctggggggccatctgcctgccctgcacactgg

SEQ ID NO: 31604 - DNA, 600 bp, Chicken  19866894254092_1
aatttcagacagttctgcccaattccagataggtaggtaagatgttacgtggggctcacatactagaaatgtctatcttcctgaccccagcctaatctttagcaacacctttgcatgcaaagtaggatcaactgcacagctgtggttgtaaacccttagtcacgtgcaccctccttctcctttcttgccagtgcttttacttttctgagcacgtctttactggtaacgttgactgaaagctagagatggatggctaacaagtcagctggctcagctgtacagacatcaatactgttagtsagcagcaaacatagccctggcagcagtcaaactcctctggaggttaatgctcttttgcaacaacgaagggcaaatattccagcatagctgctttcaaacatgaaggggaaaatttacaacttcagttgtgtgaacatagagaaaatgattataattgctattgaaaaatttgcrttactctgcttactgcatgtatttggccaacattctgctttgaagcagaactgcctgcaggtttgggccaaatttgagagtggctttggttaacagcaaaacaaaacagacaaaaaaccaacaaaa

SEQ ID NO: 31605 - DNA, 600 bp, Chicken  19866894254092_2
ttctcctttcttgccagtgcttttacttttctgagcacgtctttactggtaacgttgactgaaagctagagatggatggctaacaagtcagctggctcagctgtacagacatcaatactgttagtsagcagcaaacatagccctggcagcagtcaaactcctctggaggttaatgctcttttgcaacaacgaagggcaaatattccagcatagctgctttcaaacatgaaggggaaaatttacaacttcagttgtgtgaacatagagaaaatgattataattgctattgaaaaatttgcrttactctgcttactgcatgtatttggccaacattctgctttgaagcagaactgcctgcaggtttgggccaaatttgagagtggctttggttaacagcaaaacaaaacagacaaaaaaccaacaaaatattacttaaattttaaatttatagacaaaaagttaatctttaagatccaaaaactcaaacaatatttcttgctttcctgtaaaccatgctggtccctcttctggggttttagcacatgctgataaagatcatgccaataatttcactcttctggggatatacacatcagttta

SEQ ID NO: 31606 - DNA, 600 bp, Chicken  19866894254095_1
tgcgccccgagggacagagcaatgttctccagcacagtcacagctccgttccccctgtctctgcagccaccatttgaggcttcccagctctgctcttccagcaaatcccaaacaatggctttggttttgctcactgtggtagcgagcatcccacagacctgctgcccccacccagccaggaggctgggataaccccaaagctgctcctcctgctcccccaggtggaggcacggcaaagcccaggtcctgatccacccagcttggcctctgtaagacatttcagcccaggaaacgaagcgrtgaagcagagaggaaatcccagcgctccctcggggctgtgcaggaacccttcacctcccagccccagggtgtgygctcctacattgctaattaacgtccatttgctacccaaaatagggcagggaggatggcttcccatagaacaccagcagtagggcaagagctcacatttcagcccactccacaacacggagaccccaacatgagcacccacattgcctctcccacggccacatcccagcccrtgcccacagctgccccagcygtcctcttggctcctccaaggccacgagaaggggc

SEQ ID NO: 31607 - DNA, 600 bp, Chicken  19866894254095_2
tgaggcttcccagctctgctcttccagcaaatcccaaacaatggctttggttttgctcactgtggtagcgagcatcccacagacctgctgcccccacccagccaggaggctgggataaccccaaagctgctcctcctgctcccccaggtggaggcacggcaaagcccaggtcctgatccacccagcttggcctctgtaagacatttcagcccaggaaacgaagcgrtgaagcagagaggaaatcccagcgctccctcggggctgtgcaggaacccttcacctcccagccccagggtgtgygctcctacattgctaattaacgtccatttgctacccaaaatagggcagggaggatggcttcccatagaacaccagcagtagggcaagagctcacatttcagcccactccacaacacggagaccccaacatgagcacccacattgcctctcccacggccacatcccagcccrtgcccacagctgccccagcygtcctcttggctcctccaaggccacgagaaggggcacacgaggaccacagggtggagggtgatgatcccaaggaagggctcagcagcagctgaactcagtctcccactt

SEQ ID NO: 31608 - DNA, 600 bp, Chicken  19866894254095_3
cctgatccacccagcttggcctctgtaagacatttcagcccaggaaacgaagcgrtgaagcagagaggaaatcccagcgctccctcggggctgtgcaggaacccttcacctcccagccccagggtgtgygctcctacattgctaattaacgtccatttgctacccaaaatagggcagggaggatggcttcccatagaacaccagcagtagggcaagagctcacatttcagcccactccacaacacggagaccccaacatgagcacccacattgcctctcccacggccacatcccagcccrtgcccacagctgccccagcygtcctcttggctcctccaaggccacgagaaggggcacacgaggaccacagggtggagggtgatgatcccaaggaagggctcagcagcagctgaactcagtctcccacttccacccccattttatcagcgcgttgggctgcaggaggaagtgagttcagccagagtttgtctaaacaattatattttatcagaaatgctgctcagatagactccatttttctcagggcagatctggataactgcaaggtaatctccattctccttcctatctgcacaggat

SEQ ID NO: 31609 - DNA, 598 bp, Chicken  19866894254095_4
ctctgtaagacatttcagcccaggaaacgaagcgrtgaagcagagaggaaatcccagcgctccctcggggctgtgcaggaacccttcacctcccagccccagggtgtgygctcctacattgctaattaacgtccatttgctacccaaaatagggcagggaggatggcttcccatagaacaccagcagtagggcaagagctcacatttcagcccactccacaacacggagaccccaacatgagcacccacattgcctctcccacggccacatcccagcccrtgcccacagctgccccagcygtcctcttggctcctccaaggccacgagaaggggcacacgaggaccacagggtggagggtgatgatcccaaggaagggctcagcagcagctgaactcagtctcccacttccacccccattttatcagcgcgttgggctgcaggaggaagtgagttcagccagagtttgtctaaacaattatattttatcagaaatgctgctcagatagactccatttttctcagggcagatctggataactgcaaggtaatctccattctccttcctatctgcacaggatggaaacgggaggacatgg

SEQ ID NO: 31610 - DNA, 600 bp, Chicken  19866894254096_1
aattaccctggctgaactgccgtctgtctgggtcgggagcctgcatctacctccccctgcaccagtgcacgtcatcgtgtgaacatcaagtactttctgctctggctttctccatcagctcacgttgctcaggacagagcagtcaacagggaatacgaggccccatgatgttaggtgtttcaagacatcaataacgccaggaggaattgatttattttgcagataagaaggaaattcagagtgatttatccaaattcgagcagagttattttaattcctgactcttccagtactgttcarcacctttttcaacaggaatgtgaactccgatggttgacctcccagagaagatctaaatcaacatttcattgattctcaaagctaaaggatggtgaacgttttccctgttggatggtacacaaaaagcagtgaggagccaaaggttatgagaaagccacctggagagatggttaggaagaggaggtgttcttcaccttgaagacattttcttgtgctcatctcagcacacggccatgttgtgtcccacacctggccaggccataggctgggcagccacagaggattggcatggatgaggaa

SEQ ID NO: 31611 - DNA, 600 bp, Chicken  19866894254099_1
gatgaaagctcagagttgaaccaaacctgtttcggagcagttttagactgaaacgtttctgtgtttcccactctgacatcctgaaattcctcgtggaaggaatctttgccctctgcatggcctcctatagtccagacagatgaatgcatgagatggagaaggaaggaggagaatgaggaggcagtgtggagcagaacggcaatcctgggaaaggatcctggtccagttgctatggatggtaggatgtggtcctacaacctcccccacaggatgtgtgggtccgggactggcccaagcacrtgtcccactcctgatgcagcccggggtgtacagaggttgtttttcaccgaatggaggtttttccctgaggtttgtgcaagatgctctcagagagagctataaataccgcagtgcttcctgtgcggctctgcgaggaggaagctgcttccccagcaggggaaggaggcagcgggcgtcccggtgggtgcaggcagctgtgtgtgttgggggcttgggggggggtcctcctcgtgcacccctctttctgtgctggggatgggatgctcgggtggagctctgctgctctgcatcagactggat

SEQ ID NO: 31612 - DNA, 599 bp, Chicken  19866894254110_1
  misc_feature (1)..(50): n is any nucleotide
nnnnnnnnnnnnnnnnnnnnnnnnnnnnnnnnnnnnnnnnnnnnnnnnnntcctgactcttaaaagagatctgctctgctcacaggtcttacactcccagactgtgtagttaagaaacaaacaatacattaaaaacattcaaataaaatacagcacaagcagatacaatcacacactaaatcagttgattctttttttttcctcccccctcctctctcaccgtatttgaaatttcactttggcacaactactgctccactaccaactccccctccaaaacctgattacttcagaaggatygaggcagtatggtttccacctcttgctggctggcacggctcctatcccctctttcacacctctcaatttggtactttcggagttcagccagacttcaggaagctgcaacatctgatcacctgctctggtacaccattccttttctctgtgttcttctccctcccccttttttttccctctcagacatctgttccaccatctccttaaaaaaggttaaaccaaatyacttgattttcaacatatactgatattttaccatttttgctaaaagcttccatcttctcctaatagtgggagca

SEQ ID NO: 31613 - DNA, 594 bp, Chicken  19866894254110_2
ttgaaatttcactttggcacaactactgctccactaccaactccccctccaaaacctgattacttcagaaggatygaggcagtatggtttccacctcttgctggctggcacggctcctatcccctctttcacacctctcaatttggtactttcggagttcagccagacttcaggaagctgcaacatctgatcacctgctctggtacaccattccttttctctgtgttcttctccctcccccttttttttccctctcagacatctgttccaccatctccttaaaaaaggttaaaccaaatyacttgattttcaacatatactgatattttaccatttttgctaaaagcttccatcttctcctaatagtgggagcatttgcagttgtaaacatctatctacttcagtagacattcacattctccttctcttcaggctgctcttctacatcatttttattctcttgactttatctcagtctttcttccctttcacacctattccacaatcctgggcctcatcactacaacagccgcatcacaccttttccttgctttatttttccactacaagtaatctgtataaaaaccaacaatt

SEQ ID NO: 31614 - DNA, 599 bp, Chicken  19866894254116_1
  misc_feature (1)..(46): n is any nucleotide
nnnnnnnnnnnnnnnnnnnnnnnnnnnnnnnnnnnnnnnnnnnnnncatccagaagccacttaaaacatcagaatgggcaagcaacactttgagacgtttatctagaatcatcagaagcaaatcactatctcatgattgctttgaatataatgactataataacttatattgtgatggatgtaaaaagatgagacaagcaagggtaagttatgtcaacagataacaagtcgacttggaagtcagatcttgctctgtttctataatattcagtcaggttactgcttcacaaataaacctcwtttcctcttcaaacccttrtttaccactgcacttttcctacaacttatttataaagaatggagggcagataagagtgttggctgcacaattcttattcatcacattcatgaatttttgaaatctcaggtgaatatggtgggctgcagggtcattttaagcaaattagcaaatcaagcatgctgaaattcctgtgcaaatgaagttcttgggaattcattctgtttaggagtgattcagctcagattaccagtttattccatatacttcagtgtcactctttcaacaactcaacattcta

SEQ ID NO: 31615 - DNA, 599 bp, Chicken  19866894254116_2
  misc_feature (1)..(27): n is any nucleotide
nnnnnnnnnnnnnnnnnnnnnnnnnnncatccagaagccacttaaaacatcagaatgggcaagcaacactttgagacgtttatctagaatcatcagaagcaaatcactatctcatgattgctttgaatataatgactataataacttatattgtgatggatgtaaaaagatgagacaagcaagggtaagttatgtcaacagataacaagtcgacttggaagtcagatcttgctctgtttctataatattcagtcaggttactgcttcacaaataaacctcwtttcctcttcaaacccttrtttaccactgcacttttcctacaacttatttataaagaatggagggcagataagagtgttggctgcacaattcttattcatcacattcatgaatttttgaaatctcaggtgaatatggtgggctgcagggtcattttaagcaaattagcaaatcaagcatgctgaaattcctgtgcaaatgaagttcttgggaattcattctgtttaggagtgattcagctcagattaccagtttattccatatacttcagtgtcactctttcaacaactcaacattctaggaagatgaacaggtctgc

SEQ ID NO: 31616 - DNA, 436 bp, Chicken  19866894254120_1
tgtaggttcactgatttttgtattagtgacttgtgactagtgactgtggatgggcaaggatgcaaatttggagaactgacaatgatttctttggaatcctttctcatagctattgtacacaaacaatataaaacagcaaatcagtctattgttcagataagaatgtaatttaagatgtttttttttaatggtgtaatatttttgttcttgtcttggcaaaatagtttgcagaaaataaaaacagactttgcatgttaaaacagtttgctagatgtcagatctgaccatgtgaaggccagycctgcaaaccattgccactgaatgtactatgttctggtaattctgactggaaaatgacccaggtctatgtgacatgcacactcaaagacatgctttattcatgctgacttttaaaatctggggcacaacatatagt

SEQ ID NO: 31617 - DNA, 600 bp, Chicken  19866894254123_1
atcccatgtcactccacgttctccatccatagtaccctattttctccattccacagtacctcgtattcccctctccttggcaccccatgttctccatctcctagcacaccactttgtctattccatagcagcccacattctccaccccgcagtccatcatgttgcccatcctatggcatctcctgttttccatccgatgacacccaacattctcccttccatggcaccctgtgttccacaacccacagtaccctatgttctgtatgccccccatcaggaaattctccatttcctgacacmctgtgttatccatcctacagtacaccatgttgtccatcccatggtaccccgcattcaacatcccttgccaccccatattctctatcccacagtaccccatgttctccatccgtagtaccctatgttctccatttcacagtactccatataacctactccttggcaccccatgttctcttggcaagcatgttctctaccccatggcaccccacattctcatcccatgatacatcaccatgccctatgctgcattaccatgtcatgtgctcccacctgacgccccatatccaagccatgacc

SEQ ID NO: 31618 - DNA, 599 bp, Chicken  19866894254124_1
  misc_feature (1)..(204): n is any nucleotide
nnnnnnnnnnnnnnnnnnnnnnnnnnnnnnnnnnnnnnnnnnnnnnnnnnnnnnnnnnnnnnnnnnnnnnnnnnnnnnnnnnnnnnnnnnnnnnnnnnnnnnnnnnnnnnnnnnnnnnnnnnnnnnnnnnnnnnnnnnnnnnnnnnnnnnnnnnnnnnnnnnnnnnnnnnnnnnnnnnnnnnnnnnnnnnnnnnnnnnnnnnnnataagggatattgctagactggttacttccccactaagcccactaaagtcaatgaatttgacaacagaaagcagtaggtcatgagaatgcatgtaygtgtgctgttgggcccaaccaagagggtgtatgtcaccaaaagctggaacagagatgaaaaaaacccttcccaggagcaaggggacatactgtagccttgtaaaagacagcaggcaatcactcagggatacaaaggtaaatcatggagaaagcgaggcctgctctcttataccatctgtgtggtttctcaaacctgaaattaagggattaaaagcagtattgctaaacaggagagcagatagcatagcttgtagcacatgtaacttgagaaataaagcttcacgctggtgaaggagagg

SEQ ID NO: 31619 - DNA, 600 bp, Chicken  19866894254124_2
atggagaaagcgaggcctgctctcttataccatctgtgtggtttctcaaacctgaaattaagggattaaaagcagtattgctaaacaggagagcagatagcatagcttgtagcacatgtaacttgagaaataaagcttcacgctggtgaaggagaggacgtgggacaggagagggacctggtcatgctgtgaccctttgacaagtacactgaaagcaggaggggaccagactctttgtcggatcagctgctttggcagggttttatcggctgccagaggatgaaggaaagctccaaagcrgagctgtagctgggagtgagggggctggaagccctggcaagcagggtggggaatgggaccccggtacatcactgtggtgtgctgcaagctccagcatgcagctgaggctgagacttgaaatacccttctaaagtgctctgagtgccagaaatacttcccagcctcattccaagcactagggaagtctggcaggagtgaaagcatccattgattgtgtgccgtgcggaggcagcgtggggatcagaatcccagatgagagagggcattgaggcagtcaaaaagatgccacccaaacctcag

SEQ ID NO: 31620 - DNA, 599 bp, Chicken  19866894254126_1
  misc_feature (1)..(20): n is any nucleotide
nnnnnnnnnnnnnnnnnnnntccccttgctcctgggaagggtttttttatctctgttccgcttttggtgacatacaccctcttggttgggcccaacagcacacgtacatgcattctcatgacctactgctttctgttgtcaaattcattgactttagtgggcttagtgggaagtaaccagtctagcaatatcccttatgggaaagtttgacgttgcaagttttagtctttgtgtaaaatttcctgctcttctactcatttgtgtggctgtggttagttttgcattgatgatcactgcatrttttcatagtcagacccttaaacattagcacaatgtcttgttgcagattgctcgtattgtttccataacaatcactcacattctaccttagcttcccaactttttcctttctgaaggtttggtggttgcttctagctgggagaattccacatgtgcaccaaacctgtatttttattgtccctagcagaagagactttccccctttttgtgtgtttttcttctgcctgctttcttagaacgatrgtatcattaatggtggttgagtcaccgtccctggacgtgtttaagagccgtttgga

SEQ ID NO: 31621 - DNA, 574 bp, Chicken  19866894254126_2
tgctcttctactcatttgtgtggctgtggttagttttgcattgatgatcactgcatrttttcatagtcagacccttaaacattagcacaatgtcttgttgcagattgctcgtattgtttccataacaatcactcacattctaccttagcttcccaactttttcctttctgaaggtttggtggttgcttctagctgggagaattccacatgtgcaccaaacctgtatttttattgtccctagcagaagagactttccccctttttgtgtgtttttcttctgcctgctttcttagaacgatrgtatcattaatggtggttgagtcaccgtccctggacgtgtttaagagccgtttggatgtggtgctcagagatatgatttagcagagggttgttagagttagggtactatggttaggctgcggttggacttgatgatctggtgaggtcctttccaacctgagtaattctatgattctatgattaaggttggaaaagaccactaagaccgtctagtccagctatcaacccatcaccacccacacatgcccactaagctttacttcggcatttccag

SEQ ID NO: 31622 - DNA, 600 bp, Chicken  19866894254127_1
cttctccccttgtttccacccagtgtagccagttttgggatgaacgtgagctgggaacgtctagaaatagaactctgcaggtggaactctgcttgatatgtcacagcaccgagtgaactattatcatctgcttaaaggcatgtgtggacggcaaatagggtattgctatgattcatgatgttacagtgtgagacctcataaatcttcttacatccgcctcatacttagttcacacacttactccagccactggaatttattcttagctcttttttgtttttattttttgagttgctatgytatgttaaatagaatcagyaggggactctctcctgagttggagttgtgcttggtttgttatcttacatgactcttcttgagccactttttacttcctgagttaatgtacatctgtcgttttcaggaagtcagtgaatactcatgatgggaagacctgcccatatcttacatatctgtccataccttatttagctcctgctagggatctgcgtgtgttttgttctatgtagtcaagcctaaggaaaagaacttgaactgtatgtttatagaaggcaaatgaacctttttgttagtttttat

SEQ ID NO: 31623 - DNA, 600 bp, Chicken  19866894254127_2
ccagtgtagccagttttgggatgaacgtgagctgggaacgtctagaaatagaactctgcaggtggaactctgcttgatatgtcacagcaccgagtgaactattatcatctgcttaaaggcatgtgtggacggcaaatagggtattgctatgattcatgatgttacagtgtgagacctcataaatcttcttacatccgcctcatacttagttcacacacttactccagccactggaatttattcttagctcttttttgtttttattttttgagttgctatgytatgttaaatagaatcagyaggggactctctcctgagttggagttgtgcttggtttgttatcttacatgactcttcttgagccactttttacttcctgagttaatgtacatctgtcgttttcaggaagtcagtgaatactcatgatgggaagacctgcccatatcttacatatctgtccataccttatttagctcctgctagggatctgcgtgtgttttgttctatgtagtcaagcctaaggaaaagaacttgaactgtatgtttatagaaggcaaatgaacctttttgttagtttttatgctcttgagtatgcagttg

SEQ ID NO: 31624 - DNA, 599 bp, Chicken  19866894254136_1
  misc_feature (1)..(12): n is any nucleotide
nnnnnnnnnnnncatatcagcacagatttttccagatggctgtgacttgactgcaggctaggagcaagtggggtgttttccttctctactggggattttgcctgttctctggatgcttccaaacagtttctatctctgggtggctttaaagatcttaaaagactgcgcccgtggagatgcaccagtttggaccaaatagtaggtattatcccaaaatatttgctcaaggagaggtaacctctcagaccccctgtaaggattttatcccctcatcttcaaatggcacagttcaaacacacrgctaatgacacatgtaatgatgrtaaaatggaagtgctgctgcaaagaggaacgtttaaaaataatgatatacctctaactaggacttacaaaaggaagtcttaaatagctggagagaaacagatgctttgggggacttgtggataaaaatagtggctttcaaattgcaaccaaaacaaaaatgtggccttacttagtcaacctcagtgctagaaattcctctaaaaaccatagagcccagagctgggaaaggatgtgaaatacctgctgctgcacccgcagtggtttcagcatatttt

SEQ ID NO: 31625 - DNA, 600 bp, Chicken  19866894254136_2
agatttttccagatggctgtgacttgactgcaggctaggagcaagtggggtgttttccttctctactggggattttgcctgttctctggatgcttccaaacagtttctatctctgggtggctttaaagatcttaaaagactgcgcccgtggagatgcaccagtttggaccaaatagtaggtattatcccaaaatatttgctcaaggagaggtaacctctcagaccccctgtaaggattttatcccctcatcttcaaatggcacagttcaaacacacrgctaatgacacatgtaatgatgrtaaaatggaagtgctgctgcaaagaggaacgtttaaaaataatgatatacctctaactaggacttacaaaaggaagtcttaaatagctggagagaaacagatgctttgggggacttgtggataaaaatagtggctttcaaattgcaaccaaaacaaaaatgtggccttacttagtcaacctcagtgctagaaattcctctaaaaaccatagagcccagagctgggaaaggatgtgaaatacctgctgctgcacccgcagtggtttcagcatatttttctgtcttccaccttgccttattt

SEQ ID NO: 31626 - DNA, 600 bp, Chicken  19866894254138_1
agcctttagaaccagtcctaggaatgccagtcaggaagttaacctagtgaccattagagccaaaacagcaacttaccttctgcacattaaatatctctcctaaattaatctcacagaaatctttcctaagatctaaaaatttccctcagcttgttgattcattttgctcttttgggacctatctagaacttacaagcaagcaaggcaagaaaaacaccatgagaggctgtttttgtggtatttaccatttgaccagaaagaatcatagaaatctcctagagatatttacattcaagaggyttgcatagcaagagagcttttgagtgctttctctgaaacagcttaaatgccaactttttttyatttcatccccaatagaatagaaaatatctcaatttataccaagaacaaaaataaagaagtaaaccatagctaatattgtatggagatacaacggcattaaaaagcccttcttcacaaagtatgagcaggtagaaggctggagtaatatactcttcagcagaatagtcacagttacacagaatcacagaatcacagaactgtagggattgggaaggacctctggagatcatctagttc

SEQ ID NO: 31627 - DNA, 600 bp, Chicken  19866894254138_2
aaacagcaacttaccttctgcacattaaatatctctcctaaattaatctcacagaaatctttcctaagatctaaaaatttccctcagcttgttgattcattttgctcttttgggacctatctagaacttacaagcaagcaaggcaagaaaaacaccatgagaggctgtttttgtggtatttaccatttgaccagaaagaatcatagaaatctcctagagatatttacattcaagaggyttgcatagcaagagagcttttgagtgctttctctgaaacagcttaaatgccaactttttttyatttcatccccaatagaatagaaaatatctcaatttataccaagaacaaaaataaagaagtaaaccatagctaatattgtatggagatacaacggcattaaaaagcccttcttcacaaagtatgagcaggtagaaggctggagtaatatactcttcagcagaatagtcacagttacacagaatcacagaatcacagaactgtagggattgggaaggacctctggagatcatctagttcaacctgttgcctttccattttttccactcctgtatttttttacagytttttcaaaataactc

SEQ ID NO: 31628 - DNA, 600 bp, Chicken  19866894254138_3
atgccaactttttttyatttcatccccaatagaatagaaaatatctcaatttataccaagaacaaaaataaagaagtaaaccatagctaatattgtatggagatacaacggcattaaaaagcccttcttcacaaagtatgagcaggtagaaggctggagtaatatactcttcagcagaatagtcacagttacacagaatcacagaatcacagaactgtagggattgggaaggacctctggagatcatctagttcaacctgttgcctttccattttttccactcctgtatttttttacagytttttcaaaataactcaaagacaatactttttactgagaaattcaaagacaatgtattaacaaactctatttgtctccagtttttcatttcctaaacatgctgctgcgtaattcaagttactttatatcatccttttcagaaagaaagaattgaaaacttgagagaagactcagtatgtaccatattctctgctggttttgacttgctgctctaccagcttcctccaatgtctcctctactgaagtcagagccacacacgcagaggtcagttgtactaacctcctctgtgggacagattt

SEQ ID NO: 31629 - DNA, 600 bp, Chicken  19866894254153_1
gattctgctgaggaagaagggaccttgagaagagatggagagattcagagatgggctttttcacttagagtgccctcagtcccactcagatgatcctttacatgaaacgattcattgtgcatagttgttactcttctattctgctttcagtggaagaagttatctcagcgccgcagatgcactttgcacttgtgagaggcaaaaggtagttttaatgcactttaagcactttttcttactgggatgaaaaggcagaggaggagacctgttgagtattcccttgtacccactcagacctcratggaaacgctcctaccaactttctaaaaagcaggcttcagctctgaaatcgtatggattctgctgctgccctaacttatagcacaacgcctttcgacaattgggatgggcaatcctaaactttcagctgacatctccttttgcaaacatgtgaattgcacaaatcagacccttgcttgcttcctgctctttgctgtgcagtgctcacactggggctgtcagaacagcggctgttgtgtttcctcagcttcttttggtctactggagctctgggtctgtctggaggaataagtaatcatg

SEQ ID NO: 31630 - DNA, 600 bp, Chicken  19866894254153_2
actttctaaaaagcaggcttcagctctgaaatcgtatggattctgctgctgccctaacttatagcacaacgcctttcgacaattgggatgggcaatcctaaactttcagctgacatctccttttgcaaacatgtgaattgcacaaatcagacccttgcttgcttcctgctctttgctgtgcagtgctcacactggggctgtcagaacagcggctgttgtgtttcctcagcttcttttggtctactggagctctgggtctgtctggaggaataagtaatcatgaccaagagggtaacaccrggacgaccatttttatgctatgagaggaccgtgctttccttttgtcttcagttcttctgcaaatgtatggtagtatgaaaaccgttgtgttgggtcagataagggttcggcattatgcccggccttgcggtgtctgagcactcctgcctttgagttgtgtaaagcagcatggcagctgccatacaaggcaacagggctgctttttttaaactgagaacttgtccttttgtttcttattccggagggatggagaaaatctggaaaaatgtagagtgcagcacatggcttgtggtgcctaat

SEQ ID NO: 31631 - DNA, 600 bp, Chicken  19866894254154_1
gaaatatccaatggaagatgaagaaattttgctacttagatccattacagatgtcaacctgcctaaattcttgtctcatgatttaccactttttgaggtaaaaaaacaaacaaacatattttcagtaatgtttaaaaaaacttgttaaaaatgctaattattatataacagatttatcagagtaatagtccaaatacttcaatctagccctttattatttttaaacagttttaactgttccttcatagcaaatacattgactatacgggtctactgtttatatttctgttaactagtttytggtttttgagagagaaaggataaagctttttctgctttctaaaagcaggttttgtaaactagtttgatagaagctgatccattaggtaattaatcctttactacatacacacataaacatgaaaaaggctcattatttcasaatttcattatttcaaatatcaataataaattaagaagttttagctcagaaaagattatgtgacattcataattattttgctttaatcaaaatagatattagtttgcctaaattttaaaggacaaaggattggttgcaggagtttccaaaccaaatga

SEQ ID NO: 31632 - DNA, 600 bp, Chicken  19866894254154_2
tgttaaaaatgctaattattatataacagatttatcagagtaatagtccaaatacttcaatctagccctttattatttttaaacagttttaactgttccttcatagcaaatacattgactatacgggtctactgtttatatttctgttaactagtttytggtttttgagagagaaaggataaagctttttctgctttctaaaagcaggttttgtaaactagtttgatagaagctgatccattaggtaattaatcctttactacatacacacataaacatgaaaaaggctcattatttcasaatttcattatttcaaatatcaataataaattaagaagttttagctcagaaaagattatgtgacattcataattattttgctttaatcaaaatagatattagtttgcctaaattttaaaggacaaaggattggttgcaggagtttccaaaccaaatgacagtggaagtaactctacttttcaattaattgtttgaatagggtattacctctgatttgtttcctggtgtgaagctgccaaaaccagactacaatgacctgttggaagccatcaaaacaaactgtgttgctatgaatttgca

SEQ ID NO: 31633 - DNA, 575 bp, Chicken  19866894254156_1
cttttgctgcttcctcgtgctcgagatgtcccttccaatcttcagacaagtttcttctgctcactcctgatcccgcttggcagttggtctgcctcttgcaagctcctcagcacagagctgaccccaatacgcttgccagtgggcgcaatcgttagacatacgtgtagcttaattgggtgcccaaaccttggatgggagctggaaggcaattcagagccacgttggctcaatctgcttttcgcatctgctctcgctttgctccccggtgcgtgccgagctctgcttggccacgtcccctcygggtcagtgagggatggagctcatgggcatcatcccacctgcatgccagggagcgaccctgaagcctagggttggtgccaaagcccacgtgggcgctacagtgtcaattttgggatgtggtcttggtgccctccaccaccccttgccttgactttcagaacgaaacygacgacaaccagatccagctggtgggaggcgacgtggagctgcccaaggagctggccaagatgatcgagcaggacaacgaggaggaaagaagagaagaactccgtcat

SEQ ID NO: 31634 - DNA, 408 bp, Chicken  19866894254156_2
cttaattgggtgcccaaaccttggatgggagctggaaggcaattcagagccacgttggctcaatctgcttttcgcatctgctctcgctttgctccccggtgcgtgccgagctctgcttggccacgtcccctcygggtcagtgagggatggagctcatgggcatcatcccacctgcatgccagggagcgaccctgaagcctagggttggtgccaaagcccacgtgggcgctacagtgtcaattttgggatgtggtcttggtgccctccaccaccccttgccttgactttcagaacgaaacygacgacaaccagatccagctggtgggaggcgacgtggagctgcccaaggagctggccaagatgatcgagcaggacaacgaggaggaaagaagagaagaactccgtcat

SEQ ID NO: 31635 - DNA, 599 bp, Chicken  19866894254169_1
  misc_feature (1)..(31): n is any nucleotide
nnnnnnnnnnnnnnnnnnnnnnnnnnnnnnngggctgggttggctttgaggtcccttccaatccaacctgttctgtgtttctgtgtctgtgttttaacagatacagaaatttgacaaaatcaccaggttgaggtgggacagaggtggtctgacaacctcctgtagctacagcaacttgcccatggctgtgtccatgtgggtttggaagatcccaaaagatgcagacaacacagactctctgggcagcctggtccaacatccagcctccctagagtggtcactcccacaccctgctggcartgctgtgcccaatgcagcctgggtgctgcaggctttactcagcgcctgggtaccagtggtggacaggaatgaatcctggtgcacattggacttgaaagtttactatttcatatttaatttttgtggcatcaggcaatcaatcaggagtcattaacatgtatgcgcatcagctgatctcctaaagagcatatttacttctttttaattgcttttgacattttattttgactttttcaaatagctgcataagtattggaaaggaacaagaaaatcctacaggggaagtgtaaacaaatttc

SEQ ID NO: 31636 - DNA, 600 bp, Chicken  19866894254170_1
acgaggagattaccacaagggctgatctaggagctgtgtcacccaatccgttgtgaggcagagagaggtcagatggaccatcagggagatgttcaatcagatggtcccaaacagtttcatagtctatagtttaaaacatacccagaagtgatagaaatcattttgcttccattcccatctgtcactagctctctcatagactgagaagcttcagaatccctttccaaaggcaagcactgttgttcctaggcatgtaggaaacacaacgtaataaatcctgtaagcttttacgttcacctycacaaagcactttgaaatatgtcagaatccttgaaaaagaaacattaaagatacaataccaagaacttgtgaaattttaacagcactgcagccaaaggcaattgcggttggaatccacaagcttgaggtaagcctgccttttaaggtcaccaaagaggcagaaaatgagtaactagaattagctgttaacaaacatgcatttttcagagtcctggctactctgatttccctacagcttttagcagccacactgtgctccactcccctctttcactgcttaccaggcaaagcaaccagtcc

SEQ ID NO: 31637 - DNA, 600 bp, Chicken  19866894254171_1
gttatttcttaagtaaaaaaagtgtaaaattcatgtataatgctatggactacagtgaagtaggattttattctgaaatcaaaagtccccattgagcccaaataaatgtgcttttaacatattgtgggaatttaggtgaaaatttttagtctttggcagtaatactaaactttacagtttaggagagaagtgaagaaagatctcctttaatgagtctgtagttacagaaatagcatggaatattaccaaatttgaattgcccggacttaaattgaccaatttaaaacttgtccagaagcsaagtttaacatctcatgtactcttgcaagcagtgcaacaagatcttctaatgatcaaaggtgcctaacttagttttaatgatttattcatagcaagctatgcctcaacactattgcaggtcatggatgcagtatcaggttcacaaagaaggctccagctatgaaatttctcaggctacttcctccccgtttagatattctttctagatatagaacagactaagaaatatttagcttgaaattatatgattatgataaatagtttgtttagaaaccttgcttctcataacctaaaaactca

SEQ ID NO: 31638 - DNA, 484 bp, Chicken  19866894254176_1
acttgtgcctgatgaacaccgaccgtgtttcaagctgtgttaaaatacatcgtgaatgtctcccagagaagaagatcacagacagcgtgcagaagcaagggtctgacatggtactcccccctcgaggggcaagttggagataaagttatataagcccaagtaataacatggcatcatcagatgcagttaataatgcctctgagcctgcagatgtctgttagaggcagcttttttcactacctggaaggacagcaggtagaaagtctaatcaaagcagagacggtgaagacaagggaaagygtggctgtggtaagtccctttggagagctgcaaggcaagtgaactgaacgttcagtgcaactttgtgccctagcagtcaaacctatgctatttttatgcaaaaggagagaaatacagcaccttttccaactccgcctagctgactgataccaataagaacacagatctttaaaggggggagggg

SEQ ID NO: 31639 - DNA, 600 bp, Chicken  19866894254184_1
ttttttttcaattttggtattaatctagaagtgtaaaatattcacgtatctctgtttagaactgtagtagtgggggaatgctgggattttgacatagccagactttcctgcattatttcaagacaagcactatccagtctggactttagccttcctagcaactctactcatttatatagagctaaaaatactaaatgcaaagaaaatttagaagttcaaaattatgtagcataagacaaatattaatacaagatagttttaattattagcaaccaatatatttttagtacacatagtaamacatggcaatatattgtctgtgttttaataaaatatttaataaaataaaatcacacatacatacattttaaagaacaaaagwtttaaaatgtggtacagaaggacaacagatagtatcacggacatgacattcctattgccttatatatttatgtcaaatttctatgattgagagtaaattatcagaaaagaaatttaagcctayatgctccacaaagaatatttattatttatttttattttgtcccttgttagaaatccagtaatctagaattttacttaaagcttcatagtaagctg

SEQ ID NO: 31640 - DNA, 600 bp, Chicken  19866894254184_2
gggattttgacatagccagactttcctgcattatttcaagacaagcactatccagtctggactttagccttcctagcaactctactcatttatatagagctaaaaatactaaatgcaaagaaaatttagaagttcaaaattatgtagcataagacaaatattaatacaagatagttttaattattagcaaccaatatatttttagtacacatagtaamacatggcaatatattgtctgtgttttaataaaatatttaataaaataaaatcacacatacatacattttaaagaacaaaagwtttaaaatgtggtacagaaggacaacagatagtatcacggacatgacattcctattgccttatatatttatgtcaaatttctatgattgagagtaaattatcagaaaagaaatttaagcctayatgctccacaaagaatatttattatttatttttattttgtcccttgttagaaatccagtaatctagaattttacttaaagcttcatagtaagctggtaataaacaaaaggaaaaaaaaattggcttctatactcaagatcatataagctcattttcttctcaagtgcatacagaagg

SEQ ID NO: 31641 - DNA, 509 bp, Chicken  19866894254184_3
atttagaagttcaaaattatgtagcataagacaaatattaatacaagatagttttaattattagcaaccaatatatttttagtacacatagtaamacatggcaatatattgtctgtgttttaataaaatatttaataaaataaaatcacacatacatacattttaaagaacaaaagwtttaaaatgtggtacagaaggacaacagatagtatcacggacatgacattcctattgccttatatatttatgtcaaatttctatgattgagagtaaattatcagaaaagaaatttaagcctayatgctccacaaagaatatttattatttatttttattttgtcccttgttagaaatccagtaatctagaattttacttaaagcttcatagtaagctggtaataaacaaaaggaaaaaaaaattggcttctatactcaagatcatataagctcattttcttctcaagtgcatacagaaggtcaaatgtgcaaattccttatgaaaaggatac

SEQ ID NO: 31642 - DNA, 599 bp, Chicken  19866894254188_1
  misc_feature (1)..(81): n is any nucleotide
nnnnnnnnnnnnnnnnnnnnnnnnnnnnnnnnnnnnnnnnnnnnnnnnnnnnnnnnnnnnnnnnnnnnnnnnnnnnnnnnntcatccatatcttcagcacaagtcttttccttgtaaagaaccaaccggtgtttaaaattaggggcatcaaatcccagctgcactttctgcactaggatccaatggctgtggtttctgccagcttccccgggctgtctgtcttcacatcccaccctcaccagctttcacagcactggagacaaagcctttcccagagctgaccacttcttcctggagccrtatgactgggcttttttyccttttcattttaagctgcattaaatgtacactgaccacgtgcctgtatactgcaagttgtttttcatgtgamactatatgcaatctcagttttcaacaggttttgtgccttttttagttctgtgttctgaagatgcacacagaaaaaaacgtccagagagaaccagagggcttyctgtgttttaagcactgtgttgagggcaaagtgtgtgcaaatttcaggctaagcagcatccgctatttggctgtgtacaagatgcaaataagggtgttcttgctcc

SEQ ID NO: 31643 - DNA, 599 bp, Chicken  19866894254188_2
  misc_feature (1)..(63): n is any nucleotide
nnnnnnnnnnnnnnnnnnnnnnnnnnnnnnnnnnnnnnnnnnnnnnnnnnnnnnnnnnnnnnntcatccatatcttcagcacaagtcttttccttgtaaagaaccaaccggtgtttaaaattaggggcatcaaatcccagctgcactttctgcactaggatccaatggctgtggtttctgccagcttccccgggctgtctgtcttcacatcccaccctcaccagctttcacagcactggagacaaagcctttcccagagctgaccacttcttcctggagccrtatgactgggcttttttyccttttcattttaagctgcattaaatgtacactgaccacgtgcctgtatactgcaagttgtttttcatgtgamactatatgcaatctcagttttcaacaggttttgtgccttttttagttctgtgttctgaagatgcacacagaaaaaaacgtccagagagaaccagagggcttyctgtgttttaagcactgtgttgagggcaaagtgtgtgcaaatttcaggctaagcagcatccgctatttggctgtgtacaagatgcaaataagggtgttcttgctccaagcactttaaggaaaac

SEQ ID NO: 31644 - DNA, 600 bp, Chicken  19866894254188_3
cttcagcacaagtcttttccttgtaaagaaccaaccggtgtttaaaattaggggcatcaaatcccagctgcactttctgcactaggatccaatggctgtggtttctgccagcttccccgggctgtctgtcttcacatcccaccctcaccagctttcacagcactggagacaaagcctttcccagagctgaccacttcttcctggagccrtatgactgggcttttttyccttttcattttaagctgcattaaatgtacactgaccacgtgcctgtatactgcaagttgtttttcatgtgamactatatgcaatctcagttttcaacaggttttgtgccttttttagttctgtgttctgaagatgcacacagaaaaaaacgtccagagagaaccagagggcttyctgtgttttaagcactgtgttgagggcaaagtgtgtgcaaatttcaggctaagcagcatccgctatttggctgtgtacaagatgcaaataagggtgttcttgctccaagcactttaaggaaaacaagtgaatagattaattacaggttgaaataagggtgtgggcttatgtttttactggaggaactcatttatttct

SEQ ID NO: 31645 - DNA, 600 bp, Chicken  19866894254188_4
ttctgccagcttccccgggctgtctgtcttcacatcccaccctcaccagctttcacagcactggagacaaagcctttcccagagctgaccacttcttcctggagccrtatgactgggcttttttyccttttcattttaagctgcattaaatgtacactgaccacgtgcctgtatactgcaagttgtttttcatgtgamactatatgcaatctcagttttcaacaggttttgtgccttttttagttctgtgttctgaagatgcacacagaaaaaaacgtccagagagaaccagagggcttyctgtgttttaagcactgtgttgagggcaaagtgtgtgcaaatttcaggctaagcagcatccgctatttggctgtgtacaagatgcaaataagggtgttcttgctccaagcactttaaggaaaacaagtgaatagattaattacaggttgaaataagggtgtgggcttatgtttttactggaggaactcatttatttctcaataaatatgttaaggagcaaatgtgaatccctaaacaactataaatatttatttttgcacacactgcacaaaaggtagagtttgctgtggatacacccac

SEQ ID NO: 31646 - DNA, 600 bp, Chicken  19866894254190_1
aaacatcttttaaaataacctttttatattagtatttaaaactgcagttctttctggctctgagttaccggtcttttttcccccttgtattaaaactattatagaaccgttaatattgctgaacatacagaggaaatatgtgggcttctgttggttttttaagttgttgtttttttcctgttagacacatagcatgtactgcataacaggcattctatttgtggatagcagcattaaggttatataattgttaaaaattatttgttttaaatacaattgctctttaagcaaggagagaasccggagtcttggcaaactatgtttattctcaaaaggaaaaygcactttagtgtgttgtacatccttctattgcctaacctacctttttctttttacgtttagttgctataactccaggtggtacaatccagatttctagtccaccttctgatggtgcccagggactgcagacgttaacaatgacaaattcaggaactcctcagccgggtgctaccattgtgcaatacacagcacagtcatctgatggtacacaacagttttttgttcctggaagccaacttgttgttcaaggtatagttt

SEQ ID NO: 31647 - DNA, 600 bp, Chicken  19866894254190_2
ctgcagttctttctggctctgagttaccggtcttttttcccccttgtattaaaactattatagaaccgttaatattgctgaacatacagaggaaatatgtgggcttctgttggttttttaagttgttgtttttttcctgttagacacatagcatgtactgcataacaggcattctatttgtggatagcagcattaaggttatataattgttaaaaattatttgttttaaatacaattgctctttaagcaaggagagaasccggagtcttggcaaactatgtttattctcaaaaggaaaaygcactttagtgtgttgtacatccttctattgcctaacctacctttttctttttacgtttagttgctataactccaggtggtacaatccagatttctagtccaccttctgatggtgcccagggactgcagacgttaacaatgacaaattcaggaactcctcagccgggtgctaccattgtgcaatacacagcacagtcatctgatggtacacaacagttttttgttcctggaagccaacttgttgttcaaggtatagtttattagtctactgattttttttttttttcatataaaacattt

SEQ ID NO: 31648 - DNA, 599 bp, Chicken  19866894254202_1
  misc_feature (1)..(172): n is any nucleotide
nnnnnnnnnnnnnnnnnnnnnnnnnnnnnnnnnnnnnnnnnnnnnnnnnnnnnnnnnnnnnnnnnnnnnnnnnnnnnnnnnnnnnnnnnnnnnnnnnnnnnnnnnnnnnnnnnnnnnnnnnnnnnnnnnnnnnnnnnnnnnnnnnnnnnnnnnnnnnnnnnnnnnnnnnnnnctgctgctctgggtccttgctttgactacttcgaacaaactatatttaacgtgcacttgtgcttttcacttatccccctccaaataattcaatccacaaggattgatcttaaacgcagtgaagaattycaatagctacccatttaactaattcatttctctcgtctacaggcaaaattctcatttgctctcactctcccgaagctaaaaatagagaacctcaaaataagactttgtgaaaccaagtcctctcattctttagaaatgtaacttctggtctgtgagaaatgcgagtaggagcaggaagtattccctctaatcgaagggtttgtcttcataaagcatatttactcacgtgcctccatttgcaagaaatacatttttctggttttaaaaaattgctttagaagttacttaatgtcaagtca

SEQ ID NO: 31649 - DNA, 599 bp, Chicken  19866894254206_1
  misc_feature (1)..(11): n is any nucleotide
nnnnnnnnnnntatgcagggagagggttcagagcctgacaaggtaggagacaagccccttgcagacaggttaagagcatgtttgctgtgaagaaaaggagctggagatggggtcaggttaacaaacctatggtgctgctgcacgcagcgtctcctcctcttttcagatgacaaggacacttggaggggctctgaggacatgccagagagagcaaagttgataaaaggaagctgcacgtaattcttttggtgcttggggtcaggcctagattgcatctgctgcaaatcagcgtgctgagcyggagatatgtggtagagcagtatgtggggtgcgatggcttgataaagctttttgggttgaagcagcagtaggctatcataaaagtgccccagtccagcccagattacgtggggaggtgctgctccccttttgctccctgcaagcaagctctgcttggtgttggctttggggagcatcctctccctgctgtgtgtgccccactgaagtctgccccctccacaagtgccttgtttccctggctttcctacaagggtctggatgaaatagatgaaataagccctgatgaggtgatcactgag

SEQ ID NO: 31650 - DNA, 599 bp, Chicken  19866894254207_1
  misc_feature (1)..(42): n is any nucleotide
nnnnnnnnnnnnnnnnnnnnnnnnnnnnnnnnnnnnnnnnnnacttgtgagcctcccactggttcaggacgtgcacagaaggcgcagattcatctatggagaacagattcagcttcccctctgaatcactgctgatcactctcaaaggacatccactagagcagaacacagagaaaacattagaaatttctgaaactgatgtcctcagtaatcacagagcacaaactagctgccaaactatagatggctaacatatatatttgattcaagtgaacatcaagagaaacagacaccacagtrgatgcatttatacaattattttcagcttcccatcttaaaaccatccatactagtgatgcctattccctgatctcacagagggagccatctgctcacatttatatgactgaaacaaaaacagccgtggtctttctttcccctcaatacttaacttgacttctcatgggcttgatattaattccctgacatgaactacttaacaggttagctgcagctgtaggtaccgattttggtgtctcagagcttctttccagttctacatcatatgccagttactaaaccataccaaatctcccaca

SEQ ID NO: 31651 - DNA, 600 bp, Chicken  19866894254209_1
gctaatacatacagctgtatcctatgaaatctttctgcaatgtctgttatgttcatttctagaagggcttttacacgtgttgttgttattcagaggaaactggaactgaagcaagatacactaccttacattctaccaaagagcaattttaatgaaattacacaaagaactttgttgatatttgttagctactaaactttgaccaaacactcatcacagtcaacattctgaaacaggtattgaaggtatttctaatagttgaagataagacacaatggcagtgtgaattagtattgacartatctttttttctgagtcacttgaactgctgtcagagttaagtttgtgtggccaagtattacagaacatagaaatataaaatttcactctcagcacacagtttgtaaaggtctagactgattgcttgtttctatgtcaacaaacagaaaaaaaacaccacaccaaaaggggaaaataatgtgtctagtaggtagaacatatagttggtatgtaatttacttgagaagagaagcatgtgtttgacccccttagaaatgctcaaaacatttttgagaattcctacaggcttaggccatctcg

SEQ ID NO: 31652 - DNA, 599 bp, Chicken  19866894254218_1
  misc_feature (1)..(95): n is any nucleotide
nnnnnnnnnnnnnnnnnnnnnnnnnnnnnnnnnnnnnnnnnnnnnnnnnnnnnnnnnnnnnnnnnnnnnnnnnnnnnnnnnnnnnnnnnnnnnnngaagggaagagggaaagcagcagagaagagcagaatgtccacgagatgtaacacaaatcattgttttgtgagaacagctagagccacagcaaatacatactgtaatctgagacaagtgctaagccctgataggtttcctgataaaatcaggatcactgttagtgagaggcagagaaggggagcagataacagtgagataggaagmtgtgatacatccatcaagcctgcaccaaagctcttggaccccatcctctsctgctgaccaaccagaagcctctggccatgattcatttcatgctgcctttgcttctctgctaccatctccctggtgtaactcctacctggggagctgcttctcccttttcctgtgctgtgtacacttctgatttctcaaatcttcccccaaaattccmaaagtagagctttctaaagaaacttatatctgctgccatgcacccaaggagagcccttgtctgcttggaagggaagggaaaaagggaaggg

SEQ ID NO: 31653 - DNA, 599 bp, Chicken  19866894254218_2
  misc_feature (1)..(45): n is any nucleotide
nnnnnnnnnnnnnnnnnnnnnnnnnnnnnnnnnnnnnnnnnnnnngaagggaagagggaaagcagcagagaagagcagaatgtccacgagatgtaacacaaatcattgttttgtgagaacagctagagccacagcaaatacatactgtaatctgagacaagtgctaagccctgataggtttcctgataaaatcaggatcactgttagtgagaggcagagaaggggagcagataacagtgagataggaagmtgtgatacatccatcaagcctgcaccaaagctcttggaccccatcctctsctgctgaccaaccagaagcctctggccatgattcatttcatgctgcctttgcttctctgctaccatctccctggtgtaactcctacctggggagctgcttctcccttttcctgtgctgtgtacacttctgatttctcaaatcttcccccaaaattccmaaagtagagctttctaaagaaacttatatctgctgccatgcacccaaggagagcccttgtctgcttggaagggaagggaaaaagggaagggggggaaaaaagggaagggggggaaaaaagggaagggggggaaaaaaggga

SEQ ID NO: 31654 - DNA, 521 bp, Chicken  19866894254218_3
aagtgctaagccctgataggtttcctgataaaatcaggatcactgttagtgagaggcagagaaggggagcagataacagtgagataggaagmtgtgatacatccatcaagcctgcaccaaagctcttggaccccatcctctsctgctgaccaaccagaagcctctggccatgattcatttcatgctgcctttgcttctctgctaccatctccctggtgtaactcctacctggggagctgcttctcccttttcctgtgctgtgtacacttctgatttctcaaatcttcccccaaaattccmaaagtagagctttctaaagaaacttatatctgctgccatgcacccaaggagagcccttgtctgcttggaagggaagggaaaaagggaagggggggaaaaaagggaagggggggaaaaaagggaagggggggaaaaaagggaagggggggaaaaaagggaagggggggaaaaaagggaagggggggaaaaaagggaagggggggaaaaaagggaaggggggg

SEQ ID NO: 31655 - DNA, 600 bp, Chicken  19866894254222_1
ggcatttaaaaattgaagctgatattaaataatgatggatcatttctcctgatcttaaacgtatcaaagcatttaaccccttggctttattaatttgtgtatttaccgagggtattacatcatgtttgcaacactatagttaagattgtgtcagtaattatatttgaaattgtgctcttttcccccctcctccccccccctttttttcttttctgaacctctgtgaaatatctcctccggggtgcaagtttagtatatagacgtatatgttcttgtaattttgaattattatttagccaygctcaactgctgacttctgcgatgtagcatttgaaacatcattagatatttaaaaatccagtgaattaaaaatatccagataacttttgatttcttacrgctgaggtatttacacttagacattacgagagtctattgactgaattatttttctggagacttagaacagatctagggttcagcaccatcaaaattaatgaaagaattcttacaaatctgaattgctggtttcttaagtgagatgatttatttatttcaatatttaaataataaaaagatgcatatataagggctctgggc

SEQ ID NO: 31656 - DNA, 600 bp, Chicken  19866894254222_2
tatttaccgagggtattacatcatgtttgcaacactatagttaagattgtgtcagtaattatatttgaaattgtgctcttttcccccctcctccccccccctttttttcttttctgaacctctgtgaaatatctcctccggggtgcaagtttagtatatagacgtatatgttcttgtaattttgaattattatttagccaygctcaactgctgacttctgcgatgtagcatttgaaacatcattagatatttaaaaatccagtgaattaaaaatatccagataacttttgatttcttacrgctgaggtatttacacttagacattacgagagtctattgactgaattatttttctggagacttagaacagatctagggttcagcaccatcaaaattaatgaaagaattcttacaaatctgaattgctggtttcttaagtgagatgatttatttatttcaatatttaaataataaaaagatgcatatataagggctctgggcaccttaacaattaatattgcaagatcatgcttgcagcatgaaaaaaatatatattctattaatcagagcggaatttgaccaactaggcaaaatgcttct

SEQ ID NO: 31657 - DNA, 576 bp, Chicken  19866894254222_3
ttacgagagtctattgactgaattatttttctggagacttagaacagatctagggttcagcaccatcaaaattaatgaaagaattcttacaaatctgaattgctggtttcttaagtgagatgatttatttatttcaatatttaaataataaaaagatgcatatataagggctctgggcaccttaacaattaatattgcaagatcatgcttgcagcatgaaaaaaatatatattctattaatcagagcggaatttgaccaactaggcaaaatgcttctcttctttctagcctaagaatgtrcatacaaaacttytataagacactttaaagtgaaaatctagaaaattaccaggtttaaatttaggggcaataactttagtggcatcctaaagccctaccgtgtaatactcagcyggtggasttgctttcttttcctacaatacccctgggtcacctttatattttggtgataacacaatccaagtaataagtattctgactgacagtataaaaattgccatttatctggtcaggtgatgtaggagagccatctttttaaagcagacacaagcctca

SEQ ID NO: 31658 - DNA, 563 bp, Chicken  19866894254222_4
ttgactgaattatttttctggagacttagaacagatctagggttcagcaccatcaaaattaatgaaagaattcttacaaatctgaattgctggtttcttaagtgagatgatttatttatttcaatatttaaataataaaaagatgcatatataagggctctgggcaccttaacaattaatattgcaagatcatgcttgcagcatgaaaaaaatatatattctattaatcagagcggaatttgaccaactaggcaaaatgcttctcttctttctagcctaagaatgtrcatacaaaacttytataagacactttaaagtgaaaatctagaaaattaccaggtttaaatttaggggcaataactttagtggcatcctaaagccctaccgtgtaatactcagcyggtggasttgctttcttttcctacaatacccctgggtcacctttatattttggtgataacacaatccaagtaataagtattctgactgacagtataaaaattgccatttatctggtcaggtgatgtaggagagccatctttttaaagcagacacaagcctca

SEQ ID NO: 31659 - DNA, 462 bp, Chicken  19866894254222_5
gtgagatgatttatttatttcaatatttaaataataaaaagatgcatatataagggctctgggcaccttaacaattaatattgcaagatcatgcttgcagcatgaaaaaaatatatattctattaatcagagcggaatttgaccaactaggcaaaatgcttctcttctttctagcctaagaatgtrcatacaaaacttytataagacactttaaagtgaaaatctagaaaattaccaggtttaaatttaggggcaataactttagtggcatcctaaagccctaccgtgtaatactcagcyggtggasttgctttcttttcctacaatacccctgggtcacctttatattttggtgataacacaatccaagtaataagtattctgactgacagtataaaaattgccatttatctggtcaggtgatgtaggagagccatctttttaaagcagacacaagcctca

SEQ ID NO: 31660 - DNA, 455 bp, Chicken  19866894254222_6
gatttatttatttcaatatttaaataataaaaagatgcatatataagggctctgggcaccttaacaattaatattgcaagatcatgcttgcagcatgaaaaaaatatatattctattaatcagagcggaatttgaccaactaggcaaaatgcttctcttctttctagcctaagaatgtrcatacaaaacttytataagacactttaaagtgaaaatctagaaaattaccaggtttaaatttaggggcaataactttagtggcatcctaaagccctaccgtgtaatactcagcyggtggasttgctttcttttcctacaatacccctgggtcacctttatattttggtgataacacaatccaagtaataagtattctgactgacagtataaaaattgccatttatctggtcaggtgatgtaggagagccatctttttaaagcagacacaagcctca

SEQ ID NO: 31661 - DNA, 600 bp, Chicken  19866894254226_1
ccgtgctgtactgaagaagttaactgtgcagcagctggaaatgatcttcatagctgctgaaatcagcacacgagcttcttcacatggctcttccttgccttttcttttctccacgctgtgtgaggagccccccaggggccacaagaaatgccctgtaagatcccattgcctccccaacagcctgcagccctgctcccagcacagcatgctgtgaggagagctgaagtgagtaaaccagcccacagaccccgcagcttaagcagccttaaccaagccctgcagcccagcttagcccttttraaatattttgggggtgatgtcagcacctgagctgccaacacacttgttgctctcctccctcagactacttcagttcccacagcgggacggggcaccagaccgagtgggagataggcagaagttgagagagaaattgtatctgcagtgccccagagccccagaggcagaaccactgggctccattcaccttcataaggtaaaaaaaaaaaacttggcttacttattaggtcagattttctcttgcccagggatacgggaggctggaagaacagcttgggaatggaggaatttgtgaactgc

SEQ ID NO: 31662 - DNA, 561 bp, Chicken  19866894254238_1
ctaaaatttctggccattattgtgaaggaagctaacaaatcagtctaacaataaaacaaaataatccagtaagcctaaattttatggtccatcatattctgtatttaaatcattctgcactcagtcctttccagatacctgcaaactggatcaagtcttcccagtaagatgcggccacaaaaccttgattgactacactcttccttttcgaagttcctgtttgcatcacgggatctagacattccctgaaagtggaagtaggtttctatccacccacctgagcccaagagcctggattcytgaaccagcactgtgtctcctgagcacgacacaagtcacagggagcagttcagatgtgccagcatgcctgaacagaaaaaccatctggctcaagtcccaccaacgcccctcaacacatctcttaaatgactgcagttttgatagccctccaaaggggtacatttccaaagtaaaacttgagagatgcaatgatatctgaagggaagcaaaagaataatgagtttcttgggaatgctgagaaattaaagctgcttcacgggt

SEQ ID NO: 31663 - DNA, 600 bp, Chicken  19866894254241_1
tattagcattgtattttttaaatctttttttctgttgccacctgtgtatactttgcctcatttcccagtactgggaaaaatccagaaggtgggaaattttctgttaaaatgaatgaaatacgtgtcagcacatgagcacagcatagctccagggatctcttttctcccaggggtgttgttgatgccttagtcacggggagcaaatgcgtgaggtaacattcctgcaagtgttgcgtatgcactaattgagtcatactagggtgttttgggaatttgcaaccccttcctccttctcttccyccgcttccaaaccccactgtggtgcctgtgggcttcaatacagacaactggcctctgcggaccttcctgtcaccttcccaatggatgtggcaatggaggaacccaacaggaagagctgcaaatacttctcaggcaatgggacgtggctgaagacaggagaaggagacagaacgaactttgcagagaagaacagagaccaagagaagtggtcagtgagagcagatgctgagaagctaaagatggctttgaagagtgacgctgactgtagaaaaagtgcagatgggtttggatgatgctcca

SEQ ID NO: 31664 - DNA, 600 bp, Chicken  19866894254241_2
atgggacgtggctgaagacaggagaaggagacagaacgaactttgcagagaagaacagagaccaagagaagtggtcagtgagagcagatgctgagaagctaaagatggctttgaagagtgacgctgactgtagaaaaagtgcagatgggtttggatgatgctccactgtctcctagaaggcagccagttggcactgaaaccagggtgagtctgagtacttagtgtacagcttcaaacacctgctagtgggggcttttcccatgtaactgcagctccatagattggtagtacatttcctgytttttttttttgtgggtttttttttttgtgatttaatacctaaatgaaaccacagtctgtgactgggcttttataaactgcgtctctttcttgcattgtagctccaagtgctggaacctgccagttgttgccccgatcgtatcttcaaagttgtgtttgtggggaactctggcgttggtaagagttccttcatccatcgcttctgctatgacaggttcttggctgatctcaatgcaactatcggtaagaaatagggttccaaactcatctgactgaggaggatgaggaatttggtctgga

SEQ ID NO: 31665 - DNA, 599 bp, Chicken  19866894254247_1
  misc_feature (1)..(28): n is any nucleotide
nnnnnnnnnnnnnnnnnnnnnnnnnnnnaattgcagaaagtcttgggactgagttgaggcttgactgagcccaagatcagttaacccaccagcacagtgacacacaagcccttgctccatctcactgtactgctgggcaacaagctcaggtccaaatgacagatatcatttctacctgaaaggcggtccagagatagcagaaatggacccacaggctgagatggcaggaagaagtcccatcaaggccaagtcacccccttatcagcacagccagccccaggtgttgtattcattagttcrttcctccactgccagtttgccawcaggtcaacaagtcaaagcggtttgttggatcastacaggggaagagcgggacagtggcactggagcctgtcaactggcattggcccacatcattttagctagccatgaaatgggcaccacacamgtaacagaatgaaccagaacgctggatttcccatgaaagttgcccttccaagtgcaacattaattaagcctgaccctgcttaccttgctgaaacaagaagtgagcctgaaggtgtcaggtctttaggccaaacagattaacagacaggtca

SEQ ID NO: 31666 - DNA, 599 bp, Chicken  19866894254247_2
  misc_feature (1)..(5): n is any nucleotide
nnnnnaattgcagaaagtcttgggactgagttgaggcttgactgagcccaagatcagttaacccaccagcacagtgacacacaagcccttgctccatctcactgtactgctgggcaacaagctcaggtccaaatgacagatatcatttctacctgaaaggcggtccagagatagcagaaatggacccacaggctgagatggcaggaagaagtcccatcaaggccaagtcacccccttatcagcacagccagccccaggtgttgtattcattagttcrttcctccactgccagtttgccawcaggtcaacaagtcaaagcggtttgttggatcastacaggggaagagcgggacagtggcactggagcctgtcaactggcattggcccacatcattttagctagccatgaaatgggcaccacacamgtaacagaatgaaccagaacgctggatttcccatgaaagttgcccttccaagtgcaacattaattaagcctgaccctgcttaccttgctgaaacaagaagtgagcctgaaggtgtcaggtctttaggccaaacagattaacagacaggtcagatataaaatatagcacagccca

SEQ ID NO: 31667 - DNA, 600 bp, Chicken  19866894254247_3
ggcttgactgagcccaagatcagttaacccaccagcacagtgacacacaagcccttgctccatctcactgtactgctgggcaacaagctcaggtccaaatgacagatatcatttctacctgaaaggcggtccagagatagcagaaatggacccacaggctgagatggcaggaagaagtcccatcaaggccaagtcacccccttatcagcacagccagccccaggtgttgtattcattagttcrttcctccactgccagtttgccawcaggtcaacaagtcaaagcggtttgttggatcastacaggggaagagcgggacagtggcactggagcctgtcaactggcattggcccacatcattttagctagccatgaaatgggcaccacacamgtaacagaatgaaccagaacgctggatttcccatgaaagttgcccttccaagtgcaacattaattaagcctgaccctgcttaccttgctgaaacaagaagtgagcctgaaggtgtcaggtctttaggccaaacagattaacagacaggtcagatataaaatatagcacagcccagaagtgctaatacacagtctgatgtcgacagtgcc

SEQ ID NO: 31668 - DNA, 600 bp, Chicken  19866894254247_4
ggtccaaatgacagatatcatttctacctgaaaggcggtccagagatagcagaaatggacccacaggctgagatggcaggaagaagtcccatcaaggccaagtcacccccttatcagcacagccagccccaggtgttgtattcattagttcrttcctccactgccagtttgccawcaggtcaacaagtcaaagcggtttgttggatcastacaggggaagagcgggacagtggcactggagcctgtcaactggcattggcccacatcattttagctagccatgaaatgggcaccacacamgtaacagaatgaaccagaacgctggatttcccatgaaagttgcccttccaagtgcaacattaattaagcctgaccctgcttaccttgctgaaacaagaagtgagcctgaaggtgtcaggtctttaggccaaacagattaacagacaggtcagatataaaatatagcacagcccagaagtgctaatacacagtctgatgtcgacagtgcctttccaaagcaggttaattaaactaatagcttagggtttttctcctttttttctatagctttgttcaaagcaaattatttctttgaatatt

SEQ ID NO: 31669 - DNA, 600 bp, Chicken  19866894254249_1
atgttctgcagaaggaactttaagaacctgagttatcccagagaagtttatcatcagcgatgtaatgcaatattactgctaacagactgaccaaatggaaaatatgttgtcagtctgccaggcaagaggaccagacataaatggccgtagggctctcactgataatgcgtcattccacagcatctcactttaacatttgtagggtagaatgttgatgtagttttcacttctaactatgtagcttaggcaaagcagttatatggttctctggaaacgtgtattttgacctttgttgttaaygtgtattttaagtcaaacatgcatttattttcatgtttctgcacagaatattycttctcagatacgcctctttacatttcatatagtaacctactttgaagtgtgactcttgcagggaagccttactaaataagatcgtcaggtttagtcaagtccccaggaacgcacaggtctaaaatccctaattttatctaaatatttttcctgatgtaattaaaagctactgtctacactcctggcttctttctgtgcttaattcaggtattattttattgttaactttgcaacaatgtcgttttg

SEQ ID NO: 31670 - DNA, 600 bp, Chicken  19866894254249_2
tcagcgatgtaatgcaatattactgctaacagactgaccaaatggaaaatatgttgtcagtctgccaggcaagaggaccagacataaatggccgtagggctctcactgataatgcgtcattccacagcatctcactttaacatttgtagggtagaatgttgatgtagttttcacttctaactatgtagcttaggcaaagcagttatatggttctctggaaacgtgtattttgacctttgttgttaaygtgtattttaagtcaaacatgcatttattttcatgtttctgcacagaatattycttctcagatacgcctctttacatttcatatagtaacctactttgaagtgtgactcttgcagggaagccttactaaataagatcgtcaggtttagtcaagtccccaggaacgcacaggtctaaaatccctaattttatctaaatatttttcctgatgtaattaaaagctactgtctacactcctggcttctttctgtgcttaattcaggtattattttattgttaactttgcaacaatgtcgttttgatgtttagcaaatctttgtttctgtataattattgtggccaccctaccttcag

SEQ ID NO: 31671 - DNA, 599 bp, Chicken  19866894254250_1
  misc_feature (1)..(67): n is any nucleotide
nnnnnnnnnnnnnnnnnnnnnnnnnnnnnnnnnnnnnnnnnnnnnnnnnnnnnnnnnnnnnnnnnnncctggcaccctacaaacacagaacagagggcagctgcttgccacagcccgaggacgtgtccacagggggaagttactgctcattaaatggaggtgtgggcatggaaagcagctcattgtgctaggccttttgccccacacagcgtgccggcaggagggaccagggcgttttgtgagctcccggcttcacctgctgtgtggtgagctgccagcgctgcgttaaccggcatggcygcacagcagccaagcggaaggaagggaccagcackcctactaaatctacccagtctcctgcacaggccggccctggtctgataaacctctttaatcctttgcaakttgcaaaagtgcctctgtcactcctaagactgattcagagtggcccaaagtagaggaacctgtctgtgttcacagtgcaggtggcctacagctctcctcaggcgcaggttrgagggttggactagatgacctccaggggtcccctccaaccaacccctaccattctgtaattctgtgaagtcaagtgttccaat

SEQ ID NO: 31672 - DNA, 599 bp, Chicken  19866894254250_2
  misc_feature (1)..(32): n is any nucleotide
nnnnnnnnnnnnnnnnnnnnnnnnnnnnnnnncctggcaccctacaaacacagaacagagggcagctgcttgccacagcccgaggacgtgtccacagggggaagttactgctcattaaatggaggtgtgggcatggaaagcagctcattgtgctaggccttttgccccacacagcgtgccggcaggagggaccagggcgttttgtgagctcccggcttcacctgctgtgtggtgagctgccagcgctgcgttaaccggcatggcygcacagcagccaagcggaaggaagggaccagcackcctactaaatctacccagtctcctgcacaggccggccctggtctgataaacctctttaatcctttgcaakttgcaaaagtgcctctgtcactcctaagactgattcagagtggcccaaagtagaggaacctgtctgtgttcacagtgcaggtggcctacagctctcctcaggcgcaggttrgagggttggactagatgacctccaggggtcccctccaaccaacccctaccattctgtaattctgtgaagtcaagtgttccaatgtcaccccacaaccttctcaggagaccctgcaaag

SEQ ID NO: 31673 - DNA, 600 bp, Chicken  19866894254250_3
tgccacagcccgaggacgtgtccacagggggaagttactgctcattaaatggaggtgtgggcatggaaagcagctcattgtgctaggccttttgccccacacagcgtgccggcaggagggaccagggcgttttgtgagctcccggcttcacctgctgtgtggtgagctgccagcgctgcgttaaccggcatggcygcacagcagccaagcggaaggaagggaccagcackcctactaaatctacccagtctcctgcacaggccggccctggtctgataaacctctttaatcctttgcaakttgcaaaagtgcctctgtcactcctaagactgattcagagtggcccaaagtagaggaacctgtctgtgttcacagtgcaggtggcctacagctctcctcaggcgcaggttrgagggttggactagatgacctccaggggtcccctccaaccaacccctaccattctgtaattctgtgaagtcaagtgttccaatgtcaccccacaaccttctcaggagaccctgcaaagagacctgccttattgcactgtaatatcacctgaaagcatctctggctgcttacatacaggcataccagggc

SEQ ID NO: 31674 - DNA, 600 bp, Chicken  19866894254250_4
gcaggagggaccagggcgttttgtgagctcccggcttcacctgctgtgtggtgagctgccagcgctgcgttaaccggcatggcygcacagcagccaagcggaaggaagggaccagcackcctactaaatctacccagtctcctgcacaggccggccctggtctgataaacctctttaatcctttgcaakttgcaaaagtgcctctgtcactcctaagactgattcagagtggcccaaagtagaggaacctgtctgtgttcacagtgcaggtggcctacagctctcctcaggcgcaggttrgagggttggactagatgacctccaggggtcccctccaaccaacccctaccattctgtaattctgtgaagtcaagtgttccaatgtcaccccacaaccttctcaggagaccctgcaaagagacctgccttattgcactgtaatatcacctgaaagcatctctggctgcttacatacaggcataccagggctggggcagggagaactcattccatcatctttttgccacygagagacaaaatgttcctttccggaaaggagcatgcaggcttgaagagaaataagggaggtcttacacagca

SEQ ID NO: 31675 - DNA, 600 bp, Chicken  19866894254250_5
gtggcccaaagtagaggaacctgtctgtgttcacagtgcaggtggcctacagctctcctcaggcgcaggttrgagggttggactagatgacctccaggggtcccctccaaccaacccctaccattctgtaattctgtgaagtcaagtgttccaatgtcaccccacaaccttctcaggagaccctgcaaagagacctgccttattgcactgtaatatcacctgaaagcatctctggctgcttacatacaggcataccagggctggggcagggagaactcattccatcatctttttgccacygagagacaaaatgttcctttccggaaaggagcatgcaggcttgaagagaaataagggaggtcttacacagcaggtgttttgaacacatgagctcctcagttcttacagggaactggcttttcaggtgagtcaggacaggtttgcaaggataccccatgaaacatgcctrcatcaaatactgtgatcacacagtmccaggccctaggaacaacaccagttccaggcataaggatcacaatcctcagtttcttccagtggtcaaggacagctcccaggactgtcttattcagtctcctttag

SEQ ID NO: 31676 - DNA, 600 bp, Chicken  19866894254250_6
ttctcaggagaccctgcaaagagacctgccttattgcactgtaatatcacctgaaagcatctctggctgcttacatacaggcataccagggctggggcagggagaactcattccatcatctttttgccacygagagacaaaatgttcctttccggaaaggagcatgcaggcttgaagagaaataagggaggtcttacacagcaggtgttttgaacacatgagctcctcagttcttacagggaactggcttttcaggtgagtcaggacaggtttgcaaggataccccatgaaacatgcctrcatcaaatactgtgatcacacagtmccaggccctaggaacaacaccagttccaggcataaggatcacaatcctcagtttcttccagtggtcaaggacagctcccaggactgtcttattcagtctcctttagatgtgagcatttyaaatcagtgaaacacagctgtttctgactctaagacagcagcccaagtgagttccctagggcagggcaatttgggctgcaagtcacagattgcaaccacaggagactacttggctttcccctttatgagaagagtaaaggaattcagagagcaagt

SEQ ID NO: 31677 - DNA, 600 bp, Chicken  19866894254250_7
ctgccttattgcactgtaatatcacctgaaagcatctctggctgcttacatacaggcataccagggctggggcagggagaactcattccatcatctttttgccacygagagacaaaatgttcctttccggaaaggagcatgcaggcttgaagagaaataagggaggtcttacacagcaggtgttttgaacacatgagctcctcagttcttacagggaactggcttttcaggtgagtcaggacaggtttgcaaggataccccatgaaacatgcctrcatcaaatactgtgatcacacagtmccaggccctaggaacaacaccagttccaggcataaggatcacaatcctcagtttcttccagtggtcaaggacagctcccaggactgtcttattcagtctcctttagatgtgagcatttyaaatcagtgaaacacagctgtttctgactctaagacagcagcccaagtgagttccctagggcagggcaatttgggctgcaagtcacagattgcaaccacaggagactacttggctttcccctttatgagaagagtaaaggaattcagagagcaagttctgaccaaggcagacagaatgaat

SEQ ID NO: 31678 - DNA, 554 bp, Chicken  19866894254250_8
ttcctttccggaaaggagcatgcaggcttgaagagaaataagggaggtcttacacagcaggtgttttgaacacatgagctcctcagttcttacagggaactggcttttcaggtgagtcaggacaggtttgcaaggataccccatgaaacatgcctrcatcaaatactgtgatcacacagtmccaggccctaggaacaacaccagttccaggcataaggatcacaatcctcagtttcttccagtggtcaaggacagctcccaggactgtcttattcagtctcctttagatgtgagcatttyaaatcagtgaaacacagctgtttctgactctaagacagcagcccaagtgagttccctagggcagggcaatttgggctgcaagtcacagattgcaaccacaggagactacttggctttcccctttatgagaagagtaaaggaattcagagagcaagttctgaccaaggcagacagaatgaatacacaaccatgtcatccctcttctatctttttaaagccctgcaattcccctgtctacacttaacatactaatt

SEQ ID NO: 31679 - DNA, 599 bp, Chicken  19866894254261_1
  misc_feature (1)..(60): n is any nucleotide
nnnnnnnnnnnnnnnnnnnnnnnnnnnnnnnnnnnnnnnnnnnnnnnnnnnnnnnnnnnnccctggaattggctacatcttgtcagaggaattttgaaatcgtgcagctgttatcccacgactggagatgtcccatcccttccactaaaaatacattcatcactgctccaggcaaacaactccccccgccccactccagcttctccctccctcttaccctctggggattcccatgcaacaaactttacaaggcttaggaacagcacttaacccaagcagccttctgcttcccagctgcaytgtaccaagttggcagtgctatcaattcatcagtacatttccataatgctcamcatctccaagggctaagagcaaaagctcacaacactgtgtgtagcacctctctgggtgtctttctggcccccaggacaaaactgctgcctgtacccacagtgctgtacagctctggatgatgaggtcagggctttcagggagcatcacycagtttgagctgctggcaccccaatgcaggaggtgcagcccgctgaaaggagctgctcacacctacagcccatgctctgcatagctggagaatgact

SEQ ID NO: 31680 - DNA, 599 bp, Chicken  19866894254261_2
  misc_feature (1)..(7): n is any nucleotide
nnnnnnnccctggaattggctacatcttgtcagaggaattttgaaatcgtgcagctgttatcccacgactggagatgtcccatcccttccactaaaaatacattcatcactgctccaggcaaacaactccccccgccccactccagcttctccctccctcttaccctctggggattcccatgcaacaaactttacaaggcttaggaacagcacttaacccaagcagccttctgcttcccagctgcaytgtaccaagttggcagtgctatcaattcatcagtacatttccataatgctcamcatctccaagggctaagagcaaaagctcacaacactgtgtgtagcacctctctgggtgtctttctggcccccaggacaaaactgctgcctgtacccacagtgctgtacagctctggatgatgaggtcagggctttcagggagcatcacycagtttgagctgctggcaccccaatgcaggaggtgcagcccgctgaaaggagctgctcacacctacagcccatgctctgcatagctggagaatgactttgtagcatgtctgatgtgtccagacagcgctggattgcctgtgcacgaagca

SEQ ID NO: 31681 - DNA, 600 bp, Chicken  19866894254261_3
ctccctccctcttaccctctggggattcccatgcaacaaactttacaaggcttaggaacagcacttaacccaagcagccttctgcttcccagctgcaytgtaccaagttggcagtgctatcaattcatcagtacatttccataatgctcamcatctccaagggctaagagcaaaagctcacaacactgtgtgtagcacctctctgggtgtctttctggcccccaggacaaaactgctgcctgtacccacagtgctgtacagctctggatgatgaggtcagggctttcagggagcatcacycagtttgagctgctggcaccccaatgcaggaggtgcagcccgctgaaaggagctgctcacacctacagcccatgctctgcatagctggagaatgactttgtagcatgtctgatgtgtccagacagcgctggattgcctgtgcacgaagcagttctcatgcttcctggaaatactggacttgctacacaaacaacaacttctgctggtgaaactgcaggcacagagaacacgtgtgcagagacactcggggtggaggtgggtgtggggttggggtatctgcctcctccatgaagtcaaacc

SEQ ID NO: 31682 - DNA, 326 bp, Chicken  19866894254270_1
gggctatttagtcacaggccagatattctgcaagtaaccactcctgagcactctcttctggaggcaagcagctctggaggaagttgctttcaaatgtaaaattgtccacacagtgatgttgattgccacacggcaacaaccatctctcatctaagtcagagtcttaccacaagaaatgcctcagaaagcaagctttgaaccaaaaaaagacaaggaaggattcataaaactgcacctcaggctacctctgttcttgatctctggtaagttctgcaccagtgaacaacaggtcaatccctyaacgtagtacttcccagattttttca

SEQ ID NO: 31683 - DNA, 600 bp, Chicken  19866894254275_1
tttgggaagggagaggaacacatttcatcttcgcctagacatgactcataacaactctcccctccgtgcagcccagaaaattgccccagtgcttcactccctcatatccaacctttcccctgctagctcacaggccatggcaagccacagctttacatctacattacttcctgtgtgcacagctggaaacactgtacatagtggcatgttctttaaggactcacattatgctactcttacttcttatctgctaatcaggatgcaatctgatccacttccactatcccacctcactgccaygctatctggccacctggaaacactcctgtcttttgttgcaacaatgatgcaacgaggaattcttattattattttacagaggcacagagtgattaagtgatttgttcaaagtcagcagcagagcccacagctgaagtcgtaaaatgtgaactcccttgaaaaacagagagttattcattgtctgtctccttgataactctgatattacatgctattttccagtgatcgctgtgctacattgcttctctctgatcttaatgactgtatcccagatttgtgaatagcagaaaaaggaaaaca

SEQ ID NO: 31684 - DNA, 526 bp, Chicken  19866894254280_1
cttgttttgaatgattgtttatggatgtttctagagaaataaatttgatatccaagaaacaaatgttttcatctttttaaggagtaaaaagcttgtttggagcaaatacaactgtgcagttacatttgaaaccaagttcttatctgtctgcttcctcagaaacagggttatccaaccatattcttaatttattttttttctcccttctttcaaaggcagcagaggattaatgcttctaaatcagggctttaatagaccaaatttgaaattaatgtgagtgttgacaactgaaggtcagaygtggaaacagagattcacagaggaagtgtaggccagtttccctggcagcggtgcagtgttctgccccaaaagcaggtttgctatcctgactggactttttggctaaaatctactttttggctcacatgaagcatctgagtctgctgcttggtgtgacacagcaggagcacgcgatgtatcagcaccccctacaagttcccagaccttccaaaatctcctgggtata

SEQ ID NO: 31685 - DNA, 600 bp, Chicken  19866894254288_1
cttatcagccagcactgcgtggaggtccgacttctctagcagcttgttatctaaaagaacaattaagaaaaatcagcaaagagcaaaaccagattcccatatgttccttcaccacctaaatgtggtacaacacgccataagcctgtaccacagcgaggtgtgctgctggctggggcagtactcaactccaaggccagcccctcattagttcaggagctgtgctcggcagaaggctgccatggctcacaggtattgatatatgataaacctaagttggaagtgcaaagtccaacctcctcrcagctctgatccaacagcaaagagcagtgctgggctatcaccacacacaacacaaggctgtgccgcgcacgagggtgctgagagaagcagctacttattcttcagataaaacaacgcacacacaaaaatttaaattaaaaaacaaaacaacccacaacttttctcggttgggacaccccctcacgtcgccctcgtggaattgagataagcgaggcccggtgcccccagccccgcgactttcctccgtcccagaggaaccccgaggcacagagcccgccgcaggcgctcacactgcgcgac

SEQ ID NO: 31686 - DNA, 599 bp, Chicken  19866894254290_1
  misc_feature (1)..(129): n is any nucleotide
nnnnnnnnnnnnnnnnnnnnnnnnnnnnnnnnnnnnnnnnnnnnnnnnnnnnnnnnnnnnnnnnnnnnnnnnnnnnnnnnnnnnnnnnnnnnnnnnnnnnnnnnnnnnnnnnnnnnnnnnnnnnnnnnntaatccacagccccatcctccgctgcagcggcgagcctgcataacacagtccagctccaacaaccccatcatctcatgatgcagattattttcattctgcttttgttctggcagtggtttcccccccggcccctgctggcactatgccacggcctgcttgtgactctgagrgcaactgctttggaaatgacagcacttggtgcaatttcctttgtttcagaatgcgtagagcgtgtgyttggtgacagtttttctagttaggccacttcttttttccttctctcctcattctcctaagcatgtctccatgctggtaatcccagtcaagtgaacgttcaaacaatgaatccattactgtaggattctcgtggtgatcaaatctttgtgtgaggtctaaaaaaatatggaagcttatttatttttcgttcttccgtatcagtcttctctatgacaattcacatccamcacag

SEQ ID NO: 31687 - DNA, 599 bp, Chicken  19866894254290_2
  misc_feature (1)..(62): n is any nucleotide
nnnnnnnnnnnnnnnnnnnnnnnnnnnnnnnnnnnnnnnnnnnnnnnnnnnnnnnnnnnnnntaatccacagccccatcctccgctgcagcggcgagcctgcataacacagtccagctccaacaaccccatcatctcatgatgcagattattttcattctgcttttgttctggcagtggtttcccccccggcccctgctggcactatgccacggcctgcttgtgactctgagrgcaactgctttggaaatgacagcacttggtgcaatttcctttgtttcagaatgcgtagagcgtgtgyttggtgacagtttttctagttaggccacttcttttttccttctctcctcattctcctaagcatgtctccatgctggtaatcccagtcaagtgaacgttcaaacaatgaatccattactgtaggattctcgtggtgatcaaatctttgtgtgaggtctaaaaaaatatggaagcttatttatttttcgttcttccgtatcagtcttctctatgacaattcacatccamcacagcaaattaaaggtgaaggaggctggtgggatgaagagggtcttctagctttacgttcttccttgcaag

SEQ ID NO: 31688 - DNA, 490 bp, Chicken  19866894254290_3
ctgagrgcaactgctttggaaatgacagcacttggtgcaatttcctttgtttcagaatgcgtagagcgtgtgyttggtgacagtttttctagttaggccacttcttttttccttctctcctcattctcctaagcatgtctccatgctggtaatcccagtcaagtgaacgttcaaacaatgaatccattactgtaggattctcgtggtgatcaaatctttgtgtgaggtctaaaaaaatatggaagcttatttatttttcgttcttccgtatcagtcttctctatgacaattcacatccamcacagcaaattaaaggtgaaggaggctggtgggatgaagagggtcttctagctttacgttcttccttgcaaggccacaggaaaatgctgagagctgtagaatacagcctggggtaagaagttcagtctcctgctgggacagctaaccgcatcttataaccccttctgagactcatcttaagaccaaatag

SEQ ID NO: 31689 - DNA, 600 bp, Chicken  19866894254293_1
actaattaccagctttgtgtttgtttgctgtgtactgtaaactgggttctattttctgagtcagtattataacaacttcatcctttaggattagcacatgctttgttttctttataaaaggctaacagcagaagtcagtattttcctattcaaatatgtacatattaatccaaattaacatgctgtcagtaagctgaaatatagttcctagccagtagaagtaggagcagagtcttttactagaaatgcagaattaataaattgaagagttcgtagtcatagttgtaggctgttactccycagcacagaactaatcattgtaagttactagtaaggtgaataaatacattaaactttggaaagttcaatatgtatgtgtttcctttcagacttctttcctaattgcagataggttcctttgtaaataaaaaagcccagtcagtagtcaactttgtaactgcaagtttccaatgctgcttcttaaattagagtccagcgagttctgctcaggatatggtctactatcatgtccacaaggatgtagttcactttagcagtagttcttcatcgttatagggtaaatacttccatgctttgctt

SEQ ID NO: 31690 - DNA, 600 bp, Chicken  19866894254305_1
gttggcctcaacatgcaaacatttggtaaaatgcctccatccaaaatggtaacttaaaccactgtagcagaacacaggagaagaaaattgaagcctgtctcagaacgaatgcataaatgggaatcttaaccctcctattaaaaagttgtacaaatttaggaatgctgttttgtattgtatcgtattgtactgtgttgtacaatggaatgcattttgttcaggactgattcatccggaagaattaacggaatcaaaaccacaaatggaaaaagctctatgaattcccttgaattttgttcygataaattgcctgtgatattaagaactggaattggcacctactttgctaaacattatcaatttttcttacctgccacttaccagtcaagtgacagggcaaaacagtacagcccgacattgttcgtgcattgtttcctttaaggcaaattacatyacattcaacttcaaaagtcacatttcccaaatgaacctgacaaaactgaaagattaatgaatcaagaatattttctttaagcatcaacgtaccacggagggcaattagtgatcatgaagcaatcaaattattgtctcacgcctctt

SEQ ID NO: 31691 - DNA, 600 bp, Chicken  19866894254305_2
tttaggaatgctgttttgtattgtatcgtattgtactgtgttgtacaatggaatgcattttgttcaggactgattcatccggaagaattaacggaatcaaaaccacaaatggaaaaagctctatgaattcccttgaattttgttcygataaattgcctgtgatattaagaactggaattggcacctactttgctaaacattatcaatttttcttacctgccacttaccagtcaagtgacagggcaaaacagtacagcccgacattgttcgtgcattgtttcctttaaggcaaattacatyacattcaacttcaaaagtcacatttcccaaatgaacctgacaaaactgaaagattaatgaatcaagaatattttctttaagcatcaacgtaccacggagggcaattagtgatcatgaagcaatcaaattattgtctcacgcctcttatttccagagcagtttgctgtaaccttgcattccaagttgcctggtggatattatgacatgtcctcaagcttttacactcaaagagagtagactgtaataaccctggaaaactggagtgagaatgttttttaacctccaaaagtaaccaatcag

SEQ ID NO: 31692 - DNA, 600 bp, Chicken  19866894254319_1
tgttttgaggctcatctcacattttcctacccttccccctttccctttcccctttcctagggtgtagacctgtgggtcccctgctgcatttctcacagaactggaacaaatcagcctgtaaaccattggcaccccccacccccctctcctttttgggcctgtgggcctgctgtcctctgtcatggacacagatagatctagataaccctgtgacacgggtaaactcttagatgctttaaacatggttttgcatatgatttttatcatatcttaatattaaatattgcatattaagcactrtctggtgtagagtttgtgtttgtggttagggctgcttaagtgactgttgtgtaaagtttaatgctctctatcatttttaagtcttcttaaaaagcctgcatgataattggagctgaaaatataagaaaatatctgcttctggttttccacaggatctgtcctgtccaggatttagagatcttttatattactttcgtgagggaaatcaggaagattggactccatcagatggataatgaggtgtttccccatgaaatcacttctgaaaaatgtaaaggatgaaaacatttgaaaatccat

SEQ ID NO: 31693 - DNA, 519 bp, Chicken  19866894254326_1
tgcttaaaaactgggctgaaatcctcttgaacacatcagttatgaagtcttgactctaattttagctaaacattataatatgtctaatgtgaagaggcccattcagcaacacaaggactttctggattcatttactactcagtacctcactttaatgtgcttcagcctctttcacttgaacaggtcttgcttaaaactaaccgtgtgcagtagtgaataagaacggcacagtaaatgtgggcaaaaaggctcatctaacattaaaaagtagactgcacacagcacccatcaggacaatayyaagaagcatatagcattagagattcaaactgaaacataatcatacatggtgcggacctggtgacaaaaggaaataggaatatattaaataggcatgtgatttaagggatcaaagagatgtgattctcatagccagatacccatacgcagtgcctctgaagtaaatgcagctggacgttattatctctattgctctaccaggctctgacagacatctgt

SEQ ID NO: 31694 - DNA, 518 bp, Chicken  19866894254326_2
gcttaaaaactgggctgaaatcctcttgaacacatcagttatgaagtcttgactctaattttagctaaacattataatatgtctaatgtgaagaggcccattcagcaacacaaggactttctggattcatttactactcagtacctcactttaatgtgcttcagcctctttcacttgaacaggtcttgcttaaaactaaccgtgtgcagtagtgaataagaacggcacagtaaatgtgggcaaaaaggctcatctaacattaaaaagtagactgcacacagcacccatcaggacaatayyaagaagcatatagcattagagattcaaactgaaacataatcatacatggtgcggacctggtgacaaaaggaaataggaatatattaaataggcatgtgatttaagggatcaaagagatgtgattctcatagccagatacccatacgcagtgcctctgaagtaaatgcagctggacgttattatctctattgctctaccaggctctgacagacatctgt

SEQ ID NO: 31695 - DNA, 600 bp, Chicken  19866894254333_1
gtcagtcatgccttttacctagacctcctgttattaagatcttagctactggaaatctacgagaacattgcactctaatattgtgtggctgctgtgtttcagttcttaaatgacaatctggagattactattttcagacctcactaaaagaaaacatgctacatctacaaaaaattaaaagaactgatttgcatatgtgtcataaaagagtgagagaaacgaaggaaggtgatagaaagagtaagtgatcactgaagatgtgaaataaagatcaataggaaattgtactagctttctaarttattgcatgatacagtaaaacctactcattgtgtaatcatggcaacaattcattgcaacatcatcccaggatacatcaaagtggaacctacaactttaatactataatgtttattctctttaaaatgtatttaattcttgatagcattaatcagaatgagaaacatcacaaaaaaaagtaccaaaaaaaatcaaatcctatgttgtgctttggcttatctgtaaataggttttccagacaactgaagcttaatgttctcctgtctgatataacacgtgtattagtatgcatataagaat

SEQ ID NO: 31696 - DNA, 600 bp, Chicken  19866894254338_1
tcttgagagtgacctatcaccctgtattacatttgtggacagagccaaccaagtgggtgggacacagcgtgggacaagactgcttccacagacagcttggtggggggcctgctgcctacaggagcctccatcagccctatgtatgccagtacccattgccccatgcacagctctcagcccatatttaaggcatgggtactgataatgttagttcctctacaaacaacatcagacaagctctgattttcaacgttaaaccttcaagaggggttcgccagccctacttggccagacgggtcycgctggattgtttcctttccttccctggcagggtgcccacactcttttggcatgaataactgcacattcaaatggagcatttggtttccacaaacacatgtgcatgtgaccttcaaattcgcttccacaaacatttgtgtcattgtaggttaatgggtgcgtgaacagtactacatggaaagaggttactgtgaawtttctggtagagaagcagccttttgcacttgaaaagcaacagaattatatgggacactccttgtctcagatacagcaaattcatggggaagtcagatatttcag

SEQ ID NO: 31697 - DNA, 522 bp, Chicken  19866894254338_2
tactgataatgttagttcctctacaaacaacatcagacaagctctgattttcaacgttaaaccttcaagaggggttcgccagccctacttggccagacgggtcycgctggattgtttcctttccttccctggcagggtgcccacactcttttggcatgaataactgcacattcaaatggagcatttggtttccacaaacacatgtgcatgtgaccttcaaattcgcttccacaaacatttgtgtcattgtaggttaatgggtgcgtgaacagtactacatggaaagaggttactgtgaawtttctggtagagaagcagccttttgcacttgaaaagcaacagaattatatgggacactccttgtctcagatacagcaaattcatggggaagtcagatatttcagtgttagtggcaaccagccagtaggacgaggtaatttaacatccacttctaggtacaaaaaggcgctggtgacaagactgggaggttgtatcggattacactaaaagacaaacattttt

SEQ ID NO: 31698 - DNA, 600 bp, Chicken  19866894254348_1
acatgtacagaattgctgagatcaacagaaacccagctcttggaaagagttaaaacacatgattagacatggggccaaaatcaaagggccttcatccatcctacgggtggtgctatctcaaagtataatcacaccctggggtggcataatgctatttatcaactaactaacttgcctatatttgagatgggcaagacagagacttcagtttagcatgcatttaaatactgccaagtgagaactgcagccatgacatgcagcctgcaaaactctcaattaaaaagaaaaaaaaaaaaaaaraagaagaagaagaaaaaaaagagagagaaagagaaagaaaagaatcaatgaatgagaagttgaaaggtatgcgagtatgtggaaaaatggtgttacctgccattaatgcacagcaatgaaagarggtaggaacagagagaaggaacaagaaaagttgtagtacaagatgatctaaagattttacccacttttctgcatctgtgatacttctccagcaaatgtctgaagactaactgaattaattaatctgctagttacatgcataaaaattccagcgatgaccaaggacagaaaacaatg

SEQ ID NO: 31699 - DNA, 600 bp, Chicken  19866894254348_2
tgctgagatcaacagaaacccagctcttggaaagagttaaaacacatgattagacatggggccaaaatcaaagggccttcatccatcctacgggtggtgctatctcaaagtataatcacaccctggggtggcataatgctatttatcaactaactaacttgcctatatttgagatgggcaagacagagacttcagtttagcatgcatttaaatactgccaagtgagaactgcagccatgacatgcagcctgcaaaactctcaattaaaaagaaaaaaaaaaaaaaaraagaagaagaagraaaaaaagagagagaaagagaaagaaaagaatcaatgaatgagaagttgaaaggtatgcgagtatgtggaaaaatggtgttacctgccattaatgcacagcaatgaaagarggtaggaacagagagaaggaacaagaaaagttgtagtacaagatgatctaaagattttacccacttttctgcatctgtgatacttctccagcaaatgtctgaagactaactgaattaattaatctgctagttacatgcataaaaattccagcgatgaccaaggacagaaaacaatggagttcattctcc

SEQ ID NO: 31700 - DNA, 600 bp, Chicken  19866894254348_3; identical to SEQ ID NO: 31699

SEQ ID NO: 31701 - DNA, 600 bp, Chicken  19866894254348_4
ataatcacaccctggggtggcataatgctatttatcaactaactaacttgcctatatttgagatgggcaagacagagacttcagtttagcatgcatttaaatactgccaagtgagaactgcagccatgacatgcagcctgcaaaactctcaattaaaaagaaaaaaaaaaaaaaaraagaagaagaagaaaaaaaagagagagaaagagaaagaaaagaatcaatgaatgagaagttgaaaggtatgcgagtatgtggaaaaatggtgttacctgccattaatgcacagcaatgaaagarggtaggaacagagagaaggaacaagaaaagttgtagtacaagatgatctaaagattttacccacttttctgcatctgtgatacttctccagcaaatgtctgaagactaactgaattaattaatctgctagttacatgcataaaaattccagcgatgaccaaggacagaaaacaatggagttcattctcccttattctggcaagatctgtagtgtcaaagcacttttatatgcataccatgagatgtgcctcctaccaccagttatatggactttacagtcatgtcatacagagagctccg

SEQ ID NO: 31702 - DNA, 600 bp, Chicken  19866894254354_1
cctttttgttttcttgtaattttccagctgtaacgtctgcacacatttgtatctttccaattcacactgttcacataggtcctcaagacacaataggtgagtctccatttcttcaaagtttgcctctagacgggctacatgaaatacttgtatgagcaccgaactgtatcaatagatgcacaaccccacccaaacagaaatgggaattcatagagttaacactgtaataactacacatacgtaaatggctcagaaagataaacatctcatatcacatagtacagagtgacaacagcaccrttttaagtgagatctagctgyggttctctttgcagtgagatgctgaatcacttgctatatttgccccaacacaccacagacctgtggtctgtacttggtgaaaagaagcagccagaatctgtagcttaattttgctagtcaagcacactgtcagtttaccccttcctgtatcatgccagtctgaggaaggaagatgtactgaacaagaccagtactgatcttaattattcaactcaagtaaaacataatgtgagaattttaactctaacatgaccttgtgataacctaaaccacaggctc

SEQ ID NO: 31703 - DNA, 600 bp, Chicken  19866894254354_2
ttccagctgtaacgtctgcacacatttgtatctttccaattcacactgttcacataggtcctcaagacacaataggtgagtctccatttcttcaaagtttgcctctagacgggctacatgaaatacttgtatgagcaccgaactgtatcaatagatgcacaaccccacccaaacagaaatgggaattcatagagttaacactgtaataactacacatacgtaaatggctcagaaagataaacatctcatatcacatagtacagagtgacaacagcaccrttttaagtgagatctagctgyggttctctttgcagtgagatgctgaatcacttgctatatttgccccaacacaccacagacctgtggtctgtacttggtgaaaagaagcagccagaatctgtagcttaattttgctagtcaagcacactgtcagtttaccccttcctgtatcatgccagtctgaggaaggaagatgtactgaacaagaccagtactgatcttaattattcaactcaagtaaaacataatgtgagaattttaactctaacatgaccttgtgataacctaaaccacaggctcaaaaaagtaaccaataaagat

SEQ ID NO: 31704 - DNA, 600 bp, Chicken  19866894254354_3
ctgaatcacttgctatatttgccccaacacaccacagacctgtggtctgtacttggtgaaaagaagcagccagaatctgtagcttaattttgctagtcaagcacactgtcagtttaccccttcctgtatcatgccagtctgaggaaggaagatgtactgaacaagaccagtactgatcttaattattcaactcaagtaaaacataatgtgagaattttaactctaacatgaccttgtgataacctaaaccacaggctcaaaaaagtaaccaataaagatagattgatgggcaaacctctrtcccacatatgctcagaaaacatttcaatctttttttaagtttaggctctggacattgtggataaagagatcatgcctatgaaaagccctgagaaatcttatctcatagctcaccttgttctgagcagaaatttagatctccttaagtaccttctggcctgaattatcctatgtgaatcttacatcaaaaatcgctccccttatgggtgactaaatactgagttccatgtccctcatcgggatcccaaagtggaaaaactaattttccaaaactgtaatgaactaatcattccaggatgg

SEQ ID NO: 31705 - DNA, 599 bp, Chicken  19866894254360_1
  misc_feature (1)..(18): n is any nucleotide
nnnnnnnnnnnnnnnnnngcatcatgaataattaacttggcagctggcttttgctttcatggcagacaatcaattggaaactgtgccagagatgcatttgtttctctctttttctctttttccccattttctgacccagtcaatgttaataagcagtgttttgattgcagcccgctttcagaaggcaagtggctccctgcctgctcgtcccttctgcccttcagatccatgctttcctaactcagatagttgagggaaagtgctgcccttcaaacttgattgactgaccagcagtgtgayagcatgggaggagagctgtggctgagccctgctttctgaaggacaaacttcatggagtgtggagccccttttggaaagctgaggtcttacgtggtgagaggtgtgctactctgaagctgcagtgactggtagagctcagtcttctgaaccttcctgctgcttgtggttacaggaaggtagggaagcaaaccactgtttgtggttagtagtcgagcagctgctytcaccctctctatcctcagcaccattgtgtgcagagggacagcagggttacaggagcccactgctgtggcacaaag

SEQ ID NO: 31706 - DNA, 600 bp, Chicken  19866894254360_2
gatccatgctttcctaactcagatagttgagggaaagtgctgcccttcaaacttgattgactgaccagcagtgtgayagcatgggaggagagctgtggctgagccctgctttctgaaggacaaacttcatggagtgtggagccccttttggaaagctgaggtcttacgtggtgagaggtgtgctactctgaagctgcagtgactggtagagctcagtcttctgaaccttcctgctgcttgtggttacaggaaggtagggaagcaaaccactgtttgtggttagtagtcgagcagctgctytcaccctctctatcctcagcaccattgtgtgcagagggacagcagggttacaggagcccactgctgtggcacaaagcctgtgatggtggtggtttcagtgcattcttcctattcccacacgctctgaacactggcaaaatgtccccaccagcttatccagccattatccacaaacctatctaacctccattgtgtgtagttctttctttttttccccttgtcttaccacaactactatttcagtagaaaagagaggctgtgcatgggaaaaggaccagcctaaatccactctcttgcatc

SEQ ID NO: 31707 - DNA, 600 bp, Chicken  19866894254360_3
tgagctttcaccctgctgatgtggcagggctgttagttcagatttggattagtctctctttcacatgctctgagtcagcgctggggctggcagttttctggctggactttgggaagtgaggggcctttggcattttcattctcaaacgatggtctggggaatgagtaccagcagcctttgccatctgaagaactgtgggagatgagctcagccttcataataacaggatctttagtatcaaccatttcaaatgctgaaagaaagacagctatattaactccaatgggactggattcagcrcaggatcaagctcgtgttgttccttttgaggagttgcaccctctcacagcaggtgaattcgaccaataactttgtgaaaaaacacagcagcagagcagggttgttgagagcatgtgagctggtttataagccctcagagggatggccttcagatgagacagtgagacttggtgtttggaatttaacattctctttttgggaaaatacaggtctcttgatgttcagatgcctctaaaacagtaacgttgtgaaattgggaagaaggtgcaaaaaactcaatcttttcttctcatcgattgg

SEQ ID NO: 31708 - DNA, 600 bp, Chicken  19866894254362_1
gtgcttggtacaggagctctctgttggccatgcttctcaactctcattccagaggcagcatccccgctggcactgagtctgcattggatgaacaaatacagcaaagctgtacgtccagcagattgcccggtggtgatccgtgctgtgcagatagcccagggctgggcctcgtgcagactcccgcatctcctgatggagctgtgcccttctggtgctttgtgcctcgatttttttctcttgctgctcaggcgaggtggagaagcatgcttgattgtgactgcgattgctgtgctaaccacrgtgtgtgttctcttgtttttttktttgttggtttgtttcctgctttttcacagcagaaggggccctgcctcacctactcgacctaccataatccgaccggctgaaccgtccctcttagatttataacccgaggctgcagacagctggcgacgagcgccgtgctggcggcttccccatcccacctcccctccacagccacagtcactcctcatccatcccacacctgcctccccccaccccttcccgctgtgtcgtgcagcactaagcctagtgaccgagctcttcgtctccactcgtgcg

SEQ ID NO: 31709 - DNA, 600 bp, Chicken  19866894254362_2
ttggccatgcttctcaactctcattccagaggcagcatccccgctggcactgagtctgcattggatgaacaaatacagcaaagctgtacgtccagcagattgcccggtggtgatccgtgctgtgcagatagcccagggctgggcctcgtgcagactcccgcatctcctgatggagctgtgcccttctggtgctttgtgcctcgatttttttctcttgctgctcaggcgaggtggagaagcatgcttgattgtgactgcgattgctgtgctaaccacrgtgtgtgttctcttgtttttttktttgttggtttgtttcctgctttttcacagcagaaggggccctgcctcacctactcgacctaccataatccgaccggctgaaccgtccctcttagatttataacccgaggctgcagacagctggcgacgagcgccgtgctggcggcttccccatcccacctcccctccacagccacagtcactcctcatccatcccacacctgcctccccccaccccttcccgctgtgtcgtgcagcactaagcctagtgaccgagctcttcgtctccactcgtgcgtcccgtgttgctttgtgagcgta

SEQ ID NO: 31710 - DNA, 600 bp, Chicken  19866894254362_3
cacctactcgacctaccataatccgaccggctgaaccgtccctcttagatttataacccgaggctgcagacagctggcgacgagcgccgtgctggcggcttccccatcccacctcccctccacagccacagtcactcctcatccatcccacacctgcctccccccaccccttcccgctgtgtcgtgcagcactaagcctagtgaccgagctcttcgtctccactcgtgcgtcccgtgttgctttgtgagcgtagcgtagcctccattcagtggcacggatcccagaagcgcaggctgcayggagagggcagccccagggacgtccctaagcccgaacgttggctgtccgtcccgttctcatccgcctgtctggcctggatcagtgccctgcctgcatcacctagctgtagcaccacctaggactgagctgtagcgacttccttgtagttaagaagatacgagcgtgacttagagcatcacgtcttgacagcgttcttgcttcttaggaacagattaaacgtcctacgtgtattagtttgacttccatggtgcaaaacctcatgttgggaacagtgcaatctaccttcaatcaaagcgagg

SEQ ID NO: 31711 - DNA, 600 bp, Chicken  19866894254364_1
cctgcatttaacagcagcaggaaacattttgtttgctacttccctgggtgttttccaatgacaaaaaaaattgcacacttctgtctagtgaaattcagttagaatgcttggtagctggacaaaaatcaggctagacgtagctgcttagcatggtttgcattacgtgctagctgcggacgttgccttgaggagagtatgcacacagaatattttgtcttaattgactccagtctgcttctccgagaggcttctaatctttgtcctttccattccttttaacatacaccagtgtaagacttygctcttttatgtatctgttatatagatggctgtttcttaaaagttcttctaaaaattaatacaggttagattgtttgatctaaaaagagcagaagaccagtcctgatttgagttgtgaggaggaactgggctgtagtggagatgctgtatcaataaccagaagagctaagctaatgctgttactgttcagagctacagcaaacttatttgcacacaaggcaaatagtgagtagcatttctttagcaggtcttctgccaaactgacctctccaagctctgttgcagaagtatctgtattca

SEQ ID NO: 31712 - DNA, 600 bp, Chicken  19866894254365_1
tgggacccaagtactgaactcaaaagagcagatcattgcaaagcatcactaaaagaaaaccatccagaaaacccttctgagtcccagtcccttccatcttctttaacacacttcactccaagaagcacccgtccactttcttaagggcacgtttaagtgtttcctgaaaagtgagcctttgctcactgctgagcaatcgtactctgaacagtcagtcttagaatggattacgcttttgtctgcaggattctgccatcttgaaaatgcaaacttagcaagtatcatctatcagagtcagcrgataatctgcaacaactgttttaggagcagatacgagcctcactgccttccaaagtagcctgcagcatcayggcctcctgtttcagctctcasaatccttaaacagtgcacttcttcagctacattttcctgcactcagcctaaaagttcgttcttctactggctcctatttcaagatgtatcttttttaagccaatgacataaaatatgttaaaatattttcctccatttttcacagaaacacaaacatgcaaagtcagaacttgtcaacaatctctaattttctgaaatgttggaaat

SEQ ID NO: 31713 - DNA, 600 bp, Chicken  19866894254365_2
cccttctgagtcccagtcccttccatcttctttaacacacttcactccaagaagcacccgtccactttcttaagggcacgtttaagtgtttcctgaaaagtgagcctttgctcactgctgagcaatcgtactctgaacagtcagtcttagaatggattacgcttttgtctgcaggattctgccatcttgaaaatgcaaacttagcaagtatcatctatcagagtcagcrgataatctgcaacaactgttttaggagcagatacgagcctcactgccttccaaagtagcctgcagcatcayggcctcctgtttcagctctcasaatccttaaacagtgcacttcttcagctacattttcctgcactcagcctaaaagttcgttcttctactggctcctatttcaagatgtatcttttttaagccaatgacataaaatatgttaaaatattttcctccatttttcacagaaacacaaacatgcaaagtcagaacttgtcaacaatctctaattttctgaaatgttggaaatggtcagagactaaataaaaatgtgtgtttctgctcccagtggcattccagaagattcagatgttatggatg

SEQ ID NO: 31714 - DNA, 600 bp, Chicken  19866894254365_3
ccatcttctttaacacacttcactccaagaagcacccgtccactttcttaagggcacgtttaagtgtttcctgaaaagtgagcctttgctcactgctgagcaatcgtactctgaacagtcagtcttagaatggattacgcttttgtctgcaggattctgccatcttgaaaatgcaaacttagcaagtatcatctatcagagtcagcrgataatctgcaacaactgttttaggagcagatacgagcctcactgccttccaaagtagcctgcagcatcayggcctcctgtttcagctctcasaatccttaaacagtgcacttcttcagctacattttcctgcactcagcctaaaagttcgttcttctactggctcctatttcaagatgtatcttttttaagccaatgacataaaatatgttaaaatattttcctccatttttcacagaaacacaaacatgcaaagtcagaacttgtcaacaatctctaattttctgaaatgttggaaatggtcagagactaaataaaaatgtgtgtttctgctcccagtggcattccagaagattcagatgttatggatgatagatatatcttttttcttcc

SEQ ID NO: 31715 - DNA, 600 bp, Chicken  19866894254377_1
attatgacaagttcccttgttaaaactgtgctgatagaggagctgataattaactggccaatgtctgtactgtactagcacattgtccagtcttatctagcagtggttttcggagataacactggacaatggcctgtttggacaggcgagtaaactggaaagaagtacttgaatgcttgcacacactaaaaagaaaaagccactattcagatgctaagctactaaattcaactactccatataaataccgtttttattcagatagctttcccaacagatgatacgtcactttgactgcartagtccagcagtgacttcaccttgactttgcccagtctattggttcaaaaagagagaaaggaaatcgtctgccactggccagtgaagggaggaggcatttagaaaccacaatgttgaaagcagaggagaaatagctgaaatactcccggaaggcaagagacaaagcaaggcagataccatcaagcatttcttctagcaacgcttgaatccaaattctggccactgatctgggtgaggaattgctcccaacagagccaagagttctcatgcaacgtagagacgataattcctaggataaac

SEQ ID NO: 31716 - DNA, 600 bp, Chicken  19866894254378_1
agtcataagtcataagtaatcatgaccctctgtcatgattacttaccctgctcttggggaaagtgaggtgccatttatgttgaactgctgctctggctatgatgtgcagagatctgctggacttgaaagctcctttcacaggtatattcccatcaggggaggccacttgtggccaatgatgctacttctcacttttttctttccagccagttgccaggaaaacattcttgtctttcaccctgtacaaatgaccacagtattggtcttttgcaaagaccagtacttttgcaaagacatttyatcctagagtggaacttaactgtccatgcaaatacctcacttgtgtcccagctcacatgttatttcctacagacagagcttttttgacatagctctggctatgcagagaaggaaattttgtgttcttcagctgccaagataaatcctggctttgggcatggtgagtgccaggtaaatggagccacaggtggcagagtgaacagtaaaagcaaggacatattcaggagtaagagaaaactagcaactcaaggccaacagcagacacagtgctatctgcagttcacacctcagaggttccta

SEQ ID NO: 31717 - DNA, 600 bp, Chicken  19866894254378_2
ctagagtggaacttaactgtccatgcaaatacctcacttgtgtcccagctcacatgttatttcctacagacagagcttttttgacatagctctggctatgcagagaaggaaattttgtgttcttcagctgccaagataaatcctggctttgggcatggtgagtgccaggtaaatggagccacaggtggcagagtgaacagtaaaagcaaggacatattcaggagtaagagaaaactagcaactcaaggccaacagcagacacagtgctatctgcagttcacacctcagaggttcctatcrttgyctgatgacatctgttgttctctcattttgcaaaaatggatttcaaatctaattaccaaattcacayaaaaacccaagggtaaatttgtgaattcaaaatgttgctctgagggcagcatatgtgtggtgggagaagccgactgtaacccaccatgatatgaaatgtctcgttcactcctacttacaaacaaacctgacttcttcactgattttcccttggtgtctgcaggtgactccatgcaagctgtgagtgtgcagcacagcccacagcccgctgcacccttctgagaacaaaca

SEQ ID NO: 31718 - DNA, 600 bp, Chicken  19866894254378_3
agtggaacttaactgtccatgcaaatacctcacttgtgtcccagctcacatgttatttcctacagacagagcttttttgacatagctctggctatgcagagaaggaaattttgtgttcttcagctgccaagataaatcctggctttgggcatggtgagtgccaggtaaatggagccacaggtggcagagtgaacagtaaaagcaaggacatattcaggagtaagagaaaactagcaactcaaggccaacagcagacacagtgctatctgcagttcacacctcagaggttcctatcrttgyctgatgacatctgttgttctctcattttgcaaaaatggatttcaaatctaattaccaaattcacayaaaaacccaagggtaaatttgtgaattcaaaatgttgctctgagggcagcatatgtgtggtgggagaagccgactgtaacccaccatgatatgaaatgtctcgttcactcctacttacaaacaaacctgacttcttcactgattttcccttggtgtctgcaggtgactccatgcaagctgtgagtgtgcagcacagcccacagcccgctgcacccttctgagaacaaacaggta

SEQ ID NO: 31719 - DNA, 600 bp, Chicken  19866894254378_4
cagagcttttttgacatagctctggctatgcagagaaggaaattttgtgttcttcagctgccaagataaatcctggctttgggcatggtgagtgccaggtaaatggagccacaggtggcagagtgaacagtaaaagcaaggacatattcaggagtaagagaaaactagcaactcaaggccaacagcagacacagtgctatctgcagttcacacctcagaggttcctatcrttgyctgatgacatctgttgttctctcattttgcaaaaatggatttcaaatctaattaccaaattcacayaaaaacccaagggtaaatttgtgaattcaaaatgttgctctgagggcagcatatgtgtggtgggagaagccgactgtaacccaccatgatatgaaatgtctcgttcactcctacttacaaacaaacctgacttcttcactgattttcccttggtgtctgcaggtgactccatgcaagctgtgagtgtgcagcacagcccacagcccgctgcacccttctgagaacaaacaggtagcaggagagccaagaggcactccagggcagctctcccatgcccacagcacagggtgaggggggagg

SEQ ID NO: 31720 - DNA, 599 bp, Chicken  19866894254379_1
  misc_feature (1)..(228): n is any nucleotide
nnnnnnnnnnnnnnnnnnnnnnnnnnnnnnnnnnnnnnnnnnnnnnnnnnnnnnnnnnnnnnnnnnnnnnnnnnnnnnnnnnnnnnnnnnnnnnnnnnnnnnnnnnnnnnnnnnnnnnnnnnnnnnnnnnnnnnnnnnnnnnnnnnnnnnnnnnnnnnnnnnnnnnnnnnnnnnnnnnnnnnnnnnnnnnnnnnnnnnnnnnnnnnnnnnnnnnnnnnnnnnnnnnnncctgtacctgtgaaattctgtaataatatattcatagatttttatgacagtgaatagtaagtcaataaaatytgtgttttgggaaggctattcagatctttgtgttgaggtactcaacactggaaaactagagaagtagtagtccataaatggatttaaattactttggtttagaaaacttaatagctgtgtcaagaatttcagatcaaaataagtgcaccatcctttttacacatagmtatcaggagaaagaaaaatgaagggccttctctgaaagaaatgttttgataagaacataaaaatagtcaagtatcttcttatttgcacttttcatagctcaaagctttctctgtaggaataactaagtgaag

SEQ ID NO: 31721 - DNA, 599 bp, Chicken  19866894254379_2
  misc_feature (1)..(61): n is any nucleotide
nnnnnnnnnnnnnnnnnnnnnnnnnnnnnnnnnnnnnnnnnnnnnnnnnnnnnnnnnnnnncctgtacctgtgaaattctgtaataatatattcatagatttttatgacagtgaatagtaagtcaataaaatytgtgttttgggaaggctattcagatctttgtgttgaggtactcaacactggaaaactagagaagtagtagtccataaatggatttaaattactttggtttagaaaacttaatagctgtgtcaagaatttcagatcaaaataagtgcaccatcctttttacacatagmtatcaggagaaagaaaaatgaagggccttctctgaaagaaatgttttgataagaacataaaaatagtcaagtatcttcttatttgcacttttcatagctcaaagctttctctgtaggaataactaagtgaagaaacagacatatggagagtgacttacatagcctgragaaaatcactagccttagaggtggtcccagatttttgctgggtcccattctaatgcattatttatgagcagccacattgcatatgtacaaatgtgtaaaaggagttttagcttgaattccttagttggctt

SEQ ID NO: 31722 - DNA, 600 bp, Chicken  19866894254379_3
gaggtactcaacactggaaaactagagaagtagtagtccataaatggatttaaattactttggtttagaaaacttaatagctgtgtcaagaatttcagatcaaaataagtgcaccatcctttttacacatagmtatcaggagaaagaaaaatgaagggccttctctgaaagaaatgttttgataagaacataaaaatagtcaagtatcttcttatttgcacttttcatagctcaaagctttctctgtaggaataactaagtgaagaaacagacatatggagagtgacttacatagcctgragaaaatcactagccttagaggtggtcccagatttttgctgggtcccattctaatgcattatttatgagcagccacattgcatatgtacaaatgtgtaaaaggagttttagcttgaattccttagttggcttccacagctacagcagcacrtaagtattaatatagtctttcaggttttcatacgtcaaataagctaggttataaagatctgacccaagacccagtgatataggttgaacatgtgaaggtggacccaaggcccttccagccaattatgctatctctaacagtacccgata

SEQ ID NO: 31723 - DNA, 600 bp, Chicken  19866894254379_4
tgaagggccttctctgaaagaaatgttttgataagaacataaaaatagtcaagtatcttcttatttgcacttttcatagctcaaagctttctctgtaggaataactaagtgaagaaacagacatatggagagtgacttacatagcctgragaaaatcactagccttagaggtggtcccagatttttgctgggtcccattctaatgcattatttatgagcagccacattgcatatgtacaaatgtgtaaaaggagttttagcttgaattccttagttggcttccacagctacagcagcacrtaagtattaatatagtctttcaggttttcatacgtcaaataagctaggttataaagatctgacccaagacccagtgatataggttgaacatgtgaaggtggacccaaggcccttccagccaattatgctatctctaacagtacccgataagcgaacctctgacactatgataagagccctttatgggattttttcttctttggaagaatttttttatgcgcatttaaattttcaacctctaccacatccactgcttaattaaatcgtacatattatatcttagtccttaaattattattc

SEQ ID NO: 31724 - DNA, 600 bp, Chicken  19866894254387_1
gaaggaactgataggaataatctcagcctggcaaatgaagattgtttgtgacgctcttacctggagccctgcccattgaaggatggaaaggctgctcaagcctgactttcttctcctggcaggagccacaaggccaaagaaaattcgtatgtgtcttttctattgcctttgagaagaaattgaaggagtccttttcacgctgtgtgagcaaagtgtttctgttgggtgtttgctaactttctaaagctgcaaatctttttagtagaagtagagcccttaaaattgtggcagcttgtgccrcgtaaggaatgcttcagccactctgctctatttagtwactggaaagcacgtaaacaaaactgtgttatcactgcaaagagttgcccttacccatggatttgggatgttgcataaggtttttgcccttcatgcatattacatcttgctttgggacaaggacacgggaagaggtcttcttgtgtgctttttctccccaytgactttattagggccgttaatgtaacactgctgtacttcatttgcaaactgcaatactagaactgcattttgatggatatgtgaaataaattacagtcttat

SEQ ID NO: 31725 - DNA, 600 bp, Chicken  19866894254387_2
aagattgtttgtgacgctcttacctggagccctgcccattgaaggatggaaaggctgctcaagcctgactttcttctcctggcaggagccacaaggccaaagaaaattcgtatgtgtcttttctattgcctttgagaagaaattgaaggagtccttttcacgctgtgtgagcaaagtgtttctgttgggtgtttgctaactttctaaagctgcaaatctttttagtagaagtagagcccttaaaattgtggcagcttgtgccrcgtaaggaatgcttcagccactctgctctatttagtwactggaaagcacgtaaacaaaactgtgttatcactgcaaagagttgcccttacccatggatttgggatgttgcataaggtttttgcccttcatgcatattacatcttgctttgggacaaggacacgggaagaggtcttcttgtgtgctttttctccccaytgactttattagggccgttaatgtaacactgctgtacttcatttgcaaactgcaatactagaactgcattttgatggatatgtgaaataaattacagtcttatgaaagacagctattgtggagttgaaactttccctctt

SEQ ID NO: 31726 - DNA, 600 bp, Chicken  19866894254387_3
cgctgtgtgagcaaagtgtttctgttgggtgtttgctaactttctaaagctgcaaatctttttagtagaagtagagcccttaaaattgtggcagcttgtgccrcgtaaggaatgcttcagccactctgctctatttagtwactggaaagcacgtaaacaaaactgtgttatcactgcaaagagttgcccttacccatggatttgggatgttgcataaggtttttgcccttcatgcatattacatcttgctttgggacaaggacacgggaagaggtcttcttgtgtgctttttctccccaytgactttattagggccgttaatgtaacactgctgtacttcatttgcaaactgcaatactagaactgcattttgatggatatgtgaaataaattacagtcttatgaaagacagctattgtggagttgaaactttccctcttctttattttgctgtcaaagttgtgcacatcccttataaaatgaagtgttaaactgctgtgttatagttttgcattttgagaacttattaactgtctcggaacagtacattggatttcttttattattgggtaagtttgtttagcagataggtataaacct

SEQ ID NO: 31727 - DNA, 600 bp, Chicken  19866894254390_1
gccatttctttatgcattccatcctaagtgagacagaagtgcatgaaatgttgtttctgtccacgtgccacactgattcagcctgaggacaacctgactgcagcacagccatggctgccccacctgcattcaccagcacagcacacacgtgactcctgaaacatctgagatctaaacttcgatctaatgcttcaatattttaacagctctttggtgggtccctgggaatgctggggcagagcagcccctgcacagcagtctaagtcactgcaacacacgagcacagaactcctcacctcyscagaacaaagaacccaaccagctacaaaggacctgggacgtgtttgtgcctctccaggacatcagatgataccaaactgctcacagtgggcgagaggatgcaagtggacaggaagaaaagatacattaactctggatgctgccctcactctcactaactcacactgcgaaatcttttaacaaagttttgtttggaccagcaaatcagtttgttcctgtggaaatacccaactgcttctatgcagaaatcatcagtctgacaaattcctgaggcatagcagaaaaaaaaaaaaaaaagaa

SEQ ID NO: 31728 - DNA, 600 bp, Chicken  19866894254390_2
ccatttctttatgcattccatcctaagtgagacagaagtgcatgaaatgttgtttctgtccacgtgccacactgattcagcctgaggacaacctgactgcagcacagccatggctgccccacctgcattcaccagcacagcacacacgtgactcctgaaacatctgagatctaaacttcgatctaatgcttcaatattttaacagctctttggtgggtccctgggaatgctggggcagagcagcccctgcacagcagtctaagtcactgcaacacacgagcacagaactcctcacctcyscagaacaaagaacccaaccagctacaaaggacctgggacgtgtttgtgcctctccaggacatcagatgataccaaactgctcacagtgggcgagaggatgcaagtggacaggaagaaaagatacattaactctggatgctgccctcactctcactaactcacactgcgaaatcttttaacaaagttttgtttggaccagcaaatcagtttgttcctgtggaaatacccaactgcttctatgcagaaatcatcagtctgacaaattcctgaggcatagcagaaaaaaaaaaaaaaaagaag

SEQ ID NO: 31729 - DNA, 600 bp, Chicken  19866894254390_3
ccaactgcttctatgcagaaatcatcagtctgacaaattcctgaggcatagcagaaaaaaaaaaaaaaaagaagaagaaaaaaaaagaaaaaaagaaaaaaaaaaggagagagagagagaaaacggagcccatttcaatgccaaacggtaccagttctgcagcacctcattagctttcatttaatggagggggaggggttttaattttaaaccttttacctctcacattaaacaagaggcttcagatctcattgagtctctctttgtctctggagacgtcttccaccatctctcctcccygcttccagacaagttaagtattaatcttcccttgttttatgctgaagtggctttgtattgatttttaaagatgttcaattctctcatatttggaaatagagaatcactttacgcagacacacttagccctattctcctctccactcaaacactgcaaacaagtctttgctgtaatcaatttcttctggacttcgtttgcaccggatctataattcatagcaggagggcggggtgacgatgcagagggtcggagcaggcaggtagggctgtgctcagctccccagggacactgcagggcag

SEQ ID NO: 31730 - DNA, 599 bp, Chicken  19866894254391_1
  misc_feature (1)..(92): n is any nucleotide
nnnnnnnnnnnnnnnnnnnnnnnnnnnnnnnnnnnnnnnnnnnnnnnnnnnnnnnnnnnnnnnnnnnnnnnnnnnnnnnnnnnnnnnnnnnnaagttagaggacttatctgttcccatttaccttgtttattctggcttcacttcccattactattatactgggaactattacagcagtaataattgcctttgatcttggaatttcaaagcaccagccaaacatcagcaaactaagcctcctcttacagatggataaattgagacagaggccggcagatgtgcagtgactgatgcaggtrcccaccccttgttttaacacaaaataggatgcttcttctaggatcaattcagtcctccagtgccaccccaacttttctaacactacawctcaggctctctgagaaacaagagatccttccccttttattattaaactctcatctaattggaacaaagactgaaaagtgggatggattctgttttagggcatgcgtacayagtgctgtagtacattcraacacagtgcacctacctcttctccaggctcaatctctttcacagctctgacttcagccagcgtccctttgtaagttacaat

SEQ ID NO: 31731 - DNA, 599 bp, Chicken  19866894254391_2
  misc_feature (1)..(4): n is any nucleotide
nnnnaagttagaggacttatctgttcccatttaccttgtttattctggcttcacttcccattactattatactgggaactattacagcagtaataattgcctttgatcttggaatttcaaagcaccagccaaacatcagcaaactaagcctcctcttacagatggataaattgagacagaggccggcagatgtgcagtgactgatgcaggtrcccaccccttgttttaacacaaaataggatgcttcttctaggatcaattcagtcctccagtgccaccccaacttttctaacactacawctcaggctctctgagaaacaagagatccttccccttttattattaaactctcatctaattggaacaaagactgaaaagtgggatggattctgttttagggcatgcgtacayagtgctgtagtacattcraacacagtgcacctacctcttctccaggctcaatctctttcacagctctgacttcagccagcgtccctttgtaagttacaatcacatttgggcaacagctatggttcatcagtgcaacactgtaaaagcagaaaagtgaacttttttccctccccaccaaaagcaacagg

SEQ ID NO: 31732 - DNA, 600 bp, Chicken  19866894254391_3
gaatttcaaagcaccagccaaacatcagcaaactaagcctcctcttacagatggataaattgagacagaggccggcagatgtgcagtgactgatgcaggtrcccaccccttgttttaacacaaaataggatgcttcttctaggatcaattcagtcctccagtgccaccccaacttttctaacactacawctcaggctctctgagaaacaagagatccttccccttttattattaaactctcatctaattggaacaaagactgaaaagtgggatggattctgttttagggcatgcgtacayagtgctgtagtacattcraacacagtgcacctacctcttctccaggctcaatctctttcacagctctgacttcagccagcgtccctttgtaagttacaatcacatttgggcaacagctatggttcatcagtgcaacactgtaaaagcagaaaagtgaacttttttccctccccaccaaaagcaacaggcttttgttaagttaagcaacacctcataaaacaaacaagcctgaaaggaccgagtcagtctccctctgcaagctgttcttagtgaggcttaatacgaaggcaacctggggaa

SEQ ID NO: 31733 - DNA, 600 bp, Chicken  19866894254391_4
caaacatcagcaaactaagcctcctcttacagatggataaattgagacagaggccggcagatgtgcagtgactgatgcaggtrcccaccccttgttttaacacaaaataggatgcttcttctaggatcaattcagtcctccagtgccaccccaacttttctaacactacawctcaggctctctgagaaacaagagatccttccccttttattattaaactctcatctaattggaacaaagactgaaaagtgggatggattctgttttagggcatgcgtacayagtgctgtagtacattcraacacagtgcacctacctcttctccaggctcaatctctttcacagctctgacttcagccagcgtccctttgtaagttacaatcacatttgggcaacagctatggttcatcagtgcaacactgtaaaagcagaaaagtgaacttttttccctccccaccaaaagcaacaggcttttgttaagttaagcaacacctcataaaacaaacaagcctgaaaggaccgagtcagtctccctctgcaagctgttcttagtgaggcttaatacgaaggcaacctggggaaaatctgttgtgctgttat

SEQ ID NO: 31734 - DNA, 458 bp, Chicken  19866894254391_5
ctcaatctctttcacagctctgacttcagccagcgtccctttgtaagttacaatcacatttgggcaacagctatggttcatcagtgcaacactgtaaaagcagaaaagtgaacttttttccctccccaccaaaagcaacaggcttttgttaagttaagcaacacctcataaaacaaacaagcctgaaaggaccgagtcagtctccctctgcaagctgttcttagtgaggcttaatacgaaggcaacctggggaaaatctgttgtgctgttatttatcccatcaatatggagaatgggcaytttaatgaatagctgcaattttaaaatcttcttatagccagacatgtcttttcttagtggctcagatgctgagcatttacaaatgaaggacggtgttgcactcgattccaaatgatccggtttcatattcttctcttcccaccagaccccattccggc

SEQ ID NO: 31735 - DNA, 599 bp, Chicken  19866894254400_1
  misc_feature (1)..(28): n is any nucleotide
nnnnnnnnnnnnnnnnnnnnnnnnnnnnactgttgggcaggattatctgatttattttacaaagtactttatggtgggatgagtggtgacctaaaagtgccaatttcctgatggtgatttcctcctgactagatgagtttcagatgttaaagcagtcaatttctactcatgttcagaaaaattaccatcaagaattccacaaatactctccctaggaagctacagtactctgtcatactgaacagttacttatagcaatgtgactaagcattataatgtaggaatgtacaggatacaaaytcgttttcaaggcacagtgagtttattggactactaatccttcaactctgtgatataaggattcctacaactggctcagaattagtccctcaattttagtaattaataggaaatttgcctgtgcgatacaatataattagacaattcatgtactaaaataacactctgtaaattgcattcgtttctttatcaagaagatttctcttcctaacttcctaaaagctttactcatctttgccctataactcaattacttgcatccacttgtgaagctcttgaccttcagggaatagactaag

SEQ ID NO: 31736 - DNA, 600 bp, Chicken  19866894254412_1
ggagaaattgttaaagaggtaaaaaatctcaccattactaacaaaatagaactatttgatgattagtagtctcataaagagtacctttcttctgaaacttacatttccctaagaatttttattctttatcccagctgttatcatccaagattactagaaagttttaaatatcattaaagaaacaaaagttgcaatttctattttccaagtgcatgagtaggatttcaatcaaatgtattgactgcaaatgaattatcttcttaattgctggtttagtgtagagtataatgggccaagaasaacaaataaaacttaggtataaaacaagacgttaatgcaccttctttgtatttccaataacaagcaagcataccttgattttgggctacagtgggatgttctcttgaatgctattttaagtttaattgcataggctgaattttctttctctatttaaattattttccttcactgtccatcgtacattacaaaagtagcactgtaatgatttccacatgaatgtacaaaaaatgtaaacagttcattgatttaaaatatcttgtagtttaagttccagatatagaaactgccaagtttttt

SEQ ID NO: 31737 - DNA, 600 bp, Chicken  19866894254419_1
tctaccactggctctgggcagcctgttccaatgcctcatcacttttctgagaataattttttcctaatatccaatctaaacctcccctgatgcaacttaaggccattacttcttatcctatcacttgatacctggaaaaagaggccaaccctcatgtcactacaacctactttcaggtagttgtaaagggtgataaggtctcctctgagcttcctccagtctaaacaatccctcaggtgctctcctcatgagatttgtgctccagacccttcaccagctttgttgccccctttttggacrtggttcagggcctcaatgtctttcttgtaatgaattgaacaaagcacttgaggtacagtctcagcagtgcttagtacagagggacgatcacctccctcattgtgctgtacaatttctgatacaagccaggatgccactagccttcaaagccacttggacatactgctagctcatgttcagctgccttaactaataccccccaaatcctatcccttttcccctatccttttcccctatgcagctttttcctggaaaaagtccagtggagggccacaaaaatgataaggggtctgcagcatc

SEQ ID NO: 31738 - DNA, 600 bp, Chicken  19866894254422_1
actgttatttcaagtggctagaactccaccaatcaatcagcaagtggtagctgtttgcatcctgttaggggcagataaacagctgagcagacctaatgggatcagtggtagcccacagctgtatgatgcaggctgctggctgaggtggcatgtaaaggagtgggtttcttggcattttgtaaaataggactggctgtaatttctatgctgcatcttgaacagatgttatttgccggggtgcttttcaagtccaagcacactgaacagtttgatatgcaactgggcatgagatacaggctstctgcaggttgtccttgaggcagaggtcaggcagaccatggagcacccaaggattttggtcactactgcactcatctactcattcaaatacagacataaccaaaacacygccttctgtttatttccatggaaattttaacagatacaaagatgaaaatagcactatttgacagagcagattcttaggtacaaaatactatttttcaacacagtcaccaccattagccgttcaccagcaatgaaccagagcctgcatgctgcactcataaaaatctgcatggccttttggaatgtggcttg

SEQ ID NO: 31739 - DNA, 600 bp, Chicken  19866894254422_2
agcccacagctgtatgatgcaggctgctggctgaggtggcatgtaaaggagtgggtttcttggcattttgtaaaataggactggctgtaatttctatgctgcatcttgaacagatgttatttgccggggtgcttttcaagtccaagcacactgaacagtttgatatgcaactgggcatgagatacaggctstctgcaggttgtccttgaggcagaggtcaggcagaccatggagcacccaaggattttggtcactactgcactcatctactcattcaaatacagacataaccaaaacacygccttctgtttatttccatggaaattttaacagatacaaagatgaaaatagcactatttgacagagcagattcttaggtacaaaatactatttttcaacacagtcaccaccattagccgttcaccagcaatgaaccagagcctgcatgctgcactcataaaaatctgcatggccttttggaatgtggcttgtctttcatgtcactgtcaccactgctgaaactcacaactcattgcctcacatccactgtttggtccccgtaaatgttcagcaagcataaatgaatgttagtaggtgcaa

SEQ ID NO: 31740 - DNA, 599 bp, Chicken  19866894254427_1
  misc_feature (1)..(47): n is any nucleotide
nnnnnnnnnnnnnnnnnnnnnnnnnnnnnnnnnnnnnnnnnnnnnnncccatcagggcagtttgtgagatatgtgaaatatataacctgtaagggaagctctgcagcacctcgtctttcatatgcttgtgttaccatgtctgatgttgttttgatactccattcccttttttgcttttagaaagatgcaaaacctttgactgccctgccatactctgtcctctttgttgttgggtaaaacacgctgtttgcagcgtgcagcaaagggctgggaagtgtccaggctagcctcctgtaaaartaatgatgccaagttaactgatgatgagtgaactcgtaatcaatccctcatgcaagtaccagcatgctagtatttcacaagcttatgccatagcagccagctgtgagctgaggtcaggcctatgcagatggctgctgctttgaatatccattttagtggctgacatgggtatttcagcaatggcatcaaaacatttaagataagaacactggtcactgctgcccagctgtcattacttagatccatctttgagcagaaactacccaagtacattatcccaagtagctgtgttcctcatg

SEQ ID NO: 31741 - DNA, 600 bp, Chicken  19866894254430_1
cccagtacatatggtagaatgtcattctgctagagcagacaagggcgttagtgcagtgctgccaaaagttgctagatagtgaagtgagtgctgaattttacaatctccttcctaagtttagtggagaaaaatcaaatgcactccggatgatgtgcaaaaagtacaggaagctttgtgattaagtattatttcttagtacggtacagtcatcttaggttgaagattcagcacatctgacataaagcagtttgtgccaaggagcctaaaactgaccaggcttacactatagctatttcaatstgagyttaagacatacagtaccccttttccatctgaggacaggtgagatggataaccagcttaggcttacgtgttcaggacgtgtgtcatagcagccgcacttaactgcttgaggaacaaaggagtaacccagygactgttaaaatgaaatctaggaggcctgagttcatagccctgccacaccatgcctgtgagatgccagcaaacctgcatcctggcagcaaaccgcgctggggggcctcgagcaaaggtgtaacaaaaactggaaagcatagttggatggaaacatctgaaaggatc

SEQ ID NO: 31742 - DNA, 600 bp, Chicken  19866894254430_2
tacatatggtagaatgtcattctgctagagcagacaagggcgttagtgcagtgctgccaaaagttgctagatagtgaagtgagtgctgaattttacaatctccttcctaagtttagtggagaaaaatcaaatgcactccggatgatgtgcaaaaagtacaggaagctttgtgattaagtattatttcttagtacggtacagtcatcttaggttgaagattcagcacatctgacataaagcagtttgtgccaaggagcctaaaactgaccaggcttacactatagctatttcaatstgagyttaagacatacagtaccccttttccatctgaggacaggtgagatggataaccagcttaggcttacgtgttcaggacgtgtgtcatagcagccgcacttaactgcttgaggaacaaaggagtaacccagygactgttaaaatgaaatctaggaggcctgagttcatagccctgccacaccatgcctgtgagatgccagcaaacctgcatcctggcagcaaaccgcgctggggggcctcgagcaaaggtgtaacaaaaactggaaagcatagttggatggaaacatctgaaaggatccagaa

SEQ ID NO: 31743 - DNA, 600 bp, Chicken  19866894254430_3
aatgcactccggatgatgtgcaaaaagtacaggaagctttgtgattaagtattatttcttagtacggtacagtcatcttaggttgaagattcagcacatctgacataaagcagtttgtgccaaggagcctaaaactgaccaggcttacactatagctatttcaatstgagyttaagacatacagtaccccttttccatctgaggacaggtgagatggataaccagcttaggcttacgtgttcaggacgtgtgtcatagcagccgcacttaactgcttgaggaacaaaggagtaacccagygactgttaaaatgaaatctaggaggcctgagttcatagccctgccacaccatgcctgtgagatgccagcaaacctgcatcctggcagcaaaccgcgctggggggcctcgagcaaaggtgtaacaaaaactggaaagcatagttggatggaaacatctgaaaggatccagaaggagactcactgttcaggtgatgaccgctggcctaacgtgcatcttctgaagctggcgcatggctggggagagtggtggaggagcacttctccgactcgctgaaatagcacacagagggcctgccgttt

SEQ ID NO: 31744 - DNA, 600 bp, Chicken  19866894254431_1
gttcttgccacagaactattagaggaggaggcactgatttcacatgtatccagctgtgattttgagcatgcagagaggcagtgatttgtgactgtactggtaattataggttggactatgcacattcagagcacacataccatggtgtacttttcaggcaacttaatacagaaaaaatgcccagatcaactatccagaaaaaaggcttcaagtgaaaagcagaccccaagctgctcagctgcaaaatgatggaggcaatggatagtaattaaattctaggcaggttgctgtctctccagycagagggggaaatgctcccacaggtcctccatcttcgttgcatggcagacttccacctctgcgtgtgagcagggaagatactctcattttataaagatgactgyaaagccggtccaaacgatacccacaagygagcacagcagccccatcactcctaaagtcatgrgaaacccttgccagacagccaggatgaatctccaagcctggcaagcaccaggaggtcaggatgtctccacagttaatttgcacttcaacctgcagacctcaaaaacctgaagaacccattcctcaaaagytaat

SEQ ID NO: 31745 - DNA, 600 bp, Chicken  19866894254431_2
tataggttggactatgcacattcagagcacacataccatggtgtacttttcaggcaacttaatacagaaaaaatgcccagatcaactatccagaaaaaaggcttcaagtgaaaagcagaccccaagctgctcagctgcaaaatgatggaggcaatggatagtaattaaattctaggcaggttgctgtctctccagycagagggggaaatgctcccacaggtcctccatcttcgttgcatggcagacttccacctctgcgtgtgagcagggaagatactctcattttataaagatgactgyaaagccggtccaaacgatacccacaagygagcacagcagccccatcactcctaaagtcatgrgaaacccttgccagacagccaggatgaatctccaagcctggcaagcaccaggaggtcaggatgtctccacagttaatttgcacttcaacctgcagacctcaaaaacctgaagaacccattcctcaaaagytaatgaaacatcatgtttcartgaggtaaagtcaagtcactttgcttgatgagatttaggattttcaattttgagtggccctacaaccagaacaccttttaaaaacct

SEQ ID NO: 31746 - DNA, 600 bp, Chicken  19866894254431_3
acacataccatggtgtacttttcaggcaacttaatacagaaaaaatgcccagatcaactatccagaaaaaaggcttcaagtgaaaagcagaccccaagctgctcagctgcaaaatgatggaggcaatggatagtaattaaattctaggcaggttgctgtctctccagycagagggggaaatgctcccacaggtcctccatcttcgttgcatggcagacttccacctctgcgtgtgagcagggaagatactctcattttataaagatgactgyaaagccggtccaaacgatacccacaagygagcacagcagccccatcactcctaaagtcatgrgaaacccttgccagacagccaggatgaatctccaagcctggcaagcaccaggaggtcaggatgtctccacagttaatttgcacttcaacctgcagacctcaaaaacctgaagaacccattcctcaaaagytaatgaaacatcatgtttcartgaggtaaagtcaagtcactttgcttgatgagatttaggattttcaattttgagtggccctacaaccagaacaccttttaaaaaccttctgccaattcttccttccagccattca

SEQ ID NO: 31747 - DNA, 600 bp, Chicken  19866894254431_4
tacagaaaaaatgcccagatcaactatccagaaaaaaggcttcaagtgaaaagcagaccccaagctgctcagctgcaaaatgatggaggcaatggatagtaattaaattctaggcaggttgctgtctctccagycagagggggaaatgctcccacaggtcctccatcttcgttgcatggcagacttccacctctgcgtgtgagcagggaagatactctcattttataaagatgactgyaaagccggtccaaacgatacccacaagygagcacagcagccccatcactcctaaagtcatgrgaaacccttgccagacagccaggatgaatctccaagcctggcaagcaccaggaggtcaggatgtctccacagttaatttgcacttcaacctgcagacctcaaaaacctgaagaacccattcctcaaaagytaatgaaacatcatgtttcartgaggtaaagtcaagtcactttgcttgatgagatttaggattttcaattttgagtggccctacaaccagaacaccttttaaaaaccttctgccaattcttccttccagccattcagtctttgctatgtggctaaaatagaaacatttct

SEQ ID NO: 31748 - DNA, 600 bp, Chicken  19866894254431_5
cagycagagggggaaatgctcccacaggtcctccatcttcgttgcatggcagacttccacctctgcgtgtgagcagggaagatactctcattttataaagatgactgyaaagccggtccaaacgatacccacaagygagcacagcagccccatcactcctaaagtcatgrgaaacccttgccagacagccaggatgaatctccaagcctggcaagcaccaggaggtcaggatgtctccacagttaatttgcacttcaacctgcagacctcaaaaacctgaagaacccattcctcaaaagytaatgaaacatcatgtttcartgaggtaaagtcaagtcactttgcttgatgagatttaggattttcaattttgagtggccctacaaccagaacaccttttaaaaaccttctgccaattcttccttccagccattcagtctttgctatgtggctaaaatagaaacatttcttcaagataggaatgctgaagtgactctgtgtcactatcaactgcctgaattggaataaatcatgatgcttttgtccagtctatttcgacagacatcctgcatcccttcctatacagctattaagagatga

SEQ ID NO: 31749 - DNA, 600 bp, Chicken  19866894254431_6
ccacaggtcctccatcttcgttgcatggcagacttccacctctgcgtgtgagcagggaagatactctcattttataaagatgactgyaaagccggtccaaacgatacccacaagygagcacagcagccccatcactcctaaagtcatgrgaaacccttgccagacagccaggatgaatctccaagcctggcaagcaccaggaggtcaggatgtctccacagttaatttgcacttcaacctgcagacctcaaaaacctgaagaacccattcctcaaaagytaatgaaacatcatgtttcartgaggtaaagtcaagtcactttgcttgatgagatttaggattttcaattttgagtggccctacaaccagaacaccttttaaaaaccttctgccaattcttccttccagccattcagtctttgctatgtggctaaaatagaaacatttcttcaagataggaatgctgaagtgactctgtgtcactatcaactgcctgaattggaataaatcatgatgcttttgtccagtctatttcgacagacatcctgcatcccttcctatacagctattaagagatgaacaatgcaggaccaaatgctg

SEQ ID NO: 31750 - DNA, 600 bp, Chicken  19866894254446_1
tttcggttacattgacattccctgctgattttcttctctcttctcagatttacatttctttccatggaaattacaacaaagataacagtatttgatagagcaaattctcagctacaaaacactatttttcaacataatcgctaccattagctttacattttcaataatgatgaacaagagcatgcatgctgcgctcataataatctgcaccagtggagctgatccactgtcaccactattcaaacgcaccacccactaccttggtgtgctgacattcaatggtctccataaacattcagsaaacttcagtgaacatcactgggtgacattttctccctatggaggaattcaatgacatatttttgcttcatacacacttccatgtcaaaagccaatttgtctcactctccctctgctgtcatctgtcacattgcaacagaatctaacaaaatattggtaggaaggttcaacttctactgccataccaccaaccacttctgatattatgagctaacataataaaataggaggcattactatcagagcagctctcatgcatgtagtcagtctccttgcagtgttcaatcctgaaagacattt

SEQ ID NO: 31751 - DNA, 599 bp, Chicken  19866894254457_1
  misc_feature (1)..(51): n is any nucleotide
nnnnnnnnnnnnnnnnnnnnnnnnnnnnnnnnnnnnnnnnnnnnnnnnnnnctgtgcatgacaaacagaacaagttcctgcagggtgagcttcacccagagcttccagcagctctggagcaggaactgcccagacacacgctctgctctggaacaaatgcggataacttcaccttcagttgtcaagtgggatctgctgcctcacatttacccctcaggcagcaactgtggagcaactggcaagtctcagattcaaaccaaagcttatcctggagtaacctgtcctggtcatcagagtccwtaatgaggagcaggttacttcatgtccagtgaacaacttccttccaaagagttcagcatgcttgaaaagcatggagagacsatgtagagcagctatggttttagcaatttaaatacttgcttgcttcatttttattaaccacgtagacatgcccaacatgcagcaacagaagttctgctgccagggaaagctctgtgcaacagagccatttggggttttctaatggtactgcttccatgcatctgcttggcatgaaacgtgttcacagcagcatatgtaaactaagaaaggcttgaggc

SEQ ID NO: 31752 - DNA, 600 bp, Chicken  19866894254457_2
agggtgagcttcacccagagcttccagcagctctggagcaggaactgcccagacacacgctctgctctggaacaaatgcggataacttcaccttcagttgtcaagtgggatctgctgcctcacatttacccctcaggcagcaactgtggagcaactggcaagtctcagattcaaaccaaagcttatcctggagtaacctgtcctggtcatcagagtccwtaatgaggagcaggttacttcatgtccagtgaacaacttccttccaaagagttcagcatgcttgaaaagcatggagagacsatgtagagcagctatggttttagcaatttaaatacttgcttgcttcatttttattaaccacgtagacatgcccaacatgcagcaacagaagttctgctgccagggaaagctctgtgcaacagagccatttggggttttctaatggtactgcttccatgcatctgcttggcatgaaacgtgttcacagcagcatatgtaaactaagaaaggcttgaggctttcactctgctttcctccctcacctgacaccacttccatattacagagcagtcatagcctcatagcacacataactgacat

SEQ ID NO: 31753 - DNA, 389 bp, Chicken  19866894254457_3
tttcttgaatcaacgcctaaaaagtgaaaaggaaggggaaggggaagctagtttccacagtaatagtagttgagaagtctttgaatcttgccaacaggaaaaatgcatgtcagagagctgctcagctctcctaggaaactagcacagaccgacatcttcctgctggccagtacagcaaggccaagggacacgatcaagtccttaatgtgcaccaagagcaaggtagatggttaggatttggttgtttcttagttccataccagaggcaagtgagaagacaccctgcttctcatatgcacrtacacatctgctcaaaccatgtatgttcaggcttccatactaccctgttacacaccatctgtgtatctctcctacacaagggagcctga

SEQ ID NO: 31754 - DNA, 600 bp, Chicken  19866894254458_1
agaaaaacctgaaagaacgtaaatggcaaagaatcacttcttctgaaatggtttacatgccgttccaggctcctaaggtaagggaaaacagtgccacaagggctaactgactcaccactgtcatttttgttgcatttcttgcatcttctgtacaaaagaattaagtggctcttctctggactgccaggctagcatgcagaatgcataccattggcttctacaactcataatcagattgcaattaacaacaatctgcagatggctgaaacttacagttatttctagagagcttttttcttytctaagagacaaaaagaactctgaaatatcagaatgtctccagaatgaccactattcccatagaaataagcttctataagataattatttaatacataaaaccttacttttaagctagaattctaaagctttaaaacaaaacagaactgggttcacaagcttcagcatactgatgcagtactcacttggaaaygctcyrtgcactaatcattcctaagctgcactgatttaaaaaaataaataaataaaaatcccactagaagaaatgaactgcatctcctgacttggaaaaagctgcag

SEQ ID NO: 31755 - DNA, 600 bp, Chicken  19866894254458_2
atgcagaatgcataccattggcttctacaactcataatcagattgcaattaacaacaatctgcagatggctgaaacttacagttatttctagagagcttttttcttytctaagagacaaaaagaactctgaaatatcagaatgtctccagaatgaccactattcccatagaaataagcttctataagataattatttaatacataaaaccttacttttaagctagaattctaaagctttaaaacaaaacagaactgggttcacaagcttcagcatactgatgcagtactcacttggaaaygctcyrtgcactaatcattcctaagctgcactgatttaaaaaaataaataaataaaaatcccactagaagaaatgaactgcatctcctgacttggaaaaagctgcagtcatttcagctacagctatcttcagctatatacagctaccataaaaccacaaaataaaagaagtgaagtgttcacagtcaagtaacacatgaaaaagccaagtaactgaaaattatggttgataagttacaggtgtttaggcagtaagcaatggaagccaacattcaagagggtaaagcagaagtaaagagca

SEQ ID NO: 31756 - DNA, 600 bp, Chicken  19866894254458_3
gaatgcataccattggcttctacaactcataatcagattgcaattaacaacaatctgcagatggctgaaacttacagttatttctagagagcttttttcttytctaagagacaaaaagaactctgaaatatcagaatgtctccagaatgaccactattcccatagaaataagcttctataagataattatttaatacataaaaccttacttttaagctagaattctaaagctttaaaacaaaacagaactgggttcacaagcttcagcatactgatgcagtactcacttggaaaygctcyrtgcactaatcattcctaagctgcactgatttaaaaaaataaataaataaaaatcccactagaagaaatgaactgcatctcctgacttggaaaaagctgcagtcatttcagctacagctatcttcagctatatacagctaccataaaaccacaaaataaaagaagtgaagtgttcacagtcaagtaacacatgaaaaagccaagtaactgaaaattatggttgataagttacaggtgtttaggcagtaagcaatggaagccaacattcaagagggtaaagcagaagtaaagagcacgtca

SEQ ID NO: 31757 - DNA, 600 bp, Chicken  19866894254458_4
aatgcataccattggcttctacaactcataatcagattgcaattaacaacaatctgcagatggctgaaacttacagttatttctagagagcttttttcttytctaagagacaaaaagaactctgaaatatcagaatgtctccagaatgaccactattcccatagaaataagcttctataagataattatttaatacataaaaccttacttttaagctagaattctaaagctttaaaacaaaacagaactgggttcacaagcttcagcatactgatgcagtactcacttggaaaygctcyrtgcactaatcattcctaagctgcactgatttaaaaaaataaataaataaaaatcccactagaagaaatgaactgcatctcctgacttggaaaaagctgcagtcatttcagctacagctatcttcagctatatacagctaccataaaaccacaaaataaaagaagtgaagtgttcacagtcaagtaacacatgaaaaagccaagtaactgaaaattatggttgataagttacaggtgtttaggcagtaagcaatggaagccaacattcaagagggtaaagcagaagtaaagagcacgtcaa

SEQ ID NO: 31758 - DNA, 600 bp, Chicken  19866894254460_1
accctctgtgctacatgctctgctgaagtctcctcaggcattccctctagcaatgctgaaggctgttatttgcaatcccactggcaccactgaagagcattatttatttgcaaccccactagctgtgctgaagggtgcagctcattcagctgccaaaggtagggcagctgagggcaggctgaacactgcacctgtgtgtgctcaggagcactgcggaacagctgaaattgccttgggtacagacagctccagcaagataacttgctggtgagtatcagctttagcaaatctttgttaatytttagttttctcaagtttattctctcttccttctgtccactgcgttgttttggtaaggttgctttttagtattgagctttgcttacggtgcacgttggagtggcaccaaaacaaaatggagctgaggtgggggaaacaaacagaaaaaatgacttcttagagtatttacaaacgaagtatttacacaaggaatggtaaagaactaagaagtctgaactgtattttgtaagtttttcaaagacttgtctacttaactgaattaagagaargcgccactaaagtactggttcactcctttat

SEQ ID NO: 31759 - DNA, 600 bp, Chicken  19866894254460_2
gagtatcagctttagcaaatctttgttaatytttagttttctcaagtttattctctcttccttctgtccactgcgttgttttggtaaggttgctttttagtattgagctttgcttacggtgcacgttggagtggcaccaaaacaaaatggagctgaggtgggggaaacaaacagaaaaaatgacttcttagagtatttacaaacgaagtatttacacaaggaatggtaaagaactaagaagtctgaactgtattttgtaagtttttcaaagacttgtctacttaactgaattaagagaargcgccactaaagtactggttcactcctttatcttcaaacagacgttagcctgtgtggaagttgtatattgtaatttcagaatttgtctaattacatgcttaaatattatataagatacaaaaatggcctggtatgtgttgaaatgtcatacatagagtgccgtaaaaactgtaaaaaacaaataagagattttgtcatgtactaatgaaggtggacacttgaggcaaattatttatactattccaaaccactactgttatccttgtttgagtaaccagttattttcagaacaaaagcaaa

SEQ ID NO: 31760 - DNA, 600 bp, Chicken  19866894254460_3
ttaaacgcatctgtggtagcccgctaaaataattagttgtcatttctacaaggacaaatcaattgagcagaaaaatgtggcagaaatgttgttagtacagaatctaagttgtatctgctatgtagactacaataagaataaggttacaaatgatgaagtatttttgagatctgatgattaccaaggtctcttttctgttagtggctgctttttatcagtagctgaaggttcaaaagaaatgtttgaaagcatacagcaccttctttggatttcaatattttgtgtgatattagattacawttttttttacaattattcagtaaataaacctaagcaactactactcygtagcagggaatgcaagtcagtgcttgaactggtgattagagcacctggtgggaaggcagggccaacccaggggagctcaggtgcatgcagaaacctgaaatttcccaagagtggggggttagaagcacgctatcaaggtaaagttgtatgacatagaagtctaaggttcatttaatgctataagtgagaaacagagatggtaccaatatgggtgagaagaatggtgattaagtgaatcagtagaaaactgag

SEQ ID NO: 31761 - DNA, 600 bp, Chicken  19866894254460_4
acaaggacaaatcaattgagcagaaaaatgtggcagaaatgttgttagtacagaatctaagttgtatctgctatgtagactacaataagaataaggttacaaatgatgaagtatttttgagatctgatgattaccaaggtctcttttctgttagtggctgctttttatcagtagctgaaggttcaaaagaaatgtttgaaagcatacagcaccttctttggatttcaatattttgtgtgatattagattacawttttttttacaattattcagtaaataaacctaagcaactactactcygtagcagggaatgcaagtcagtgcttgaactggtgattagagcacctggtgggaaggcagggccaacccaggggagctcaggtgcatgcagaaacctgaaatttcccaagagtggggggttagaagcacgctatcaaggtaaagttgtatgacatagaagtctaaggttcatttaatgctataagtgagaaacagagatggtaccaatatgggtgagaagaatggtgattaagtgaatcagtagaaaactgagaatattttataaatggggaaatgcagtggttgggaatgatagaagga

SEQ ID NO: 31762 - DNA, 586 bp, Chicken  19866894254466_1
acactgaaaagattactgaaaaagtattttgtgtatatagaatttcagcatttctttcacagtttgttctatctctctgttactgatgctgttatataaaagatatttttaaatgcaaaacttgacacataggcaatgaaatcatactagatactttaggaaattcagtgaatatacaagcatagatggaaaaaaaaatagtattctttgccagtaatctcatagaacactggtttgtcacacattttttttctgactttctgacttattctgatgaattcatgaatataaactcaactmagtagcacgtgtatttttcatttgattcttggtaggcacatgctaataatttatatttagaaagttctgtgaaatattctctatgtttcagagtatatccatgtatcttttcccttctcattagtttaatgttcacagtgaagctacaaagctgtggcccatacgtaagaagcctgaatgtacatggttaaaatggggggatgttggctctcattctcatatgtaatgaataatatttcagggcatatttaacttcaatatatcaaggcaaatattaagacaattt

SEQ ID NO: 31763 - DNA, 600 bp, Chicken  19866894254467_1
actttagatccccaattatagcccagatcgcttaaagctaggaaatgtgcaaacatctaccacaaatgaagatgagaaatctaatgaaaaagacatgacatgagaaaaccggaagagcagaagcagaaaattaaacctatacttctacaactgtattacagaggaattattgagaagcagaagttagtgataaacttgtggctctcctatgctagcagaatatctaaaattaaacagcctgcaaaacacaagttatatgtcaggttgtggatgttgagcagctagcattgcatttctttyctcaattgtaaacaactatgccatccattctacatatcagaaattgctgtggacaggtttgcctttttgctacagagttttgataacaagttgagtagtgcatattaggaaaaaaaaaacagtttataaattaactgagcacataagaaatgatatacatgcatgttttttctttagaagatgaaccgtcatgattaataacaaccaagtagacaaaaagttctaattgtaatagcctacgtataaagggaatgtatcatggagtcaagagttatagaaagcatacgatgtccagagaaa

SEQ ID NO: 31764 - DNA, 600 bp, Chicken  19866894254468_1
ttttctgtgagaacaagctttgcctgtgtgataccaaaaaaataaaaaaataaaaaaatgaagggttttgtgagaaaagaaacatatggacatgataggcaggggcctggataggaagcattagtcctgcttgcagcaccgagaggcaggcgctgcttccatttcgtgtcaaccagtggtagcttctaatcccttgtgtgtgatctgctttttctctgcttttacctcacagatacatatctgcaatgtcaaacccttatttacatctactggattccaaaactggaataatggtctatrctcctttgtccttcgctctgtggatacagaacgcagagagctgtctggtgaaatacgattataccacatacatgtgggtctgtggatagtttattaagcagatgcaggaataaacctggtagcagtaaatttaagatttctatataactttgtttcaaaagtcttcattttgatcattcgtattagttataaactgtatttcaggatgattaaataagctttatcttggtaatcgtatactttgagtgcgaaatgtagcaaaggcataaaggatgaaactgatctgaatgtagctgataa

SEQ ID NO: 31765 - DNA, 600 bp, Chicken  19866894254472_1
tttcaacccaggccattctatgattctataataaaatcaggactgattctgatgtaatgctcatcatgttcaggatgcatctttgtgtaattgactcctcctcgtgagtttccttcattttgagccaaaatgctttgctgcttgttaaattagaaacatattacagcattactgttgtgctgaatatttttcacatttagtggataaaacaaagaaagaagaatatgaaatgtgaagggctcagtttctactgacacagagagaagtcaaatctaaaccagttttgcaagaaaatcaccygaggattttgaatgtgaattatacccacagcaaaatacctgctgcctactcaaagctggttagcattctgtattggttagaggtatgcaaggacagctttatgccaaaaacaccgtttcatttcttttttcagaaacatctgaattgtttctgatttaataatcccccagattcacgtgtgggaaaagattatgctttaaaatctgcagcccttagtgtaaatggtctttctgagtctgttaactagaagttgtgagtgtctgtcaagcagcagtatttgtctgtgagtcttttttccag

SEQ ID NO: 31766 - DNA, 600 bp, Chicken  19866894254472_2
atacctgctgcctactcaaagctggttagcattctgtattggttagaggtatgcaaggacagctttatgccaaaaacaccgtttcatttcttttttcagaaacatctgaattgtttctgatttaataatcccccagattcacgtgtgggaaaagattatgctttaaaatctgcagcccttagtgtaaatggtctttctgagtctgttaactagaagttgtgagtgtctgtcaagcagcagtatttgtctgtgagtcttttttccaggaaagtgcttatgcatatacgttatgcataaagygcaggcctgttagcatctgctcaggtgcttaaatggcacctgtgtttctgtgccttttgaatcaaaactttcactctgtttatatagtgtgaacagttagccactgttgtttcagtttagttgcaggttgcaatgcctgaccgttagcatttgagtggaacaggtaaacctgctcattcagggcagtggttcttgagctgcccacacatagcatgtgtactaaatgaagcrcagtacatctttgtcctgtcaggtgctttgcttcagaaacatgtcactggatcaaagtcaagtatgagc

SEQ ID NO: 31767 - DNA, 600 bp, Chicken  19866894254472_3
aagcagcagtatttgtctgtgagtcttttttccaggaaagtgcttatgcatatacgttatgcataaagygcaggcctgttagcatctgctcaggtgcttaaatggcacctgtgtttctgtgccttttgaatcaaaactttcactctgtttatatagtgtgaacagttagccactgttgtttcagtttagttgcaggttgcaatgcctgaccgttagcatttgagtggaacaggtaaacctgctcattcagggcagtggttcttgagctgcccacacatagcatgtgtactaaatgaagcrcagtacatctttgtcctgtcaggtgctttgcttcagaaacatgtcactggatcaaagtcaagtatgagctctcaagaaggttttttcctccaaccagaacactgtctcacattcaggagtgctggaagttaagtaatgatgacagagtgtagctgttcatagccctcgagcagccttgtgtataaagacaagctctgggaccttgcctactatatgtacctgatcttatccctgtcaaatatcttctgcaattggccatgcctggttgccattaaacaaaactaaacaaggagatgatac

SEQ ID NO: 31768 - DNA, 599 bp, Chicken  19866894254489_1
  misc_feature (1)..(11): n is any nucleotide
nnnnnnnnnnngatggagtgtgggggctgacagcagcgggtccaagggctttgtcctaacggtggtgatgctgatggcatctgctttcctctctccccacgctgggtgggtgcagccttcagtccgtgcttcccctgctcctcgtctgccccaaccgctgtcacgcaacaaaaacattccttcccaatctgcttcctagaaatcagcccccggtttctgcattgcagaaattccagcacaccgcactcatcgcatgaaggaccttttgttttcctaagaacagctgagccaccccacagracgaccagacragagctgctgctgctctgaggccaggcagcctccttgcatcacacttctgcttgtactgttgccttagctggaccaacgccatgcagtcaatcagcactcactcccggagctgatccccagtttaatgcactgtggtaggtttggctcctttctgattatttccttggcaaatcagctcccagtgtttgtttttctctcctaaagatagtggcttcacattcccgatggggcccgagagcagtgctggggaagctagaggagctcagagcagctcagcagcacggggc

SEQ ID NO: 31769 - DNA, 600 bp, Chicken  19866894254489_2
gatggagtgtgggggctgacagcagcgggtccaagggctttgtcctaacggtggtgatgctgatggcatctgctttcctctctccccacgctgggtgggtgcagccttcagtccgtgcttcccctgctcctcgtctgccccaaccgctgtcacgcaacaaaaacattccttcccaatctgcttcctagaaatcagcccccggtttctgcattgcagaaattccagcacaccgcactcatcgcatgaaggaccttttgttttcctaagaacagctgagccaccccacagracgaccagacragagctgctgctgctctgaggccaggcagcctccttgcatcacacttctgcttgtactgttgccttagctggaccaacgccatgcagtcaatcagcactcactcccggagctgatccccagtttaatgcactgtggtaggtttggctcctttctgattatttccttggcaaatcagctcccagtgtttgtttttctctcctaaagatagtggcttcacattcccgatggggcccgagagcagtgctggggaagctagaggagctcagagcagctcagcagcacggggccaaggagcaggg

SEQ ID NO: 31770 - DNA, 600 bp, Chicken  19866894254490_1
tcactaaggaggattttgtggagttgggggtgacacgggtcggccaccggatgaacattgagcgggcgctcaagcagctggtggacagctgaccgtgctaggcagcgccggcctcttccagagccacagatggggcggggggacgtttctactagactaataaaacccattttgattctctttctactctgagcactgcactgaagggtgcggagcctgacggctcccacctgctcccaggcggccccgcgccgcgcacacgcagccccgctcggccccgccggccccgcgacgccttcrggaaaaggaatgttgcatgaaatacatcctcttttccgtccctcccagagagtcyggcctgtatatcgcttgatgtgctcttgcctgggggcgtcgctggtggccggaagggccgaggagccacgtgccgccatgtccgggctctgtgcctggcctgtggcacggcgacacctggctggggctgggggccgatccaccgccaggcgaggagcctgaccttcctgcaggcacctcgtgtggcaggtgggaacaggccgaccaggccctggggtgtgcagcacagccaggcccagcagtgca

SEQ ID NO: 31771 - DNA, 600 bp, Chicken  19866894254490_2
cattgagcgggcgctcaagcagctggtggacagctgaccgtgctaggcagcgccggcctcttccagagccacagatggggcggggggacgtttctactagactaataaaacccattttgattctctttctactctgagcactgcactgaagggtgcggagcctgacggctcccacctgctcccaggcggccccgcgccgcgcacacgcagccccgctcggccccgccggccccgcgacgccttcrggaaaaggaatgttgcatgaaatacatcctcttttccgtccctcccagagagtcyggcctgtatatcgcttgatgtgctcttgcctgggggcgtcgctggtggccggaagggccgaggagccacgtgccgccatgtccgggctctgtgcctggcctgtggcacggcgacacctggctggggctgggggccgatccaccgccaggcgaggagcctgaccttcctgcaggcacctcgtgtggcaggtgggaacaggccgaccaggccctggggtgtgcagcacagccaggcccagcagtgcagccaggcccagcaatgctgccagrcccagcacaggccccggcggtgcagccaggc

SEQ ID NO: 31772 - DNA, 600 bp, Chicken  19866894254490_3
catcctcttttccgtccctcccagagagtcyggcctgtatatcgcttgatgtgctcttgcctgggggcgtcgctggtggccggaagggccgaggagccacgtgccgccatgtccgggctctgtgcctggcctgtggcacggcgacacctggctggggctgggggccgatccaccgccaggcgaggagcctgaccttcctgcaggcacctcgtgtggcaggtgggaacaggccgaccaggccctggggtgtgcagcacagccaggcccagcagtgcagccaggcccagcaatgctgccagrcccagcacaggccccggcggtgcagccaggcccagcagtgcggctaaacccagtggtgcagccaggcccagcgacacagctaggctgggtggcacagcgaggcccggctgcacagctaggcccagtggtgcacttaggcccagcagtgcaactaggcccagtgacgtggctgggctcaatggcacacccaggcccagcggcacaacgaggcctggtggcacagttaggcccagttaggccacaacaaggcctggtggcacagctaggcccagcagcacagttaggcccagttaggccaca

SEQ ID NO: 31773 - DNA, 600 bp, Chicken  19866894254497_1
agggtttatcacacactaacgcacctttgaaagttacagcagccaagctgtctctaaattgcagggaaagcaccggagaaataaattattcagtcctaatgggaagtgaaaaggtgaaaagttttattacaaagtggcccgtatggcaccctttcaggtatttggggatgggaatttgcaactggtactttggaatcactattggatcacatatagccaaataaccagtgatgctattgcctctttatagcgtcatgcattggcataaaggaaaatcagagccaaaaaaatagtatattmtttttgttagtacagcgtgacttattcaccagatcaaataggttgatccataaaaactagtcgggtatgtaattccagccagatattagatttgagacttgtatacacttgaaaatttacaaaaatagctcatttgaaataattgcttaggaacagctatttaggcagaaagctgtagggatatttctcaaccgttttagattagttatctcacaaaatttctaactatagttgctctcatgatgtgtcctgtcgaatgaagattgtgttattcaattagctctcattaaggaagggagg

SEQ ID NO: 31774 - DNA, 600 bp, Chicken  19866894254501_1
gttagtacaacttcccccgagccatacagctgcttagcttggcttctgagcatggaatccatctcatttcttgttggccacccagaagttagctgtctagtttatactggctcactggggtttatccgtagttaagggagcaaaggtaagacagctgtagcggagaaaggagaaaggaaaatccatttcatctaaaatacttgttaaagttgggttgaattgtcttcctaggatgcttgtctctattgtgaaaaatagattggatatctgctattttggtggctgaagttaggaaggagraacctcactcagtgatcacatctgagagaaatattaaaagagggggaaaaatggaaaataataatgaaaaaatagatgcttatagtttaggtaccaccctttgcaaaccttgtgcccagtagtatgggcatgggccagtattttgggaccatggagcctctgtcatctgcgtgatgctctgtctaggtgctttcagagccattaggtcttgatgaacaagtgcatattgactgtgatttgtatgattgtaaagcccttaagaggtggagggctacagcgtgtgacctrtagtgcctctgg

SEQ ID NO: 31775 - DNA, 575 bp, Chicken  19866894254501_2
ttaggaaggagraacctcactcagtgatcacatctgagagaaatattaaaagagggggaaaaatggaaaataataatgaaaaaatagatgcttatagtttaggtaccaccctttgcaaaccttgtgcccagtagtatgggcatgggccagtattttgggaccatggagcctctgtcatctgcgtgatgctctgtctaggtgctttcagagccattaggtcttgatgaacaagtgcatattgactgtgatttgtatgattgtaaagcccttaagaggtggagggctacagcgtgtgacctrtagtgcctctggaagagagaaatgtagctagacaccatagcaaatggttcaaactttcagctgtgtgattttaggatctagttttttttttgcacccatatctgcccaatgcatttcaggtaacagttactgtcctgaaaaataagtattttgaaagacaacctagaagtcctttcttcccaactaaatacacgaactactcgactgcaaagcctcagtggttgtgtgttccatttaaagtccacagagacagttgtattttgagagtatgaaga

SEQ ID NO: 31776 - DNA, 600 bp, Chicken  19866894254502_1
agctttctttagcaacccaccagcttgtgaccttctggaggagcttctctgttcctggactgttcaagctttccaaatgaggcactatacctgactaattctgaaccactatgtataggttcgcagccctgggaacacatgagagtgctaccattttgctgagaagtttacatgttgctgaaaaacagaggaccaaaagaaaactgtctcagatgtatgcttgtaaaatctgaattgaaaagtagtgtactgggatcactgctagatttgtgttttaacatcagaggatacagaaaaaamtacagttggtaatgaaaattgtttaacataaaatgaagaactgaaatgctttaatcatgctacgatgtcattatggggcagaattcacatygtttggttttttcttcatagagtaatttaacacgttaaattaaagctcgagagaaacctgaatgctgagygttctgtaatgcttgcttgagagagatttatagccagtttgttttttggtttagtttagtttgttgctttttttcccccatttcaagcataccagcaatcaccttcacctttgtttgaaaatccatttgctgtcacatt

SEQ ID NO: 31777 - DNA, 600 bp, Chicken  19866894254502_2
tgactaattctgaaccactatgtataggttcgcagccctgggaacacatgagagtgctaccattttgctgagaagtttacatgttgctgaaaaacagaggaccaaaagaaaactgtctcagatgtatgcttgtaaaatctgaattgaaaagtagtgtactgggatcactgctagatttgtgttttaacatcagaggatacagaaaaaamtacagttggtaatgaaaattgtttaacataaaatgaagaactgaaatgctttaatcatgctacgatgtcattatggggcagaattcacatygtttggttttttcttcatagagtaatttaacacgttaaattaaagctcgagagaaacctgaatgctgagygttctgtaatgcttgcttgagagagatttatagccagtttgttttttggtttagtttagtttgttgctttttttcccccatttcaagcataccagcaatcaccttcacctttgtttgaaaatccatttgctgtcacattcattttaaaaaatatttgcattaaaataagattataccttaagataagttcaaaatacacatacytaacatacatattcatacacttkcac

SEQ ID NO: 31778 - DNA, 600 bp, Chicken  19866894254502_3
agaagtttacatgttgctgaaaaacagaggaccaaaagaaaactgtctcagatgtatgcttgtaaaatctgaattgaaaagtagtgtactgggatcactgctagatttgtgttttaacatcagaggatacagaaaaaamtacagttggtaatgaaaattgtttaacataaaatgaagaactgaaatgctttaatcatgctacgatgtcattatggggcagaattcacatygtttggttttttcttcatagagtaatttaacacgttaaattaaagctcgagagaaacctgaatgctgagygttctgtaatgcttgcttgagagagatttatagccagtttgttttttggtttagtttagtttgttgctttttttcccccatttcaagcataccagcaatcaccttcacctttgtttgaaaatccatttgctgtcacattcattttaaaaaatatttgcattaaaataagattataccttaagataagttcaaaatacacatacytaacatacatattcatacacttkcacacacctctcaatgcctctagtgcaagcttccatctactcactatgccaagttctctcagccacactcctc

SEQ ID NO: 31779 - DNA, 600 bp, Chicken  19866894254502_4
tgtcattatggggcagaattcacatygtttggttttttcttcatagagtaatttaacacgttaaattaaagctcgagagaaacctgaatgctgagygttctgtaatgcttgcttgagagagatttatagccagtttgttttttggtttagtttagtttgttgctttttttcccccatttcaagcataccagcaatcaccttcacctttgtttgaaaatccatttgctgtcacattcattttaaaaaatatttgcattaaaataagattataccttaagataagttcaaaatacacatacytaacatacatattcatacacttkcacacacctctcaatgcctctagtgcaagcttccatctactcactatgccaagttctctcagccacactcctccagtcagttttataattccccaagaacacactgaaataactgagtttctcaatcattgtatcaatttttggaaagtatgctgtttttccaaaaaatttaagtgttctgcctttgaaaggtcactttgtttgtaactcttcctgttacctactctacctttgcttctttgttaggcaggcactatmtttattacaaaaagggtca

SEQ ID NO: 31780 - DNA, 600 bp, Chicken  19866894254502_5
atygtttggttttttcttcatagagtaatttaacacgttaaattaaagctcgagagaaacctgaatgctgagygttctgtaatgcttgcttgagagagatttatagccagtttgttttttggtttagtttagtttgttgctttttttcccccatttcaagcataccagcaatcaccttcacctttgtttgaaaatccatttgctgtcacattcattttaaaaaatatttgcattaaaataagattataccttaagataagttcaaaatacacatacytaacatacatattcatacacttkcacacacctctcaatgcctctagtgcaagcttccatctactcactatgccaagttctctcagccacactcctccagtcagttttataattccccaagaacacactgaaataactgagtttctcaatcattgtatcaatttttggaaagtatgctgtttttccaaaaaatttaagtgttctgcctttgaaaggtcactttgtttgtaactcttcctgttacctactctacctttgcttctttgttaggcaggcactatmtttattacaaaaagggtcaacctgtgtcaaactctaagtgtt

SEQ ID NO: 31781 - DNA, 600 bp, Chicken  19866894254502_6
agttcaaaatacacatacytaacatacatattcatacacttkcacacacctctcaatgcctctagtgcaagcttccatctactcactatgccaagttctctcagccacactcctccagtcagttttataattccccaagaacacactgaaataactgagtttctcaatcattgtatcaatttttggaaagtatgctgtttttccaaaaaatttaagtgttctgcctttgaaaggtcactttgtttgtaactcttcctgttacctactctacctttgcttctttgttaggcaggcactatmtttattacaaaaagggtcaacctgtgtcaaactctaagtgttcaaatagagttggttatttgcccttaccctcttctatttgcttcatttccatttttattgctttactgcttgttgtttaaacacagagtctcattctgaagaaacacctgtcattcattatattccaccaccacctatcaatcattttattatctaaaaatgtataagcaatgaagggacaaacaggaggtcattacagtaagcaaattatgagctggaatagggacttgaagtccatcaggtcaacgttttgggtca

SEQ ID NO: 31782 - DNA, 599 bp, Chicken  19866894254512_1
  misc_feature (1)..(63): n is any nucleotide
nnnnnnnnnnnnnnnnnnnnnnnnnnnnnnnnnnnnnnnnnnnnnnnnnnnnnnnnnnnnnnncccccctgctaaagcaggtaccctacagtaggttgcacaggcaggcatccagatgggtcttgaatatctccagagaaggagactccacaatctttctgggcaacctgttccagggctctgtcacccttaccacaaagaagttcttccacatgttagtacagaactttctgtgttcaagttttaggccattactccttgtcctttcactacacaccccagagaagagcctggccttayccayttgcctcccacctcccttcagatatttataaatatttaccagatcccccctcagtcttcttttccccaggctgaacagacccaggttattcagcctttcctcatacagaagatgctccaggccctttatcgtcctgcctctacttgccttacaacttcttgtcataaatgcttattatcataaacaaatggagataggagttgtataaaaacatagtggaaataagtattgctgatgatttattttgttggagagcaaactcttattcagaagccataattccgctgaagaaatt

SEQ ID NO: 31783 - DNA, 599 bp, Chicken  19866894254512_2
  misc_feature (1)..(59): n is any nucleotide
nnnnnnnnnnnnnnnnnnnnnnnnnnnnnnnnnnnnnnnnnnnnnnnnnnnnnnnnnnncccccctgctaaagcaggtaccctacagtaggttgcacaggcaggcatccagatgggtcttgaatatctccagagaaggagactccacaatctttctgggcaacctgttccagggctctgtcacccttaccacaaagaagttcttccacatgttagtacagaactttctgtgttcaagttttaggccattactccttgtcctttcactacacaccccagagaagagcctggccttayccayttgcctcccacctcccttcagatatttataaatatttaccagatcccccctcagtcttcttttccccaggctgaacagacccaggttattcagcctttcctcatacagaagatgctccaggccctttatcgtcctgcctctacttgccttacaacttcttgtcataaatgcttattatcataaacaaatggagataggagttgtataaaaacatagtggaaataagtattgctgatgatttattttgttggagagcaaactcttattcagaagccataattccgctgaagaaattgcag

SEQ ID NO: 31784 - DNA, 600 bp, Chicken  19866894254527_1
ggctgacaaaagggatggatccaaaatctctttcgcaataggtgtaaaacctgattgaaagcagtgggctctgcctttgtttttcttttgtgttttgtttcagatgaacacttagggacaaatatctacagctcgtgctgtaaggtgcacgaattcacttagaaaaggcatcccgtagctctggggaatgcttttccattcagtttgtttgaatttttgctgatctttgcagttctgcttggaggtcagcagtgtgcacctgcctccctccacctgttctactgcttgttgttcagcgcygccgggctgcgctgtgccggagttctctctgaagcaaatctcttccagtccttcatgagcctgaactgttggtacagtggtgcagctctgctggaaatttgcatcctgcatctaaaatggatgtttacagttgtaaggctgttgtgtcattttcatgcttgacatctgtctacttgagctcctaagcaaggtaggaatggggaggcagcagagcagctctgagtagcagcttcttcagggagttgtgagcccatggcacgtggtgattggaacgtagatattgcctctgacagcacgatg

SEQ ID NO: 31785 - DNA, 598 bp, Chicken  19866894254527_2
cggagaataagtgtaagatcaatgaccctccatcaattcagccatgtttttaagacttgcttttaagacctttctgcttcactggatcaatttttgctttttgaggtatagccagacaatatcaaaatttgcatgtatcaggagtgccccattaatctccagtagcacactgtgtttatgtactcagtcgtgagacttaataaattgagcaatatctgtatcctgataagtgcttccacatctgtggaaattcttccattgcagcgactgtggaacgttcactaagctgtgtgcttcatygggcctttcatcgagtggttttactgaatgtcttattagttttatcatatggctttctagtgattctctgtaaacttgggtagttctatttaatctagaaattaaaagtcattattattgccttatttgtataataatcactttttctcctgaaggcactctgtgggaatttgtcttcctacgagcccctgaagatggtcatcatcaaccacggcctgcagacgctcaccaacgagggtgattataccccattctggctggggagagtgagccccaacgaggactccaagcctcgcga

SEQ ID NO: 31786 - DNA, 600 bp, Chicken  19866894254528_1
ttgaaatttatttttaatttctttcaatctatttcattctagttatgctgaatgaacacacgatgttgatagttcgttgtcatttatttcttacttactctgtgttgaaaagaatgctcccataaaagaattgtttgtagtccctttgcttctgaagttttaatcaagttggactagttagtaccaaatgcttcttttagcacttgtgtttcactgcagtttggagctttggaaatttattctagtaattgttttcagcattttaaaaatctgttcctactcttgtgcagaaagttaatsccattgacatggacaggaacaaaataattagccagtaacttcagttccaattggtttcaaaagaaactttacaatagtcatcttcttctgtagtaaattactggtgtctttggttttgacttgatgaccatgaactgcagagcaggagctgggtcaaagcaggagccaggtcaaagcctgggataaataccagcaacattttgccatatttgtatgcaggtggacattatagaagatgtgaaagcaccacaacaactctttaaccgtgtgtgcagcatgacacagacccttagcatcatg

SEQ ID NO: 31787 - DNA, 599 bp, Chicken  19866894254532_1
  misc_feature (1)..(15): n is any nucleotide
nnnnnnnnnnnnnnntgtagtggagacaggcacctgcctctcgcagtgccataaataacggcttctgaatgctcccagtaaaatctgctctctcccttaaagaaattagagcctttcccatgttaaagcacctgctgctcagttcatggagctctatctcagaggaacattatttccaaaataatgttattgcagcagcaaaactccatgcagtgtccgaatgtgagcaatggctgttggcagcgctctgttttgaagatcacatcggtgtgttgctctggttctcatccattcatatcyattagtacttgggttataacataaatcatagctgcactacacttattgcctgagcagaaaccagaayggtggggtggaccaatgctgaggatmaattatcaagaacactgctgagtgctgaagctcctgaatcacatgggggttttctcagtaaaggtaagatggaagtttttycaaattctaatcaaatttaatcacagaattgcaaagtttggaaggaacccaagggggaatagttttaaactgagacaggggaggtttaggttagatatgaggaggaagtttttcccccagagggt

SEQ ID NO: 31788 - DNA, 600 bp, Chicken  19866894254532_2
aatgctcccagtaaaatctgctctctcccttaaagaaattagagcctttcccatgttaaagcacctgctgctcagttcatggagctctatctcagaggaacattatttccaaaataatgttattgcagcagcaaaactccatgcagtgtccgaatgtgagcaatggctgttggcagcgctctgttttgaagatcacatcggtgtgttgctctggttctcatccattcatatcyattagtacttgggttataacataaatcatagctgcactacacttattgcctgagcagaaaccagaayggtggggtggaccaatgctgaggatmaattatcaagaacactgctgagtgctgaagctcctgaatcacatgggggttttctcagtaaaggtaagatggaagtttttycaaattctaatcaaatttaatcacagaattgcaaagtttggaaggaacccaagggggaatagttttaaactgagacaggggaggtttaggttagatatgaggaggaagtttttcccccagagggtggtgacgcactgaacaggttgcccaaggaggctgtgggtgccccatcgctgcaggcattcaaggccag

SEQ ID NO: 31789 - DNA, 600 bp, Chicken  19866894254532_3
cccttaaagaaattagagcctttcccatgttaaagcacctgctgctcagttcatggagctctatctcagaggaacattatttccaaaataatgttattgcagcagcaaaactccatgcagtgtccgaatgtgagcaatggctgttggcagcgctctgttttgaagatcacatcggtgtgttgctctggttctcatccattcatatcyattagtacttgggttataacataaatcatagctgcactacacttattgcctgagcagaaaccagaayggtggggtggaccaatgctgaggatmaattatcaagaacactgctgagtgctgaagctcctgaatcacatgggggttttctcagtaaaggtaagatggaagtttttycaaattctaatcaaatttaatcacagaattgcaaagtttggaaggaacccaagggggaatagttttaaactgagacaggggaggtttaggttagatatgaggaggaagtttttcccccagagggtggtgacgcactgaacaggttgcccaaggaggctgtgggtgccccatcgctgcaggcattcaaggccaggctggatgtggctctgggcagcctgg

SEQ ID NO: 31790 - DNA, 600 bp, Chicken  19866894254532_4
tccaaaataatgttattgcagcagcaaaactccatgcagtgtccgaatgtgagcaatggctgttggcagcgctctgttttgaagatcacatcggtgtgttgctctggttctcatccattcatatcyattagtacttgggttataacataaatcatagctgcactacacttattgcctgagcagaaaccagaayggtggggtggaccaatgctgaggatmaattatcaagaacactgctgagtgctgaagctcctgaatcacatgggggttttctcagtaaaggtaagatggaagtttttycaaattctaatcaaatttaatcacagaattgcaaagtttggaaggaacccaagggggaatagttttaaactgagacaggggaggtttaggttagatatgaggaggaagtttttcccccagagggtggtgacgcactgaacaggttgcccaaggaggctgtgggtgccccatcgctgcaggcattcaaggccaggctggatgtggctctgggcagcctggtctgctggttggtgaccctgcacatagcagggggttggaactggatgagcactgtggtccttttcaacccaggccattctg

SEQ ID NO: 31791 - DNA, 600 bp, Chicken  19866894254540_1
aatgcttaaacgtttcacaaccccctttttaacagtccactgtatcactccattgtaccagaagctggtgcatgacagggaatataataaatccactcaacgccatgatctttgatccaggtgtttacaagagaatttttgaaatgagtcccattctatgactcagttctttctggagtgccatgtcaacacaggacttgtttcctgagacctaatatggtgttttgagtggtgcatgggctacagaatatgtttcaagtgacccagtggttgcctccaccatggtgatcatatatgacyttgccatgaacccatgatgctaagtgtaatcaacctgccctgtatttacacttttgccatcacccttcccaccagagaggtctcatcctcttggcttgtttaactgcagcacaagtttcacagtcatgaataacttgtgaaatagtgttcacagttaagtttgccccttggwctctagcccacatataygttgcatcacttycttgatggcccaaggtctcatgggcccactgagctagaagtagtttacctttgtgtttgccagtccaagtctatttgacccacttcaattttggcagc

SEQ ID NO: 31792 - DNA, 600 bp, Chicken  19866894254540_2
ctggagtgccatgtcaacacaggacttgtttcctgagacctaatatggtgttttgagtggtgcatgggctacagaatatgtttcaagtgacccagtggttgcctccaccatggtgatcatatatgacyttgccatgaacccatgatgctaagtgtaatcaacctgccctgtatttacacttttgccatcacccttcccaccagagaggtctcatcctcttggcttgtttaactgcagcacaagtttcacagtcatgaataacttgtgaaatagtgttcacagttaagtttgccccttggwctctagcccacatataygttgcatcacttycttgatggcccaaggtctcatgggcccactgagctagaagtagtttacctttgtgtttgccagtccaagtctatttgacccacttcaattttggcagcttgatctacctgatggttattttgttgttcttcagtagtctgactcttgggcacatgagcattcacataatgcacctttacaaccatatycttcatttgggcagcaatgtctttctccagttcagcagcccagataggtttaacccttcattgccagttattttgttcccgc

SEQ ID NO: 31793 - DNA, 600 bp, Chicken  19866894254540_3
cacaggacttgtttcctgagacctaatatggtgttttgagtggtgcatgggctacagaatatgtttcaagtgacccagtggttgcctccaccatggtgatcatatatgacyttgccatgaacccatgatgctaagtgtaatcaacctgccctgtatttacacttttgccatcacccttcccaccagagaggtctcatcctcttggcttgtttaactgcagcacaagtttcacagtcatgaataacttgtgaaatagtgttcacagttaagtttgccccttggwctctagcccacatataygttgcatcacttycttgatggcccaaggtctcatgggcccactgagctagaagtagtttacctttgtgtttgccagtccaagtctatttgacccacttcaattttggcagcttgatctacctgatggttattttgttgttcttcagtagtctgactcttgggcacatgagcattcacataatgcacctttacaaccatatycttcatttgggcagcaatgtctttctccagttcagcagcccagataggtttaacccttcattgccagttattttgttcccgctgttgtaactgccccgt

SEQ ID NO: 31794 - DNA, 600 bp, Chicken  19866894254540_4
tcctgagacctaatatggtgttttgagtggtgcatgggctacagaatatgtttcaagtgacccagtggttgcctccaccatggtgatcatatatgacyttgccatgaacccatgatgctaagtgtaatcaacctgccctgtatttacacttttgccatcacccttcccaccagagaggtctcatcctcttggcttgtttaactgcagcacaagtttcacagtcatgaataacttgtgaaatagtgttcacagttaagtttgccccttggwctctagcccacatataygttgcatcacttycttgatggcccaaggtctcatgggcccactgagctagaagtagtttacctttgtgtttgccagtccaagtctatttgacccacttcaattttggcagcttgatctacctgatggttattttgttgttcttcagtagtctgactcttgggcacatgagcattcacataatgcacctttacaaccatatycttcatttgggcagcaatgtctttctccagttcagcagcccagataggtttaacccttcattgccagttattttgttcccgctgttgtaactgccccgtaaggcatttgcca

SEQ ID NO: 31795 - DNA, 429 bp, Chicken  19866894254540_5
ttggcttgtttaactgcagcacaagtttcacagtcatgaataacttgtgaaatagtgttcacagttaagtttgccccttggwctctagcccacatataygttgcatcacttycttgatggcccaaggtctcatgggcccactgagctagaagtagtttacctttgtgtttgccagtccaagtctatttgacccacttcaattttggcagcttgatctacctgatggttattttgttgttcttcagtagtctgactcttgggcacatgagcattcacataatgcacctttacaaccatatycttcatttgggcagcaatgtctttctccagttcagcagcccagataggtttaacccttcattgccagttattttgttcccgctgttgtaactgccccgtaaggcatttgccaccgtctatgagtcagta

SEQ ID NO: 31796 - DNA, 600 bp, Chicken  19866894254552_1
tgtgaagtgtttcaaactatttaatgaatttgtttcaaacaagctgcctccgtcttctattcttgctctccaggtagcttgaaaatcccagatgtttgcagaatgcaagtcctcaggtttcatgcactgaggaaagagcatgtgtttacttgaagttgttcagaagctgtttgatatgcctgtaggctcatgcaggaaggagaatttgcaagcatcctgcaacatatcagaccagctgcagctgaacacagcttggattttaactattttggttcaatgctgagatcaatattttattawtttgaataaaatctgagtactgaattcaaacaagtggtagccttctggcagtatgtcccaagcacccactgtgtcagtatgactgaacaaattgttccatgagaattattcagtgagctgtctttgcagtgtacaggaatactcaaagctttyctgcgcttgactgatacaagacaacctgactttctggcttcgcatgctgttgctccacagtgtgatgcagttagacagwgatagctctgaagttactgtatgcccatattgcaattcttgtgtattttgaagacagtggaccaactc

SEQ ID NO: 31797 - DNA, 600 bp, Chicken  19866894254552_2
agttgttcagaagctgtttgatatgcctgtaggctcatgcaggaaggagaatttgcaagcatcctgcaacatatcagaccagctgcagctgaacacagcttggattttaactattttggttcaatgctgagatcaatattttattawtttgaataaaatctgagtactgaattcaaacaagtggtagccttctggcagtatgtcccaagcacccactgtgtcagtatgactgaacaaattgttccatgagaattattcagtgagctgtctttgcagtgtacaggaatactcaaagctttyctgcgcttgactgatacaagacaacctgactttctggcttcgcatgctgttgctccacagtgtgatgcagttagacagwgatagctctgaagttactgtatgcccatattgcaattcttgtgtattttgaagacagtggaccaactccagaaaagcatttgtgaagcctttgaagcagtagttttgtaatttactgctgaatccagcaggagtatgtgacaacctcaaaataacttttgcagtgctgagattggcttgctttttggttcagctggagtttctccagatggtctactacct

SEQ ID NO: 31798 - DNA, 588 bp, Chicken  19866894254552_3
cagctgcagctgaacacagcttggattttaactattttggttcaatgctgagatcaatattttattawtttgaataaaatctgagtactgaattcaaacaagtggtagccttctggcagtatgtcccaagcacccactgtgtcagtatgactgaacaaattgttccatgagaattattcagtgagctgtctttgcagtgtacaggaatactcaaagctttyctgcgcttgactgatacaagacaacctgactttctggcttcgcatgctgttgctccacagtgtgatgcagttagacagwgatagctctgaagttactgtatgcccatattgcaattcttgtgtattttgaagacagtggaccaactccagaaaagcatttgtgaagcctttgaagcagtagttttgtaatttactgctgaatccagcaggagtatgtgacaacctcaaaataacttttgcagtgctgagattggcttgctttttggttcagctggagtttctccagatggtctactacctttgtggcaactgggaactgcacttggaaaatattcagcaaactgcagattgttgttgcttttttctg

SEQ ID NO: 31799 - DNA, 599 bp, Chicken  19866894254554_1
  misc_feature (1)..(281): n is any nucleotide
nnnnnnnnnnnnnnnnnnnnnnnnnnnnnnnnnnnnnnnnnnnnnnnnnnnnnnnnnnnnnnnnnnnnnnnnnnnnnnnnnnnnnnnnnnnnnnnnnnnnnnnnnnnnnnnnnnnnnnnnnnnnnnnnnnnnnnnnnnnnnnnnnnnnnnnnnnnnnnnnnnnnnnnnnnnnnnnnnnnnnnnnnnnnnnnnnnnnnnnnnnnnnnnnnnnnnnnnnnnnnnnnnnnnnnnnnnnnnnnnnnnnnnnnnnnnnnnnnnnnnnnnnnnnnnnnnnnnnnnnnactttctaatgtagcttgkattttatttgtgttgggctgcatcgactgctacacgaaacgctgcactaagacgattttgcaggagccatccagaactgtatcactgtttttactgtccctctggttactcttcaggactgaagttacagtagggtcaggatttcaatctttagtcatgaactgtgttgaaaaaaacaaacaccaacaaatcctctgcaagtcacagagtactgytccagttctaactatgagtacagtagcatttcagcttcttaaatgtctttcttaagtggagtgatagtgttatgtttcccaata

SEQ ID NO: 31800 - DNA, 599 bp, Chicken  19866894254554_2
  misc_feature (1)..(66): n is any nucleotide
nnnnnnnnnnnnnnnnnnnnnnnnnnnnnnnnnnnnnnnnnnnnnnnnnnnnnnnnnnnnnnnnnnactttctaatgtagcttgkattttatttgtgttgggctgcatcgactgctacacgaaacgctgcactaagacgattttgcaggagccatccagaactgtatcactgtttttactgtccctctggttactcttcaggactgaagttacagtagggtcaggatttcaatctttagtcatgaactgtgttgaaaaaaacaaacaccaacaaatcctctgcaagtcacagagtactgytccagttctaactatgagtacagtagcatttcagcttcttaaatgtctttcttaagtggagtgatagtgttatgtttcccaatagcatttggtttcagaacagcrttttaaacaccttcttacatctttcctatccctacyttaattttcttactaaacgcagttgtgtgcttttgttcagaatagctgatttttggcaacattcactctgtaggagagagactataaattattttatacttttcagagtgtaattcagagtgtactttccagagttaatttttagcacctacagacct

SEQ ID NO: 31801 - DNA, 600 bp, Chicken  19866894254554_3
catcgactgctacacgaaacgctgcactaagacgattttgcaggagccatccagaactgtatcactgtttttactgtccctctggttactcttcaggactgaagttacagtagggtcaggatttcaatctttagtcatgaactgtgttgaaaaaaacaaacaccaacaaatcctctgcaagtcacagagtactgytccagttctaactatgagtacagtagcatttcagcttcttaaatgtctttcttaagtggagtgatagtgttatgtttcccaatagcatttggtttcagaacagcrttttaaacaccttcttacatctttcctatccctacyttaattttcttactaaacgcagttgtgtgcttttgttcagaatagctgatttttggcaacattcactctgtaggagagagactataaattattttatacttttcagagtgtaattcagagtgtactttccagagttaatttttagcacctacagacctacctggttcaggtctgtgaatgtgtgcatctagcagtcctgtgagttcagtattagacgaacatagcattttacgtgtttcaaataatttctcatatctaactgca

SEQ ID NO: 31802 - DNA, 600 bp, Chicken  19866894254554_4
tttgcaggagccatccagaactgtatcactgtttttactgtccctctggttactcttcaggactgaagttacagtagggtcaggatttcaatctttagtcatgaactgtgttgaaaaaaacaaacaccaacaaatcctctgcaagtcacagagtactgytccagttctaactatgagtacagtagcatttcagcttcttaaatgtctttcttaagtggagtgatagtgttatgtttcccaatagcatttggtttcagaacagcrttttaaacaccttcttacatctttcctatccctacyttaattttcttactaaacgcagttgtgtgcttttgttcagaatagctgatttttggcaacattcactctgtaggagagagactataaattattttatacttttcagagtgtaattcagagtgtactttccagagttaatttttagcacctacagacctacctggttcaggtctgtgaatgtgtgcatctagcagtcctgtgagttcagtattagacgaacatagcattttacgtgtttcaaataatttctcatatctaactgcattctaactgaatttaaggattcggtgtgctgattct

SEQ ID NO: 31803 - DNA, 600 bp, Chicken  19866894254558_1
cagccatttctcaccaccattccagggaccagcagcctgctcccacccttctctccatacactccaactctgctctcctgaagccattcaggctttccacacatccctgcctgctgtcatctgccccctctaatttattatcctctagatcatgatgctccaaagtggacacacatcagccagcagcgagcaaagcgctctaattatctcctgcatcttggctatgagagtaaggatgcctgtctggagtagaaggaacagaccaagttgacagtggtctttttttgggcttgaaataamtgctacatagaattacacaggagtgcttttaattaattgccttacactgacagcagctggcaagacgtccctttgcccatcagcactcagacaattagtttgctctgcgctccacctgagttggtagagtggctctatatttatctggctcaaagtgaatcacttccacaagcgatcaactgcagggagaaagctctgtatttcagttcttcaaagatcacagccccccagctgggggattggtgtcagggggactctgacctctcaggagggctcaccgtggctcctgtctgaaggtac

SEQ ID NO: 31804 - DNA, 600 bp, Chicken  19866894254564_1
actgcttccatttttgaatcgcagctgaaataaatagtactactaaaagcatgtttcttgtggtgtaactgagtcagtgttattttggagacatagctgtatcattggagacttgttctactttctccactttctgtagtgtgcactctgattatcggtcctgcactgacatggtgtgaccaacacttgacatgtatggcttgttccagggttgggcctggtttaacaaggattttggttttgtgttgtggtgagagcaggagacttataaatagataacctcactaaacgctagcatgyaaaagagcaaaaaaaaaccctccttaaatctgacgagagcaaggtctgtggtaaccagggagcaattcagtccatcaatgcgtttggcatcgtaatatcagcaacagtttgcaatgacctggtgagagagtgtactgggaggagcagaggtagatgatgctgtaaaatgtctcttagtggtaagatgtaaaatgtaagcatacaaaaaggrggtgtgggggagagctgttctaaaccaaaacagctgtkacatagccagcagatcagtgtgtggttctcaatgtctggttttggtagtgt

SEQ ID NO: 31805 - DNA, 600 bp, Chicken  19866894254564_2
atttttgaatcgcagctgaaataaatagtactactaaaagcatgtttcttgtggtgtaactgagtcagtgttattttggagacatagctgtatcattggagacttgttctactttctccactttctgtagtgtgcactctgattatcggtcctgcactgacatggtgtgaccaacacttgacatgtatggcttgttccagggttgggcctggtttaacaaggattttggttttgtgttgtggtgagagcaggagacttataaatagataacctcactaaacgctagcatgyaaaagagcyaaaaaaaaccctccttaaatctgacgagagcaaggtctgtggtaaccagggagcaattcagtccatcaatgcgtttggcatcgtaatatcagcaacagtttgcaatgacctggtgagagagtgtactgggaggagcagaggtagatgatgctgtaaaatgtctcttagtggtaagatgtaaaatgtaagcatacaaaaaggrggtgtgggggagagctgttctaaaccaaaacagctgtkacatagccagcagatcagtgtgtggttctcaatgtctggttttggtagtgtgcaagactg

SEQ ID NO: 31806 - DNA, 600 bp, Chicken  19866894254564_3
ttgggcctggtttaacaaggattttggttttgtgttgtggtgagagcaggagacttataaatagataacctcactaaacgctagcatgyaaaagagcaaaaaaaaaccctccttaaatctgacgagagcaaggtctgtggtaaccagggagcaattcagtccatcaatgcgtttggcatcgtaatatcagcaacagtttgcaatgacctggtgagagagtgtactgggaggagcagaggtagatgatgctgtaaaatgtctcttagtggtaagatgtaaaatgtaagcatacaaaaaggrggtgtgggggagagctgttctaaaccaaaacagctgtkacatagccagcagatcagtgtgtggttctcaatgtctggttttggtagtgtgcaagactggaaaataaggtttgggggagtctttgtgcatccttggaaccttgtaggcatcctgcttgttttctgattccttgactggtctcagccatgaatgtacagtttacaaatcaaatgttcattgtcttttgttgcagaaacagagggggaaggaaaatgagtctaaatgagattgtcagcagcctctaatgttttgtgtagcttc

SEQ ID NO: 31807 - DNA, 600 bp, Chicken  19866894254564_4
ggtgagagcaggagacttataaatagataacctcactaaacgctagcatgyaaaagagcaaaaaaaaaccctccttaaatctgacgagagcaaggtctgtggtaaccagggagcaattcagtccatcaatgcgtttggcatcgtaatatcagcaacagtttgcaatgacctggtgagagagtgtactgggaggagcagaggtagatgatgctgtaaaatgtctcttagtggtaagatgtaaaatgtaagcatacaaaaaggrggtgtgggggagagctgttctaaaccaaaacagctgtkacatagccagcagatcagtgtgtggttctcaatgtctggttttggtagtgtgcaagactggaaaataaggtttgggggagtctttgtgcatccttggaaccttgtaggcatcctgcttgttttctgattccttgactggtctcagccatgaatgtacagtttacaaatcaaatgttcattgtcttttgttgcagaaacagagggggaaggaaaatgagtctaaatgagattgtcagcagcctctaatgttttgtgtagcttctactgttaaagtggactgctcaatggatttagtgcata

SEQ ID NO: 31808 - DNA, 600 bp, Chicken  19866894254566_1
ttcactgggattcacagcaaaagcagaaggcttataaacttaactgtccccgtctcttgggtttgtccatatcctaatttggcacttacttgggttcagagccttttgggtgcttgtgtggtggaacatcccaaatttggctttctagaacgaaggagcttactctgtgagtctcttgcctatttgcaatattcagttgtagtcacctgatttttcagctatgaccataaaatttgttgggcagagtgggaacacaaggaaagttctccctagggaagcagtggataaaatgtattaatrtttrctattgaccttgaagcaagtaaaagcaagcagctgatgactagatggtgcatgaggcttcactgcagatattggtttatcaaagatccatagcacaggaatcatcaggtgtgtgacttacccttctcctgctcctaagcagggatgcagggagcaggctctacctcagaaatgaaaggtgcactacctgcctgctatcaagaatgattagattatacacatggctagtttaatcatttgcatagcctttcgggacacccacccgcttttaataaagaatgccaatacacctggagc

SEQ ID NO: 31809 - DNA, 600 bp, Chicken  19866894254566_2
ctgggattcacagcaaaagcagaaggcttataaacttaactgtccccgtctcttgggtttgtccatatcctaatttggcacttacttgggttcagagccttttgggtgcttgtgtggtggaacatcccaaatttggctttctagaacgaaggagcttactctgtgagtctcttgcctatttgcaatattcagttgtagtcacctgatttttcagctatgaccataaaatttgttgggcagagtgggaacacaaggaaagttctccctagggaagcagtggataaaatgtattaatrtttrctattgaccttgaagcaagtaaaagcaagcagctgatgactagatggtgcatgaggcttcactgcagatattggtttatcaaagatccatagcacaggaatcatcaggtgtgtgacttacccttctcctgctcctaagcagggatgcagggagcaggctctacctcagaaatgaaaggtgcactacctgcctgctatcaagaatgattagattatacacatggctagtttaatcatttgcatagcctttcgggacacccacccgcttttaataaagaatgccaatacacctggagcagag

SEQ ID NO: 31810 - DNA, 599 bp, Chicken  19866894254572_1
  misc_feature (1)..(136): n is any nucleotide
nnnnnnnnnnnnnnnnnnnnnnnnnnnnnnnnnnnnnnnnnnnnnnnnnnnnnnnnnnnnnnnnnnnnnnnnnnnnnnnnnnnnnnnnnnnnnnnnnnnnnnnnnnnnnnnnnnnnnnnnnnnnnnnnnnnnnnnnactgaagtctcatcactgaagtgacacattacatctcaaatgtctctttacgttattttctgtggcccacaagagttggtcagtttgggaacaattcttttgtcccctactgtatgtgcaggaaaactccaggtatggacttacctgagatcttctcttgctcytctttgtcttgctgggcaagacgagctgcgacttcatctggtgatcgttcttttatagcatgrgaaccctcatgttctttatctataaaagcagagaaattgtttaagcatcagattaaackrtttcacttaaactgctatacagattacttggagggaaataaccttccttttaaaattgactttcatagttagcatcattttacaaatctgacttacgaacaaagccggaccaaaactacctcaagcttttttatatccataatgatraagagaaggtgcttcacttggccctgcag

SEQ ID NO: 31811 - DNA, 599 bp, Chicken  19866894254572_2
  misc_feature (1)..(73): n is any nucleotide
nnnnnnnnnnnnnnnnnnnnnnnnnnnnnnnnnnnnnnnnnnnnnnnnnnnnnnnnnnnnnnnnnnnnnnnnnactgaagtctcatcactgaagtgacacattacatctcaaatgtctctttacgttattttctgtggcccacaagagttggtcagtttgggaacaattcttttgtcccctactgtatgtgcaggaaaactccaggtatggacttacctgagatcttctcttgctcytctttgtcttgctgggcaagacgagctgcgacttcatctggtgatcgttcttttatagcatgrgaaccctcatgttctttatctataaaagcagagaaattgtttaagcatcagattaaackrtttcacttaaactgctatacagattacttggagggaaataaccttccttttaaaattgactttcatagttagcatcattttacaaatctgacttacgaacaaagccggaccaaaactacctcaagcttttttatatccataatgatraagagaaggtgcttcacttggccctgcagagctcttctaaagcacagtcagaaagccaccaacagcagaggcaaactgggccatgcagtttg

SEQ ID NO: 31812 - DNA, 599 bp, Chicken  19866894254572_3
  misc_feature (1)..(14): n is any nucleotide
nnnnnnnnnnnnnnactgaagtctcatcactgaagtgacacattacatctcaaatgtctctttacgttattttctgtggcccacaagagttggtcagtttgggaacaattcttttgtcccctactgtatgtgcaggaaaactccaggtatggacttacctgagatcttctcttgctcytctttgtcttgctgggcaagacgagctgcgacttcatctggtgatcgttcttttatagcatgrgaaccctcatgttctttatctataaaagcagagaaattgtttaagcatcagattaaackrtttcacttaaactgctatacagattacttggagggaaataaccttccttttaaaattgactttcatagttagcatcattttacaaatctgacttacgaacaaagccggaccaaaactacctcaagcttttttatatccataatgatraagagaaggtgcttcacttggccctgcagagctcttctaaagcacagtcagaaagccaccaacagcagaggcaaactgggccatgcagtttgcactcagcagaagggcagactctcccctygcatccatccctgtaactctccccaccacc

SEQ ID NO: 31813 - DNA, 599 bp, Chicken  19866894254572_4
  misc_feature (1)..(13): n is any nucleotide
nnnnnnnnnnnnnactgaagtctcatcactgaagtgacacattacatctcaaatgtctctttacgttattttctgtggcccacaagagttggtcagtttgggaacaattcttttgtcccctactgtatgtgcaggaaaactccaggtatggacttacctgagatcttctcttgctcytctttgtcttgctgggcaagacgagctgcgacttcatctggtgatcgttcttttatagcatgrgaaccctcatgttctttatctataaaagcagagaaattgtttaagcatcagattaaackrtttcacttaaactgctatacagattacttggagggaaataaccttccttttaaaattgactttcatagttagcatcattttacaaatctgacttacgaacaaagccggaccaaaactacctcaagcttttttatatccataatgatraagagaaggtgcttcacttggccctgcagagctcttctaaagcacagtcagaaagccaccaacagcagaggcaaactgggccatgcagtttgcactcagcagaagggcagactctcccctygcatccatccctgtaactctccccaccacca

SEQ ID NO: 31814 - DNA, 600 bp, Chicken  19866894254572_5
atggacttacctgagatcttctcttgctcytctttgtcttgctgggcaagacgagctgcgacttcatctggtgatcgttcttttatagcatgrgaaccctcatgttctttatctataaaagcagagaaattgtttaagcatcagattaaackrtttcacttaaactgctatacagattacttggagggaaataaccttccttttaaaattgactttcatagttagcatcattttacaaatctgacttacgaacaaagccggaccaaaactacctcaagcttttttatatccataatgatraagagaaggtgcttcacttggccctgcagagctcttctaaagcacagtcagaaagccaccaacagcagaggcaaactgggccatgcagtttgcactcagcagaagggcagactctcccctygcatccatccctgtaactctccccaccaccaatctcayttgctcagcatactgaaaatctattaacaaatgatgaaagatcttctgcaaaaggcataaagagcctttccaaaatgacaaataccaacagaraactacgaatctatgagtttgaagctacagggttttgttttctacgtg

SEQ ID NO: 31815 - DNA, 600 bp, Chicken  19866894254572_6
cagagaaattgtttaagcatcagattaaackrtttcacttaaactgctatacagattacttggagggaaataaccttccttttaaaattgactttcatagttagcatcattttacaaatctgacttacgaacaaagccggaccaaaactacctcaagcttttttatatccataatgatraagagaaggtgcttcacttggccctgcagagctcttctaaagcacagtcagaaagccaccaacagcagaggcaaactgggccatgcagtttgcactcagcagaagggcagactctcccctygcatccatccctgtaactctccccaccaccaatctcayttgctcagcatactgaaaatctattaacaaatgatgaaagatcttctgcaaaaggcataaagagcctttccaaaatgacaaataccaacagaraactacgaatctatgagtttgaagctacagggttttgttttctacgtggaattcatgcaatctttttcaccttcttcaggctgtatccccggagctggcactgacatggctacccctgttgcagagatgatctgtgctgcagctgtgcctgctgttaagtacagttaca

SEQ ID NO: 31816 - DNA, 600 bp, Chicken  19866894254572_7
ttaaactgctatacagattacttggagggaaataaccttccttttaaaattgactttcatagttagcatcattttacaaatctgacttacgaacaaagccggaccaaaactacctcaagcttttttatatccataatgatraagagaaggtgcttcacttggccctgcagagctcttctaaagcacagtcagaaagccaccaacagcagaggcaaactgggccatgcagtttgcactcagcagaagggcagactctcccctygcatccatccctgtaactctccccaccaccaatctcayttgctcagcatactgaaaatctattaacaaatgatgaaagatcttctgcaaaaggcataaagagcctttccaaaatgacaaataccaacagaraactacgaatctatgagtttgaagctacagggttttgttttctacgtggaattcatgcaatctttttcaccttcttcaggctgtatccccggagctggcactgacatggctacccctgttgcagagatgatctgtgctgcagctgtgcctgctgttaagtacagttacagaactgaaacagttagaatgcacatgcactaaagtgag

SEQ ID NO: 31817 - DNA, 546 bp, Chicken  19866894254572_8
caaagccggaccaaaactacctcaagcttttttatatccataatgatraagagaaggtgcttcacttggccctgcagagctcttctaaagcacagtcagaaagccaccaacagcagaggcaaactgggccatgcagtttgcactcagcagaagggcagactctcccctygcatccatccctgtaactctccccaccaccaatctcayttgctcagcatactgaaaatctattaacaaatgatgaaagatcttctgcaaaaggcataaagagcctttccaaaatgacaaataccaacagaraactacgaatctatgagtttgaagctacagggttttgttttctacgtggaattcatgcaatctttttcaccttcttcaggctgtatccccggagctggcactgacatggctacccctgttgcagagatgatctgtgctgcagctgtgcctgctgttaagtacagttacagaactgaaacagttagaatgcacatgcactaaagtgagaacagggaagtaataaatactgggttcttcctctggagg

SEQ ID NO: 31818 - DNA, 600 bp, Chicken  19866894254578_1
cagcccatctgttttaatctactttctctctctaattacaaatagtagagataaaaggagatcgtgttcctccggtatcactcaggctcatgttttggtgacatttaagttatgcaaacttgtgagcagagctttagataattaaagggaaatttgtgttagaaatttctctttaaaacagcataacctttggttatattctgatgtcttttggggctcagcatcttgtatactgaatgtggactctctatgtgtgttattgtgcttggctggttttagattatttttttattttttttwaatgatgaaatgttgtgggtttccatccctcccctcccccattctggttggcttcagattccttatgtaacaacctttgctctgcttaaaaaaaaaaaaaaaaaaatccaagcacctgaccctggctacactttaggaggcctgttggtaggaagtgagtgctggaatgtttcagctttcagaactgtaaaaattcagatttatagtcagtctgtttatactctatcatatcacgtgtggtagcataggatatcaaagcaagaaagtctatgggactaccaccatttcaaatgaaaaatt

SEQ ID NO: 31819 - DNA, 600 bp, Chicken  19866894254578_2
ttctctctctaattacaaatagtagagataaaaggagatcgtgttcctccggtatcactcaggctcatgttttggtgacatttaagttatgcaaacttgtgagcagagctttagataattaaagggaaatttgtgttagaaatttctctttaaaacagcataacctttggttatattctgatgtcttttggggctcagcatcttgtatactgaatgtggactctctatgtgtgttattgtgcttggctggttttagattatttttttattttttttwaatgatgaaatgttgtgggtttwcatccctcccctcccccattctggttggcttcagattccttatgtaacaacctttgctctgcttaaaaaaaaaaaaaaaaaaatccaagcacctgaccctggctacactttaggaggcctgttggtaggaagtgagtgctggaatgtttcagctttcagaactgtaaaaattcagatttatagtcagtctgtttatactctatcatatcacgtgtggtagcataggatatcaaagcaagaaagtctatgggactaccaccatttcaaatgaaaaattgttcttatgtatggcataatgca

SEQ ID NO: 31820 - DNA, 600 bp, Chicken  19866894254578_3
tctctctctaattacaaatagtagagataaaaggagatcgtgttcctccggtatcactcaggctcatgttttggtgacatttaagttatgcaaacttgtgagcagagctttagataattaaagggaaatttgtgttagaaatttctctttaaaacagcataacctttggttatattctgatgtcttttggggctcagcatcttgtatactgaatgtggactctctatgtgtgttattgtgcttggctggttttagattatttttttattttttttwaatgatgaaatgttgtgggtttcwatccctcccctcccccattctggttggcttcagattccttatgtaacaacctttgctctgcttaaaaaaaaaaaaaaaaaaatccaagcacctgaccctggctacactttaggaggcctgttggtaggaagtgagtgctggaatgtttcagctttcagaactgtaaaaattcagatttatagtcagtctgtttatactctatcatatcacgtgtggtagcataggatatcaaagcaagaaagtctatgggactaccaccatttcaaatgaaaaattgttcttatgtatggcataatgcag

SEQ ID NO: 31821 - DNA, 600 bp, Chicken  19866894254578_4
ctctctctaattacaaatagtagagataaaaggagatcgtgttcctccggtatcactcaggctcatgttttggtgacatttaagttatgcaaacttgtgagcagagctttagataattaaagggaaatttgtgttagaaatttctctttaaaacagcataacctttggttatattctgatgtcttttggggctcagcatcttgtatactgaatgtggactctctatgtgtgttattgtgcttggctggttttagattatttttttattttttttwaatgatgaaatgttgtgggtttccwtccctcccctcccccattctggttggcttcagattccttatgtaacaacctttgctctgcttaaaaaaaaaaaaaaaaaaatccaagcacctgaccctggctacactttaggaggcctgttggtaggaagtgagtgctggaatgtttcagctttcagaactgtaaaaattcagatttatagtcagtctgtttatactctatcatatcacgtgtggtagcataggatatcaaagcaagaaagtctatgggactaccaccatttcaaatgaaaaattgttcttatgtatggcataatgcagc

SEQ ID NO: 31822 - DNA, 600 bp, Chicken  19866894254578_5
tctctctaattacaaatagtagagataaaaggagatcgtgttcctccggtatcactcaggctcatgttttggtgacatttaagttatgcaaacttgtgagcagagctttagataattaaagggaaatttgtgttagaaatttctctttaaaacagcataacctttggttatattctgatgtcttttggggctcagcatcttgtatactgaatgtggactctctatgtgtgttattgtgcttggctggttttagattatttttttattttttttwaatgatgaaatgttgtgggtttccawccctcccctcccccattctggttggcttcagattccttatgtaacaacctttgctctgcttaaaaaaaaaaaaaaaaaaatccaagcacctgaccctggctacactttaggaggcctgttggtaggaagtgagtgctggaatgtttcagctttcagaactgtaaaaattcagatttatagtcagtctgtttatactctatcatatcacgtgtggtagcataggatatcaaagcaagaaagtctatgggactaccaccatttcaaatgaaaaattgttcttatgtatggcataatgcagca

SEQ ID NO: 31823 - DNA, 600 bp, Chicken  19866894254578_6
ctctctaattacaaatagtagagataaaaggagatcgtgttcctccggtatcactcaggctcatgttttggtgacatttaagttatgcaaacttgtgagcagagctttagataattaaagggaaatttgtgttagaaatttctctttaaaacagcataacctttggttatattctgatgtcttttggggctcagcatcttgtatactgaatgtggactctctatgtgtgttattgtgcttggctggttttagattatttttttattttttttwaatgatgaaatgttgtgggtttccatwcctcccctcccccattctggttggcttcagattccttatgtaacaacctttgctctgcttaaaaaaaaaaaaaaaaaaatccaagcacctgaccctggctacactttaggaggcctgttggtaggaagtgagtgctggaatgtttcagctttcagaactgtaaaaattcagatttatagtcagtctgtttatactctatcatatcacgtgtggtagcataggatatcaaagcaagaaagtctatgggactaccaccatttcaaatgaaaaattgttcttatgtatggcataatgcagcac

SEQ ID NO: 31824 - DNA, 600 bp, Chicken  19866894254586_1
ttgcctttgaggacgagcagaatgccctgcccgacagctttgtgccccgctcctgcagggtccgtgggggcaggtagggcactgggagctcagtggtgggcagcaggacaggcagtcctgggggacactcacccgctacgatggctgcatcagctcaagcatacgcctccgctccccaccagctggatcctgtttgacagccaggccttcactggggagcagcatgtgctgtctgagggcgagtaccccacgctgggtgccatgggctgcctctcctccactaccatccgctccttgaaraaggtcccagtggtgagtgcccatccaacattgctggggtagaagctctcaggagcctccttgtttcttgcagcatttgttctccagccccagagcatacatgggtgctggcttcccccagctttctccctttaccccttcrtctttgccccctcycacagttcttctcggagccctccatcttcctgcatggcctggagtgtttygaggggaaagagattgagctgaacaatgaagtacggagtctccaggcagagggcttcaacaaccacgtgctgtcagtgcgtgtcaaaggtggca

SEQ ID NO: 31825 - DNA, 600 bp, Chicken  19866894254586_2
ggctgcatcagctcaagcatacgcctccgctccccaccagctggatcctgtttgacagccaggccttcactggggagcagcatgtgctgtctgagggcgagtaccccacgctgggtgccatgggctgcctctcctccactaccatccgctccttgaaraaggtcccagtggtgagtgcccatccaacattgctggggtagaagctctcaggagcctccttgtttcttgcagcatttgttctccagccccagagcatacatgggtgctggcttcccccagctttctccctttaccccttcrtctttgccccctcycacagttcttctcggagccctccatcttcctgcatggcctggagtgtttygaggggaaagagattgagctgaacaatgaagtacggagtctccaggcagagggcttcaacaaccacgtgctgtcagtgcgtgtcaaaggtggcatgtaagtgagcccagycctactgttcccatccctgctggggtttgtctgcccactggggctgactgcactctgcccgtctccacagctgggtgctgtgtgagcacggtgacttccgaggccgccagtggctgctggagtgca

SEQ ID NO: 31826 - DNA, 600 bp, Chicken  19866894254586_3
aagcatacgcctccgctccccaccagctggatcctgtttgacagccaggccttcactggggagcagcatgtgctgtctgagggcgagtaccccacgctgggtgccatgggctgcctctcctccactaccatccgctccttgaaraaggtcccagtggtgagtgcccatccaacattgctggggtagaagctctcaggagcctccttgtttcttgcagcatttgttctccagccccagagcatacatgggtgctggcttcccccagctttctccctttaccccttcrtctttgccccctcycacagttcttctcggagccctccatcttcctgcatggcctggagtgtttygaggggaaagagattgagctgaacaatgaagtacggagtctccaggcagagggcttcaacaaccacgtgctgtcagtgcgtgtcaaaggtggcatgtaagtgagcccagycctactgttcccatccctgctggggtttgtctgcccactggggctgactgcactctgcccgtctccacagctgggtgctgtgtgagcacggtgacttccgaggccgccagtggctgctggagtgcaccgagatcaccaac

SEQ ID NO: 31827 - DNA, 600 bp, Chicken  19866894254586_4
cttcactggggagcagcatgtgctgtctgagggcgagtaccccacgctgggtgccatgggctgcctctcctccactaccatccgctccttgaaraaggtcccagtggtgagtgcccatccaacattgctggggtagaagctctcaggagcctccttgtttcttgcagcatttgttctccagccccagagcatacatgggtgctggcttcccccagctttctccctttaccccttcrtctttgccccctcycacagttcttctcggagccctccatcttcctgcatggcctggagtgtttygaggggaaagagattgagctgaacaatgaagtacggagtctccaggcagagggcttcaacaaccacgtgctgtcagtgcgtgtcaaaggtggcatgtaagtgagcccagycctactgttcccatccctgctggggtttgtctgcccactggggctgactgcactctgcccgtctccacagctgggtgctgtgtgagcacggtgacttccgaggccgccagtggctgctggagtgcaccgagatcaccaactggctgacctacagcgggctgcagcacgtggggtccctctaccccatccg

SEQ ID NO: 31828 - DNA, 600 bp, Chicken  19866894254586_5
gtgcccatccaacattgctggggtagaagctctcaggagcctccttgtttcttgcagcatttgttctccagccccagagcatacatgggtgctggcttcccccagctttctccctttaccccttcrtctttgccccctcycacagttcttctcggagccctccatcttcctgcatggcctggagtgtttygaggggaaagagattgagctgaacaatgaagtacggagtctccaggcagagggcttcaacaaccacgtgctgtcagtgcgtgtcaaaggtggcatgtaagtgagcccagycctactgttcccatccctgctggggtttgtctgcccactggggctgactgcactctgcccgtctccacagctgggtgctgtgtgagcacggtgacttccgaggccgccagtggctgctggagtgcaccgagatcaccaactggctgacctacagcgggctgcagcacgtggggtccctctaccccatccgycaggtgagcacacagggagccccaaaaccagccctggtgcaatggggctggggaaagcagcatgctgctgccactgctcacccatgaaaagtgctgccaacctaccaty

SEQ ID NO: 31829 - DNA, 600 bp, Chicken  19866894254586_6
aggggaaagagattgagctgaacaatgaagtacggagtctccaggcagagggcttcaacaaccacgtgctgtcagtgcgtgtcaaaggtggcatgtaagtgagcccagycctactgttcccatccctgctggggtttgtctgcccactggggctgactgcactctgcccgtctccacagctgggtgctgtgtgagcacggtgacttccgaggccgccagtggctgctggagtgcaccgagatcaccaactggctgacctacagcgggctgcagcacgtggggtccctctaccccatccgycaggtgagcacacagggagccccaaaaccagccctggtgcaatggggctggggaaagcagcatgctgctgccactgctcacccatgaaaagtgctgccaacctaccatyagctccctgctcctccctgcaatttgtcgtggcgaaatgctccccacgggcaagcaccttgcacaatgtcttggcatcatggcgtggcaagccacgctgtgccagctgtgagatgagccagggtcacagccatcaccctggcactgtggagacatgcacaaygtggttcttgggtgctgcagagatcctga

SEQ ID NO: 31830 - DNA, 600 bp, Chicken  19866894254586_7
cctactgttcccatccctgctggggtttgtctgcccactggggctgactgcactctgcccgtctccacagctgggtgctgtgtgagcacggtgacttccgaggccgccagtggctgctggagtgcaccgagatcaccaactggctgacctacagcgggctgcagcacgtggggtccctctaccccatccgycaggtgagcacacagggagccccaaaaccagccctggtgcaatggggctggggaaagcagcatgctgctgccactgctcacccatgaaaagtgctgccaacctaccatyagctccctgctcctccctgcaatttgtcgtggcgaaatgctccccacgggcaagcaccttgcacaatgtcttggcatcatggcgtggcaagccacgctgtgccagctgtgagatgagccagggtcacagccatcaccctggcactgtggagacatgcacaaygtggttcttgggtgctgcagagatcctgagcaaaaagagcttctctccttccagagacggatctatttccgcatcaggaacaaggagctgcagctctacctgtctgtccctgacgatgtggaggacatgaaagcaggg

SEQ ID NO: 31831 - DNA, 600 bp, Chicken  19866894254586_8
agcacgtggggtccctctaccccatccgycaggtgagcacacagggagccccaaaaccagccctggtgcaatggggctggggaaagcagcatgctgctgccactgctcacccatgaaaagtgctgccaacctaccatyagctccctgctcctccctgcaatttgtcgtggcgaaatgctccccacgggcaagcaccttgcacaatgtcttggcatcatggcgtggcaagccacgctgtgccagctgtgagatgagccagggtcacagccatcaccctggcactgtggagacatgcacaaygtggttcttgggtgctgcagagatcctgagcaaaaagagcttctctccttccagagacggatctatttccgcatcaggaacaaggagctgcagctctacctgtctgtccctgacgatgtggaggacatgaaagcagggcgctgtggtggtctccaggctgagtgagcagagcaactctgtctggtactatgaggatgggctgctcaaaaaccaggtgaggatgggatgctcaaaaactgaggtctgcagcttggagctggagaggacctgggaatgccccaaagccaccttgtagggctt

SEQ ID NO: 31832 - DNA, 600 bp, Chicken  19866894254596_1
cctgcatacaaattgcaccatattgttgtttgttgcattcataaagcttttaagaaaattagtatttactgtcattacttattaaaggctaacagtgctctctgttatgggtacagacttgattctagtcagtgctgtgggccaactgcttgcctctttgtagaggttcttatcttgttctcatctcactgctcatttcaggcatttatcttccactcagctcacctgatggtaggaaacaaaacgttaccctctaaaaagccaattgaaaaatcagtcacacaagagcaacctgaattmcctacctctgggtcttatgccagctggaactggatattttccattgaaaatgagacttttggtgataaagtcatgcacaatgacatttcaattaatgtgattggtttggggttttcttgtagtagtaggcagtcatctcttgttttgtgcgggcagtaaaaggagaactgtaacttcagtttgcaataaattttctgctctgtggtgtttaaaatggaagtttcccagagctagaattaaacgataattagcagctgataaaacccccttgacatcctgcaccttacttcacgcagcatg

SEQ ID NO: 31833 - DNA, 600 bp, Chicken  19866894254596_2
cagctggaactggatattttccattgaaaatgagacttttggtgataaagtcatgcacaatgacatttcaattaatgtgattggtttggggttttcttgtagtagtaggcagtcatctcttgttttgtgcgggcagtaaaaggagaactgtaacttcagtttgcaataaattttctgctctgtggtgtttaaaatggaagtttcccagagctagaattaaacgataattagcagctgataaaacccccttgacatcctgcaccttacttcacgcagcatgaatattaagagctgcttgtsaagcccagttcctkattaatattctgctgtttgtgcaggaactgctccttgtttcctccaggaaggatttgtttgaaaatacacagaaggctgaaaaaaggctgcatttgtgaaatgaaaaactgaacttccttcatagctgggacatcccagggctgtgcagtgagttctttgtaacatgtacttcaattactatatgttgttgagagcttgtttttaagtgtttgtaggatgaaacttctgaatgtcagctgcgttttgacctcttcaaggtcgtaaataggtataaagcagattacc

SEQ ID NO: 31834 - DNA, 600 bp, Chicken  19866894254596_3
tattttccattgaaaatgagacttttggtgataaagtcatgcacaatgacatttcaattaatgtgattggtttggggttttcttgtagtagtaggcagtcatctcttgttttgtgcgggcagtaaaaggagaactgtaacttcagtttgcaataaattttctgctctgtggtgtttaaaatggaagtttcccagagctagaattaaacgataattagcagctgataaaacccccttgacatcctgcaccttacttcacgcagcatgaatattaagagctgcttgtsaagcccagttcctkattaatattctgctgtttgtgcaggaactgctccttgtttcctccaggaaggatttgtttgaaaatacacagaaggctgaaaaaaggctgcatttgtgaaatgaaaaactgaacttccttcatagctgggacatcccagggctgtgcagtgagttctttgtaacatgtacttcaattactatatgttgttgagagcttgtttttaagtgtttgtaggatgaaacttctgaatgtcagctgcgttttgacctcttcaaggtcgtaaataggtataaagcagattacctgtagcaattattc

SEQ ID NO: 31835 - DNA, 599 bp, Chicken  19866894254598_1
  misc_feature (1)..(98): n is any nucleotide
nnnnnnnnnnnnnnnnnnnnnnnnnnnnnnnnnnnnnnnnnnnnnnnnnnnnnnnnnnnnnnnnnnnnnnnnnnnnnnnnnnnnnnnnnnnnnnnnnntcatgttgaagacaagctgcagaaaaggaaatgcctggaaatggcaatagcaccagctagaccctaccaggagccccttccagtgccattcccaacacatcaactgtggttaaaggtaaagccagacccatgcattgtgcctgccatacacagagcccttacccaaggcactggaatgcccaatccctgctgtctgtgccarcaggatgggaaggatgtgagcagcaggcgagaggcagcgcccacacaagcagccgaaacgctgccaggccagaggaagaacaaaagaaaaaaaatacatggaacaacagattggattttcatttctaatgcaaaatgtgaatgcctccacgcagcrgtggaagggcttcaggaggagacggtagggactccaagcaggaaagccacccttgggctgccatcagtactttccaaaacttccaaggaaaagacacaaagggaagcaatttcccctaaatgtttcaaccttcgtgcatggag

SEQ ID NO: 31836 - DNA, 600 bp, Chicken  19866894254598_2
agaccctaccaggagccccttccagtgccattcccaacacatcaactgtggttaaaggtaaagccagacccatgcattgtgcctgccatacacagagcccttacccaaggcactggaatgcccaatccctgctgtctgtgccarcaggatgggaaggatgtgagcagcaggcgagaggcagcgcccacacaagcagccgaaacgctgccaggccagaggaagaacaaaagaaaaaaaatacatggaacaacagattggattttcatttctaatgcaaaatgtgaatgcctccacgcagcrgtggaagggcttcaggaggagacggtagggactccaagcaggaaagccacccttgggctgccatcagtactttccaaaacttccaaggaaaagacacaaagggaagcaatttcccctaaatgtttcaaccttcgtgcatggagaggcacaaggacacatactgaatgaaaaatagtactgaaaataaatgagtgagaattagcgtctcctaaytgagtagagctatagcacagtgcaattgaaagaacaagctccaacatttcaagactccaaagagaagatagccaatacagcacagag

SEQ ID NO: 31837 - DNA, 489 bp, Chicken  19866894254598_3
cagaggaagaacaaaagaaaaaaaatacatggaacaacagattggattttcatttctaatgcaaaatgtgaatgcctccacgcagcrgtggaagggcttcaggaggagacggtagggactccaagcaggaaagccacccttgggctgccatcagtactttccaaaacttccaaggaaaagacacaaagggaagcaatttcccctaaatgtttcaaccttcgtgcatggagaggcacaaggacacatactgaatgaaaaatagtactgaaaataaatgagtgagaattagcgtctcctaaytgagtagagctatagcacagtgcaattgaaagaacaagctccaacatttcaagactccaaagagaagatagccaatacagcacagagactgaccctgcagctccttccaaccttgagcttggttgcatccaacaagctggatgcatggggggaggacagactatcacccaaatagaaccacagaatcac

SEQ ID NO: 31838 - DNA, 600 bp, Chicken  19866894254601_1
actctggcttgtcagttcataataattttctcatcttttggttgaaaaaaaaatagctcttatttaagtttaacttctattgacaaatacttgagaaaagctgttggaataagtgatgtgctgctctgaaagtcccatctgcagggggtttcagccttcagtggttataatgggaatggatatttttccgttctgcaactgatactaagacactgttagaagcagtgttttgtttttaatttttaatgtacaaatagccaggctttattatcctaaatgtaataatttcttacagatttyacctatacgctttggtctttcagctcgctcctcattgcacttggccartggttcagggtcaagtgtgggacagagtcactgttttggaagatgyttgtgtctggtgaggccctcactggttttggcatggagaagatgatcaggaggcaggacagtgttaggtgtgtgatgatgtcctcgtgatttggatgtgtagcaacatggcattacgtggttggaatttcaaaatatcactgaagtagcaratctgacatcaatgatcctgaaatgaatcagatgaaatgtacgttgtagagcatt

SEQ ID NO: 31839 - DNA, 600 bp, Chicken  19866894254601_2
aaaaatagctcttatttaagtttaacttctattgacaaatacttgagaaaagctgttggaataagtgatgtgctgctctgaaagtcccatctgcagggggtttcagccttcagtggttataatgggaatggatatttttccgttctgcaactgatactaagacactgttagaagcagtgttttgtttttaatttttaatgtacaaatagccaggctttattatcctaaatgtaataatttcttacagatttyacctatacgctttggtctttcagctcgctcctcattgcacttggccartggttcagggtcaagtgtgggacagagtcactgttttggaagatgyttgtgtctggtgaggccctcactggttttggcatggagaagatgatcaggaggcaggacagtgttaggtgtgtgatgatgtcctcgtgatttggatgtgtagcaacatggcattacgtggttggaatttcaaaatatcactgaagtagcaratctgacatcaatgatcctgaaatgaatcagatgaaatgtacgttgtagagcattatttgtgaagatttgaggatcagtgatcactcatgaactcattttgga

SEQ ID NO: 31840 - DNA, 600 bp, Chicken  19866894254601_3
gaaaagctgttggaataagtgatgtgctgctctgaaagtcccatctgcagggggtttcagccttcagtggttataatgggaatggatatttttccgttctgcaactgatactaagacactgttagaagcagtgttttgtttttaatttttaatgtacaaatagccaggctttattatcctaaatgtaataatttcttacagatttyacctatacgctttggtctttcagctcgctcctcattgcacttggccartggttcagggtcaagtgtgggacagagtcactgttttggaagatgyttgtgtctggtgaggccctcactggttttggcatggagaagatgatcaggaggcaggacagtgttaggtgtgtgatgatgtcctcgtgatttggatgtgtagcaacatggcattacgtggttggaatttcaaaatatcactgaagtagcaratctgacatcaatgatcctgaaatgaatcagatgaaatgtacgttgtagagcattatttgtgaagatttgaggatcagtgatcactcatgaactcattttggagagcatgtacagcggaggtccgtgtctgtagtaaccaggggccatc

SEQ ID NO: 31841 - DNA, 600 bp, Chicken  19866894254601_4
atgtacaaatagccaggctttattatcctaaatgtaataatttcttacagatttyacctatacgctttggtctttcagctcgctcctcattgcacttggccartggttcagggtcaagtgtgggacagagtcactgttttggaagatgyttgtgtctggtgaggccctcactggttttggcatggagaagatgatcaggaggcaggacagtgttaggtgtgtgatgatgtcctcgtgatttggatgtgtagcaacatggcattacgtggttggaatttcaaaatatcactgaagtagcaratctgacatcaatgatcctgaaatgaatcagatgaaatgtacgttgtagagcattatttgtgaagatttgaggatcagtgatcactcatgaactcattttggagagcatgtacagcggaggtccgtgtctgtagtaaccaggggccatcagatacagaataatactgctcactctgatgagctcagcaatgggggtcactcttcaggcagttttgctgggcatgatccatctctgcacaggctgggactgtttgctgactggtgctggggagatgggaagcctgtgaggcagaatatgtg

SEQ ID NO: 31842 - DNA, 600 bp, Chicken  19866894254603_1
agattttgcttactgttgatttactagattctatccagggaacatgtatactttctaaaaaggtaaataaaagaaactttctacctttgtaagactgaacattccaatataagatacataattaagggcacagaagaagaaagcaccaccaggtggttttgcataaaatagcttagatgaatgcagtattaaataaatgagggaataggaaacatatttctaagaacagtaagaaaaacaaactagaactgtttctccatggttctctatttcccagcatgtcatttgtggcagagaaaygggcactcattttcttcctagattccctgtatgtatgcatatcttgtatgagtgccacctggaggaactgggaacgggacagtaatgggggacttttatcctactgatagagttttcttctatcaaaaaaagaaaacaatttcaggatgtgatttaattggctggctcattgtagttctgaagacatagatccactttttggtttttttttttgtgagccacactggacaatagaggtcaactcaggaaatacattctccataaataaataaatagtccagtatttttttggagaaacta

SEQ ID NO: 31843 - DNA, 600 bp, Chicken  19866894254613_1
ttagccatatgagtcttgcccgtcagccacctgctgatccagctgaacctcacgccactatgttccagtccactgttgtcctgcagcccccgcagcagtctggttatatcattgcagccgctccgcctccaccaccttctggccagccggtttctgctccaggctactctccatccagccaccctgtcagccagcaggtccttccacagcagggatatatgcagcaacctgtgccacaggtacaagggctttgtttccattctactgaaagctgtgtttagaaactaatcatgctgttcsaycagtgaggtttctataaaatctgcctacttataygtagtcggtttaaaaaacaaacaaamaaagccaccaaaaacatacaytttgttattggtagaaatattttaaaactacraaatggaaattggtcctgtgatcctaaatctgcttccctccaaccttctccggggtttcaccaatggtgctgcattttaaaagtttcttctggcgttggctgaaatggcatgcttagtcaccaaagcctgctaaaagcagttctgtgaaatcagtgctgatgcaggggaatgtaatattgtggaa

SEQ ID NO: 31844 - DNA, 600 bp, Chicken  19866894254613_2
agccatatgagtcttgcccgtcagccacctgctgatccagctgaacctcacgccactatgttccagtccactgttgtcctgcagcccccgcagcagtctggttatatcattgcagccgctccgcctccaccaccttctggccagccggtttctgctccaggctactctccatccagccaccctgtcagccagcaggtccttccacagcagggatatatgcagcaacctgtgccacaggtacaagggctttgtttccattctactgaaagctgtgtttagaaactaatcatgctgttcsaycagtgaggtttctataaaatctgcctacttataygtagtcggtttaaaaaacaaacaaamaaagccaccaaaaacatacaytttgttattggtagaaatattttaaaactacraaatggaaattggtcctgtgatcctaaatctgcttccctccaaccttctccggggtttcaccaatggtgctgcattttaaaagtttcttctggcgttggctgaaatggcatgcttagtcaccaaagcctgctaaaagcagttctgtgaaatcagtgctgatgcaggggaatgtaatattgtggaatt

SEQ ID NO: 31845 - DNA, 600 bp, Chicken  19866894254613_3
atccagctgaacctcacgccactatgttccagtccactgttgtcctgcagcccccgcagcagtctggttatatcattgcagccgctccgcctccaccaccttctggccagccggtttctgctccaggctactctccatccagccaccctgtcagccagcaggtccttccacagcagggatatatgcagcaacctgtgccacaggtacaagggctttgtttccattctactgaaagctgtgtttagaaactaatcatgctgttcsaycagtgaggtttctataaaatctgcctacttataygtagtcggtttaaaaaacaaacaaamaaagccaccaaaaacatacaytttgttattggtagaaatattttaaaactacraaatggaaattggtcctgtgatcctaaatctgcttccctccaaccttctccggggtttcaccaatggtgctgcattttaaaagtttcttctggcgttggctgaaatggcatgcttagtcaccaaagcctgctaaaagcagttctgtgaaatcagtgctgatgcaggggaatgtaatattgtggaattttcctttttacaatggaagtccaagaaatcagcc

SEQ ID NO: 31846 - DNA, 600 bp, Chicken  19866894254613_4
ttccagtccactgttgtcctgcagcccccgcagcagtctggttatatcattgcagccgctccgcctccaccaccttctggccagccggtttctgctccaggctactctccatccagccaccctgtcagccagcaggtccttccacagcagggatatatgcagcaacctgtgccacaggtacaagggctttgtttccattctactgaaagctgtgtttagaaactaatcatgctgttcsaycagtgaggtttctataaaatctgcctacttataygtagtcggtttaaaaaacaaacaaamaaagccaccaaaaacatacaytttgttattggtagaaatattttaaaactacraaatggaaattggtcctgtgatcctaaatctgcttccctccaaccttctccggggtttcaccaatggtgctgcattttaaaagtttcttctggcgttggctgaaatggcatgcttagtcaccaaagcctgctaaaagcagttctgtgaaatcagtgctgatgcaggggaatgtaatattgtggaattttcctttttacaatggaagtccaagaaatcagccattaaagagagacttcgtatggaaaa

SEQ ID NO: 31847 - DNA, 600 bp, Chicken  19866894254613_5
cagcccccgcagcagtctggttatatcattgcagccgctccgcctccaccaccttctggccagccggtttctgctccaggctactctccatccagccaccctgtcagccagcaggtccttccacagcagggatatatgcagcaacctgtgccacaggtacaagggctttgtttccattctactgaaagctgtgtttagaaactaatcatgctgttcsaycagtgaggtttctataaaatctgcctacttataygtagtcggtttaaaaaacaaacaaamaaagccaccaaaaacatacaytttgttattggtagaaatattttaaaactacraaatggaaattggtcctgtgatcctaaatctgcttccctccaaccttctccggggtttcaccaatggtgctgcattttaaaagtttcttctggcgttggctgaaatggcatgcttagtcaccaaagcctgctaaaagcagttctgtgaaatcagtgctgatgcaggggaatgtaatattgtggaattttcctttttacaatggaagtccaagaaatcagccattaaagagagacttcgtatggaaaaaattgttaaagcatcactaaa

SEQ ID NO: 31848 - DNA, 600 bp, Chicken  19866894254613_6
agccgctccgcctccaccaccttctggccagccggtttctgctccaggctactctccatccagccaccctgtcagccagcaggtccttccacagcagggatatatgcagcaacctgtgccacaggtacaagggctttgtttccattctactgaaagctgtgtttagaaactaatcatgctgttcsaycagtgaggtttctataaaatctgcctacttataygtagtcggtttaaaaaacaaacaaamaaagccaccaaaaacatacaytttgttattggtagaaatattttaaaactacraaatggaaattggtcctgtgatcctaaatctgcttccctccaaccttctccggggtttcaccaatggtgctgcattttaaaagtttcttctggcgttggctgaaatggcatgcttagtcaccaaagcctgctaaaagcagttctgtgaaatcagtgctgatgcaggggaatgtaatattgtggaattttcctttttacaatggaagtccaagaaatcagccattaaagagagacttcgtatggaaaaaattgttaaagcatcactaaagcatcttttttaccctgtcattctttttctgt

SEQ ID NO: 31849 - DNA, 599 bp, Chicken  19866894254616_1
  misc_feature (1)..(198): n is any nucleotide
nnnnnnnnnnnnnnnnnnnnnnnnnnnnnnnnnnnnnnnnnnnnnnnnnnnnnnnnnnnnnnnnnnnnnnnnnnnnnnnnnnnnnnnnnnnnnnnnnnnnnnnnnnnnnnnnnnnnnnnnnnnnnnnnnnnnnnnnnnnnnnnnnnnnnnnnnnnnnnnnnnnnnnnnnnnnnnnnnnnnnnnnnnnnnnnnnnnnnntttataaatatttatgcaatcctctctcagtcatcttttccccagtctgaacagacccaggttactcagcctttcctcatatgggagatgctccaggccctytatcatctttgtggccctccactggactacttctaggagatccttgtcttttttgaacaggggagcctagaactgaatgcagtattctaaatgtggcctcatcatggcagagtagatggggaggatcccttgacctgctggccacactctttttaatcccccccaggataccattggccttcatggccacaagggcacactgctggctcatggccaacctgttgtccaccaggactaccaggtccttctccccagaacagcaggacatcccctaaccttttccttttttcctggagtga

SEQ ID NO: 31850 - DNA, 600 bp, Chicken  19866894254619_1
acagctaccaaagatagcgttcatctggctaatgccaacccaaacaccacatggtattccatagtatgcatctgctccagcttctcctaccatgacttaggagggcaaagtctaagatgaaagcgtgtgctccgttttcccccctaatcctcactcacactctgtttttccctgttgtcttttctgtagggccaaataattcctaatattcaccagattccctttcatgctctcagatgaaattccttttagaagctactgagtgatgaaacagaaagccccaaatccttctcctccttrttctaaggtccctgagaaatgcaatgaacattctcttctcctcctttacttgagacctaagcactctcagtcagtatcagtgtatcttcatccccctttcactcccattccttgttctgcttccatccagacactgatatcgcccatgtctacacctgtrtgcctgtggccagtgacccactgaacctcmcctggtttctgctgaaagatgtattttccccagctaagagaccttcacaagagctatttccctccaaccctacccttggttaacaccaagattcagctaactcctgtcag

SEQ ID NO: 31851 - DNA, 600 bp, Chicken  19866894254619_2
tctgtttttccctgttgtcttttctgtagggccaaataattcctaatattcaccagattccctttcatgctctcagatgaaattccttttagaagctactgagtgatgaaacagaaagccccaaatccttctcctccttrttctaaggtccctgagaaatgcaatgaacattctcttctcctcctttacttgagacctaagcactctcagtcagtatcagtgtatcttcatccccctttcactcccattccttgttctgcttccatccagacactgatatcgcccatgtctacacctgtrtgcctgtggccagtgacccactgaacctcmcctggtttctgctgaaagatgtattttccccagctaagagaccttcacaagagctatttccctccaaccctacccttggttaacaccaagattcagctaactcctgtcaggaaaagccaccttctcaaagatatttcacacacatgagatggcagatatttggggacatccttaagtagaaggaaactaagagaagaacagaagagtatgtggaaatctgcaaacacagcaaagcatggcagaaggaggcaaaggcatacccagcacaca

SEQ ID NO: 31852 - DNA, 600 bp, Chicken  19866894254619_3
gccaaataattcctaatattcaccagattccctttcatgctctcagatgaaattccttttagaagctactgagtgatgaaacagaaagccccaaatccttctcctccttrttctaaggtccctgagaaatgcaatgaacattctcttctcctcctttacttgagacctaagcactctcagtcagtatcagtgtatcttcatccccctttcactcccattccttgttctgcttccatccagacactgatatcgcccatgtctacacctgtrtgcctgtggccagtgacccactgaacctcmcctggtttctgctgaaagatgtattttccccagctaagagaccttcacaagagctatttccctccaaccctacccttggttaacaccaagattcagctaactcctgtcaggaaaagccaccttctcaaagatatttcacacacatgagatggcagatatttggggacatccttaagtagaaggaaactaagagaagaacagaagagtatgtggaaatctgcaaacacagcaaagcatggcagaaggaggcaaaggcatacccagcacacagcaggcaaaaggacaatgggtacaaggaca

SEQ ID NO: 31853 - DNA, 599 bp, Chicken  19866894254626_1
  misc_feature (1)..(11): n is any nucleotide
nnnnnnnnnnnaaaaagttggcttttgataaaaataatttttcctacactggtaaaaaaaaaaaaaaaattagaggaagaagagttaagtaaaatatgctgcgctttaactctaaattgccaggattttagcagatgatgcacaacaagcatggggcatccaagccattgagtcctatggtagatcaaaagtggctggaaagagtgatgcagatatattttcaggtatggtctattctatttagtataacaataacctgtgatctcctgcaccttgcgttaaacagttcttcccaaagtwaagtcttttacacgttaggtgtttaatattctatcagtagcagtaactattgcaagcagaccacgtagcttccaatagaaacagaaaaatcagttcagtttacaaatggataagctttaattctaaagacttaaacaaccaagagaaatgttgataatgtttattacagtgcaacttccttcactcagtaaaatggttacatgagtacaagggatgccaccagggcccaggaggcactagcagacctccctggccctgaccagcctcacctcactgtaaccattttaggaaaaatctat

SEQ ID NO: 31854 - DNA, 600 bp, Chicken  19866894254626_2
cagtttacaaatggataagctttaattctaaagacttaaacaaccaagagaaatgttgataatgtttattacagtgcaacttccttcactcagtaaaatggttacatgagtacaagggatgccaccagggcccaggaggcactagcagacctccctggccctgaccagcctcacctcactgtaaccattttaggaaaaatctataaactgaaaatggttagagaatggcagaatattagggggaaatgtcacctacgctttatcgattctgattcttccagatgtctgtttgagattcakttgagctcatgattgtagcctgcaccgcagacagaacactgcaggatggacgttgggctgaagcagcatgggrattctttggtctttacccctgacagattcttaaatgtttgcttaaacaattcatgcatcagkaaaaggccttttttatcctagttacactacctgaaaaataccattgtgaaacagcttccaaaggagcatagctacctttttctgtaatttgggaaaactatatcttaattaaaacgtacttactcagtttttcagtgtacagcaaaaggaagggatttctttaaa

SEQ ID NO: 31855 - DNA, 600 bp, Chicken  19866894254626_3
gtgcaacttccttcactcagtaaaatggttacatgagtacaagggatgccaccagggcccaggaggcactagcagacctccctggccctgaccagcctcacctcactgtaaccattttaggaaaaatctataaactgaaaatggttagagaatggcagaatattagggggaaatgtcacctacgctttatcgattctgattcttccagatgtctgtttgagattcakttgagctcatgattgtagcctgcaccgcagacagaacactgcaggatggacgttgggctgaagcagcatgggrattctttggtctttacccctgacagattcttaaatgtttgcttaaacaattcatgcatcagkaaaaggccttttttatcctagttacactacctgaaaaataccattgtgaaacagcttccaaaggagcatagctacctttttctgtaatttgggaaaactatatcttaattaaaacgtacttactcagtttttcagtgtacagcaaaaggaagggatttctttaaaagagatgagcagaacatgaacaggacaaaagaactattttctgtccagagtcttcctttcatggaactacttg

SEQ ID NO: 31856 - DNA, 600 bp, Chicken  19866894254626_4
gaggcactagcagacctccctggccctgaccagcctcacctcactgtaaccattttaggaaaaatctataaactgaaaatggttagagaatggcagaatattagggggaaatgtcacctacgctttatcgattctgattcttccagatgtctgtttgagattcakttgagctcatgattgtagcctgcaccgcagacagaacactgcaggatggacgttgggctgaagcagcatgggrattctttggtctttacccctgacagattcttaaatgtttgcttaaacaattcatgcatcagkaaaaggccttttttatcctagttacactacctgaaaaataccattgtgaaacagcttccaaaggagcatagctacctttttctgtaatttgggaaaactatatcttaattaaaacgtacttactcagtttttcagtgtacagcaaaaggaagggatttctttaaaagagatgagcagaacatgaacaggacaaaagaactattttctgtccagagtcttcctttcatggaactacttgcaaagttaaaacagaaggaaacgctacttaaataagctgtgtttcagacgttgcttccttgc

SEQ ID NO: 31857 - DNA, 600 bp, Chicken  19866894254630_1
gatgcagggaattatagatctggacctctcccatccaactgaaagaattaactctgtacaatacttctaataattcaagttttcaagtatttttaaaattgcattttcttctagatgttttctggatgggaaaaagtatataccaaaaccaaagatctcccacctggacttctgaaataaaatctaaagtacaacttccatgtgaagactcaagatttccatcccaaacagagattattacctccttagaatccacaatacatcaacaaatatgctagagagtttaaaaacttaccaagrgtaagtgctgtaactacagcaagcaaacactgtttgttcagcatcacaatcatacatatttaactttaccttcagatcaaacagggaacacagaatacaaaaacgaaatggaattctgatactgaaatccctttaggaaacagctctcccactaaatttaaaaataatgattattttgtcatttttactcatttagtgggattctaatctgaactgagaaattaaatactactctaaaccaaattaaaagttctggagatggttatatgcttgacagcaattggatttcaagcaaaacat

SEQ ID NO: 31858 - DNA, 600 bp, Chicken  19866894254635_1
catttggattctgagccaatcccaaagatggctcactttatgagctatatcggtccaaagagagctctctgtggacagctctgcaattcagagccacagagagtcctttctgagtgttctgcagtgcagccatgtcataccctctcctctctccagcaggcactgggcacggctggatgttggtcagagcaggttgcagaatggaagaagctttaaacccgttttgctaataaaactgaattcaagtcataacagaaacaattcatgacacgtttctgtctgtctctagaggactttaawaaaaagaaaagggttagagcacctgtgtcagttaaagcaagagatgctccatttataggttcggaaataaagacaatgtctcagtttactactggccaccaaaatagctgaagataaggtttttaaagtagttttctaccgtgtacaaagagcaaaaggagaggtctaaagatcttccagtgtctgtgcttctttaaattcctcctgctgtttatagccctcctgttgtatttttcttgaagaaacaaaagcccataaacttcagccttcttccccctgccctgcccttttctcaaagaa

SEQ ID NO: 31859 - DNA, 600 bp, Chicken  19866894254653_1
cctgtgcttggctttgggcacgctcagggctcgtgccgagctgctgcatggggccatcctgggcgttccagcatcccctttagattttgcaatgtggtttcgtaccactttgggcactgccgtgcattttcttcactctcaaatctgttcttcaagcttccctttggggaaccaaggagcgagcagcgctccgactgctgcctgtgtcagccgtacagctgtgcccagggctggatgtggcaacaggcaatttccaagcatgcagcccggctgtccccgctccacgtgcttgctgcttcscccytctccttgcgctgctttttctgcagagcagcacagcccttttgcaacctcacatgtttgtatttcatatctgacttcagcagacagctgcactctgttgctctgcggttggccgtctctctgcacaccaaacgtcctcccagagctggggaagcactgccggccccttcctgcccacccctgccctgggacacctcctgcagcaccgagctgggctctggggccagggctgctgcagggctgtggctgcggaggggacaaggccattgggtgtgagcagagtgggctggcagcggt

SEQ ID NO: 31860 - DNA, 600 bp, Chicken  19866894254653_2
tgcttggctttgggcacgctcagggctcgtgccgagctgctgcatggggccatcctgggcgttccagcatcccctttagattttgcaatgtggtttcgtaccactttgggcactgccgtgcattttcttcactctcaaatctgttcttcaagcttccctttggggaaccaaggagcgagcagcgctccgactgctgcctgtgtcagccgtacagctgtgcccagggctggatgtggcaacaggcaatttccaagcatgcagcccggctgtccccgctccacgtgcttgctgcttcscccytctccttgcgctgctttttctgcagagcagcacagcccttttgcaacctcacatgtttgtatttcatatctgacttcagcagacagctgcactctgttgctctgcggttggccgtctctctgcacaccaaacgtcctcccagagctggggaagcactgccggccccttcctgcccacccctgccctgggacacctcctgcagcaccgagctgggctctggggccagggctgctgcagggctgtggctgcggaggggacaaggccattgggtgtgagcagagtgggctggcagcggtgggc

SEQ ID NO: 31861 - DNA, 600 bp, Chicken  19866894254668_1
agtggggcttgtgccacacatatcagtgcaaaccaggaagaactacagggttgcaaataaatttaaaactgcagcttgctgagaagtggtcctgcaactaaaagaaattcagtatagaaactagatctgaacattttgctcattttttcctcagcaattcccctttaaaacctctgataggctttaaactgttgtgctaatgtttcgaaagaaatgcagttttacagactgacttgtctgggaataggatgagctgcaacatctgtccttctgaactgttggagttgcttggctgaagcraatgcawgatgaaaaaaaatggagataaaaagayaagttgaaaaaataggacttgttaatcttttctccaaaacacacactaaactttgaaagttaaatttacgcatactatttcctactatttcatactactacatcttcccacataacaaccgagttaaaaaaggaaaaagcaaaactggatacggtgctgagatagcggcgtgtgccaggacaatagaaaaagcatgatgcatttctgatcacaatatacatatgtatatatttttggttttaaaataatgtgaaagaaagcattta

SEQ ID NO: 31862 - DNA, 600 bp, Chicken  19866894254668_2
cttgtgccacacatatcagtgcaaaccaggaagaactacagggttgcaaataaatttaaaactgcagcttgctgagaagtggtcctgcaactaaaagaaattcagtatagaaactagatctgaacattttgctcattttttcctcagcaattcccctttaaaacctctgataggctttaaactgttgtgctaatgtttcgaaagaaatgcagttttacagactgacttgtctgggaataggatgagctgcaacatctgtccttctgaactgttggagttgcttggctgaagcraatgcawgatgaaaaaaaatggagataaaaagayaagttgaaaaaataggacttgttaatcttttctccaaaacacacactaaactttgaaagttaaatttacgcatactatttcctactatttcatactactacatcttcccacataacaaccgagttaaaaaaggaaaaagcaaaactggatacggtgctgagatagcggcgtgtgccaggacaatagaaaaagcatgatgcatttctgatcacaatatacatatgtatatatttttggttttaaaataatgtgaaagaaagcatttaagtgatc

SEQ ID NO: 31863 - DNA, 600 bp, Chicken  19866894254668_3
aggaagaactacagggttgcaaataaatttaaaactgcagcttgctgagaagtggtcctgcaactaaaagaaattcagtatagaaactagatctgaacattttgctcattttttcctcagcaattcccctttaaaacctctgataggctttaaactgttgtgctaatgtttcgaaagaaatgcagttttacagactgacttgtctgggaataggatgagctgcaacatctgtccttctgaactgttggagttgcttggctgaagcraatgcawgatgaaaaaaaatggagataaaaagayaagttgaaaaaataggacttgttaatcttttctccaaaacacacactaaactttgaaagttaaatttacgcatactatttcctactatttcatactactacatcttcccacataacaaccgagttaaaaaaggaaaaagcaaaactggatacggtgctgagatagcggcgtgtgccaggacaatagaaaaagcatgatgcatttctgatcacaatatacatatgtatatatttttggttttaaaataatgtgaaagaaagcatttaagtgatctagatttctgtatcatcgcctcaggta

SEQ ID NO: 31864 - DNA, 600 bp, Chicken  19866894254669_1
cctattactagtggagagagtagaggcgactgcctgtaacatgctgaatcacacggttttttcattcatttcagctgcttaacaggattacatgaggagtggtttctgcccccaggcatgtagcgcctatggagatctgcagctgtctggatcggttaagtgcaaatctgatgactccccttatgcaaaggaatttatgaattacagaaaccatgcaaatcaattgcatgagtaatttttcatgtgcttcaacctatgtcagatttgagaggactttcagttaactgtgtctcatccccrgcagtttcccctaaaagagaggagatgtttcaggacggccactaggtgtaggagtaggatagttttgatgaatctccttgccttgggcagtgggaaacagcacagtgtgcaaatgagctgaggttgcttggttttctgaagcatgwctcccttttgaaatggcagagccttgacacccttcagccttgagagggaaggtaactgtagtacctgagtgccggccagcagcagatgctgtgtcttgtgtatggggctggcacgtccagctcttctttgaattctgtgggaaaacaatgtgtt

SEQ ID NO: 31865 - DNA, 600 bp, Chicken  19866894254669_2
tagtggagagagtagaggcgactgcctgtaacatgctgaatcacacggttttttcattcatttcagctgcttaacaggattacatgaggagtggtttctgcccccaggcatgtagcgcctatggagatctgcagctgtctggatcggttaagtgcaaatctgatgactccccttatgcaaaggaatttatgaattacagaaaccatgcaaatcaattgcatgagtaatttttcatgtgcttcaacctatgtcagatttgagaggactttcagttaactgtgtctcatccccrgcagtttrccctaaaagagaggagatgtttcaggacggccactaggtgtaggagtaggatagttttgatgaatctccttgccttgggcagtgggaaacagcacagtgtgcaaatgagctgaggttgcttggttttctgaagcatgwctcccttttgaaatggcagagccttgacacccttcagccttgagagggaaggtaactgtagtacctgagtgccggccagcagcagatgctgtgtcttgtgtatggggctggcacgtccagctcttctttgaattctgtgggaaaacaatgtgttgcttcttc

SEQ ID NO: 31866 - DNA, 600 bp, Chicken  19866894254669_3
ctggatcggttaagtgcaaatctgatgactccccttatgcaaaggaatttatgaattacagaaaccatgcaaatcaattgcatgagtaatttttcatgtgcttcaacctatgtcagatttgagaggactttcagttaactgtgtctcatccccrgcagtttcccctaaaagagaggagatgtttcaggacggccactaggtgtaggagtaggatagttttgatgaatctccttgccttgggcagtgggaaacagcacagtgtgcaaatgagctgaggttgcttggttttctgaagcatgwctcccttttgaaatggcagagccttgacacccttcagccttgagagggaaggtaactgtagtacctgagtgccggccagcagcagatgctgtgtcttgtgtatggggctggcacgtccagctcttctttgaattctgtgggaaaacaatgtgttgcttcttcaggacatcccaggaaacatacctttggatgactctttgggatgtgtatttgacgcctgattcaccaagctttgtctagagaaatgtgacacactttgcagtgcagtgctttattccaatgggtgcaaattctgcaatt

SEQ ID NO: 31867 - DNA, 599 bp, Chicken  19866894254671_1
  misc_feature (1)..(157): n is any nucleotide
nnnnnnnnnnnnnnnnnnnnnnnnnnnnnnnnnnnnnnnnnnnnnnnnnnnnnnnnnnnnnnnnnnnnnnnnnnnnnnnnnnnnnnnnnnnnnnnnnnnnnnnnnnnnnnnnnnnnnnnnnnnnnnnnnnnnnnnnnnnnnnnnnnnnnnnnnnnnncacatacaattgctttaaacccaagaaagcagcagtcacaatccaataataaaaatgaaagactcactcacccctttccaaggatcaagattcaccacagactcgaaaagaagcaagatccaagcagagatctttcccttacwgctgccagcccttaaatgaggttagggaggggtggacccttctggttgcacaggtgaattgcttccacctgtgctcccagggctggctactccccttcaccaggtgttcaatcagtggttcaggccatgacctaatagttcccatacaatattatatgcatgtaaaaagcaggattcaaagttgtgcaggttttgtgccataggcaccaaggctccttccctatctcccaattgtactatagaggtgagtaaaagaaggaggtaattggtcccaaataaggcagagatgctcagttttg

SEQ ID NO: 31868 - DNA, 600 bp, Chicken  19866894254674_1
gtggttggttgtgtgttctggaaatgccctttgaaaatagcattggttgcaaatgtgctggtgtcttccatgcccaacaagctgagaccagtatcttgcatgacactacagttttgtaaggtctgtctgctctaatttgtaccttacagacaagacttattactcagttaacaaaggagaagacctgtcatagaatgtgtgcattgtctacgtagtgatctcagtcataatttgcatttctttccttctcttaatgcactctgttttgcacatatcagtgtcagaatgtgaatgcagacrtgatagcggtaataactagctggctgctaacttagctttctgaacagagttgaaggcgtgatgctaaacctcctgcacggttatagtggtgctgtttctggtactgcatctgttgctgagtgtaggtgagaccagttggcttggaagagttatatactgaagaaactagtgacagaagactagaagtctgtgtgtgatcccttaattattgaagctttgtttgtagcttaaggtaaaaggacrctgttagtaaatgttttttccctgagacacgggcttctaacattgtgtccagtgtgc

SEQ ID NO: 31869 - DNA, 569 bp, Chicken  19866894254674_2
ccttctcttaatgcactctgttttgcacatatcagtgtcagaatgtgaatgcagacrtgatagcggtaataactagctggctgctaacttagctttctgaacagagttgaaggcgtgatgctaaacctcctgcacggttatagtggtgctgtttctggtactgcatctgttgctgagtgtaggtgagaccagttggcttggaagagttatatactgaagaaactagtgacagaagactagaagtctgtgtgtgatcccttaattattgaagctttgtttgtagcttaaggtaaaaggacrctgttagtaaatgttttttccctgagacacgggcttctaacattgtgtccagtgtgcaaaacaaacaaacctcagcctctcagcataccaaatgacttgtgttatagcggggaataaatccaatcccacttgttaaaccttaataggtaaattttatttggagttgtgctgttacttggttctgtatgtggacttactgtgaccatgttattaaccacctgaaagagatcaggagaaacctagtgctaccttgaaggaattcattcaat

SEQ ID NO: 31870 - DNA, 600 bp, Chicken  19866894254679_1
tcattctaattttcctgctagcacctgaatgtgaaaaacgtgcctttaaacagaggcactgcaactgtgtagatacgacaaaaccgggtcccttcccctggcgtgtgaggcagttctgagtgcctgccagaaagctttaaagaggagttttgaaggtaaggcatgatttagcttttccaatatcgtatacaactaaaatcaaaagcgggtgagtttactgaccttcgggagaaaaatcttcctgcagctgccggctgttgaggtggcacagaacaaggcgttccggctctgctggttatygagcgaatgacttttcaactgtttttccactacttcatggatcatcttggcctggtttaacagtttccagttcggtaactaaagaagaaggcggctcttcattttttgaaggtgaggagggcaaacactgcacgtgccccatctgtggggcgatgggcactgagccctgtgtcctcaggagccattgaaccaccgcgtggttggcttggaagctacactaccgtgcacctctgcctccacagcaggtaatagggctgctgggaatctcaccaatctcacggggaatcctccttggatcac

SEQ ID NO: 31871 - DNA, 600 bp, Chicken  19866894254679_2
cactgcacgtgccccatctgtggggcgatgggcactgagccctgtgtcctcaggagccattgaaccaccgcgtggttggcttggaagctacactaccgtgcacctctgcctccacagcaggtaatagggctgctgggaatctcaccaatctcacggggaatcctccttggatcaccggctccaagtggaatcagtaagctctaccatttcctcatgctgccctttagtctgacctctgtcttttccctcctcggtttacgtatcacaaagcatcctggtgtgctgaagcatgcacactcrcattgcagcggctgtcctcccatcaccarccagagaccttaaactccttactcgctgaactggaagttaaatttaaattgagtgactgcttgaagcaatggataagaaaaaaaacaccccttatttattaactgcttctagctggtgtcaactatcaagattttgttatctgcttacatcagttgagcttaaaggcatattttctctgttargactgtttttaaaattccttggccttttaattggcttcatatttcaattctcttgtcaaaaaatagatttgtttaaaaagcaccacct

SEQ ID NO: 31872 - DNA, 600 bp, Chicken  19866894254679_3
gggcactgagccctgtgtcctcaggagccattgaaccaccgcgtggttggcttggaagctacactaccgtgcacctctgcctccacagcaggtaatagggctgctgggaatctcaccaatctcacggggaatcctccttggatcaccggctccaagtggaatcagtaagctctaccatttcctcatgctgccctttagtctgacctctgtcttttccctcctcggtttacgtatcacaaagcatcctggtgtgctgaagcatgcacactcrcattgcagcggctgtcctcccatcaccarccagagaccttaaactccttactcgctgaactggaagttaaatttaaattgagtgactgcttgaagcaatggataagaaaaaaaacaccccttatttattaactgcttctagctggtgtcaactatcaagattttgttatctgcttacatcagttgagcttaaaggcatattttctctgttargactgtttttaaaattccttggccttttaattggcttcatatttcaattctcttgtcaaaaaatagatttgtttaaaaagcaccacctcacttctctgcagattcctccttcttcag

SEQ ID NO: 31873 - DNA, 600 bp, Chicken  19866894254679_4
catgctgccctttagtctgacctctgtcttttccctcctcggtttacgtatcacaaagcatcctggtgtgctgaagcatgcacactcrcattgcagcggctgtcctcccatcaccarccagagaccttaaactccttactcgctgaactggaagttaaatttaaattgagtgactgcttgaagcaatggataagaaaaaaaacaccccttatttattaactgcttctagctggtgtcaactatcaagattttgttatctgcttacatcagttgagcttaaaggcatattttctctgttargactgtttttaaaattccttggccttttaattggcttcatatttcaattctcttgtcaaaaaatagatttgtttaaaaagcaccacctcacttctctgcagattcctccttcttcagcctcctcagtgctgctcactccctgcagaagtttgctgctctgcagcactcacagcaaagccttcagccttggtcctgtattcagcatgagaagcccaggaaaacccacctgtaagaacgtgcctgctgtgtctgccccagattcaaggacaagtttttcatttcttccattccaactaaaga

SEQ ID NO: 31874 - DNA, 600 bp, Chicken  19866894254693_1
gtgagtgctcccgtgcgcaaccggacagcttagtatgaccgtcccagaagcactcccgccatcgctactatattatttcctggtgttttttctctgatttgtaaacagtgcacactgctgacaccgaagccggtatttgtccacttctgacaagggcagcgaaagggggaggagaggcggcaacaacagcaacaggcaccgccaccccgagcggcagcgcaccgcctcccgccccttcccaacaaaacagctctttctctcccccagctctcaccaaagtcgcacggaccccaacagcgscaggcaaaggaggacaggacgggcccagagctacccgaaggaccgagcgctcccggcccgcgctcccaaccacgcggcgtcccccgaagtgcagtggtccgagccccgctgggggatcccgaccttccctcgcctyacaacagcccgcttggcyccggccctccgaggcgcagcccctggaccgggccctcagcgggcccaggccactccaacacacgactcctctcgccacaggcccagtgcctccccaccgtccgcagcgatcggcaacgggccgagccacccagccgaggctaggac

SEQ ID NO: 31875 - DNA, 600 bp, Chicken  19866894254693_2
ttgtccacttctgacaagggcagcgaaagggggaggagaggcggcaacaacagcaacaggcaccgccaccccgagcggcagcgcaccgcctcccgccccttcccaacaaaacagctctttctctcccccagctctcaccaaagtcgcacggaccccaacagcgscaggcaaaggaggacaggacgggcccagagctacccgaaggaccgagcgctcccggcccgcgctcccaaccacgcggcgtcccccgaagtgcagtggtccgagccccgctgggggatcccgaccttccctcgcctyacaacagcccgcttggcyccggccctccgaggcgcagcccctggaccgggccctcagcgggcccaggccactccaacacacgactcctctcgccacaggcccagtgcctccccaccgtccgcagcgatcggcaacgggccgagccacccagccgaggctaggaccgcggcagcccccgtcccccaggcgaaggagcggccccgctggcgccatcttaccgagcgcgctgcgataccggctttcaacgcacgaacgcagactcctccaccacctttgccaggcctctggcgcgctgatctc

SEQ ID NO: 31876 - DNA, 600 bp, Chicken  19866894254693_3
ggcagcgaaagggggaggagaggcggcaacaacagcaacaggcaccgccaccccgagcggcagcgcaccgcctcccgccccttcccaacaaaacagctctttctctcccccagctctcaccaaagtcgcacggaccccaacagcgscaggcaaaggaggacaggacgggcccagagctacccgaaggaccgagcgctcccggcccgcgctcccaaccacgcggcgtcccccgaagtgcagtggtccgagccccgctgggggatcccgaccttccctcgcctyacaacagcccgcttggcyccggccctccgaggcgcagcccctggaccgggccctcagcgggcccaggccactccaacacacgactcctctcgccacaggcccagtgcctccccaccgtccgcagcgatcggcaacgggccgagccacccagccgaggctaggaccgcggcagcccccgtcccccaggcgaaggagcggccccgctggcgccatcttaccgagcgcgctgcgataccggctttcaacgcacgaacgcagactcctccaccacctttgccaggcctctggcgcgctgatctcgcgagaactgctctctca

SEQ ID NO: 31877 - DNA, 599 bp, Chicken  19866894254696_1
  misc_feature (1)..(94): n is any nucleotide
nnnnnnnnnnnnnnnnnnnnnnnnnnnnnnnnnnnnnnnnnnnnnnnnnnnnnnnnnnnnnnnnnnnnnnnnnnnnnnnnnnnnnnnnnnnnnntccctagtgcctgccattttgcactctgatggtacttctcaagtgatcaaaggcacaaagctaagtacaccctctggggaaaggaatgtgtttctcagcttaccacaccacaccttttagtcccctgttgtcttttattattaaaatcagccattagaacagcctatgctgctctgaacatcacctcacatggtgttaggcgattmatttttttattttcttaactgttcagtaaaaaaaaaaaagagtaaaagtttacttataaaacaaaaatattgcaaatcccatcttcctaacacacacttgtatggatgcatgcattttcacctccttttaagccacacctgagtcattttcctgcagtttcattaatggcacaaattgtatgtcgtgtgcatgagtacatgcgtgctgtgctgatacagaaacaaggaacggaaagcagaagtatgcagtggcagtgttatgcttttcagtgtcaacataccatacaagatggtcactg

SEQ ID NO: 31878 - DNA, 600 bp, Chicken  19866894254697_1
tggccccatctaagagcttttggggagtacaagtagggatctcatgactcatataatggagggtgttgtggttcagcggagacagcagggccagcagagcatgcagatgcagtgagcatgatctgaggtatgcaaaccaaactgctgttaaaggcctaagtcttgggcaaagtccctagagtcatagaatggcttgggcaggaaggagcctcaaagatctaattccaaccactctgccgcgttaagttagaagagtagggcagtgagcaaaaagggtgccttcagatctcatactgatcrttttgcctttgagcatcaaatgctgagagtcagctcatctggaaggtaaaatctgggggaaaatggcagcagccttgcaaatctttcagcyctgttctcatgcgtgtraagtgcttctttttcatgggtagacgtaattgctgaggccgatggggacttgttcaagatctgctctgcttgttttgcagcctttggccaaaggagcttttctgcgggggacggggttaaacctggcaacgggacgtttcacagcacccgtatccggcatctaccagttctcagccaacgtccacatcggtg

SEQ ID NO: 31879 - DNA, 600 bp, Chicken  19866894254697_2
gagcttttggggagtacaagtagggatctcatgactcatataatggagggtgttgtggttcagcggagacagcagggccagcagagcatgcagatgcagtgagcatgatctgaggtatgcaaaccaaactgctgttaaaggcctaagtcttgggcaaagtccctagagtcatagaatggcttgggcaggaaggagcctcaaagatctaattccaaccactctgccgcgttaagttagaagagtagggcagtgagcaaaaagggtgccttcagatctcatactgatcrttttgcctttgarcatcaaatgctgagagtcagctcatctggaaggtaaaatctgggggaaaatggcagcagccttgcaaatctttcagcyctgttctcatgcgtgtraagtgcttctttttcatgggtagacgtaattgctgaggccgatggggacttgttcaagatctgctctgcttgttttgcagcctttggccaaaggagcttttctgcgggggacggggttaaacctggcaacgggacgtttcacagcacccgtatccggcatctaccagttctcagccaacgtccacatcggtgagtgctgtccact

SEQ ID NO: 31880 - DNA, 600 bp, Chicken  19866894254697_3; identical to SEQ ID NO: 31879

SEQ ID NO: 31881 - DNA, 600 bp, Chicken  19866894254697_4; identical to SEQ ID NO: 31879

SEQ ID NO: 31882 - DNA, 600 bp, Chicken  19866894254697_5
cagcagagcatgcagatgcagtgagcatgatctgaggtatgcaaaccaaactgctgttaaaggcctaagtcttgggcaaagtccctagagtcatagaatggcttgggcaggaaggagcctcaaagatctaattccaaccactctgccgcgttaagttagaagagtagggcagtgagcaaaaagggtgccttcagatctcatactgatcrttttgcctttgagcatcaaatgctgagagtcagctcatctggaaggtaaaatctgggggaaaatggcagcagccttgcaaatctttcagcyctgttctcatgcgtgtraagtgcttctttttcatgggtagacgtaattgctgaggccgatggggacttgttcaagatctgctctgcttgttttgcagcctttggccaaaggagcttttctgcgggggacggggttaaacctggcaacgggacgtttcacagcacccgtatccggcatctaccagttctcagccaacgtccacatcggtgagtgctgtccactcgagaggtgctggaaggaggcctgctgttctctgggtctctggtgggtcctgcctgatgtgaatgtatgatggcagcc

SEQ ID NO: 31883 - DNA, 600 bp, Chicken  19866894254697_6
gcagtgagcatgatctgaggtatgcaaaccaaactgctgttaaaggcctaagtcttgggcaaagtccctagagtcatagaatggcttgggcaggaaggagcctcaaagatctaattccaaccactctgccgcgttaagttagaagagtagggcagtgagcaaaaagggtgccttcagatctcatactgatcrttttgcctttgagcatcaaatgctgagagtcagctcatctggaaggtaaaatctgggggaaaatggcagcagccttgcaaatctttcagcyctgttctcatgcgtgtraagtgcttctttttcatgggtagacgtaattgctgaggccgatggggacttgttcaagatctgctctgcttgttttgcagcctttggccaaaggagcttttctgcgggggacggggttaaacctggcaacgggacgtttcacagcacccgtatccggcatctaccagttctcagccaacgtccacatcggtgagtgctgtccactcgagaggtgctggaaggaggcctgctgttctctgggtctctggtgggtcctgcctgatgtgaatgtatgatggcagccctttgcagcgagttctg

SEQ ID NO: 31884 - DNA, 600 bp, Chicken  19866894254697_7
tgtraagtgcttctttttcatgggtagacgtaattgctgaggccgatggggacttgttcaagatctgctctgcttgttttgcagcctttggccaaaggagcttttctgcgggggacggggttaaacctggcaacgggacgtttcacagcacccgtatccggcatctaccagttctcagccaacgtccacatcggtgagtgctgtccactcgagaggtgctggaaggaggcctgctgttctctgggtctctggtgggtcctgcctgatgtgaatgtatgatggcagccctttgcagcgagrtctgtttggtaccataccctaaactgtttgggatttcctaaggagccacaatatgactgtgtcttttgaaccaaacgccagcgagtgattgttgctgtgttgtggatgttgatgttgatttcactgctttacacagatcatagtgagttgaagagcaaagtccagctccgtgccagagataacgtccgagtgttgatctgcattgaatctctctgccaccgatacacgtgagttactgcaattttaaaccataaatacgcataggacttctctgaatagatggattccatctggccctta

SEQ ID NO: 31885 - DNA, 600 bp, Chicken  19866894254697_8; identical to SEQ ID NO: 31884

SEQ ID NO: 31886 - DNA, 599 bp, Chicken  19866894254699_1
  misc_feature (1)..(62): n is any nucleotide
nnnnnnnnnnnnnnnnnnnnnnnnnnnnnnnnnnnnnnnnnnnnnnnnnnnnnnnnnnnnnnagagcatttcatcctcctggagatgacaccagtgtggccacgctgtgtgaccattagctttctcatccacatcctaattcaagctaaaatgtgtcccagtaattactcagaagaaaattgcaaagcttttaaaactaagaaaataatgccatgcaaaaggtacgcattagggtaagactagactaactaatggtgactcctcgttctgtcctgtccaccacaaatgtgtaagcttaaygtcaattatagcattggcattctgaacaggtttgactgttgattatggaccaaatttgaatgcttattttgcagtggagagggctcaggagaggtggaattgctgagtgtcttgatgagaggagatcactaaagccttgccaggagctgctgctgttgatgacatttttgaactgcataaaggaacttggttacaactttggctgtgctaacctttacacagtctgggtttgctttcttttttccctttttgtgcttcttcatgtacaacttggctatacttttggccagattgactgg

SEQ ID NO: 31887 - DNA, 600 bp, Chicken  19866894254704_1
tacctctgagaagttagatgttcctttcacttatgggaaatctggtcataattgctttgggcatgcatgaattatgaatctttcaaacctgtaaagaaaggtttgtatatagaattgtagcatatgagaaaatcctaaaagcttattaattttgatcttctagagtaactgttgatatgtgactcatctgtctactgttaaacttcagaaaatgtacttcagagggggaggtcccagccctaccttcatcaaaatcagtagggatgattacagttgtgtggaagtatgacggatgtaaaracagaagctagagaattaactgactaaatcaaatatactgcatacacacaaatataaagaaaaaataagcgctactactaaatacataaaatacatggcacttaggtccttataatatcctggagtctgtgtgcaactgcaaggcgtaacaagacaacattttttcacaagagcacattgacagtaaattcaagcaattaatcccatagtagactgtagatatgattgtactccttctgcagctatgctttgaatgagtactagaaaaaaaaaagagcagaattatcaaaatgagtaaga

SEQ ID NO: 31888 - DNA, 600 bp, Chicken  19866894254707_1
atggttccttctaataacattcagtaaagttattagtgtttgtcaaatgcatcatgacaaattcagtgttatgagaaagttttcagtttcataactcaacatctaaccaatagcagtaataaatggcctttaatttttcacaggtgacaagcagagctaatcatgattggtaggcatatgttagatattaatgtttaagatggaattttaccaattcagactacagtattgagtaattagtattgcctttagtgtatcaaaatggcggatttatttcaggaaaacgtatttttatttttwtttttataatcatctctaactagtggaaaacgttattttacttttccgtattttctcttcagctgaatgttcttggaaagtaatggaaggaaggaagcacgaactggaaggaacttgtgtgcaaaagaagattaaaaaaaaaaagaaaaaaaattaagtaaaaatttgaaccaaactgataatatccattgctggattgtttaataacacaatggggagatatgtataaacagctctattgctttaaaacttcaagagaattatatttccacagttttcttgcaaattttgcacatttta

SEQ ID NO: 31889 - DNA, 599 bp, Chicken  19866894254715_1
  misc_feature (1)..(128): n is any nucleotide
nnnnnnnnnnnnnnnnnnnnnnnnnnnnnnnnnnnnnnnnnnnnnnnnnnnnnnnnnnnnnnnnnnnnnnnnnnnnnnnnnnnnnnnnnnnnnnnnnnnnnnnnnnnnnnnnnnnnnnnnnnnnnnnnatgaaattaatgctaggttaattgctctccatgggtagctgtgctaagagctgggtgggctttcccttccagtctctcctgggaagggaagaagtttttctcgtacggtccctcttaactgaaatagaaaggaaactgccacataattcctgttggcagctcctgaacaccwcaactgccctgaactgtcagctgggagcagcggatggtaccttgggaagctgatgggaatggcgcagcttcccaaggctgtgagatgtcagggctgccgtggtgagcactgctcggtgccagcatttaaaagagtctggggaagggtgctggctgcagcctgtcacgcctgggaaattggatgggagacagagcagcttcacgactcctggatgcgtctgtcagctcatctctgcccacgcgctacgcccaggcgctgtaattgccacataaacaatcagcatcacttttgccagagga

SEQ ID NO: 31890 - DNA, 599 bp, Chicken  19866894254718_1
  misc_feature (1)..(74): n is any nucleotide
nnnnnnnnnnnnnnnnnnnnnnnnnnnnnnnnnnnnnnnnnnnnnnnnnnnnnnnnnnnnnnnnnnnnnnnnnntatctctttcttctttggatgtgaactggcttccccgaccttgttttgcataaagatctgttctttcctgcgtagcctgtgcaagtctatattgagaaggggaagacgtgtggtattataaagaactcttgaatttatgaagaaaaagcaatgataattaccataagaattttccaaaacagtcaaatcaggctctagttaaagcagttatgaaaagaaaggaatygtggtatgaacaagacaatcatgcagaagacttcacaaaacagcaagttcataaaactccacaaggtgattaattaactaaattcactaaatactgatttccccaccagttcaatacccaacacaaaatgaggcttatttaaataaagaacatatatagccactccaycctcaaatattaaataaagccctaaatatattgcacaactgttctgatagcatcatggctctttctgtaatgcttaattcccctcactgcagaacactacagacctggcaattcctctctcttctttctct

SEQ ID NO: 31891 - DNA, 600 bp, Chicken  19866894254718_2
agaaggggaagacgtgtggtattataaagaactcttgaatttatgaagaaaaagcaatgataattaccataagaattttccaaaacagtcaaatcaggctctagttaaagcagttatgaaaagaaaggaatygtggtatgaacaagacaatcatgcagaagacttcacaaaacagcaagttcataaaactccacaaggtgattaattaactaaattcactaaatactgatttccccaccagttcaatacccaacacaaaatgaggcttatttaaataaagaacatatatagccactccaycctcaaatattaaataaagccctaaatatattgcacaactgttctgatagcatcatggctctttctgtaatgcttaattcccctcactgcagaacactacagacctggcaattcctctctcttctttctcttttacactgttgaacttcggctctgtttctgctaattctttctgtttctcctcaattttctcaagaagcttttgcctctcctttaacagccttttctgaaagtgaaacaaagcaataattaaaatgaggtagtaacagaaactctattaatatctttggataaatacac

SEQ ID NO: 31892 - DNA, 599 bp, Chicken  19866894254728_1
  misc_feature (1)..(57): n is any nucleotide
nnnnnnnnnnnnnnnnnnnnnnnnnnnnnnnnnnnnnnnnnnnnnnnnnnnnnnnnnccatccaattccttgcttttcatcccacagaagcatggagggggtttagcatgcatgcaaccaacagtgtggccgtgtccaggacacagcctcagcgtccccatccccatactgctgtcctactgcaaaaggggggggggggggggcagcaggcttgaggtgatgctgccatgtccaagctgtcacctgccttcacaccccttccctctcactccttgattttgactctgttaccattccagractcaaacagcccctgtgcaaggtgagacaccacacgagtcgctggcgattccttttgaggggctctttagttattggggtttctttgtacagatataaaacaagcagagggcgggcacccgccaggacgcccctcaccctgcggtgctgcactgccatcccagtgccatccccacccgtgccagctctgggacccggggaggtgacagctcactcagtcctcggggtgccgagccagccctggggggacacaggaagcaaagagccccagtgaagagccatccacgagaggaggtgtg

SEQ ID NO: 31893 - DNA, 590 bp, Chicken  19866894254728_2
cattttgcaggtgtaggagaggtggtaattgcaggggacatcgctccattgtcccccgtcgtgccacacgatgaccacgcagttctcaccggagaggaagtagctgtcgggctgccccgggtgccagttctcatagagctggggagcacaggacgggctggggctgcgctggcactttgcattgcgcccatgccacggtgccccatctccgtgctgctggttcaggcaccccaaatgacgtggtgctcatgccagtggcttcagctgaagcttcaaaacctgggacccatcccaagggayggagaaggaccacgaggtgtggtggggatgggaacggggtggtggtggggggtgttggcagcacggcttaccagggggctgccgtcggaccactggaagtccccctcgatggtgcggtcgttgaggccgatccattggtactcgcggtactgttctgggggcagaggagggcttggggggctccgccgtcccctggcagccgtcagggcggagggtttgggggggggggggttctccagacgagggcagcagagccccagtgtccccacgtctgtccctgatgtccccgt

SEQ ID NO: 31894 - DNA, 600 bp, Chicken  19866894254736_1
gctttgcaatcagatatccaggagacctaataggtgcccagaagagaaagtgacttactggcatctgctttagtcctgtaggaaaagaagggaagtcattctgaagcaaggaaaagaaaattggaggctcttgatacacagacacataagaaagaactgaagagtgagaaaattgctattttaggataatacagcaaagaatgtgaaagaatatgagtaggaatttgagagcaagcccaagaaaaaaaaggaagtcagtctgacaaaaagaatatgaaaaaataccaaggaagaatatamaggaaaaggtggaaaatgaaaaagaattaggcagagatatctatattttcctgcaaaaaaattctctccaagttcatatagatgattgctgtcagctatttctaggacacattgctagatgcagtgtcatctgtttgaaaaagcatgaataataatgacaatgcatatgatacccaaagaaactgtgtttgtgtctggtagttagaaaaaactttcatttagatttagattatttttctatattcattagaggagaaacaatacattagcctaaaagggacagtgtggccattttcttta

SEQ ID NO: 31895 - DNA, 600 bp, Chicken  19866894254739_1
ccagcctttctttaagctacagcgtttgcaagcaaagccttgaatataaaacagatcatcattctgaggggtaaattaaatatgaggggagagaatgagaaattcacctttggctttgtgcaagatcatttccattggctgcctatgcaaaaagcgggcaggcaggagaccaaactgcaaccacacattaaggccaaggggtggatttgacctggagacttcaatttggtactcacttaatgcaagagaagccctcgtgggtctctctgtcacagtgggagagtacactgtgctgcctgmycacagctggataacagcgcttgaacttgacctgtatctatggaaagagttaacccaaaacacacaaaaaccatttcctggtctacataaaactctgaggctagagatgtgtgttagcccaggatgtggttattactgagctaacaagccacacttccagatcaaactcaagtctaacgtatcacatgtcgcaggcggttcgtgcttttcaatcaatgcatcacaaacacagcaggctgtctcaccagatgtccccccagagctccacgttatcctcaccctgcatcccctgggcctttg

SEQ ID NO: 31896 - DNA, 600 bp, Chicken  19866894254739_2
cagcctttctttaagctacagcgtttgcaagcaaagccttgaatataaaacagatcatcattctgaggggtaaattaaatatgaggggagagaatgagaaattcacctttggctttgtgcaagatcatttccattggctgcctatgcaaaaagcgggcaggcaggagaccaaactgcaaccacacattaaggccaaggggtggatttgacctggagacttcaatttggtactcacttaatgcaagagaagccctcgtgggtctctctgtcacagtgggagagtacactgtgctgcctgmycacagctggataacagcgcttgaacttgacctgtatctatggaaagagttaacccaaaacacacaaaaaccatttcctggtctacataaaactctgaggctagagatgtgtgttagcccaggatgtggttattactgagctaacaagccacacttccagatcaaactcaagtctaacgtatcacatgtcgcaggcggttcgtgcttttcaatcaatgcatcacaaacacagcaggctgtctcaccagatgtccccccagagctccacgttatcctcaccctgcatcccctgggcctttgt

SEQ ID NO: 31897 - DNA, 600 bp, Chicken  19866894254739_3
ttccagatcaaactcaagtctaacgtatcacatgtcgcaggcggttcgtgcttttcaatcaatgcatcacaaacacagcaggctgtctcaccagatgtccccccagagctccacgttatcctcaccctgcatcccctgggcctttgtagcacaaataacctcacctcctgtggggcagctatctttttatacttcatttatcatattgcacaggggcacagaccccaaacaccggggcaagaatgaagaattgttctttttgtggctggctgtataaataccatacctaaaatatgttcyttaacgtayagggaacgtgctcagaaatctctccatctccacagttcttccaggtttcctctgatgcacaagattggtaagaacaaaaacggcagctcttcrcaccaactcagtctyatttatgtactctttcaaggccacctatagggccaaaagatgctggacagcagmacagataagatcttgaactccaccttttgactttgtttccatcctataatcaagcaccaccgaaagaaacacaaacagtatattcctgagtcaaaactcttttagatgaaaacttcacagctactattc

SEQ ID NO: 31898 - DNA, 600 bp, Chicken  19866894254739_4
aaactcaagtctaacgtatcacatgtcgcaggcggttcgtgcttttcaatcaatgcatcacaaacacagcaggctgtctcaccagatgtccccccagagctccacgttatcctcaccctgcatcccctgggcctttgtagcacaaataacctcacctcctgtggggcagctatctttttatacttcatttatcatattgcacaggggcacagaccccaaacaccggggcaagaatgaagaattgttctttttgtggctggctgtataaataccatacctaaaatatgttcyttaacgtayagggaacgtgctcagaaatctctccatctccacagttcttccaggtttcctctgatgcacaagattggtaagaacaaaaacggcagctcttcrcaccaactcagtctyatttatgtactctttcaaggccacctatagggccaaaagatgctggacagcagmacagataagatcttgaactccaccttttgactttgtttccatcctataatcaagcaccaccgaaagaaacacaaacagtatattcctgagtcaaaactcttttagatgaaaacttcacagctactattcattgccaag

SEQ ID NO: 31899 - DNA, 600 bp, Chicken  19866894254739_5
ccagagctccacgttatcctcaccctgcatcccctgggcctttgtagcacaaataacctcacctcctgtggggcagctatctttttatacttcatttatcatattgcacaggggcacagaccccaaacaccggggcaagaatgaagaattgttctttttgtggctggctgtataaataccatacctaaaatatgttcyttaacgtayagggaacgtgctcagaaatctctccatctccacagttcttccaggtttcctctgatgcacaagattggtaagaacaaaaacggcagctcttcrcaccaactcagtctyatttatgtactctttcaaggccacctatagggccaaaagatgctggacagcagmacagataagatcttgaactccaccttttgactttgtttccatcctataatcaagcaccaccgaaagaaacacaaacagtatattcctgagtcaaaactcttttagatgaaaacttcacagctactattcattgccaagggaatcttatccccctggttggccttgctgcagttacaaaaccctacatgcctactgctcagttgcgcaccctttaaacaggacaaataatca

SEQ ID NO: 31900 - DNA, 600 bp, Chicken  19866894254739_6
atcctcaccctgcatcccctgggcctttgtagcacaaataacctcacctcctgtggggcagctatctttttatacttcatttatcatattgcacaggggcacagaccccaaacaccggggcaagaatgaagaattgttctttttgtggctggctgtataaataccatacctaaaatatgttcyttaacgtayagggaacgtgctcagaaatctctccatctccacagttcttccaggtttcctctgatgcacaagattggtaagaacaaaaacggcagctcttcrcaccaactcagtctyatttatgtactctttcaaggccacctatagggccaaaagatgctggacagcagmacagataagatcttgaactccaccttttgactttgtttccatcctataatcaagcaccaccgaaagaaacacaaacagtatattcctgagtcaaaactcttttagatgaaaacttcacagctactattcattgccaagggaatcttatccccctggttggccttgctgcagttacaaaaccctacatgcctactgctcagttgcgcaccctttaaacaggacaaataatcatttggttctgtatta

SEQ ID NO: 31901 - DNA, 600 bp, Chicken  19866894254739_7
ggggcagctatctttttatacttcatttatcatattgcacaggggcacagaccccaaacaccggggcaagaatgaagaattgttctttttgtggctggctgtataaataccatacctaaaatatgttcyttaacgtayagggaacgtgctcagaaatctctccatctccacagttcttccaggtttcctctgatgcacaagattggtaagaacaaaaacggcagctcttcrcaccaactcagtctyatttatgtactctttcaaggccacctatagggccaaaagatgctggacagcagmacagataagatcttgaactccaccttttgactttgtttccatcctataatcaagcaccaccgaaagaaacacaaacagtatattcctgagtcaaaactcttttagatgaaaacttcacagctactattcattgccaagggaatcttatccccctggttggccttgctgcagttacaaaaccctacatgcctactgctcagttgcgcaccctttaaacaggacaaataatcatttggttctgtattaattccctgcaaataccacttcagagccaatggggacttttaacttgtgctggct

SEQ ID NO: 31902 - DNA, 600 bp, Chicken  19866894254744_1
catgttgttttgatcctgcagtcagctccagatcagcaaacctacgcacttgcacagagcttcataacaatcagtttgccctgaagaacaaacttctcattataaattcatttgcaaaatcaaaagttgaagggtgaagtttttaatttttgtatcaagaactgcttcactgaatcctttttcatcctcttatttggttaattgtttttttctgttaaaatcctcatttcctacatgcagcaacaatccaactgcccaaagaaatgttctcctcatacatctccagaggtaccaggcaaygtgcaaagctgcatcttttaatcttaaaacatctctgcaggattttttttgaagaattgagtaaatatgaaataatcatttgcatagccaaccttcacaagcagtaatgaaycttattccttcgagaatgatgcatgtaacttctaaccttgcaaataggactgtggtccctacctgcagaatactcctgagggtaatagagctctatgccagtatctgctggtgggggattgtgcttgctgtgaaggtgaagggacttaaaaatggaaaaattcctctaccagaattattccatttttg

SEQ ID NO: 31903 - DNA, 600 bp, Chicken  19866894254744_2
tgcaaaatcaaaagttgaagggtgaagtttttaatttttgtatcaagaactgcttcactgaatcctttttcatcctcttatttggttaattgtttttttctgttaaaatcctcatttcctacatgcagcaacaatccaactgcccaaagaaatgttctcctcatacatctccagaggtaccaggcaaygtgcaaagctgcatcttttaatcttaaaacatctctgcaggattttttttgaagaattgagtaaatatgaaataatcatttgcatagccaaccttcacaagcagtaatgaaycttattccttcgagaatgatgcatgtaacttctaaccttgcaaataggactgtggtccctacctgcagaatactcctgagggtaatagagctctatgccagtatctgctggtgggggattgtgcttgctgtgaaggtgaagggacttaaaaatggaaaaattcctctaccagaattattccatttttgtcagcactatattatttgcccttgtatactggggaaaccattacaccaacctctaaatcacataaacagcttgctctcctgcgttggagtcctagaaatgagaataaggcaa

SEQ ID NO: 31904 - DNA, 600 bp, Chicken  19866894254746_1
caagtagggaagccaagccaagaggaggtatggggggaggaggatttggagccagcagaaaggaggagctgactcaaagccttgggatttgtggttagctagagatggccaggagggtgctgtggggctgccaacagtcattggcatacctgcagcaccagtccgtctaggagctgcattttgcaagaggaatatttaaatagattgagcctggaggactcaaagcagatttttaagctaggctacgacactattttaagcttatcagaggagtgaagttggatcaacagattggaaatrgaaggtagaaccaccagtgtgaagttggcccttwggagaagaatgggctgatccagaggatggagtgcctctggtctcataaagatccattacagaatcacagagatattaaagattttagatattacctaaaagactttaaatattaaagattttcagcactccgggcagctaagagctcctccacagcaaaaccaatgaccaggttcttgctctacaccccatttcctccacctccactccattttataagtccctccctgaagccaacaggttgacaatgcggtggagtcattcctg

SEQ ID NO: 31905 - DNA, 600 bp, Chicken  19866894254746_2
gggaggaggatttggagccagcagaaaggaggagctgactcaaagccttgggatttgtggttagctagagatggccaggagggtgctgtggggctgccaacagtcattggcatacctgcagcaccagtccgtctaggagctgcattttgcaagaggaatatttaaatagattgagcctggaggactcaaagcagatttttaagctaggctacgacactattttaagcttatcagaggagtgaagttggatcaacagattggaaatrgaaggtagaaccaccagtgtgaagttggcccttwggagaagaatgggctgatccagaggatggagtgcctctggtctcataaagatccattacagaatcacagagatattaaagattttagatattacctaaaagactttaaatattaaagattttcagcactccgggcagctaagagctcctccacagcaaaaccaatgaccaggttcttgctctacaccccatttcctccacctccactccattttataagtccctccctgaagccaacaggttgacaatgcggtggagtcattcctgccccaatttctcaggcattcccaaatgcttgttg

SEQ ID NO: 31906 - DNA, 600 bp, Chicken  19866894254755_1
accatcccctagggaataccattcatgactggtcatcagctagatttaattccattcaccaccactctcttggccaggccctacagacagttcttaaaccagtgatgatgattttacacctaaagaacacagtttaccaagaaattagagattcactcaaatcagagatttggatttgttcaggctttgttcaggatttattcagaataaaagcttgaggaaccatatttcatcttctactgttttgtgggaggatatagtggagacaaagtcaaacttctgaggggtgtccagaaaagyctgagagagagtgagcaccatttgtatcaagaaaaatagaaattaaacatgagcagagagcacttaagagtgagtttgattaagcagtggaaaagattgcctggaaaggttgtggaatgagttcttggccaaatcttatacatagtctccaaaatactgctctctaaaaaacatctggcgtttgctaccacttgctaccagtcccttcaaagaaagatctgtgaagaaaagattagatttaaatttgaaagtgagatatgaacttcattgactggttgggaaaaacttcatatttagtct

SEQ ID NO: 31907 - DNA, 600 bp, Chicken  19866894254755_2
gtttgattaagcagtggaaaagattgcctggaaaggttgtggaatgagttcttggccaaatcttatacatagtctccaaaatactgctctctaaaaaacatctggcgtttgctaccacttgctaccagtcccttcaaagaaagatctgtgaagaaaagattagatttaaatttgaaagtgagatatgaacttcattgactggttgggaaaaacttcatatttagtcttgttatttggtgtgaattgctaataacaatgagaaactcagttgtatgttatttaatgtatctgttaagattrttgtagtagagaaaaaaagatgctacagctgatttgcaataaattgatcagtttgaatgtgacagtaggtacattttaaaatattatttcacagcttgtatgaacacctcgttctcctctggatccacttcacagttcagaaactaactctcaaaatgttaatagaatttgtcaattaattctaaataccttctgtaatataacagtcaactttgactaattttcctctggtttgatatcttgagtccagtccaaactgaaaagaagccttggctcattgactttaggagattttggatc

SEQ ID NO: 31908 - DNA, 599 bp, Chicken  19866894254772_1
  misc_feature (1)..(22): n is any nucleotide
nnnnnnnnnnnnnnnnnnnnnnggaagaattaatgaatccttgcattaagttcatgtcctgaatttctaccaagtgcaactcttacgattcttaataaaatgttaataaaaataatcacctgtaatacaatttaataaccttgagatacagtattccagtttttctcaacactaatttaaaaactgagttaatctaaggtattcctttttcccaccttacattcagctattacactggtgttttgtggaactgagcacagattaacttcaggaggactttgtgacattcagacaatgtaytgtgtcacgatttctaaaagatactacaaagctttctgaaaaaattcaaaaggtgctattatgtgaatttttttctttttattccacaatgcctcaacagcttctcagttacctctaatatcacatgctccatatcaggttctcagaagaagatacacacatcatatgtgaatatatttacatctgtcaacatacgtcataaagaacgtataaagtcattaatagttcaagctgctgaagttcagaaaatactttgatacctatatttttttcctcaatttcttttttttttccccaca

SEQ ID NO: 31909 - DNA, 599 bp, Chicken  19866894254789_1
  misc_feature (1)..(108): n is any nucleotide
nnnnnnnnnnnnnnnnnnnnnnnnnnnnnnnnnnnnnnnnnnnnnnnnnnnnnnnnnnnnnnnnnnnnnnnnnnnnnnnnnnnnnnnnnnnnnnnnnnnnnnnnnnnngaggctcaggggagaccttattgctctctataactacctgaagggaggttgtagtgagctgggggtcagcctcttctctcatgtgactagtgataggacgagagggaatggcttcaaactgcaccagggaaggttcagacttgatgttaggaaatactacttctctgaaagggtggtcaggcattggaatgkgctacccagagaagtggtggagtcaccraccctggtggtgttcaaagagygtttggatgttgtgttgagggacatggtttagcragaaccattggtgaagggcgaatggttggactggatgatcctgtgggtcttttccaaccttagcaattctatgattctatgattctatgaaatactcttattttccttctcttctcaaagtctagtttctgagaagctctagaccaagagttgaaaaccaagaatctaaytgaagtagaactcccctttcccaaggaaagctkcctrgcagagca

SEQ ID NO: 31910 - DNA, 599 bp, Chicken  19866894254789_2
  misc_feature (1)..(80): n is any nucleotide
nnnnnnnnnnnnnnnnnnnnnnnnnnnnnnnnnnnnnnnnnnnnnnnnnnnnnnnnnnnnnnnnnnnnnnnnnnnnnnnngaggctcaggggagaccttattgctctctataactacctgaagggaggttgtagtgagctgggggtcagcctcttctctcatgtgactagtgataggacgagagggaatggcttcaaactgcaccagggaaggttcagacttgatgttaggaaatactacttctctgaaagggtggtcaggcattggaatgkgctacccagagaagtggtggagtcaccraccctggtggtgttcaaagagygtttggatgttgtgttgagggacatggtttagcragaaccattggtgaagggcgaatggttggactggatgatcctgtgggtcttttccaaccttagcaattctatgattctatgattctatgaaatactcttattttccttctcttctcaaagtctagtttctgagaagctctagaccaagagttgaaaaccaagaatctaaytgaagtagaactcccctttcccaaggaaagctkcctrgcagagcatgcaggctgctccaggctctgctccctg

SEQ ID NO: 31911 - DNA, 599 bp, Chicken  19866894254789_3
  misc_feature (1)..(58): n is any nucleotide
nnnnnnnnnnnnnnnnnnnnnnnnnnnnnnnnnnnnnnnnnnnnnnnnnnnnnnnnnngaggctcaggggagaccttattgctctctataactacctgaagggaggttgtagtgagctgggggtcagcctcttctctcatgtgactagtgataggacgagagggaatggcttcaaactgcaccagggaaggttcagacttgatgttaggaaatactacttctctgaaagggtggtcaggcattggaatgkgctacccagagaagtggtggagtcaccraccctggtggtgttcaaagagygtttggatgttgtgttgagggacatggtttagcragaaccattggtgaagggcgaatggttggactggatgatcctgtgggtcttttccaaccttagcaattctatgattctatgattctatgaaatactcttattttccttctcttctcaaagtctagtttctgagaagctctagaccaagagttgaaaaccaagaatctaaytgaagtagaactcccctttcccaaggaaagctkcctrgcagagcatgcaggctgctccaggctctgctccctggctacccacctgcaatggcacc

SEQ ID NO: 31912 - DNA, 599 bp, Chicken  19866894254789_4
  misc_feature (1)..(24): n is any nucleotide
nnnnnnnnnnnnnnnnnnnnnnnngaggctcaggggagaccttattgctctctataactacctgaagggaggttgtagtgagctgggggtcagcctcttctctcatgtgactagtgataggacgagagggaatggcttcaaactgcaccagggaaggttcagacttgatgttaggaaatactacttctctgaaagggtggtcaggcattggaatgkgctacccagagaagtggtggagtcaccraccctggtggtgttcaaagagygtttggatgttgtgttgagggacatggtttagcragaaccattggtgaagggcgaatggttggactggatgatcctgtgggtcttttccaaccttagcaattctatgattctatgattctatgaaatactcttattttccttctcttctcaaagtctagtttctgagaagctctagaccaagagttgaaaaccaagaatctaaytgaagtagaactcccctttcccaaggaaagctkcctrgcagagcatgcaggctgctccaggctctgctccctggctacccacctgcaatggcacctctctgcttcacgtgtctgcgggcaaccagacac

SEQ ID NO: 31913 - DNA, 600 bp, Chicken  19866894254789_5
ttaggaaatactacttctctgaaagggtggtcaggcattggaatgkgctacccagagaagtggtggagtcaccraccctggtggtgttcaaagagygtttggatgttgtgttgagggacatggtttagcragaaccattggtgaagggcgaatggttggactggatgatcctgtgggtcttttccaaccttagcaattctatgattctatgattctatgaaatactcttattttccttctcttctcaaagtctagtttctgagaagctctagaccaagagttgaaaaccaagaatctaaytgaagtagaactcccctttcccaaggaaagctkcctrgcagagcatgcaggctgctccaggctctgctccctggctacccacctgcaatggcacctctctgcttcacgtgtctgcgggcaaccagacacctcagcactktaccagccaaagcaggagctcctgctgttatttaaagcagttttaaatactttccagcccgatcgcttcctttatgatcactgcctggtttgccctctgatttcagctggctgtgtctgtgtatcaagcacctgctgaggaacagtgagtcagttttgaaa

SEQ ID NO: 31914 - DNA, 600 bp, Chicken  19866894254789_6
ggcattggaatgkgctacccagagaagtggtggagtcaccraccctggtggtgttcaaagagygtttggatgttgtgttgagggacatggtttagcragaaccattggtgaagggcgaatggttggactggatgatcctgtgggtcttttccaaccttagcaattctatgattctatgattctatgaaatactcttattttccttctcttctcaaagtctagtttctgagaagctctagaccaagagttgaaaaccaagaatctaaytgaagtagaactcccctttcccaaggaaagctkcctrgcagagcatgcaggctgctccaggctctgctccctggctacccacctgcaatggcacctctctgcttcacgtgtctgcgggcaaccagacacctcagcactktaccagccaaagcaggagctcctgctgttatttaaagcagttttaaatactttccagcccgatcgcttcctttatgatcactgcctggtttgccctctgatttcagctggctgtgtctgtgtatcaagcacctgctgaggaacagtgagtcagttttgaaacttcagacctttgcagttcagcytgttactgag

SEQ ID NO: 31915 - DNA, 600 bp, Chicken  19866894254789_7
ttggaatgkgctacccagagaagtggtggagtcaccraccctggtggtgttcaaagagygtttggatgttgtgttgagggacatggtttagcragaaccattggtgaagggcgaatggttggactggatgatcctgtgggtcttttccaaccttagcaattctatgattctatgattctatgaaatactcttattttccttctcttctcaaagtctagtttctgagaagctctagaccaagagttgaaaaccaagaatctaaytgaagtagaactcccctttcccaaggaaagctkcctrgcagagcatgcaggctgctccaggctctgctccctggctacccacctgcaatggcacctctctgcttcacgtgtctgcgggcaaccagacacctcagcactktaccagccaaagcaggagctcctgctgttatttaaagcagttttaaatactttccagcccgatcgcttcctttatgatcactgcctggtttgccctctgatttcagctggctgtgtctgtgtatcaagcacctgctgaggaacagtgagtcagttttgaaacttcagacctttgcagttcagcytgttactgagttgt

SEQ ID NO: 31916 - DNA, 600 bp, Chicken  19866894254789_8
ggtgaagggcgaatggttggactggatgatcctgtgggtcttttccaaccttagcaattctatgattctatgattctatgaaatactcttattttccttctcttctcaaagtctagtttctgagaagctctagaccaagagttgaaaaccaagaatctaaytgaagtagaactcccctttcccaaggaaagctkcctrgcagagcatgcaggctgctccaggctctgctccctggctacccacctgcaatggcacctctctgcttcacgtgtctgcgggcaaccagacacctcagcactktaccagccaaagcaggagctcctgctgttatttaaagcagttttaaatactttccagcccgatcgcttcctttatgatcactgcctggtttgccctctgatttcagctggctgtgtctgtgtatcaagcacctgctgaggaacagtgagtcagttttgaaacttcagacctttgcagttcagcytgttactgagttgtgtttatttttctactctgaaaaagtgagtatcttagaaattaaaagctgtgacctgagccaggtaaaatgacagagaaataaaacctataataataggctaa

SEQ ID NO: 31917 - DNA, 600 bp, Chicken  19866894254789_9
aggaaagctkcctrgcagagcatgcaggctgctccaggctctgctccctggctacccacctgcaatggcacctctctgcttcacgtgtctgcgggcaaccagacacctcagcactktaccagccaaagcaggagctcctgctgttatttaaagcagttttaaatactttccagcccgatcgcttcctttatgatcactgcctggtttgccctctgatttcagctggctgtgtctgtgtatcaagcacctgctgaggaacagtgagtcagttttgaaacttcagacctttgcagttcagcytgttactgagttgtgtttatttttctactctgaaaaagtgagtatcttagaaattaaaagctgtgacctgagccaggtaaaatgacagagaaataaaacctataataataggctaagagatccctagaatggctttctgaaagcaagttcttcctgtgagggcactggtaacacttcatggtgagtagaggcacttaatcaagtgctattttagacaaatagtgtctactcatgaaaaatcacaaagagcaggtgaggatgaagtcaatcgattcagaattgtttgcattcatacaactg

SEQ ID NO: 31918 - DNA, 600 bp, Chicken  19866894254793_1
acaacagctggctacattcagaaaacaaaatgtctccgaacaagaaagggagaccctctcccctcgaagagtaaattgaacagcactggtgagacaaaacaagagaggttgctaggagaagcaagttttaaggaagaacttaaaagaagagtggagctggcagacaagaataggagagaggcaccaggaaaggagcaaagctcaggctgcaagaaaaaaagaaactgtaaatagtagaaacgactgcagaaaacagtgtgtgcctgaaaggagttcaaacacataagtgagggtgaagcyatacagcccaaaaacctgcacagcatggccagttagtaacagagagggcataaaaaagcagctgggaaggaggacaatagtaaagactgagataggagttgagttttttggttttttttcttgtccctgcatatgaagtctacagcatttatgacttgtgccgggacatcacagaacagaaaatgtgcagatctggaagaattactctcagctgacgatggggaattcaacacagcacgtgtcagccaggtttgcagctggagaggacggtaaatgaaaccaggagcagagaaaatcaca

SEQ ID NO: 31919 - DNA, 600 bp, Chicken  19866894254794_1
cccagtggctcgttgcttttaattaagtttcaggatatctggctgcataactctgtttgcatcagcacagacacagcaagtcacccaagtggaagatccaacctgctgcttaacgacctcattgattttgtcgtacaatagcagaagagtttccaataatttgttttcagacatcttatccttttagagataaatggctagtcatagttcttgaatacagggggagcttgctttataactcaaacccccagaatcataagagtgatctgattatcagaccctcactgaggtacagctccwattgcacccaaggggagacccaagcagatttctgtctctggcaaatttgagacagaagtaaaaaccacttcctcctatccctcacgcagcaaagcttcctttctgccctcacagctcaccacacccttcagccatttaccttcaagaagaggacagcaatgaatgcaacagtgaaggtgaccatcactttggcatactcctctgttggtaacttctccagggctggcaaaaagccctgtgaaaagagggagarggtctcagtcaaacacttgtctgctctgccagggtcacgccagtgtg

SEQ ID NO: 31920 - DNA, 465 bp, Chicken  19866894254794_2
tcataagagtgatctgattatcagaccctcactgaggtacagctccwattgcacccaaggggagacccaagcagatttctgtctctggcaaatttgagacagaagtaaaaaccacttcctcctatccctcacgcagcaaagcttcctttctgccctcacagctcaccacacccttcagccatttaccttcaagaagaggacagcaatgaatgcaacagtgaaggtgaccatcactttggcatactcctctgttggtaacttctccagggctggcaaaaagccctgtgaaaagagggagarggtctcagtcaaacacttgtctgctctgccagggtcacgccagtgtgctcaccacctaccctgttgtctgcagacttgaggctgaggtaggtgggcacctccatgtaggagctgcagagggtcaggatgctcaggcagaagtccagcagctgcagagccaggaaa

SEQ ID NO: 31921 - DNA, 600 bp, Chicken  19866894254795_1
aaatatttctctaaaataatttccaaatgggtaccatacgattcccacagtactgtgcatcattatgcgtatcctctgacaggaaaacaatggcattcatttatcttatgtggccattcaagaaagttgccaatttactattcatgacgtactgaaaatgagatatacacatctcattttctagatacatctgaaggtctggagagatatctccaaacagctcacaatcagaaaaaggttaattatcctgtcctttcacttctcttcatgttttcatgtttaaagattactccaaaatcycaaagcccagataacaaaagacttcaaaagttgcacatctgagcctgccgatttagtttcaaattagattgaaccccccagaagaatagctgttcctagttgtgaataactgtgycccagcrstmcctaaattycctcagatgatgaactgaaaatttcagtcacctgwactttccaaagggaaggccctggctgagctttgcccctaccctgcacaccacctgctctgctgcagctcacgcctcctgctgagcccctgtgagagaccgtccagcacgctgtgtgcagatcaaacttcaa

SEQ ID NO: 31922 - DNA, 600 bp, Chicken  19866894254795_2
attcaagaaagttgccaatttactattcatgacgtactgaaaatgagatatacacatctcattttctagatacatctgaaggtctggagagatatctccaaacagctcacaatcagaaaaaggttaattatcctgtcctttcacttctcttcatgttttcatgtttaaagattactccaaaatcycaaagcccagataacaaaagacttcaaaagttgcacatctgagcctgccgatttagtttcaaattagattgaaccccccagaagaatagctgttcctagttgtgaataactgtgycccagcrstmcctaaattycctcagatgatgaactgaaaatttcagtcacctgwactttccaaagggaaggccctggctgagctttgcccctaccctgcacaccacctgctctgctgcagctcacgcctcctgctgagcccctgtgagagaccgtccagcacgctgtgtgcagatcaaacttcaacatcagtatgtggaaagataaaattttactttcacctctaacttctgaaaagtcgggattttaaacatgttagagtttccttgactgtggaaataaggtgtggcacctttgcctt

SEQ ID NO: 31923 - DNA, 600 bp, Chicken  19866894254795_3
aaagttgccaatttactattcatgacgtactgaaaatgagatatacacatctcattttctagatacatctgaaggtctggagagatatctccaaacagctcacaatcagaaaaaggttaattatcctgtcctttcacttctcttcatgttttcatgtttaaagattactccaaaatcycaaagcccagataacaaaagacttcaaaagttgcacatctgagcctgccgatttagtttcaaattagattgaaccccccagaagaatagctgttcctagttgtgaataactgtgycccagcrstmcctaaattycctcagatgatgaactgaaaatttcagtcacctgwactttccaaagggaaggccctggctgagctttgcccctaccctgcacaccacctgctctgctgcagctcacgcctcctgctgagcccctgtgagagaccgtccagcacgctgtgtgcagatcaaacttcaacatcagtatgtggaaagataaaattttactttcacctctaacttctgaaaagtcgggattttaaacatgttagagtttccttgactgtggaaataaggtgtggcacctttgcctttggaaag

SEQ ID NO: 31924 - DNA, 600 bp, Chicken  19866894254795_4
aagttgccaatttactattcatgacgtactgaaaatgagatatacacatctcattttctagatacatctgaaggtctggagagatatctccaaacagctcacaatcagaaaaaggttaattatcctgtcctttcacttctcttcatgttttcatgtttaaagattactccaaaatcycaaagcccagataacaaaagacttcaaaagttgcacatctgagcctgccgatttagtttcaaattagattgaaccccccagaagaatagctgttcctagttgtgaataactgtgycccagcrstmcctaaattycctcagatgatgaactgaaaatttcagtcacctgwactttccaaagggaaggccctggctgagctttgcccctaccctgcacaccacctgctctgctgcagctcacgcctcctgctgagcccctgtgagagaccgtccagcacgctgtgtgcagatcaaacttcaacatcagtatgtggaaagataaaattttactttcacctctaacttctgaaaagtcgggattttaaacatgttagagtttccttgactgtggaaataaggtgtggcacctttgcctttggaaagc

SEQ ID NO: 31925 - DNA, 600 bp, Chicken  19866894254795_5
gttgccaatttactattcatgacgtactgaaaatgagatatacacatctcattttctagatacatctgaaggtctggagagatatctccaaacagctcacaatcagaaaaaggttaattatcctgtcctttcacttctcttcatgttttcatgtttaaagattactccaaaatcycaaagcccagataacaaaagacttcaaaagttgcacatctgagcctgccgatttagtttcaaattagattgaaccccccagaagaatagctgttcctagttgtgaataactgtgycccagcrstmcctaaattycctcagatgatgaactgaaaatttcagtcacctgwactttccaaagggaaggccctggctgagctttgcccctaccctgcacaccacctgctctgctgcagctcacgcctcctgctgagcccctgtgagagaccgtccagcacgctgtgtgcagatcaaacttcaacatcagtatgtggaaagataaaattttactttcacctctaacttctgaaaagtcgggattttaaacatgttagagtttccttgactgtggaaataaggtgtggcacctttgcctttggaaagcgg

SEQ ID NO: 31926 - DNA, 600 bp, Chicken  19866894254795_6
ttactattcatgacgtactgaaaatgagatatacacatctcattttctagatacatctgaaggtctggagagatatctccaaacagctcacaatcagaaaaaggttaattatcctgtcctttcacttctcttcatgttttcatgtttaaagattactccaaaatcycaaagcccagataacaaaagacttcaaaagttgcacatctgagcctgccgatttagtttcaaattagattgaaccccccagaagaatagctgttcctagttgtgaataactgtgycccagcrstmcctaaattycctcagatgatgaactgaaaatttcagtcacctgwactttccaaagggaaggccctggctgagctttgcccctaccctgcacaccacctgctctgctgcagctcacgcctcctgctgagcccctgtgagagaccgtccagcacgctgtgtgcagatcaaacttcaacatcagtatgtggaaagataaaattttactttcacctctaacttctgaaaagtcgggattttaaacatgttagagtttccttgactgtggaaataaggtgtggcacctttgcctttggaaagcggcattcaccc

SEQ ID NO: 31927 - DNA, 594 bp, Chicken  19866894254795_7
catctcattttctagatacatctgaaggtctggagagatatctccaaacagctcacaatcagaaaaaggttaattatcctgtcctttcacttctcttcatgttttcatgtttaaagattactccaaaatcycaaagcccagataacaaaagacttcaaaagttgcacatctgagcctgccgatttagtttcaaattagattgaaccccccagaagaatagctgttcctagttgtgaataactgtgycccagcrstmcctaaattycctcagatgatgaactgaaaatttcagtcacctgwactttccaaagggaaggccctggctgagctttgcccctaccctgcacaccacctgctctgctgcagctcacgcctcctgctgagcccctgtgagagaccgtccagcacgctgtgtgcagatcaaacttcaacatcagtatgtggaaagataaaattttactttcacctctaacttctgaaaagtcgggattttaaacatgttagagtttccttgactgtggaaataaggtgtggcacctttgcctttggaaagcggcattcaccctgtgctgcatgaactcagtccgctggcat

SEQ ID NO: 31928 - DNA, 599 bp, Chicken  19866894254804_1
  misc_feature (1)..(76): n is any nucleotide
nnnnnnnnnnnnnnnnnnnnnnnnnnnnnnnnnnnnnnnnnnnnnnnnnnnnnnnnnnnnnnnnnnnnnnnnnnnncattcttctctgcctgcttgaagagaaaatcatttaaatcagaggattgtatttctgtctggacttgcactcaaccagcagaaatacatttctggagctacagctcatcatgcagggacacagccttactctggcctgctcatgcccttaggaactggtgtgaaagtgctactgagctgcaggaaggcgcttctggcgcacctcaccgggcctgctggtctctkcttgggttggaccggggagcagcagtttgtgcatgtgccagagggtgggcagggggcacgtcccttacctttgtgctcggcggtacccctcatggctctcagtcccgcggtctgcatgggctcctggtcaccaatgaacctgtggaaccacctcctccgcagccacctcagctctgagttgcgggacgccatccagcgcgggctgtgccgcagttccacctctggcagcgtgtccactcccatggggagctgggcaccagggctctgcgccaggtgagggtctgcagccttggctccca

SEQ ID NO: 31929 - DNA, 600 bp, Chicken  19866894254805_1
agatctttcgatattttttctacattttcttgcttaagtgggtcctcttgccagcgtgcacgtttctgtgtgaatctggttacagtgtttgcttaatgcattttatttaacatctgatttagcgtatgattctctcttctttttttttcttgtttatagctgcatacagcttaaacagtgtttgagcaggttgcctctaatttcaatagtaattgataaattctagctatggcaatgttaattcatttcttcatttttataacatatttgtagttttttagatttatccttattattttycttactgtctgcttaaaaatgttgagatttggttggattttcaatagttgatagggagatagagatcagaatggataaaggattttcaagcatccttttagtcatattcaatatttgtggcaaatgctgaagagacattgtacatatcttttggaaaaaacatagctcacaaacagtgaatacagtggacaagtgtttgcatttggacaatagacagtggtttctttggttgtttgatttgttgctattatttggtttgtttgtgcggtttttgtttgacagctcagcaaaagtgctaat

SEQ ID NO: 31930 - DNA, 600 bp, Chicken  19866894254806_1
caagtactttcaatttactttttttttttttagctttctacaaaaacttggctctaaaactgacatcactgtatctatccgtgacacgcctgcttgagattattcttccattcccagtgagataaactatgtagatgagtacttctcactcaacctgaaagtagtggtatgtgtctttaagtccccagaatcttccaccacaaataatgaagctaaacctttccattcagctcccctctctcactacagctgcttctcctatcgctccagctgtactttcagagctgcaacatgatgctscgrtctggaagaacttacatttatttattttttaacagaggagttgggtgggcttttcatcccagtagaaggaaaagtatcaggctagaatgactcttyacatctttcttccaaaacactagctctcgatgaaacactgacagctgaatagctctttgtgtgttataagttttcaaggcagaagcctcttcctggggaggacaacagactgcagaactttgtcacgtaattcctataggcaccacaaaccggcgaggttttcatttttctaaaacgaagttactcattctcagccactct

SEQ ID NO: 31931 - DNA, 600 bp, Chicken  19866894254806_2
gtactttcaatttactttttttttttttagctttctacaaaaacttggctctaaaactgacatcactgtatctatccgtgacacgcctgcttgagattattcttccattcccagtgagataaactatgtagatgagtacttctcactcaacctgaaagtagtggtatgtgtctttaagtccccagaatcttccaccacaaataatgaagctaaacctttccattcagctcccctctctcactacagctgcttctcctatcgctccagctgtactttcagagctgcaacatgatgctscgrtctggaagaacttacatttatttattttttaacagaggagttgggtgggcttttcatcccagtagaaggaaaagtatcaggctagaatgactcttyacatctttcttccaaaacactagctctcgatgaaacactgacagctgaatagctctttgtgtgttataagttttcaaggcagaagcctcttcctggggaggacaacagactgcagaactttgtcacgtaattcctataggcaccacaaaccggcgaggttttcatttttctaaaacgaagttactcattctcagccactctctc

SEQ ID NO: 31932 - DNA, 600 bp, Chicken  19866894254806_3
ttattcttccattcccagtgagataaactatgtagatgagtacttctcactcaacctgaaagtagtggtatgtgtctttaagtccccagaatcttccaccacaaataatgaagctaaacctttccattcagctcccctctctcactacagctgcttctcctatcgctccagctgtactttcagagctgcaacatgatgctscgrtctggaagaacttacatttatttattttttaacagaggagttgggtgggcttttcatcccagtagaaggaaaagtatcaggctagaatgactcttyacatctttcttccaaaacactagctctcgatgaaacactgacagctgaatagctctttgtgtgttataagttttcaaggcagaagcctcttcctggggaggacaacagactgcagaactttgtcacgtaattcctataggcaccacaaaccggcgaggttttcatttttctaaaacgaagttactcattctcagccactctctctggtggataactcatgacaagcctcacgttgctaaaatgcactcacagtaaataaaggcaacaaggtactgcagctgatcaaaaagtcagggaaaa

SEQ ID NO: 31933 - DNA, 600 bp, Chicken  19866894254809_1
cagcagatgcactcgagtcccactatgcgcagaagtttattgcagaggtaaaattacaaggactgcacagaagacagccatgcacacaaaagctcagctctgatcaactcagcatcagactcggagcagttggcaaaaacagcctattctgtgcagtagagccacaacaggaaggcaagccctgactcaaacaaacaaacaaccacacaccaaaaaaaaaaaaaaccctgtagaaatctcagacccaacctgcccgtcctttccacagatctagccaattaaaaacatttcaataaaagmacctgacacagttacagcttccyatttcttcacatgttaaatctgcagcagggtttttgctgctggacgcccccatccaaaagaaaggggccattgactgcagatgaaggcaatcagcaaatggctggatgtcatcctctccctggcagtgagaatcatgtactagcctggactgcttccatcaaaagatctcaaagcacttgatgaatagttcattaaagcctggcagcacctctgggagatggggaaggaacaatgagcgatcacttcagtcatcacagaagggcatctccctttaga

SEQ ID NO: 31934 - DNA, 600 bp, Chicken  19866894254809_2
tatgcgcagaagtttattgcagaggtaaaattacaaggactgcacagaagacagccatgcacacaaaagctcagctctgatcaactcagcatcagactcggagcagttggcaaaaacagcctattctgtgcagtagagccacaacaggaaggcaagccctgactcaaacaaacaaacaaccacacaccaaaaaaaaaaaaaaccctgtagaaatctcagacccaacctgcccgtcctttccacagatctagccaattaaaaacatttcaataaaagmacctgacacagttacagcttccyatttcttcacatgttaaatctgcagcagggtttttgctgctggacgcccccatccaaaagaaaggggccattgactgcagatgaaggcaatcagcaaatggctggatgtcatcctctccctggcagtgagaatcatgtactagcctggactgcttccatcaaaagatctcaaagcacttgatgaatagttcattaaagcctggcagcacctctgggagatggggaaggaacaatgagcgatcacttcagtcatcacagaagggcatctccctttagacttgaaaagcctcgcttgttagc

SEQ ID NO: 31935 - DNA, 600 bp, Chicken  19866894254818_1
gctgtagtaatttttagcacaccgaaaccaaaacaactcatccataccacagagaaagcagaaatccaatggctctaacagctaaactatagagagactcgtactgtagaatcacagaatggcctgggttgaaaaggaccgcagtgatcatcagttccagccccctgctatgtgcagggtcgccaaccagcagaccaggttgcccagagccacatccagcctggccttgaatgcctccagggatggggcatccacaacctccttgggcaacctgttccagtgcatcaccaccctatgagwgaaaaacttcctcctaatatctaacctaaacctcctctgtctcagttatgtcatagaacagtctaagttggaaggaatcttaaagatcatttatttctgatctgtggtgccccccaccagaccaggctgcccagggccccatccagcacagcsttgggcactgcagggatggggtacccacagctctctgctcagcctgacctcaccgccctctgagagaagaattccttcccaacaactaacttaagtctcccctctttaattttaaagccacttcccctgatcctatcactatcatac

SEQ ID NO: 31936 - DNA, 600 bp, Chicken  19866894254818_2
gttccagccccctgctatgtgcagggtcgccaaccagcagaccaggttgcccagagccacatccagcctggccttgaatgcctccagggatggggcatccacaacctccttgggcaacctgttccagtgcatcaccaccctatgagwgaaaaacttcctcctaatatctaacctaaacctcctctgtctcagttatgtcatagaacagtctaagttggaaggaatcttaaagatcatttatttctgatctgtggtgccccccaccagaccaggctgcccagggccccatccagcacagcsttgggcactgcagggatggggtacccacagctctctgctcagcctgacctcaccgccctctgagagaagaattccttcccaacaactaacttaagtctcccctctttaattttaaagccacttcccctgatcctatcactatcatacagtttaaacagttacacccctcctgcttataagctcccttcaagtactggagggctgcaataagatctacctccatcacaaaaacattaaccagctgcaaatagagacagctgtggaattaaggttggggtttgtttttttaacctcacactg

SEQ ID NO: 31937 - DNA, 600 bp, Chicken  19866894254819_1
ctgaaaccacatttgtatcaaaacactatgtatctctcctaggagcataaaatgggtcaggagggaaggaggaataaactgaagaattaggagatagaaacatttaatgattacatggccaggatgccaaccgtagtacttcacttttgcacagcctttctcttatcccataaaccaaaaatacagcaatgacagaaacagcaaagcaaagaagttcagagctctgcaagttcactgacagtcaccttgtgctcacagtctgggcaatgaacctcactcataataaaatgttgtaaaccrttgtaccttatggctatacttgggtatgggtttttgctcaacagagcacacagcactaaagctgtacataccaaatttgttttgttcacagcctgattgctaaagcacaagacttgcctctgtttaaaacatctgtgaagacagaatttacaggagctgcaggggaggccatcactacagcttcctgcccgtggtcagtccyttaccagcaagatccaccttatcagagcttgcttccattacaacttaaacatgacataactacagcacagaagctacgctatggtaaaaaatgtgccg

SEQ ID NO: 31938 - DNA, 531 bp, Chicken  19866894254819_2
aaagcaaagaagttcagagctctgcaagttcactgacagtcaccttgtgctcacagtctgggcaatgaacctcactcataataaaatgttgtaaaccrttgtaccttatggctatacttgggtatgggtttttgctcaacagagcacacagcactaaagctgtacataccaaatttgttttgttcacagcctgattgctaaagcacaagacttgcctctgtttaaaacatctgtgaagacagaatttacaggagctgcaggggaggccatcactacagcttcctgcccgtggtcagtccyttaccagcaagatccaccttatcagagcttgcttccattacaacttaaacatgacataactacagcacagaagctacgctatggtaaaaaatgtgccgtttttagagtgaaaaaagttgcagagaagaatgtcaacttttgcatttctgctttttatttttcaccctaaaagtaggtttttgagggtttagctacgtgggaaattattttatatttccttctggggtgggg

SEQ ID NO: 31939 - DNA, 600 bp, Chicken  19866894254821_1
gagctcccagttagatggtagagtaatcgctccgaagcagaaaaaagtctggaagattagttactagaaatcttattttgctgaaaacacagaaatgcattaaaacagacaagtgcattaacaaacttaaaataagctttttattactcttttcctatggaattcaaagctttggcactctaagtaaagctggaagtggaaatctcagcagcactgcattaatttttcaagccttaatgtgccagacagggaataagttattacatctgttgccctctgggaggaagaatgaaaagcacraaaatgattctccaccgttaggatggagccactgaataatagctggtagaagcagcggcatggtggaagaaaagcttacagcagcttttgtgtcatcattaggggtgaacatttctctgtataactagtgtagcaagattaggaaacatggcagggcttatttgttcttctcaaggggccctttacaattatgagagaatttcaaatgagtacctcgtgcgcagccgtggctgatctatgtaagactccttttttttccctaagttaaatttacagcctgtacaaactgcttccaggata

SEQ ID NO: 31940 - DNA, 600 bp, Chicken  19866894254821_2
ggcaccttcaggcaggctcgtgtgttgcccatccctgaagggcgggacctggagcaagggctgggctcctgcctagggggaacaaatccatggggtccttgtcccgctaggattcttgttaatgattgtctccatagtaagtacagctgtaaagctttgtaagggctagcctggcagataaacagagaggtagcctcagtcttgagtgggcaagtatgggagttacgtaagtgtccatgaatgctccaggggacagtagaggatgccaaaccctgttacagtgttgctcttaagtgtcaygaagcatctccgccattaggtgtttttgagcaatgtgaaaggctttgctattatggtatagagctgaagaaggacaagggattatctttctagtggtccagctactgtgcttttatatgctattaaagccattgctgtgtcttttagacaagcgtgttgaaaagatattcagatcatgaaagaggaaagccattgcacagccttctagcttctactggtcatttatttctgtgattctgaaaggctcagcctcttcctggcccctcattggaatgtcaagtgttaccatgacgtgtggag

SEQ ID NO: 31941 - DNA, 599 bp, Chicken  19866894254828_1
  misc_feature (1)..(199): n is any nucleotide
nnnnnnnnnnnnnnnnnnnnnnnnnnnnnnnnnnnnnnnnnnnnnnnnnnnnnnnnnnnnnnnnnnnnnnnnnnnnnnnnnnnnnnnnnnnnnnnnnnnnnnnnnnnnnnnnnnnnnnnnnnnnnnnnnnnnnnnnnnnnnnnnnnnnnnnnnnnnnnnnnnnnnnnnnnnnnnnnnnnnnnnnnnnnnnnnnnnnnnntcacctgttcctcttgttctgcattctttcacaagtagttgtagtcctttatgtgcttctaaaagtttactgtgatcctcaaaatccatcacctctcttasttagtgtcttctaaataaaggaacatatgttagcacmatttcatcacctgttacacatcagtgtcaaagtttcaagagtttaagccttaatttgagctcaggtgaaaccatctaatgtctaagaagacctcagcagttaactactatgaaccaggcgaggcaagagggaaatataccttatgcacagcgctgctgagtaacaataagtatgagagcaatctgagaaagatttttctttattctgtttttctaagagtctttattctaataacaactcttwccgaaactgcttacacagc

SEQ ID NO: 31942 - DNA, 599 bp, Chicken  19866894254828_2
  misc_feature (1)..(162): n is any nucleotide
nnnnnnnnnnnnnnnnnnnnnnnnnnnnnnnnnnnnnnnnnnnnnnnnnnnnnnnnnnnnnnnnnnnnnnnnnnnnnnnnnnnnnnnnnnnnnnnnnnnnnnnnnnnnnnnnnnnnnnnnnnnnnnnnnnnnnnnnnnnnnnnnnnnnnnnnnnnnnnnnnntcacctgttcctcttgttctgcattctttcacaagtagttgtagtcctttatgtgcttctaaaagtttactgtgatcctcaaaatccatcacctctcttasttagtgtcttctaaataaaggaacatatgttagcacmatttcatcacctgttacacatcagtgtcaaagtttcaagagtttaagccttaatttgagctcaggtgaaaccatctaatgtctaagaagacctcagcagttaactactatgaaccaggcgaggcaagagggaaatataccttatgcacagcgctgctgagtaacaataagtatgagagcaatctgagaaagatttttctttattctgtttttctaagagtctttattctaataacaactcttwccgaaactgcttacacagccatactaattctacttctctagttaattgcccagata

SEQ ID NO: 31943 - DNA, 600 bp, Chicken  19866894254828_3
aaatccatcacctctcttasttagtgtcttctaaataaaggaacatatgttagcacmatttcatcacctgttacacatcagtgtcaaagtttcaagagtttaagccttaatttgagctcaggtgaaaccatctaatgtctaagaagacctcagcagttaactactatgaaccaggcgaggcaagagggaaatataccttatgcacagcgctgctgagtaacaataagtatgagagcaatctgagaaagatttttctttattctgtttttctaagagtctttattctaataacaactcttwccgaaactgcttacacagccatactaattctacttctctagttaattgcccagatacatcgcttgtccaattcttcctcaataatgaggacagcctgtgctgtatgtgctaagcacataggtcatttctacatcatactaccaggtgttgtgcaatcaggagattttgcagcattttttagtaaacaggatcatagattctgtggagaagttctawgattgagttgctaactaratcaactgccacattttaatctataaatattttagccactctaagttctttagatgattgactgta

SEQ ID NO: 31944 - DNA, 505 bp, Chicken  19866894254828_4
gtaacaataagtatgagagcaatctgagaaagatttttctttattctgtttttctaagagtctttattctaataacaactcttwccgaaactgcttacacagccatactaattctacttctctagttaattgcccagatacatcgcttgtccaattcttcctcaataatgaggacagcctgtgctgtatgtgctaagcacataggtcatttctacatcatactaccaggtgttgtgcaatcaggagattttgcagcattttttagtaaacaggatcatagattctgtggagaagttctawgattgagttgctaactaratcaactgccacattttaatctataaatattttagccactctaagttctttagatgattgactgtacaataaaaagactggaatggacttggtctttgatatttaacaggctacatgggtctcagtagaacaaataaaagtgattctaatattcaacttatagaacaggcaagatcaaacagaacag

SEQ ID NO: 31945 - DNA, 487 bp, Chicken  19866894254828_5
gcaatctgagaaagatttttctttattctgtttttctaagagtctttattctaataacaactcttwccgaaactgcttacacagccatactaattctacttctctagttaattgcccagatacatcgcttgtccaattcttcctcaataatgaggacagcctgtgctgtatgtgctaagcacataggtcatttctacatcatactaccaggtgttgtgcaatcaggagattttgcagcattttttagtaaacaggatcatagattctgtggagaagttctawgattgagttgctaactaratcaactgccacattttaatctataaatattttagccactctaagttctttagatgattgactgtacaataaaaagactggaatggacttggtctttgatatttaacaggctacatgggtctcagtagaacaaataaaagtgattctaatattcaacttatagaacaggcaagatcaaacagaacag

SEQ ID NO: 31946 - DNA, 600 bp, Chicken  19866894254830_1
attgcagcctgtcttatatttggcacatattaagtataccttttcatttttttctactcatactttaccggctacataaaaaattcagctgaaatatttaagatgtaagaatgcgggaagaacaagtctgagaaaaaaaataaagtaaactaagcctactgattttgatattaagatcagttaagattactgttatgtgaaaacaatagcttaattaaaagaaaaaatctgtcagcagaaaattgtggttctttgagtttccgtgaagtttccttttattctactgcagtttccaaattwatgagtgttgagacagctgcataaaaaaagtgcatgttcaaaaggtgattsaagtaacagarcagaagaatgaactactcgttgcagggtagtggcattttgtgtactctgagctgccttcttctaactggtgaacgctgatacctaaaacagagatgcctccaggtagccttgaatttgtaaaaatccttcttcttcagatcatgtgtctgatcagctttggcttgtttctggagtcataatttcataggcgaatgagcttgaaaaatgtctccagtttgatagggacaaacaagcttt

SEQ ID NO: 31947 - DNA, 600 bp, Chicken  19866894254830_2
ttctactcatactttaccggctacataaaaaattcagctgaaatatttaagatgtaagaatgcgggaagaacaagtctgagaaaaaaaataaagtaaactaagcctactgattttgatattaagatcagttaagattactgttatgtgaaaacaatagcttaattaaaagaaaaaatctgtcagcagaaaattgtggttctttgagtttccgtgaagtttccttttattctactgcagtttccaaattwatgagtgttgagacagctgcataaaaaaagtgcatgttcaaaaggtgattsaagtaacagarcagaagaatgaactactcgttgcagggtagtggcattttgtgtactctgagctgccttcttctaactggtgaacgctgatacctaaaacagagatgcctccaggtagccttgaatttgtaaaaatccttcttcttcagatcatgtgtctgatcagctttggcttgtttctggagtcataatttcataggcgaatgagcttgaaaaatgtctccagtttgatagggacaaacaagcttttgttccacaccagtgccttttctttgctcctattcacaactctttgaataa

SEQ ID NO: 31948 - DNA, 600 bp, Chicken  19866894254830_3
ctttaccggctacataaaaaattcagctgaaatatttaagatgtaagaatgcgggaagaacaagtctgagaaaaaaaataaagtaaactaagcctactgattttgatattaagatcagttaagattactgttatgtgaaaacaatagcttaattaaaagaaaaaatctgtcagcagaaaattgtggttctttgagtttccgtgaagtttccttttattctactgcagtttccaaattwatgagtgttgagacagctgcataaaaaaagtgcatgttcaaaaggtgattsaagtaacagarcagaagaatgaactactcgttgcagggtagtggcattttgtgtactctgagctgccttcttctaactggtgaacgctgatacctaaaacagagatgcctccaggtagccttgaatttgtaaaaatccttcttcttcagatcatgtgtctgatcagctttggcttgtttctggagtcataatttcataggcgaatgagcttgaaaaatgtctccagtttgatagggacaaacaagcttttgttccacaccagtgccttttctttgctcctattcacaactctttgaataagcacatttatt

SEQ ID NO: 31949 - DNA, 600 bp, Chicken  19866894254830_4
gatcatgtgtctgatcagctttggcttgtttctggagtcataatttcataggcgaatgagcttgaaaaatgtctccagtttgatagggacaaacaagcttttgttccacaccagtgccttttctttgctcctattcacaactctttgaataagcacatttattctggccagtatcaagaaaatctaatatgggttacaatttcagctcatctatgatgcctttacttgctgtcatcaattctgggggactaacgatgaaatacgtaatttttttaacatgacatacaaaacattccagartgagcataatcaacaaatctcataattgctgactgtgggttttgagagggaagttgcaagggctgggagaacagcacttaacagatgccactgcagtatatggctgactgcaaaggaacattttaaaattaataattaatgtgccctagatataccagaggtgcatgacagaacgtaagtcatcattctcccagaagcttccaatctaaaattttagaaaagaaacaaacaaacaaaaaaaaccccaacaaaaacaagagacatagagacagatctatttaaacatcgtgttgttattct

SEQ ID NO: 31950 - DNA, 599 bp, Chicken  19866894254831_1
  misc_feature (1)..(287): n is any nucleotide
nnnnnnnnnnnnnnnnnnnnnnnnnnnnnnnnnnnnnnnnnnnnnnnnnnnnnnnnnnnnnnnnnnnnnnnnnnnnnnnnnnnnnnnnnnnnnnnnnnnnnnnnnnnnnnnnnnnnnnnnnnnnnnnnnnnnnnnnnnnnnnnnnnnnnnnnnnnnnnnnnnnnnnnnnnnnnnnnnnnnnnnnnnnnnnnnnnnnnnnnnnnnnnnnnnnnnnnnnnnnnnnnnnnnnnnnnnnnnnnnnnnnnnnnnnnnnnnnnnnnnnnnnnnnnnnnnnnnnnnnnnnnnnnctgtgagacttgytttyggtctccatcggtgtsttctgtcctggtcaaaactcaacacacgtatttgtggcaaatcaaaggaacatctgagagcgaggaatttctcagtgtatggcatggcacaggcaatggctccttcagcagtacaagagaaacccttcaatttccagctgcgaagaagcagggttggttcagggccagatattcagttatcaggttgaagtgttcagtatccaggtggaaaaagatggaggaaaatgcgtattttaaagcggagatggggtgaccttcttcgcacactgaacccagctt

SEQ ID NO: 31951 - DNA, 599 bp, Chicken  19866894254831_2
  misc_feature (1)..(283): n is any nucleotide
nnnnnnnnnnnnnnnnnnnnnnnnnnnnnnnnnnnnnnnnnnnnnnnnnnnnnnnnnnnnnnnnnnnnnnnnnnnnnnnnnnnnnnnnnnnnnnnnnnnnnnnnnnnnnnnnnnnnnnnnnnnnnnnnnnnnnnnnnnnnnnnnnnnnnnnnnnnnnnnnnnnnnnnnnnnnnnnnnnnnnnnnnnnnnnnnnnnnnnnnnnnnnnnnnnnnnnnnnnnnnnnnnnnnnnnnnnnnnnnnnnnnnnnnnnnnnnnnnnnnnnnnnnnnnnnnnnnnnnnnnnnctgtgagacttgytttyggtctccatcggtgtsttctgtcctggtcaaaactcaacacacgtatttgtggcaaatcaaaggaacatctgagagcgaggaatttctcagtgtatggcatggcacaggcaatggctccttcagcagtacaagagaaacccttcaatttccagctgcgaagaagcagggttggttcagggccagatattcagttatcaggttgaagtgttcagtatccaggtggaaaaagatggaggaaaatgcgtattttaaagcggagatggggtgaccttcttcgcacactgaacccagcttgctc

SEQ ID NO: 31952 - DNA, 599 bp, Chicken  19866894254831_3
  misc_feature (1)..(267): n is any nucleotide
nnnnnnnnnnnnnnnnnnnnnnnnnnnnnnnnnnnnnnnnnnnnnnnnnnnnnnnnnnnnnnnnnnnnnnnnnnnnnnnnnnnnnnnnnnnnnnnnnnnnnnnnnnnnnnnnnnnnnnnnnnnnnnnnnnnnnnnnnnnnnnnnnnnnnnnnnnnnnnnnnnnnnnnnnnnnnnnnnnnnnnnnnnnnnnnnnnnnnnnnnnnnnnnnnnnnnnnnnnnnnnnnnnnnnnnnnnnnnnnnnnnnnnnnnnnnnnnnnnnnnnnnnnnctgtgagacttgytttyggtctccatcggtgtsttctgtcctggtcaaaactcaacacacgtatttgtggcaaatcaaaggaacatctgagagcgaggaatttctcagtgtatggcatggcacaggcaatggctccttcagcagtacaagagaaacccttcaatttccagctgcgaagaagcagggttggttcagggccagatattcagttatcaggttgaagtgttcagtatccaggtggaaaaagatggaggaaaatgcgtattttaaagcggagatggggtgaccttcttcgcacactgaacccagcttgctcctctagacttttgggt

SEQ ID NO: 31953 - DNA, 600 bp, Chicken  19866894254833_1
cagagcaggcacccaccccccctcagcagctctgggcaccctgctggctccgtccagcagagagcagcagcacacagctttctgcccagcctccatccaaaggcggctttatgacagctcccatttccacgtgggtgtgcagaacaatttacatttccatcttttgctttgcaacagctgagtgcaaccgctgcacactgcaagggctctgaggtggtcagagagcctacggggctgggtttcaaccgtgagagagacctcgctgtgggaggatgaggtgttgcctccaaaagccatcarcctggttggtacaaggtacccaatgcacacaggggccctggcacattaaaatacaccgggttgttctggaccctttgcatgagtggttgagtatttgaggaaagcatgccagaggcttaactttttgattgctgctttggggggaaaggataagatttattccattaaaatgcaattttgaaagcacatggaaagccattagcccttaggtaaaagacaaagtttgctctgaggtgcagctcttgcatgggggtaataggaataaggcagaggaagcaatttgacagcaataacaggaac

SEQ ID NO: 31954 - DNA, 600 bp, Chicken  19866894254835_1
tctaatattttatttcctgttgacacatttaatttctggcacttgtctgttgattagcaaaataccaagtacctggtaaagggcttagcctagttttcattctacagtttaaatcaggtgagaagcaagaatcaccttgcttttattgctttctgcctttcctcatgaatccattgctgggaggagagaaacctgaaggtatttgttctaactcatgcttccttagctgctcactttcactcctagacctttctctccgttgggatgatgcaactgcttttgcatgagaattatttgaastggattatagaattgattcaagttaaatatgtattgtttataacccctttaatccaatttgccttgatttaatattgcagcgtgctgcaggaggtggcacagtggagagggaatggaaggggctgagtaacatggcattgttgagggggtagggagagaaaaacacttatcaatcctacagccatttggagattgctccgtgttccctgtacaattatgaaggaacagtacctagctgaagagaactagaggacagctgtttctgaacatgggggaaagtcatcttatttttttcatagg

SEQ ID NO: 31955 - DNA, 600 bp, Chicken  19866894254837_1
ccccacccccccacgtaacaagcgtgtgggctgagctgctatcttgcctcgctgagagctgtgttctcccccgggacggtttgattcgattgagtgacgactttttattatttattgattgatttgatttatttgtttgtttgctttcattctttttcttttttttcccaggcttccaagcccaaggtgagcatcccactgtcagccatcatcgaggtgcgcaccaccatgcctttggagatgcctgacaaggacaacacctttgtgctgaaggtgagggtggggacagcggtgggcatycacccccccccatccagccccacatctaaccccactgcaggggatgctttggccccagggatatttccttggccccagcatcgctgatgctgctgcccccccttcccatactgtgctctcctttggggctccccaaagtaccatcatgaatgaggtaccatcatggaatcattaagggtgagaaagacccctcagatccccaagtccaaccccagcccacccccccactgacattgtccctcagtgccacatctgcacagttccagagatggtggctccaccacctcccaggtgtttgcc

SEQ ID NO: 31956 - DNA, 600 bp, Chicken  19866894254848_1
aacttctgctgagcagcacagccacggctcctgccagcactgcccttaccctgaccgctgtagggatggtgctcctgtatgcttcctaagacagcatcagcatagcacagctcggctggtccgttcagctcatgttccagaccagatctcggagcaataagatgtatgtcccgttgtgtccatccaacctgcatctgtaaacaacactcagcaaaatctggagttgtgtcatttcttgtacatgtaggaactacagtgaggtaacagcagttaatagacacatccaccagtatcttttarggatgcgaggtttcaaactgtgataacctcccatcttttctgaggtatgaagcacactacacraattcattacattaaaactcattagcgtaggtcacagtgatgataatgtgaatagcaattgtctgtttgtcagaaggaagcagtgatttaacctttcaccaccttatgcagtgtgttctaccctcacttaaaggaatgctgcagtgtgtctcattgagctgtaaaaccttggcattcttacaccaaaacacaatttccttgagataaattggtgtctttctcttgtgagaagctcct

SEQ ID NO: 31957 - DNA, 600 bp, Chicken  19866894254848_2
ggatggtgctcctgtatgcttcctaagacagcatcagcatagcacagctcggctggtccgttcagctcatgttccagaccagatctcggagcaataagatgtatgtcccgttgtgtccatccaacctgcatctgtaaacaacactcagcaaaatctggagttgtgtcatttcttgtacatgtaggaactacagtgaggtaacagcagttaatagacacatccaccagtatcttttarggatgcgaggtttcaaactgtgataacctcccatcttttctgaggtatgaagcacactacacraattcattacattaaaactcattagcgtaggtcacagtgatgataatgtgaatagcaattgtctgtttgtcagaaggaagcagtgatttaacctttcaccaccttatgcagtgtgttctaccctcacttaaaggaatgctgcagtgtgtctcattgagctgtaaaaccttggcattcttacaccaaaacacaatttccttgagataaattggtgtctttctcttgtgagaagctcctctcatggacctgcatggggacagtaaacatgagagtttggggttgatgagagcaatcctaaaa

SEQ ID NO: 31958 - DNA, 600 bp, Chicken  19866894254850_1
cactgaacttaaccagcctccaggacagaagtctcaagaaagaagtccaagctggagcaaacacctcccagtgcccactcaaatgctctcccaaccccaggcctgactctaggcccagctgttccagcatagacttacccacacaacctttgtaggatgtactgaggatggctagagatgaatgcctacagagaggccctctgctcttcctaaagtattgaggccttttccctgacctctgatacaagctcatcaattctactgcaacagtgcagcactaacagctctatttttttgcamcaggttcwtacttaaggtccacttacccaaagggcatttmtaaaggcataaggccttcaagaagctcctgctgcgtccagcaaacgcgttcccaaactacccccaagatgaaagcagggaaaacaactgttccagcatacagccacctctacagaagctgagaaaccttagcaggacagatcatactcaacaagaaagcttatctcagaactatcactttcagctctgaaaggtgacttctttgataggacagatttagcccacatcacagtacactttcaatttcaattgtagtccaat

SEQ ID NO: 31959 - DNA, 600 bp, Chicken  19866894254850_2
ttaaccagcctccaggacagaagtctcaagaaagaagtccaagctggagcaaacacctcccagtgcccactcaaatgctctcccaaccccaggcctgactctaggcccagctgttccagcatagacttacccacacaacctttgtaggatgtactgaggatggctagagatgaatgcctacagagaggccctctgctcttcctaaagtattgaggccttttccctgacctctgatacaagctcatcaattctactgcaacagtgcagcactaacagctctatttttttgcamcaggttcwtacttaaggtccacttacccaaagggcatttmtaaaggcataaggccttcaagaagctcctgctgcgtccagcaaacgcgttcccaaactacccccaagatgaaagcagggaaaacaactgttccagcatacagccacctctacagaagctgagaaaccttagcaggacagatcatactcaacaagaaagcttatctcagaactatcactttcagctctgaaaggtgacttctttgataggacagatttagcccacatcacagtacactttcaatttcaattgtagtccaattgcaaaca

SEQ ID NO: 31960 - DNA, 600 bp, Chicken  19866894254850_3
agaagtccaagctggagcaaacacctcccagtgcccactcaaatgctctcccaaccccaggcctgactctaggcccagctgttccagcatagacttacccacacaacctttgtaggatgtactgaggatggctagagatgaatgcctacagagaggccctctgctcttcctaaagtattgaggccttttccctgacctctgatacaagctcatcaattctactgcaacagtgcagcactaacagctctatttttttgcamcaggttcwtacttaaggtccacttacccaaagggcatttmtaaaggcataaggccttcaagaagctcctgctgcgtccagcaaacgcgttcccaaactacccccaagatgaaagcagggaaaacaactgttccagcatacagccacctctacagaagctgagaaaccttagcaggacagatcatactcaacaagaaagcttatctcagaactatcactttcagctctgaaaggtgacttctttgataggacagatttagcccacatcacagtacactttcaatttcaattgtagtccaattgcaaacatatgaagataccatcaggaaatcaccagtcac

SEQ ID NO: 31961 - DNA, 600 bp, Chicken  19866894254860_1
cttgtgtgtgtgcataacacaaaaggaaaaagaatggaaatgaacgagcatccaccctataaaagattgggaatgtctgcataaacctgcattaccctcaaagaacaattgcagcttttcagagttaaaagagagatactgttctacagcatctgcgtgcaaagatttcttctgaaacaagagatcagaaaagaaaatatccgaacaacatcaaaattctccacctcattacaattcttcattacgcttctgagatggaagatttgactgatagtctgctttgggactctgcacttttcktttgtctccagtgtttgtttgaactgtggagtttggagaacacaagatctgtcagcagcacagcataagggtttgaatggaaaggcaagagctgcatgtgcatcacaggtgaccttcacagtccatcgatggatggaaacagaatgtgtcagagatatgagacctcagagtaccaaggaaaagagtaggagttaaatatccacatgtgtaggaatgttttagcaatagagatcctctttttgctgaagtgggaggagacctgcagtttctggaacaggggatgggagcagggctacaaga

SEQ ID NO: 31962 - DNA, 600 bp, Chicken  19866894254861_1
aaaaaaaaagtttactggtagcatctcctctacccaaaaaaacaagcaacttcatcaggaaaaagcagacatggcacagaaggacagctgaagcagaaaaggcttttcttttgaaagaggatggagcatgcacaattacaccctccaatctactcatccagaaggagaaaatggtttgatgatctcactacacctcaccaagttacacagtcaggtggactgcctcccatagctcacagcacaggcagcactccatttcagagctaacactgggtccaaacaacaccaggtaccctcagrgctccctttagaargggcccaaaagcatacagaacatcatgaccgctttcaaatttcttcaagctaacttcaaagaagttccatgattaaaaagctctccagaaattaaaatccctgaagttaagaactaacacactgaaaatcatgactaaataacatcaaaccaagtcataccgaaaggaaagaaggctggggaagttgcagtcgggactttacatacagacacacagacactgcacccccaagggaaggggagtgccatttcaatcaggtattctacaagcctactaatttgttcct

SEQ ID NO: 31963 - DNA, 600 bp, Chicken  19866894254861_2
ctggtagcatctcctctacccaaaaaaacaagcaacttcatcaggaaaaagcagacatggcacagaaggacagctgaagcagaaaaggcttttcttttgaaagaggatggagcatgcacaattacaccctccaatctactcatccagaaggagaaaatggtttgatgatctcactacacctcaccaagttacacagtcaggtggactgcctcccatagctcacagcacaggcagcactccatttcagagctaacactgggtccaaacaacaccaggtaccctcagrgctccctttagaargggcccaaaagcatacagaacatcatgaccgctttcaaatttcttcaagctaacttcaaagaagttccatgattaaaaagctctccagaaattaaaatccctgaagttaagaactaacacactgaaaatcatgactaaataacatcaaaccaagtcataccgaaaggaaagaaggctggggaagttgcagtcgggactttacatacagacacacagacactgcacccccaagggaaggggagtgccatttcaatcaggtattctacaagcctactaatttgttcctgcatagacttcatc

SEQ ID NO: 31964 - DNA, 600 bp, Chicken  19866894254862_1
ggtgttcccagcgtggagaacatcctccaagattggcttcctcaacgacaaggtgtgtggggagcagccgtcctgctgccttccaggcccttcccggggctgagtgcccactgtggggctctgggtttgcatgagggccgttggagctgctggtgcagtttgggcacagtcagctggttttgtcccctcttttctatagcaccaagagatgcagggttgtgggtatggcgccttcactctcagctgttcacagttctctgcgctcctctcctcgctgcaggtggaggagcagcgggggakgtacctggatgcctatgacatcgtgctggagagcgatgagacgttggatgtggtcaatgggattctgcggtacatcctcatggagacatgagccgggcagcagcgccccaaccccggcccatcagccacggctgggggatgagcgccctcagcaaagctggacgggtgtcctggtacctgcctgaatccatccccgtgccggggtggtccccctgccctggctgttgtgttgtgtcccaaacctcacagctcttctggtcacttcggagctgatctggaggaagcaaggagcccgccctg

SEQ ID NO: 31965 - DNA, 599 bp, Chicken  19866894254867_1
  misc_feature (1)..(7): n is any nucleotide
nnnnnnnttcattcatcatatattgaatctcagtcacttttgcaataactaccatgatggtagtttttctttcaaggtatttcaatatcacagctcatatatttgcctaagtaataaagtattcttatttttttaatcagttcatcgtggaaggtgtcacgacaaacaacttatttagctacactttaatttgatttacgggataaggatgaaggagtgagttatcctacaaaccctagaattctgtccttggcaactgacctttaacagtcttacaagagtcatacttacttgtaatgyataaacttartgcaagatgacagtcctttcccttctgtgctatattacagttttgatgaaatagtcatcaaaacatcatcatttagagctatattattctgcaaaactccagccattaaaaaaatataccagaccatccttaaagattgtttacgcagttggaagattatcctctatttggcaacagacttcttgacaactgtctccatcttccagcttcattttgcaaattatgctagtagaaaattygagtcatatgaatacattttcaaaggaaacatccatgctgaagatatatt

SEQ ID NO: 31966 - DNA, 600 bp, Chicken  19866894254867_2
attcatcatatattgaatctcagtcacttttgcaataactaccatgatggtagtttttctttcaaggtatttcaatatcacagctcatatatttgcctaagtaataaagtattcttatttttttaatcagttcatcgtggaaggtgtcacgacaaacaacttatttagctacactttaatttgatttacgggataaggatgaaggagtgagttatcctacaaaccctagaattctgtccttggcaactgacctttaacagtcttacaagagtcatacttacttgtaatgyataaacttartgcaagatgacagtcctttcccttctgtgctatattacagttttgatgaaatagtcatcaaaacatcatcatttagagctatattattctgcaaaactccagccattaaaaaaatataccagaccatccttaaagattgtttacgcagttggaagattatcctctatttggcaacagacttcttgacaactgtctccatcttccagcttcattttgcaaattatgctagtagaaaattygagtcatatgaatacattttcaaaggaaacatccatgctgaagatatatttgatccatatg

SEQ ID NO: 31967 - DNA, 539 bp, Chicken  19866894254867_3
ttggcaactgacctttaacagtcttacaagagtcatacttacttgtaatgyataaacttartgcaagatgacagtcctttcccttctgtgctatattacagttttgatgaaatagtcatcaaaacatcatcatttagagctatattattctgcaaaactccagccattaaaaaaatataccagaccatccttaaagattgtttacgcagttggaagattatcctctatttggcaacagacttcttgacaactgtctccatcttccagcttcattttgcaaattatgctagtagaaaattygagtcatatgaatacattttcaaaggaaacatccatgctgaagatatatttgatccatatgatccctttaatttagaatacatctatgtctactgaagcaaactttaaaaaagaacaaagttggatcatgtgaggagacatttttagatttcttttagcaataatcagaaatagtatcacgatacaatgtagctccaattaggcatttgtagggtgggggtaacgagaacattatctta

SEQ ID NO: 31968 - DNA, 600 bp, Chicken  19866894254875_1
aatcaactatttctttcacctacactgaagctataggccaaaccctgtaaatcttactgaaaaaaggcattttagagacctcctgctggtcttctgcacaaagaaaatgactaccgcagtgaggtgaagggcagaatggagattgaaaacacagtccatatggaaagaaaaactgcatttaaaatgcacccaataaacactaaagatctattatgctgtatttgagcaacattcaatttttcacactgttgctgacatttatatatccatctgtatgtatataaaggcacatgcgtgcamccatatacccatatatgtgtatataaaggcacatgcaaagtgtatacacacacttcattccacatggaaccatctagattaaaaagcctcaccaattttacttctagtcatatcaaacgggatcctacacattccatgctatcattagctaatagttccccaagttgtggcctcttattgctgcatgcttcaaatcaactttgtgaacatattaaaactgtttcatgaagagtagtccagaaaagataaagtaatgcccctttccgggaggcattccagtccaggctggatgggctctga

SEQ ID NO: 31969 - DNA, 600 bp, Chicken  19866894254877_1
tctttaggggtgctgtggtggtggtgttttctcaggtcgtggtccctgtttgcgcccaggggcgtgtggggtgcgggatggcaggcaggtgccagccaggctttgtgcttccacacagatgcagtgcgcgcccttacggtaacgcggcccctgcagcgtggcgagtgcccagccctggctgcatcccgctgtgcacgtgttgtgcgggttgtgctgcccagggaacccatggaggctgtatcagtaatggtatggccgggccttgccagtgctggagcatcagacagcaagaaatgcagygagtgcgttttctaaatgactgtaaaaccaaatagcacaattatcctcttctgggtctgtgtgtaaccatatatagtcattaagtttagcaattcacgtttattccgtctgaagactcagttttcactcttcttggtatgtcattgtttttattctgggagttgttttgaatttcttcaaatatgccctattggtttgttctgtgtcgcctatggtgcattttctcagtagactgcttactgctctgcgtctttctstggtatcttaygatgcatataaccccatgaaagcttcggtgta

SEQ ID NO: 31970 - DNA, 600 bp, Chicken  19866894254877_2
gggccttgccagtgctggagcatcagacagcaagaaatgcagygagtgcgttttctaaatgactgtaaaaccaaatagcacaattatcctcttctgggtctgtgtgtaaccatatatagtcattaagtttagcaattcacgtttattccgtctgaagactcagttttcactcttcttggtatgtcattgtttttattctgggagttgttttgaatttcttcaaatatgccctattggtttgttctgtgtcgcctatggtgcattttctcagtagactgcttactgctctgcgtctttctstggtatcttaygatgcatataaccccatgaaagcttcggtgtaggttttgcactgtgttcctcacataagcttcaattcactaaacggtggatggaatggctctgtcatagcctacagctcctcacagggagcggaggggcagcgctgagctctgctctgtgtgacagcgacagggcccgagggaacggcatggagctgtgtcaggggaggggcagctgggggttagggacaggggctgcaccacagggcrgtgggcatggaacgggctgcccagggctgtgggcacggcccccagtgcc

SEQ ID NO: 31971 - DNA, 600 bp, Chicken  19866894254877_3
gtgctggagcatcagacagcaagaaatgcagygagtgcgttttctaaatgactgtaaaaccaaatagcacaattatcctcttctgggtctgtgtgtaaccatatatagtcattaagtttagcaattcacgtttattccgtctgaagactcagttttcactcttcttggtatgtcattgtttttattctgggagttgttttgaatttcttcaaatatgccctattggtttgttctgtgtcgcctatggtgcattttctcagtagactgcttactgctctgcgtctttctstggtatcttaygatgcatataaccccatgaaagcttcggtgtaggttttgcactgtgttcctcacataagcttcaattcactaaacggtggatggaatggctctgtcatagcctacagctcctcacagggagcggaggggcagcgctgagctctgctctgtgtgacagcgacagggcccgagggaacggcatggagctgtgtcaggggaggggcagctgggggttagggacaggggctgcaccacagggcrgtgggcatggaacgggctgcccagggctgtgggcacggcccccagtgcctggagttcagg

SEQ ID NO: 31972 - DNA, 555 bp, Chicken  19866894254877_4
cctatggtgcattttctcagtagactgcttactgctctgcgtctttctstggtatcttaygatgcatataaccccatgaaagcttcggtgtaggttttgcactgtgttcctcacataagcttcaattcactaaacggtggatggaatggctctgtcatagcctacagctcctcacagggagcggaggggcagcgctgagctctgctctgtgtgacagcgacagggcccgagggaacggcatggagctgtgtcaggggaggggcagctgggggttagggacaggggctgcaccacagggcrgtgggcatggaacgggctgcccagggctgtgggcacggcccccagtgcctggagttcagggagcatacgcactctcattcctggtctgatttttgagtggtggtgcatggaaccagaagttggacttgatgatccgtgtgggtcccttccagcttgagatattctggtgatgttctttgttgggtatagtagggggaatggtgcactgcactgagacttgaaagtctctttctcttcgttctcactgaagtgatt

SEQ ID NO: 31973 - DNA, 599 bp, Chicken  19866894254884_1
  misc_feature (1)..(61): n is any nucleotide
nnnnnnnnnnnnnnnnnnnnnnnnnnnnnnnnnnnnnnnnnnnnnnnnnnnnnnnnnnnnnctaatagagtggggagattcctgtcacttgcagcaacctgatgagagtgcagggagataggtgttaacccaaaggtgttaatgaatgaagaattgagacatgggcttagctctttcagaaagaagtaagtcaccaccagtttttttcctctgaatacccctgctagttggtgcccacactaggatttaggtaatctggagttttgctttaaaaacacccacagaaaatatagtaagcayatgaagaaagagaagagattcacaaagccatcaaaagatatgttggctctgtataaacactcaatagcaacctaatgtaccaaactactaagcactgacatatcaggggtctaattctctaaaaattagamactcctatagctgtaatcctcacccaataaaaatggctttacaataacttttgagaatttttggaccttatacgtgaaattytgcgggttttattgtccatttcaattgtgctgtagtgtctgttggttttctcatgaagattctacaataaagaccgaacttacagt

SEQ ID NO: 31974 - DNA, 600 bp, Chicken  19866894254884_2
aaaggtgttaatgaatgaagaattgagacatgggcttagctctttcagaaagaagtaagtcaccaccagtttttttcctctgaatacccctgctagttggtgcccacactaggatttaggtaatctggagttttgctttaaaaacacccacagaaaatatagtaagcayatgaagaaagagaagagattcacaaagccatcaaaagatatgttggctctgtataaacactcaatagcaacctaatgtaccaaactactaagcactgacatatcaggggtctaattctctaaaaattagamactcctatagctgtaatcctcacccaataaaaatggctttacaataacttttgagaatttttggaccttatacgtgaaattytgcgggttttattgtccatttcaattgtgctgtagtgtctgttggttttctcatgaagattctacaataaagaccgaacttacagtttctacctccagttatgctggagataaaattcattcaaatttttggggacactctatttacctattctgtaaagagcacatcactaaaagtgatgattcatctgtggtaacacagtttgctgcattggtggc

SEQ ID NO: 31975 - DNA, 600 bp, Chicken  19866894254884_3
aatacccctgctagttggtgcccacactaggatttaggtaatctggagttttgctttaaaaacacccacagaaaatatagtaagcayatgaagaaagagaagagattcacaaagccatcaaaagatatgttggctctgtataaacactcaatagcaacctaatgtaccaaactactaagcactgacatatcaggggtctaattctctaaaaattagamactcctatagctgtaatcctcacccaataaaaatggctttacaataacttttgagaatttttggaccttatacgtgaaattytgcgggttttattgtccatttcaattgtgctgtagtgtctgttggttttctcatgaagattctacaataaagaccgaacttacagtttctacctccagttatgctggagataaaattcattcaaatttttggggacactctatttacctattctgtaaagagcacatcactaaaagtgatgattcatctgtggtaacacagtttgctgcattggtggctttagttctcatcttctacagcaggacaagctaggcttttcaacatggccattgatatccatggaggaaaatagctatttct

SEQ ID NO: 31976 - DNA, 599 bp, Chicken  19866894254885_1
  misc_feature (1)..(19): n is any nucleotide
nnnnnnnnnnnnnnnnnnnctaaatttactaagtttttgaaaaggtgtgtttatgtctcctgcaacagttcttaattatgtttactggatcaagagccaagcccacatttttcaccacctaataaacagtgagcgtgtaataatgatctgactatttcccatcctttccattgatgctaaattcatcaaaggaggagagaacactatcagcatcttcaaatgaacctcctacagaacgttatctaaagtaaataggaactattcagtgaaggaaaactggatgtgacatctctcgttgcycctgttaatactgctttagcgcatgacctgtacgaacatcctttcctgatcacagtaaaggtgtttcccaacccgtgcagaaggagggatgggagctgccccaatgactgcctctaccaggctgagctccctccttagagcaagagctgagcctcaacgacaagtaatgcccgcctttcctgtgatcctcacagacctctctatttcccaggcgcaagcagcgacctcagcatttcaccagagcaggaggctgtgctttgacacaaacacagagctccagaagaaaacgcaaagtgaca

SEQ ID NO: 31977 - DNA, 600 bp, Chicken  19866894254892_1
tgcgtcagagtcactgctgtcttcttcatgggcttcctgtcctggattcatgcaacaggaaagagaacatccttagcatgactgcttataggctgagcttttttcctgtcctgctgctacactgcctgcaactcaacaggtgccaccatggcacaattaaaagaaaattacatgtgggaatctcaacctttgcagagatccagctcctaccacggtaaacaccagcaggaatcatcacatttttcatctctggcaatggaggtagttctgaggtaggctgggaaagacacagtgagcacrgctttcaaaaayggtcaagttaaagaaaaataaaaaaaattaaaaatccctcctgttgctcaggaaaacagtaaacagtcagcaattatgaaactcggggcaactaaaacacatgagacaggcttaacatgatgtgaaaacacaactgttctatacatttatattctgttacagaaaagctgagctgcgcaattaaaagcatcctatgagtatcataggatccacatccaaatctagatcatacctttaagatgaaaaaaggaagatgagatgagtaaagcaaatgcccagcaagcatgg

SEQ ID NO: 31978 - DNA, 600 bp, Chicken  19866894254892_2
actgctgtcttcttcatgggcttcctgtcctggattcatgcaacaggaaagagaacatccttagcatgactgcttataggctgagcttttttcctgtcctgctgctacactgcctgcaactcaacaggtgccaccatggcacaattaaaagaaaattacatgtgggaatctcaacctttgcagagatccagctcctaccacggtaaacaccagcaggaatcatcacatttttcatctctggcaatggaggtagttctgaggtaggctgggaaagacacagtgagcacrgctttcaaaaayggtcaagttaaagaaaaataaaaaaaattaaaaatccctcctgttgctcaggaaaacagtaaacagtcagcaattatgaaactcggggcaactaaaacacatgagacaggcttaacatgatgtgaaaacacaactgttctatacatttatattctgttacagaaaagctgagctgcgcaattaaaagcatcctatgagtatcataggatccacatccaaatctagatcatacctttaagatgaaaaaaggaagatgagatgagtaaagcaaatgcccagcaagcatggaccaaattcttc

SEQ ID NO: 31979 - DNA, 600 bp, Chicken  19866894254896_1
tgttctaagaatattcctttcccacaagtgaagctttctgtaggctttaccaacatattttttttccactccaagaaacctacacagtcatttagaaactgccacctcggtaacagcagcacaaaacccaaaacatacaatatctccccgggctgcaaagcccctgggatacgacatgtttgtagtcaacacagacagatgcagaggaggtcagcagctgagctcctgcaagagctttcatttatgagaaatccagaaatagctcaagcttttgattctgaatgagatgaagagcttcayrgggggagggagaaagtgtcaaagcaaatcttttcgttctggtaaactcagagctatactgggttgaatttgaagattctttggcactggacagttaccagttctggaaatggaatcctctttgttcccctttaccagaaatgagagtgatgagaattgctgtaatggacacttcacastgggatgcctcccacaaaaatcccaaagtcctcttccaaccctacaccagcagatgccaagagcacatggatataccccacagtgtacttcgtgctcatcaaggtcacatctgcamgggtt

SEQ ID NO: 31980 - DNA, 600 bp, Chicken  19866894254896_2
gttctaagaatattcctttcccacaagtgaagctttctgtaggctttaccaacatattttttttccactccaagaaacctacacagtcatttagaaactgccacctcggtaacagcagcacaaaacccaaaacatacaatatctccccgggctgcaaagcccctgggatacgacatgtttgtagtcaacacagacagatgcagaggaggtcagcagctgagctcctgcaagagctttcatttatgagaaatccagaaatagctcaagcttttgattctgaatgagatgaagagcttcayrgggggagggagaaagtgtcaaagcaaatcttttcgttctggtaaactcagagctatactgggttgaatttgaagattctttggcactggacagttaccagttctggaaatggaatcctctttgttcccctttaccagaaatgagagtgatgagaattgctgtaatggacacttcacastgggatgcctcccacaaaaatcccaaagtcctcttccaaccctacaccagcagatgccaagagcacatggatataccccacagtgtacttcgtgctcatcaaggtcacatctgcamgggttg

SEQ ID NO: 31981 - DNA, 600 bp, Chicken  19866894254896_3
ttgtagtcaacacagacagatgcagaggaggtcagcagctgagctcctgcaagagctttcatttatgagaaatccagaaatagctcaagcttttgattctgaatgagatgaagagcttcayrgggggagggagaaagtgtcaaagcaaatcttttcgttctggtaaactcagagctatactgggttgaatttgaagattctttggcactggacagttaccagttctggaaatggaatcctctttgttcccctttaccagaaatgagagtgatgagaattgctgtaatggacacttcacastgggatgcctcccacaaaaatcccaaagtcctcttccaaccctacaccagcagatgccaagagcacatggatataccccacagtgtacttcgtgctcatcaaggtcacatctgcamgggttgggcttttttgttaattgcttttaaagagttttgtaaataatcaaaccttcaccttcagaactgaggcagcaacacccattcacaacaacaggcagagccagctgtgcttgcactgtaaactgaagcactgaagtgaatggggatcagaacgaggggtaggaactagatggtctttaag

SEQ ID NO: 31982 - DNA, 600 bp, Chicken  19866894254896_4
ttcayrgggggagggagaaagtgtcaaagcaaatcttttcgttctggtaaactcagagctatactgggttgaatttgaagattctttggcactggacagttaccagttctggaaatggaatcctctttgttcccctttaccagaaatgagagtgatgagaattgctgtaatggacacttcacastgggatgcctcccacaaaaatcccaaagtcctcttccaaccctacaccagcagatgccaagagcacatggatataccccacagtgtacttcgtgctcatcaaggtcacatctgcamgggttgggcttttttgttaattgcttttaaagagttttgtaaataatcaaaccttcaccttcagaactgaggcagcaacacccattcacaacaacaggcagagccagctgtgcttgcactgtaaactgaagcactgaagtgaatggggatcagaacgaggggtaggaactagatggtctttaaggtcccttccaactcaagccaactcaatggttctatgacctcacatagcacaggggaagagccattgtgtggcttcaagttggatttcctacctcctcttaacagcccaacctgaag

SEQ ID NO: 31983 - DNA, 600 bp, Chicken  19866894254907_1
tgactggtcttggtacagagaggaagaaagaaaagtgtctacaggccaacccacagagctatgaattgatttgcattgctagactttgatttaggaaaagcagcactgaaggcatatttaccacaaatatctacgtttgtgggaacaaataagtgggatcctacacacaatccaattcattctgccttttctgaaacatcttagcagctctgtgagggctggcaccagaagagccacctattcgtccgttaaggaacattgttccatgggagtctacagagagcttcagagatgaaacakwrctcacttgcayctgactgatgctggtagagtggattttagcaatgctatattcatagactctgatgaagaaccgatctggtatattcatctcccacagtcagccagcagtgctgcctgcaggattcttcttgcctctggtgtgacattcttccaattacagaaatgaaggatatcctattagaaaagtatgcattactttgaacaatttcacatttactgaggatctttaccagtaaaaaagtgttacaggccaacttcctacttcccatgatcgctaccctcaaactgccagttcat

SEQ ID NO: 31984 - DNA, 600 bp, Chicken  19866894254907_2
gactggtcttggtacagagaggaagaaagaaaagtgtctacaggccaacccacagagctatgaattgatttgcattgctagactttgatttaggaaaagcagcactgaaggcatatttaccacaaatatctacgtttgtgggaacaaataagtgggatcctacacacaatccaattcattctgccttttctgaaacatcttagcagctctgtgagggctggcaccagaagagccacctattcgtccgttaaggaacattgttccatgggagtctacagagagcttcagagatgaaacakwrctcacttgcayctgactgatgctggtagagtggattttagcaatgctatattcatagactctgatgaagaaccgatctggtatattcatctcccacagtcagccagcagtgctgcctgcaggattcttcttgcctctggtgtgacattcttccaattacagaaatgaaggatatcctattagaaaagtatgcattactttgaacaatttcacatttactgaggatctttaccagtaaaaaagtgttacaggccaacttcctacttcccatgatcgctaccctcaaactgccagttcatt

SEQ ID NO: 31985 - DNA, 600 bp, Chicken  19866894254907_3
actggtcttggtacagagaggaagaaagaaaagtgtctacaggccaacccacagagctatgaattgatttgcattgctagactttgatttaggaaaagcagcactgaaggcatatttaccacaaatatctacgtttgtgggaacaaataagtgggatcctacacacaatccaattcattctgccttttctgaaacatcttagcagctctgtgagggctggcaccagaagagccacctattcgtccgttaaggaacattgttccatgggagtctacagagagcttcagagatgaaacakwrctcacttgcayctgactgatgctggtagagtggattttagcaatgctatattcatagactctgatgaagaaccgatctggtatattcatctcccacagtcagccagcagtgctgcctgcaggattcttcttgcctctggtgtgacattcttccaattacagaaatgaaggatatcctattagaaaagtatgcattactttgaacaatttcacatttactgaggatctttaccagtaaaaaagtgttacaggccaacttcctacttcccatgatcgctaccctcaaactgccagttcattt

SEQ ID NO: 31986 - DNA, 600 bp, Chicken  19866894254907_4
tacagagaggaagaaagaaaagtgtctacaggccaacccacagagctatgaattgatttgcattgctagactttgatttaggaaaagcagcactgaaggcatatttaccacaaatatctacgtttgtgggaacaaataagtgggatcctacacacaatccaattcattctgccttttctgaaacatcttagcagctctgtgagggctggcaccagaagagccacctattcgtccgttaaggaacattgttccatgggagtctacagagagcttcagagatgaaacakwrctcacttgcayctgactgatgctggtagagtggattttagcaatgctatattcatagactctgatgaagaaccgatctggtatattcatctcccacagtcagccagcagtgctgcctgcaggattcttcttgcctctggtgtgacattcttccaattacagaaatgaaggatatcctattagaaaagtatgcattactttgaacaatttcacatttactgaggatctttaccagtaaaaaagtgttacaggccaacttcctacttcccatgatcgctaccctcaaactgccagttcatttcctaccctcag

SEQ ID NO: 31987 - DNA, 600 bp, Chicken  19866894254914_1
ttttttccccttcttgaacaattgtgtgcaaaggtgtacagtgcaaaacccccatgcaatggaaagcagcactgagaatggattgtactaactgcacattaagccacagtccagccagctgtacagtgtacatacagctgtacatacatttccctgtttccatattatataacaaaaaaacacaaaggcattccattattagacacaataggaaaaaaaaaatctgaaaggaaaccatcagcatctctaaatgacagttattgcacccatcaatggaagagtggacagttgcttgtcatygcgttatgctacttcagtgaaaacaagaaactaacagggtcaaatacagtgaatcsattctttagcccaaaagagggttatgattctctgtatctctctggaaaagatcaattttccatgaataaacctggtattttagaggacaaatataaatatagctctgtttgatctcattttattacatttaccatgtttaaggaggaggagaaaaaatgtggagagtcagcattctgtcttgccatgctactgcattgtcaatgttgaactggaaaatgtagctgtttcctagaaatattgtaa

SEQ ID NO: 31988 - DNA, 600 bp, Chicken  19866894254914_2
caatggaaagcagcactgagaatggattgtactaactgcacattaagccacagtccagccagctgtacagtgtacatacagctgtacatacatttccctgtttccatattatataacaaaaaaacacaaaggcattccattattagacacaataggaaaaaaaaaatctgaaaggaaaccatcagcatctctaaatgacagttattgcacccatcaatggaagagtggacagttgcttgtcatygcgttatgctacttcagtgaaaacaagaaactaacagggtcaaatacagtgaatcsattctttagcccaaaagagggttatgattctctgtatctctctggaaaagatcaattttccatgaataaacctggtattttagaggacaaatataaatatagctctgtttgatctcattttattacatttaccatgtttaaggaggaggagaaaaaatgtggagagtcagcattctgtcttgccatgctactgcattgtcaatgttgaactggaaaatgtagctgtttcctagaaatattgtaagtctgatttaacaaacatagcaggttagtgagcaataaacagaagtttttattagc

SEQ ID NO: 31989 - DNA, 600 bp, Chicken  19866894254917_1
caacagcaatcaaaagcatatatatacacacacacgtatatgtgagtgtatatacatgtatgcatatataaagatagatgaagaaatgaaacacaagtttaaaaacagactgtagtgcatgcagaggaatcaaattaagtaaatcactcatccctgctgtagatagtaagcactgtggtgaaaactggcctcagccctggagccctggcagtgcagatggggcctgcaagaaaggtttggagacagccttgtgtgaggagggtgctgggtgccacagcccagcagggatgacggcacagscgaggcacacagaggaagctgtcagatgaggaaggaacttctcagcagccaaaatctcgtttccaggatcccgtgctgcattacagcaggttaccagcagaagagactcttttcctgctgcttgaacaaagcctcaagggaactgcagagagcctggcagagacagcctgaatgctccatgcaggaaagcagcctcgtgtcagcgagcagcatggcctgacaccagaaagggtgaacaaagctgagcgctaagcactaagtaacagctctgtggtgactgctggggaaattcccgatgcc

SEQ ID NO: 31990 - DNA, 600 bp, Chicken  19866894254923_1
tctgaggaggctgctttccccatcgtgcccacctcacactttgcaaagaggctgtcagaggcatttagtcacaatcacatctccggaaaatgagaactgagcctgacaaacaggagcgggagagaagggagaagaaacaaatctgtcaatacgtggcagacatcccgttcctccccagcgaccccgaacaccaaggtctgccgctttaaggaacagaaggggaacatctccaaggaacagtttgtacgtggctgagaccagcactgcctccactgggtttgtctttaacagtcaatgaarccaccctcacacttctgctatgaaggaaaacttcagaacaaaaccaaaaaaaacccaaccccaaaagacaaaacacgaagcggccataagcttacctttctgtgtgcccccatctgtccagaggtcagagctccaacagcagcaatgagcagctctacacgagaggcagcagctcagaggcacagaacaccacccagggcatctcctcctgctctgccccagtgagcacacggcctccccacctctccccacggcatcccacagcttctgccaaagccacagagcagctcagcacactaa

SEQ ID NO: 31991 - DNA, 600 bp, Chicken  19866894254929_1
acacagccaagctgtgttacaagctgatctggctggatgagtgctaaacttgaaaaagactgttattactcttgttctgaagccatagatgtatcctccaattagagaaacttgaaacagtgcagaaaagaaaggatggcacaactgtgcaattaaaattctcatctaacctactgaacaagatccaacaaccacagagtgcctaaaattatgtattcagtgttcatatgtggcagtgatagagtacaagaatttgtactagtttggcttttcacatagacatacaaaacaaacatagtstccatgccaagaagagcaagagtatatagcagagggctagaaaacataggcagtcctagtgcctagtcatttgactgaaataaagggatgggcacctgacccagaaggtatagaaatgtctgaaataatgacctggtttccctttytaatattgctattgttaaaatgaagcaatcgctgctgtaaaagggttttctcttcattatttttaccacttgttcttgtggtcctcccaggcaatgaataaaacctgaagaagggcagtctggtgcacaaatgttcttgttatcttaaaggggt

SEQ ID NO: 31992 - DNA, 600 bp, Chicken  19866894254929_2
gtgcaattaaaattctcatctaacctactgaacaagatccaacaaccacagagtgcctaaaattatgtattcagtgttcatatgtggcagtgatagagtacaagaatttgtactagtttggcttttcacatagacatacaaaacaaacatagtstccatgccaagaagagcaagagtatatagcagagggctagaaaacataggcagtcctagtgcctagtcatttgactgaaataaagggatgggcacctgacccagaaggtatagaaatgtctgaaataatgacctggtttccctttytaatattgctattgttaaaatgaagcaatcgctgctgtaaaagggttttctcttcattatttttaccacttgttcttgtggtcctcccaggcaatgaataaaacctgaagaagggcagtctggtgcacaaatgttcttgttatcttaaaggggtcaatggtcaaaggtgaaaaaaattcatagagtagttatgattaaaggtaggattttaaatgcttttgataaaggcttgtaaaacagccaaaagagatcctgcaattttaatgttaagtggcttttgtattggaaaaatgcccaagg

SEQ ID NO: 31993 - DNA, 600 bp, Chicken  19866894254932_1
gaatggatcctggcactggagtaagaaggcataccccgtgacatcctccctggcatagtttgctatggtgtgcaggccttcagggggagatattgctgaaaactgccagcttgttgcagcatcctgagtagggatttgttgagtcactgctgtcactttgtcagccagttctgcatttcctgtattatagtatgtattgctaaccagacttaacacgtcagaccaaccctagccattctatgatctttctgttccttcttttaggtagtgtcaggtgaaatgaagtaatagtatccaaamgggaatggctatacctctctctcaactcaaccctcatagcagttaagagtcaagaaaatttacctttttttttctttcttttctttttttttttttagtagacaatttatattgcaaaagatcctgcctcctaaaacgcttgtgcaggggtaataatctagatcagagcttgtcacgtcttcatcaycatcaatatccaggagtttcaaattccacctgaatattgccagtcatagcagcctgggaatgctgagtattttactcccttcaagatgtcttaaaataagcaccaatagaaaa

SEQ ID NO: 31994 - DNA, 600 bp, Chicken  19866894254932_2
tagtatgtattgctaaccagacttaacacgtcagaccaaccctagccattctatgatctttctgttccttcttttaggtagtgtcaggtgaaatgaagtaatagtatccaaamgggaatggctatacctctctctcaactcaaccctcatagcagttaagagtcaagaaaatttacctttttttttctttcttttctttttttttttttagtagacaatttatattgcaaaagatcctgcctcctaaaacgcttgtgcaggggtaataatctagatcagagcttgtcacgtcttcatcaycatcaatatccaggagtttcaaattccacctgaatattgccagtcatagcagcctgggaatgctgagtattttactcccttcaagatgtcttaaaataagcaccaatagaaaaagcgttcagcactggtctctttctgcaagtcttggctccattttgttaaaagagtttttcttgtcagtgtcctgctgcatcaggtatttcagtgtcttagaattaaattttacaattcactgctgtgacataacgcctatttctcctaaaacaaatacccatatttgctcctgctgactcacctatc

SEQ ID NO: 31995 - DNA, 600 bp, Chicken  19866894254949_1
gttgcaatttattaattatctgtcctattttttagcaatatgttcaggaagttctgtatttgttactcataaacttctaatgaactaaaataaatcattttaatcatcttttttctgtccttggtgcacctggtttctttaaaaagttaatggtcagtttaatatttgtaaaatatatgtatatttaagtagaatgtgattgagttgatttccaacataattacagttacaaaaatacacactggcatatatctcagtacctcattacatctagaatacagacagcatttcctccatccmtctccccacaaacctgcaatgacacagacttgtcaccccaagctaaatcacttaacactgcagtaagaaaacactttgtttgtcatgattgccaaactcttacaagtccttcagtcctctcactgtagataatcaataaaataaactataactaagaatcatttgccctctgcttcttgcacatcacaaggacatggttttcacttcatcctcctccatgacccacaatctttttatctaaacataattgtcagaaatctaatatccaagcagatggagcatctgcaatacttgaaattc

SEQ ID NO: 31996 - DNA, 600 bp, Chicken  19866894254949_2
cttgcacatcacaaggacatggttttcacttcatcctcctccatgacccacaatctttttatctaaacataattgtcagaaatctaatatccaagcagatggagcatctgcaatacttgaaattcgccctacagttatgttcagtgacagtttcacctgagtgaaaataaaacagcttcacaccatctgattctggctaatgtgacagcccttacttgaaagtgaattaacatgaagtttgttacatcacaggaatgaaaattagagcctagagaaaagccaatggtaatttgattccayatcttacaggtgcaaaacaaaaaggatttttcatttcttttacataaaacagaagctaccttggagtgaaaccagacttcaaaagagtgctaagagccggaattctggcccaattaatacactcacctcgtaatgtgtacatcaaaacaaaacagaagaacaccaaagaacagatacagcagaggaaagaaaatgtgacattgtgtttataatactcagtttttacatcctctgattacagtaacatacagtacagtacagtacaatacagtacagtaactgtatgtacatgtgacagaa

SEQ ID NO: 31997 - DNA, 600 bp, Chicken  19866894254969_1
ctcagctcaggcacgcaggtcttatcttgttatacagctgtatttcagatagagcgagataaaaatgacactgttcttcacttgctttacgtttctttccttgtatatccagacagtttggagagctgcttactttgaagtattttctggcaaaacatgtgggagtatgtttctacttttcccttcttttttatgaattaaggtgtagtagctcattcaataatgactgatcagtcaattgggagtgtagaatattggactgttaaacttttgggattaagagatgcaggcagaatgcaytttctagaacatattcatctactgaggaaagaaaataaaaaatctacattgaaaacagtgtcaaatttctamgcatgacaattttatcacttatttaagaaactcatgcaagtcttccagaattactttgtcttccaggaaatagaaaattgcattgcgggacagattcttggtgaggttcaccaaggtggcttcactgactaaatagggttaaattagtttctaattctatttcttctaataattttaagaaaacgtattctttatctaaaatatatcaaaatatatttgctctcaaag

SEQ ID NO: 31998 - DNA, 600 bp, Chicken  19866894254969_2
gttcttcacttgctttacgtttctttccttgtatatccagacagtttggagagctgcttactttgaagtattttctggcaaaacatgtgggagtatgtttctacttttcccttcttttttatgaattaaggtgtagtagctcattcaataatgactgatcagtcaattgggagtgtagaatattggactgttaaacttttgggattaagagatgcaggcagaatgcaytttctagaacatattcatctactgaggaaagaaaataaaaaatctacattgaaaacagtgtcaaatttctamgcatgacaattttatcacttatttaagaaactcatgcaagtcttccagaattactttgtcttccaggaaatagaaaattgcattgcgggacagattcttggtgaggttcaccaaggtggcttcactgactaaatagggttaaattagtttctaattctatttcttctaataattttaagaaaacgtattctttatctaaaatatatcaaaatatatttgctctcaaagaccctttttgccattaaactcaaatttattttgatgtactagatacatacgcaaaagacagattttaaggag

SEQ ID NO: 31999 - DNA, 600 bp, Chicken  19866894254969_3
tgccattaaactcaaatttattttgatgtactagatacatacgcaaaagacagattttaaggagctatttgcagtgcttattgcatcccttaaatgaatgacatgaaagaggaagtttatatatctttccagtgaataccactataaagactgtcaaggacttaaaactttttccctttggaaattcttttatttttggagaatcagatctgttgatttcaaggaccacaacaaatgtttcctctttttccatgtgtttgcagaccaggaactgctctgctaagatgactaaagtcctcytcatattccaggtcatgaatgaactcatcacccgaagtctgtaagacagcaccctatgctgataggctacaagaagacacagagaaaaaatgatttttttttcactcatgtcataattccaagttttcagctcttttgtttcagattaaggatcatgcttgaacatgtcctgtaatgatccactagaaataactgagaattttgcatttgtatctgaagtctgagaaagtatgcacaagctctgtaaggccctggatgacctcaccggcaactcagagtaaaacagaagaaacgatgtga

SEQ ID NO: 32000 - DNA, 600 bp, Chicken  19866894254971_1
agctccttaagttaatcagggcttaatttaaataaacaagctactgaaagattaacagaaatcctcaaagaagcttgaatacagaaacagcctgctcacaaggtcctgggacaagtccatagcagccactgctctggcatgaagctgtgccactgacaccctttctcccctttattggcaccactggtgaaaaatacattttctgaaagaccaaacaaacacttccagctctagttgtgtaaacagcagtgcttgtcccaaccgcgtgtgctgacactgtacatgaggaggagcaggagrgatggttccatgcttgcaatggaaagcagtcagacaaaccctctggaggaagagctgggcctgcctgrgctgaaggccccagcagcaccacccacatctgcaggtacagcagaaatccccctggaagagacactgtgggataaggaaatattaggggtgagagcagcagtcctgcaggtaactcactgcaaccagccaccaacaagcaggcctctttgtgggaagttatcctatatgtatgcataaatgttcacatgttyggcatctaaagaggcaaagctaattatttaagactctcac

SEQ ID NO: 32001 - DNA, 600 bp, Chicken  19866894254971_2
agaagcttgaatacagaaacagcctgctcacaaggtcctgggacaagtccatagcagccactgctctggcatgaagctgtgccactgacaccctttctcccctttattggcaccactggtgaaaaatacattttctgaaagaccaaacaaacacttccagctctagttgtgtaaacagcagtgcttgtcccaaccgcgtgtgctgacactgtacatgaggaggagcaggagrgatggttccatgcttgcaatggaaagcagtcagacaaaccctctggaggaagagctgggcctgcctgrgctgaaggccccagcagcaccacccacatctgcaggtacagcagaaatccccctggaagagacactgtgggataaggaaatattaggggtgagagcagcagtcctgcaggtaactcactgcaaccagccaccaacaagcaggcctctttgtgggaagttatcctatatgtatgcataaatgttcacatgttyggcatctaaagaggcaaagctaattatttaagactctcaccttaggcccagtattgctattttatcatggaggtactaaaggagcaaaccttggtgaacaagtgatgc

SEQ ID NO: 32002 - DNA, 600 bp, Chicken  19866894254971_3
accgcgtgtgctgacactgtacatgaggaggagcaggagrgatggttccatgcttgcaatggaaagcagtcagacaaaccctctggaggaagagctgggcctgcctgrgctgaaggccccagcagcaccacccacatctgcaggtacagcagaaatccccctggaagagacactgtgggataaggaaatattaggggtgagagcagcagtcctgcaggtaactcactgcaaccagccaccaacaagcaggcctctttgtgggaagttatcctatatgtatgcataaatgttcacatgttyggcatctaaagaggcaaagctaattatttaagactctcaccttaggcccagtattgctattttatcatggaggtactaaaggagcaaaccttggtgaacaagtgatgccaggctagaacccatataaagtctctttgggttgacatgctatataaatcaagtccttcattaggttagtcattaattaattctgctgccctataggctttctcttagtgcttccagtaccataactggtacattttcaagtattatcttcctccaattgcaaaaacataatctttgttgtttgccatgaaa

SEQ ID NO: 32003 - DNA, 600 bp, Chicken  19866894254981_1
acaacagttattattagtgttccttaagttcttggggcagaaggaggaaaactgggctcttttgtggagaaaattgcacccttggtggtgatctcttgttctgctctcagaagctggcaaaatatttgtgctctacctgccgcattggctttatctggaatttatatccaggagtgtcaaacctgttgagttttaacactgaagtgaaaaaaggaaaataaaaatgcagctgcagagttagaagcgtgaaagagtctgctaagcacatttgcttacaaaaatgctgcagtctactttacsgtggggccatcagaataattagggatgagtgggtcaggaaatttggctcaccaggctgggcccagcgctggccagttttgagctctaggaggaaaaggtctttcaaatgcaaacacattacagcatttcatatggatgaagttccaggcattatttaagagtctttgtaaattggtctgttgaccatgaatgaaagtatttgaatttggtttgacactgtaatagctagcatgaagctcagttaaatccatagcattacccagccacatacagtagttttaaagccccgaagcactcgat

SEQ ID NO: 32004 - DNA, 600 bp, Chicken  19866894254984_1
catccatttacaggttgtttgtatgtgattagtcaatcttggaggcaaggcccagacaggagcagcatgtgtttattaaaccatcagaggaaggtgttgaaggctcctggaagctgtggctgagaagagtcagcaaactcttctgctattgatcagcgatttagccggcctgtgctcattgcaatgtctctctgccatgtgctaatgagcacttatgaacagaactgtaatctagagctgaaatggggagctggtccagctgcacgctgacagacctgagcctccccaggcacggagccrttctgttgcttcccatggttgggtggaactctccttgtgcacagccctgaccggcgggtgaggatcagactgaggctcagctccataagaacgggagggctcaccctggcaataattcagctcagtgattctgttcttctctctcctactcgctttgccctccttckttttctatctctcctaatgaaataactaaatgacaaggactgaattctgcagtaggaaatttttcagcccaggcctcctcccaggataatctattatcttcacaaattactgcagacagttctttactgttta

SEQ ID NO: 32005 - DNA, 600 bp, Chicken  19866894254984_2
gcctgtgctcattgcaatgtctctctgccatgtgctaatgagcacttatgaacagaactgtaatctagagctgaaatggggagctggtccagctgcacgctgacagacctgagcctccccaggcacggagccrttctgttgcttcccatggttgggtggaactctccttgtgcacagccctgaccggcgggtgaggatcagactgaggctcagctccataagaacgggagggctcaccctggcaataattcagctcagtgattctgttcttctctctcctactcgctttgccctccttckttttctatctctcctaatgaaataactaaatgacaaggactgaattctgcagtaggaaatttttcagcccaggcctcctcccaggataatctattatcttcacaaattactgcagacagttctttactgtttaaaaccttttatccaaataaatgcataaacctttaggaagggagggagggtggggagaagaaggaaatcagcattttgcatgaaaaccaccttcttccattggctaaaaaaataaggttatttagaaaaaaaaaccctgaaagaagagaraaagaatgagcccagggg

SEQ ID NO: 32006 - DNA, 600 bp, Chicken  19866894254984_3
tcgctttgccctccttckttttctatctctcctaatgaaataactaaatgacaaggactgaattctgcagtaggaaatttttcagcccaggcctcctcccaggataatctattatcttcacaaattactgcagacagttctttactgtttaaaaccttttatccaaataaatgcataaacctttaggaagggagggagggtggggagaagaaggaaatcagcattttgcatgaaaaccaccttcttccattggctaaaaaaataaggttatttagaaaaaaaaaccctgaaagaagagaraaagaatgagcccaggggaacagaaagtggtgatctgcaatggattccattagcgtctccccctttaaatattacaagtgtttgttctccgcagcctgacaaatatctcgctgtgttgagactgaaaattgataagccatgcaacatccatctccttccgagctgcagcctccctgcaagctcatcacttygggatgggcaccgcgttcaggagctgctggggcgatgccacgtcgrgctgcaccctgacagcctgggagcactgcagtgcctcagcgccctgattggaaacaacatctt

SEQ ID NO: 32007 - DNA, 600 bp, Chicken  19866894254984_4
gagggagggtggggagaagaaggaaatcagcattttgcatgaaaaccaccttcttccattggctaaaaaaataaggttatttagaaaaaaaaaccctgaaagaagagaraaagaatgagcccaggggaacagaaagtggtgatctgcaatggattccattagcgtctccccctttaaatattacaagtgtttgttctccgcagcctgacaaatatctcgctgtgttgagactgaaaattgataagccatgcaacatccatctccttccgagctgcagcctccctgcaagctcatcacttygggatgggcaccgcgttcaggagctgctggggcgatgccacgtcgrgctgcaccctgacagcctgggagcactgcagtgcctcagcgccctgattggaaacaacatcttccttatacccgatcgaaacctatcctctgttagtttgaaaccatttcctcttgtcctatcacaacagaccctgctgtggagtccccttctttcttaaagcccccctttggataacgggatgccacagtgaggtctccctggagccctctctcccccaggctgcacggcccagctcacagcctgtcctcata

SEQ ID NO: 32008 - DNA, 600 bp, Chicken  19866894254984_5
caccttcttccattggctaaaaaaataaggttatttagaaaaaaaaaccctgaaagaagagaraaagaatgagcccaggggaacagaaagtggtgatctgcaatggattccattagcgtctccccctttaaatattacaagtgtttgttctccgcagcctgacaaatatctcgctgtgttgagactgaaaattgataagccatgcaacatccatctccttccgagctgcagcctccctgcaagctcatcacttygggatgggcaccgcgttcaggagctgctggggcgatgccacgtcgrgctgcaccctgacagcctgggagcactgcagtgcctcagcgccctgattggaaacaacatcttccttatacccgatcgaaacctatcctctgttagtttgaaaccatttcctcttgtcctatcacaacagaccctgctgtggagtccccttctttcttaaagcccccctttggataacgggatgccacagtgaggtctccctggagccctctctcccccaggctgcacggcccagctcacagcctgtcctcatagggaggtgttccaaccctgggatcatttttgtggccctcctctgga

SEQ ID NO: 32009 - DNA, 600 bp, Chicken  19866894254985_1
tgatcttacagaggtaccactggcattgcttattggctcagctctggccagcagcaggtcccttttgtaaacaattgcaagctggctctgtctgatatggatgcagtttatggtgtcttttcatagtccaaccttaaagccactttacgactaaagctaactaatactctcagcaacataataaggaatgaacaggaaagcagagtattgaattttgcagttctagatatgtgatagctgagctatcacgtagacagaaagttcctttgaatgctggtttaaaatcctctgctgtggaartagaggggaaaccagggcccgatctagacgtctgcctcagtcaagagtatttacacaaatgctctcttacagcagagtagcagcttcttcaaggcctttcacagccttctgtgaattcaaacacagcctgtgggggaatatccatacagacaggaagaagttgccagcaagcaagctaataaaaatgcaagctacatcccattgatttctagggcaaacctagatctttctatgtaactaatcaaaatatacctttattcctgcaaaacttcacccagtactttatctgtccctgaggta

SEQ ID NO: 32010 - DNA, 597 bp, Chicken  19866894254986_1
aagtagttgttcacctctgctcatgaatatgggcagtatcatgatgagtattttctaactctgggccacctctccaagttacaaccctgccattcagaatgggatgcaaatagatttttctctcagctgtgagggcattctcttagcaactaccccaaatacagagaagtaccaagaaggtatcttgaatgttctttttgctcccattaataccatcaaacaattggaaaacaattggacaagaggcaacttcttaacgatggcaagcacttgtttgggaacacaccttctgaagaaacraaacattagtttacaaattacagtggaaatgggatgtgtcccagtgaaatccaatccctgcaatatcaaataagaaagaccactgaaaaagataaagtcacatggttaaactttctcccatcctttaaaataattttgaaataacatatcactattactggaaaattgattttgtaaaaccattaacattgtgtttcttgctagtgtttgttctgattaaactctatcccctccccctttttcctaatctcttagcagtcctttctggttgtcataactagtcagtataccaaagtt

SEQ ID NO: 32011 - DNA, 428 bp, Chicken  19866894254989_1
catctcgaagtggtaagcatactgttgtgcttcacaggaaggttttgatgttaacaggtaacggggttttatcagcaggcgttcaactgagtcacagtgagggaaaatgaaatccagatgtgattctgaccttaagtgcagaaggaaagctgatgcagtcaacaggtttccctacactgtcgctgtggtgataaactagaacatagctttctaagaggaaaaatgtattttaaatagccctgcaattcctaagaacccgggcatgctttctagcgctgtaagagatttcagttactgttyatgtggccaaagctgataaatcattttctgttcttaaaagtaaactcttctacaaatatcatgtatttgagctatcatctgtggtagtatattatagattcagaagtcagtttgaagtcttattgagg

SEQ ID NO: 32012 - DNA, 599 bp, Chicken  19866894254996_1
  misc_feature (1)..(78): n is any nucleotide
nnnnnnnnnnnnnnnnnnnnnnnnnnnnnnnnnnnnnnnnnnnnnnnnnnnnnnnnnnnnnnnnnnnnnnnnnnnnnngaattggggtgcagtgagcatctatccgacagcagcagcacagccatgtgtatgtacgtgtgcgtatggatgcatgcacacatctgtcacctggaggctatccatagcaccaaagccagcccccagccatgcacacgtagagctggggcaggatgtgcactgtggggctctgtatcactgtccttccttgatttcatcccagtgaaaccagtccttcttgcrgcccacatatgggaaccttgcagtcattcagcccctgcgcggccctcagtgtttttgcagcagctttgccaaatggacattcactgtggaaggggtagaaaatccttcaagggaaccgctccagctcgtgccccagcagcagagcatgggtgcaggagggacccaaggagtgctttgctgtgtcgggaagggcgtgtggggctgtggatcactgctgacttcagcacatcccctcgctgcctgcagcccctaatcctccctacgtgcagcctcacagacggccccaggttgggcagagc

SEQ ID NO: 32013 - DNA, 600 bp, Chicken  19866894254999_1
cctgagacggctatctccctcgagataagcctacacagaacactgcttcctggccattaaactctggcttatctccctcttgttgcccctgaccttgtccatctgtgtccctcagacaaaggatttcaccacccttgaccaggacttgcttggacttgttcatctgtgtccctcagaaagcttttagacagtgatgcaaaagaataatctattacagtgatatgttttgtcagtggtagtggaggcagtgcgtcatctccactggagcagatttttatgagtacattttatgagcacaayatgaaagctcttcctcatcactggtgaaaatgcctaactaatggtggagacagtgtagaaaaatactgttttgtagctggcaatttgytctattcagtagtgttattgtgctcttttttttttctttttatttttttttccagaagtagtagtttccatggaaataaatgggagacattattttcagagcaacattcatgtttcccccttttttagacttttatattggcatttgtctatttgtgaaacttaagtaaaacccataattttcttcccagataaattacagaagtaacacaa

SEQ ID NO: 32014 - DNA, 600 bp, Chicken  19866894254999_2
ctgaccttgtccatctgtgtccctcagacaaaggatttcaccacccttgaccaggacttgcttggacttgttcatctgtgtccctcagaaagcttttagacagtgatgcaaaagaataatctattacagtgatatgttttgtcagtggtagtggaggcagtgcgtcatctccactggagcagatttttatgagtacattttatgagcacaayatgaaagctcttcctcatcactggtgaaaatgcctaactaatggtggagacagtgtagaaaaatactgttttgtagctggcaatttgytctattcagtagtgttattgtgctcttttttttttctttttatttttttttccagaagtagtagtttccatggaaataaatgggagacattattttcagagcaacattcatgtttcccccttttttagacttttatattggcatttgtctatttgtgaaacttaagtaaaacccataattttcttcccagataaattacagaagtaacacaaaataagcataaaaatgtatttaggatcttcaggctgtttcaattagtttccatgtgaccccaaaaatctttacttcaaaactacatga

SEQ ID NO: 32015 - DNA, 600 bp, Chicken  19866894255002_1
ttttttttttccctcccaaaactgtgttgcagctgtattaataatgctctgtagctttcatgttggcaaatctttgggtactcggcatgaagcaccaaactccctgttgtcaggtcacattatctccaggatttcttacaggcaaattgtgtcccgaatgctctgcatgattcaccaaaaaaaggtctttctccatgtaaagcatcatcttccattaagcaggaaaaacaaaccactgcatgcaaatgatgtgaacacgtggcttatgaataagcagaacaactttaggaaaatcacctyagagcttggcaaacaacaataacacaatcagatcagtactcttgatcttccgagctcaaagcaagtggtcttctcttggtgaaaaggaggaacagctcgtggcttgttatcagtgatggtaagatggacattgatgccatgaatgtgaagatgcacaaggtgcaagaagtgctcatctcaaatctcagcagggagagggtctctgggccaggacaaggggcagcaggcaaaaggtaggaggctgattagtgatgtgggagctctgtagagatagccctgaataaaattttatcactgtac

SEQ ID NO: 32016 - DNA, 599 bp, Chicken  19866894255013_1
  misc_feature (1)..(36): n is any nucleotide
nnnnnnnnnnnnnnnnnnnnnnnnnnnnnnnnnnnngtctaaaattcccttaatctctgcagtcagatggtttgagggcatcttctgtattttgcaggtttttcattgaaaagctttgtagctgagtggcacctgctgttcattagccttatggcagtactcctgatttagtctccaagtcaaacaaatacataagaacagactgctctttacaagtgcaaactccttctgatatagtaggacagatagcactctaggagactctgaaggcaacagaagggtgctaagattggactaggrtgcaataggactagagggaatggcctcaagttgcaccaggttggaaattaggaaataattctctgaaagagagtggtcaggtgctggaacaggctgcccagggaggtggtggagtcactgtccctggaggtgttcaagaaacatttagatgttgtaacgatggaygtggtttagtgagggaatattggtgataggtggaaggttggactggatgatcttagaggtcttttccaaccttggtgattctgtgcttttatgattctaagatcccatggctaggcccaacatctctgaagagc

SEQ ID NO: 32017 - DNA, 600 bp, Chicken  19866894255013_2
atttagtctccaagtcaaacaaatacataagaacagactgctctttacaagtgcaaactccttctgatatagtaggacagatagcactctaggagactctgaaggcaacagaagggtgctaagattggactaggrtgcaataggactagagggaatggcctcaagttgcaccaggttggaaattaggaaataattctctgaaagagagtggtcaggtgctggaacaggctgcccagggaggtggtggagtcactgtccctggaggtgttcaagaaacatttagatgttgtaacgatggaygtggtttagtgagggaatattggtgataggtggaaggttggactggatgatcttagaggtcttttccaaccttggtgattctgtgcttttatgattctaagatcccatggctaggcccaacatctctgaagagcaaggactgacttgagtctggcaggtaacctagctgcctaaatatggtattgtactcgggctaactgtaccagctaggattgatagcaatgtcagtgcctaattatgcttttcagagtcttggggcaagcttgttttagggctacatcagaagatgtctgtactgtg

SEQ ID NO: 32018 - DNA, 600 bp, Chicken  19866894255015_1
tggggaatggagtttattcctctaagagttggatctctgtgtctttttcttttttcttggcatacttcatttctgtcctctaaaggcactttctttgagcttttcttttgatacaaagcagttttcttttgattgtagggttagtatatcacataatgaaaggtgattttttctccattttttttttttaaatttactactgctttcatgatggatgaacttctagagagttcactttgaataaacagccatgattgaagtttctctggaaatttcatgatcttatgtgtgcagtgcaaraggaatcctgaagctccatagaaractatatgcttcttgtctcaatagttggcagccctttctttccagacaaatttgaaacattaccaaaaatgcaaattattttggcatcagttttgtcttgcagccaaaatatagagggttcaggaaggtgaaagcatttgtcaacactgtaagacaaatcctagatactgctgtagaaagcagatttgacttcatccagttttaacagtatatgctgaagatggcatatgtgatggggatgtatgccttggaaaggcttgaggctgtggaaacccc

SEQ ID NO: 32019 - DNA, 600 bp, Chicken  19866894255015_2
agagttggatctctgtgtctttttcttttttcttggcatacttcatttctgtcctctaaaggcactttctttgagcttttcttttgatacaaagcagttttcttttgattgtagggttagtatatcacataatgaaaggtgattttttctccattttttttttttaaatttactactgctttcatgatggatgaacttctagagagttcactttgaataaacagccatgattgaagtttctctggaaatttcatgatcttatgtgtgcagtgcaaraggaatcctgaagctccatagaaractatatgcttcttgtctcaatagttggcagccctttctttccagacaaatttgaaacattaccaaaaatgcaaattattttggcatcagttttgtcttgcagccaaaatatagagggttcaggaaggtgaaagcatttgtcaacactgtaagacaaatcctagatactgctgtagaaagcagatttgacttcatccagttttaacagtatatgctgaagatggcatatgtgatggggatgtatgccttggaaaggcttgaggctgtggaaacccctgtgcttccctacaggcaatagac

SEQ ID NO: 32020 - DNA, 600 bp, Chicken  19866894255015_3
tatttagagactgggaagttctgaggttgttttattgtttaaatattgcatcagaaagccagtgtttaaaacagatctgtttttggctgctcgggaaaggagggagccagtgaaaaaactgagctgtcagatggtgagcactcagcctagcttcaggagctgcagaaagcatagcatgctttaagtgttatttaaaaggaaattaaaagcagcagcactacagtgaccctgcaggctgtattttttattgcaccatttctccattggtggatcagagaccgatccagtctctcctggatrtagtagtagctttccgctggcttagttggtttctgaatctggctctgaagagtccttgagactccatctttgccaaaattaaactcattgcccctgttgccctgctcacatagctgcagcttctyatacctttcctgaaggtatcctccatcacatgtgccaagcattagtacattcctcactgttttataagtgaattcctttatgttctgctctggcttctgatctttcaacaaacttgttttgaacagctgctcccaatgctcttgttaacctaccttcaggtaggaagaagtttgt

SEQ ID NO: 32021 - DNA, 545 bp, Chicken  19866894255015_4
gtcagatggtgagcactcagcctagcttcaggagctgcagaaagcatagcatgctttaagtgttatttaaaaggaaattaaaagcagcagcactacagtgaccctgcaggctgtattttttattgcaccatttctccattggtggatcagagaccgatccagtctctcctggatrtagtagtagctttccgctggcttagttggtttctgaatctggctctgaagagtccttgagactccatctttgccaaaattaaactcattgcccctgttgccctgctcacatagctgcagcttctyatacctttcctgaaggtatcctccatcacatgtgccaagcattagtacattcctcactgttttataagtgaattcctttatgttctgctctggcttctgatctttcaacaaacttgttttgaacagctgctcccaatgctcttgttaacctaccttcaggtaggaagaagtttgtcattctcgcaccaaactatttctccttttgccttcccagaagcaagccctgactcatccttacaatttta

SEQ ID NO: 32022 - DNA, 600 bp, Chicken  19866894255016_1
tggccctttgatccgttctgccctgatttctgatacccttctgcagcatccaaaccatcctcctggggtgagcaaggcaggctgaatttttccaacccaaggcaaacttagtgctgtagccctcccttctgtgtgttatgggtaaatatacactcagagagagagcaaaaaattaaagtgatttggggaaattagttggaatcatgcatgcacatttaggatccccaaggcagcagggtagctaaggtgcaaatttcctgtgacgcacacacagatcacaatcttcataaattgagagtyttatttgatagaaaaygtaatacaagactacaaatgcacaagtacatatttttatagagtttctaaaaaacagttgctggtaaaagaagacttctattaaggaacaagaaccacatctttaatcattcttttgttaattttgcaactctcagtttcatcaatcagacgctatagccccaggaattcctctgacagagatgtcctcttgaatctggaagactgtccaattagaatcgaatgaaacttgcaggaaaagtgactgagtacagactctaagtgttagaagaagagaaagaaaga

SEQ ID NO: 32023 - DNA, 600 bp, Chicken  19866894255016_2
tctgccctgatttctgatacccttctgcagcatccaaaccatcctcctggggtgagcaaggcaggctgaatttttccaacccaaggcaaacttagtgctgtagccctcccttctgtgtgttatgggtaaatatacactcagagagagagcaaaaaattaaagtgatttggggaaattagttggaatcatgcatgcacatttaggatccccaaggcagcagggtagctaaggtgcaaatttcctgtgacgcacacacagatcacaatcttcataaattgagagtyttatttgatagaaaaygtaatacaagactacaaatgcacaagtacatatttttatagagtttctaaaaaacagttgctggtaaaagaagacttctattaaggaacaagaaccacatctttaatcattcttttgttaattttgcaactctcagtttcatcaatcagacgctatagccccaggaattcctctgacagagatgtcctcttgaatctggaagactgtccaattagaatcgaatgaaacttgcaggaaaagtgactgagtacagactctaagtgttagaagaagagaaagaaagagggtgagagggtgaag

SEQ ID NO: 32024 - DNA, 600 bp, Chicken  19866894255021_1
tataatattgttaatgtatttaagtaataaaacttgtcttttgtttatgttttttattaaaacataaacaagaatgtgcaacaaaacccataaaaccagtggggtatgtgaccttgcttttgtgaaactaacgcatagatcagattcattggaagtggttgcaattcccagatctctcaggtgtttgttagcaatttttgattttcactcttcctgtacttacttcatccttgaaaaaaattgttcactaatgtacctactggcaaaaagcaatgacataaatgaggcagactgtgcagygaaggatatttctctccagtaagagaggtcttgtaaaagtctggtaaagagacgcaatcaaatttttgattgcaactcaatacattccctttgaaaattcacaagtaatgtatctacactgacttaaaacggagtaacaaataaacagataaattgatcattatttggcaatcttgaaacctattcccaaattcctttatcaaaatggaaagcacagccacatgtctgattttgtttgctgtgccaggctgcatgcaggccaagggctggacatgcctgatataggctgttgttggctgt

SEQ ID NO: 32025 - DNA, 600 bp, Chicken  19866894255029_1
aaaggagtttaaactggctgcagtcagtttttggcagcgtgaagtctgcagctcagtccactgcttaggcagtgagatggtttcagagaacaacggagttagagaaggtttcctgcatagatcaggcacgtctgcaggacttcagctcttactcagtgtatgtccatttctgttcatagaacttagatgccttcagcaaaacatacgtttctgtcataaaaccattgagatcagtggttgtacattcagacagttaatgatttactacatggtaaagtccatggaaaccaggaaggtagsatgtgtggagaaaaattaaatatgatagcaactttcataccggttaggtgacgaatggcwgtagctayggctctgaagtgcttccttgtttctgaaaggctgtgtggttccaacctgtcactaacttgagatgcagaaagctggtgcagagaacctacactctgtatccacagatgtgaatgtggcccagccaacaagtgmagcagtttgcacagaaggaaaagagaaggaggcctcagctaaattctgttggcataagcagtactatgaaagstgggacagaacagcttttccaagtct

SEQ ID NO: 32026 - DNA, 600 bp, Chicken  19866894255029_2
ctgcttaggcagtgagatggtttcagagaacaacggagttagagaaggtttcctgcatagatcaggcacgtctgcaggacttcagctcttactcagtgtatgtccatttctgttcatagaacttagatgccttcagcaaaacatacgtttctgtcataaaaccattgagatcagtggttgtacattcagacagttaatgatttactacatggtaaagtccatggaaaccaggaaggtagsatgtgtggagaaaaattaaatatgatagcaactttcataccggttaggtgacgaatggcwgtagctayggctctgaagtgcttccttgtttctgaaaggctgtgtggttccaacctgtcactaacttgagatgcagaaagctggtgcagagaacctacactctgtatccacagatgtgaatgtggcccagccaacaagtgmagcagtttgcacagaaggaaaagagaaggaggcctcagctaaattctgttggcataagcagtactatgaaagstgggacagaacagcttttccaagtctgtctaagtggttgtgtttgaggctgttcaaagtgatctccagctcttgttcatagcttgc

SEQ ID NO: 32027 - DNA, 600 bp, Chicken  19866894255029_3
gcagtgagatggtttcagagaacaacggagttagagaaggtttcctgcatagatcaggcacgtctgcaggacttcagctcttactcagtgtatgtccatttctgttcatagaacttagatgccttcagcaaaacatacgtttctgtcataaaaccattgagatcagtggttgtacattcagacagttaatgatttactacatggtaaagtccatggaaaccaggaaggtagsatgtgtggagaaaaattaaatatgatagcaactttcataccggttaggtgacgaatggcwgtagctayggctctgaagtgcttccttgtttctgaaaggctgtgtggttccaacctgtcactaacttgagatgcagaaagctggtgcagagaacctacactctgtatccacagatgtgaatgtggcccagccaacaagtgmagcagtttgcacagaaggaaaagagaaggaggcctcagctaaattctgttggcataagcagtactatgaaagstgggacagaacagcttttccaagtctgtctaagtggttgtgtttgaggctgttcaaagtgatctccagctcttgttcatagcttgctttaagtc

SEQ ID NO: 32028 - DNA, 600 bp, Chicken  19866894255029_4
catacgtttctgtcataaaaccattgagatcagtggttgtacattcagacagttaatgatttactacatggtaaagtccatggaaaccaggaaggtagsatgtgtggagaaaaattaaatatgatagcaactttcataccggttaggtgacgaatggcwgtagctayggctctgaagtgcttccttgtttctgaaaggctgtgtggttccaacctgtcactaacttgagatgcagaaagctggtgcagagaacctacactctgtatccacagatgtgaatgtggcccagccaacaagtgmagcagtttgcacagaaggaaaagagaaggaggcctcagctaaattctgttggcataagcagtactatgaaagstgggacagaacagcttttccaagtctgtctaagtggttgtgtttgaggctgttcaaagtgatctccagctcttgttcatagcttgctttaagtcagctctgcatgtttctcatgtgatggagaatgaaacttagcctgactgctgcagtaagtttgcttcttcaccagctgggatatttgtttatgagggtaagatcttcatagctattatgagctgcactaatgaa

SEQ ID NO: 32029 - DNA, 600 bp, Chicken  19866894255029_5
aagtccatggaaaccaggaaggtagsatgtgtggagaaaaattaaatatgatagcaactttcataccggttaggtgacgaatggcwgtagctayggctctgaagtgcttccttgtttctgaaaggctgtgtggttccaacctgtcactaacttgagatgcagaaagctggtgcagagaacctacactctgtatccacagatgtgaatgtggcccagccaacaagtgmagcagtttgcacagaaggaaaagagaaggaggcctcagctaaattctgttggcataagcagtactatgaaagstgggacagaacagcttttccaagtctgtctaagtggttgtgtttgaggctgttcaaagtgatctccagctcttgttcatagcttgctttaagtcagctctgcatgtttctcatgtgatggagaatgaaacttagcctgactgctgcagtaagtttgcttcttcaccagctgggatatttgtttatgagggtaagatcttcatagctattatgagctgcactaatgaaatccagtggaactgattttcatttcacttttttttgtgtgtcaggataaacagacagctcgcttacagttgta

SEQ ID NO: 32030 - DNA, 600 bp, Chicken  19866894255031_1
ccccacatcattattggcttctcctaacatggtatatttgtagctgtttggcattaaaagaatgcacgtgggtaacaaggggcatgagaacactgttctctgtggaaaaggaagtgtaatgcagtgtaaaactaatcgcaaacaccgttacctgaaacagtcatttcatgtttttttcttcatctctgttggaattatgtggcatttacctacaccaggagcatctctgccccactgtttccagaaatagctatcttaataacaaggcatttctgttttagcccgttttccttctacagytgtttccccaaggctgcagagataatattatcagccaatatgtcatgactggtttttaatttgcacaaatgtacgggcaggtaacaggctgtcaggagggctgtgtgtccaatcccatcagcagtgtgaaagcactcggatttaaaacagagaaatgcaaacagtcacacaccagcacacaggtaggagacacccaaaatttgggtggcacaaagagcagcctgatgccatggtcacatccagggatcctctgtttttatgaaaacgtacttacgtgttcacatggcactggtgctgaat

SEQ ID NO: 32031 - DNA, 600 bp, Chicken  19866894255041_1
attgaaagtgaaacttcaaattcctctccgattttaatggtagtctctccagctcagtgcagtactacagaaactgtaaggcagataaatgcacaacttcacatagacagtgaactcggttgtactcatttgggcaagtactggcacagactccacaacacgcttaagtgtgctttctctttcagatgtgttctgacacactaatgacttatggtatctgtagcagaacgttatgtttcagcagactagaatgagaaactgaaggcaactcattcttaatattcacttgactataaaatracccactcacctctcatcagcacttatacagttggtctacatttagcactatctcaccatctctaaatgtccttaaactcctatctcctcttaaaattaatctgtatatgtaataatgaaggcaaacaactattttttgcttatttcagtattttgctctaatttgactgaagtttaaaaagggagaattgctgaagttaaagaaatgccatgtacagttcggtcagcagagggggctcaagactggcactagcacctggtttagaagctcaggtagcgcagtgcagtaccaactatacc

SEQ ID NO: 32032 - DNA, 600 bp, Chicken  19866894255041_2
catttagcactatctcaccatctctaaatgtccttaaactcctatctcctcttaaaattaatctgtatatgtaataatgaaggcaaacaactattttttgcttatttcagtattttgctctaatttgactgaagtttaaaaagggagaattgctgaagttaaagaaatgccatgtacagttcggtcagcagagggggctcaagactggcactagcacctggtttagaagctcaggtagcgcagtgcagtaccaactataccttaacagggtgacctgtatttctctacagacttaccagwccaacagtatttacccccccataggctgaaatgctcaattatatcgagatgtattttaacaatccaggtcgaatagcaaccacagcatttccttctacgcaaaaagttgtatttcatataccttcatatagttaccaccttaagtcatcwgtgagtgccgtgtgaccattcattctccatcatcactatgtatttgtcacacacaataacaatgaataaaagcatccacagatgctattaagaaactgaagattttaatggcttcttatgcactggcacatttatacaggagttgtgctt

SEQ ID NO: 32033 - DNA, 600 bp, Chicken  19866894255041_3
tgctgaagttaaagaaatgccatgtacagttcggtcagcagagggggctcaagactggcactagcacctggtttagaagctcaggtagcgcagtgcagtaccaactataccttaacagggtgacctgtatttctctacagacttaccagwccaacagtatttacccccccataggctgaaatgctcaattatatcgagatgtattttaacaatccaggtcgaatagcaaccacagcatttccttctacgcaaaaagttgtatttcatataccttcatatagttaccaccttaagtcatcwgtgagtgccgtgtgaccattcattctccatcatcactatgtatttgtcacacacaataacaatgaataaaagcatccacagatgctattaagaaactgaagattttaatggcttcttatgcactggcacatttatacaggagttgtgctttattagtcaaatattagcctctattatgaactatcagctgtaaatgtttttcaagatgctcactaatttagaataattatttcattaatttaagcaaactggtgatattggagacttcaacaaccaaaataattcatacagtgaaactgt

SEQ ID NO: 32034 - DNA, 599 bp, Chicken  19866894255052_1
  misc_feature (1)..(138): n is any nucleotide
nnnnnnnnnnnnnnnnnnnnnnnnnnnnnnnnnnnnnnnnnnnnnnnnnnnnnnnnnnnnnnnnnnnnnnnnnnnnnnnnnnnnnnnnnnnnnnnnnnnnnnnnnnnnnnnnnnnnnnnnnnnnnnnnnnnnnnnnnntagtgctgtcaacaccttgctatataaccccaacacacggaaacttttttcttttttaattttttttttcttcttctttattcatgtgaagaatacacatcttacaaatgggactatccttgttgggacttgaaaaattattgtgtctcaggttctgttaaktattaacgcaaatggtactcagtgaatgggtaagaactgaaatgctcaacagactcacatttaggtttcagagtagtaaataagacatatttttaactgcagattctgtgaaattgggtctcagcagacaacagtaaaggaagtcgcttttatgttccatgtgtatgtgagtttagatttcctttcttgtaaaaatagtcatttacaaagcacagtagggacctgcactcatttcttctgtctcagggtgttatttcctggaaaaccaagagaacacatttgttaggctgagatattaa

SEQ ID NO: 32035 - DNA, 600 bp, Chicken  19866894255053_1
aggccaaggctttcactaagacccgttaacacgggacaactgctcccagctactgataagcatacagaagattaaaatgaattactaaaaagattaatggtctgttacttgttcttaagacttttagctgctgtattaatgttctttccactgcactaataacaagtcaatttgacaatcctaattcttggcatattaatgtctagcgatatagtctttaagaagtccttacttacaaagaggatattataggctcatagacatatgaataatcttttcaaaatattattattattattwtaaataatatcatatccaagcaacattcagtattgcacacagcagtatgcctatgcacacaggctgctcatcccactaagaaattttggttttgatgtctttcaaggagttgtttggtgctggatttgaacctatctgttgatatgagtgaatacatttctagatttctaaagcagtcaaaatgacaatgcgtaatacctgcataaggacttttaagaaatacagaaatcattaccctcttccaggtaactttcaacctagttattttcaggtttgtgagatatctaacactaaaaaaag

SEQ ID NO: 32036 - DNA, 600 bp, Chicken  19866894255054_1
cttggggttccttccaacccatgccattctatgattccatgattctatgagtcccgcagatgcaggtggtcagtcaggcagaggcaagcttccttctgtgatgctatgattctatgactcttgacacctgtgatgtttatatcaaagtagaatttgcagtacagtaatagccagtggtctccctacacatgtgcaaactcaaggagtattttaaagacatccttgcccagagcacgttggaggaatactgataaaaataggtgcaaactatctaagaaatgtatgtcagatatctttctrtaaagtaggtggagaaaaagtagcagattgacagagtacccagggaagagtacataactgtgtgattccttgaactttcaggggggcatggtagagtcgtgtgtttcataattcatctaagagtttgtctgcagtcaaggcagagaggagatcacacatcttcaaactcttctgttccattagtagttcctctgatcagcactagtttccctgtgctgcctcactccctctttctgtatacttcatgtgatttaaagagtgaaatttcctgcttccttagctctgagctgcaggggggct

SEQ ID NO: 32037 - DNA, 600 bp, Chicken  19866894255057_1
caagtagactgtgagcctctgtactggatgtctgttactgtctttgctgagcatggggccatctgcttctaatgaaggcttttgctggctctggcaggagcctggcatcagtgcctggccagcagggctgagcccaggcagggacagcatgggtttgtgtatggcatgaggacggccacaatgagggtgaagctgctgcaaaagaggcatctgtaatgtcgccctgcctgctctcccatcccttttctgctctgggagctttcacaggatgcggggcactcatttggctgtggtctctcytcctgttgggctccacttctccctcctgccctgggatttgaacagagaaaatccagcgtctcctgttgtggtcctggctgaggctgagtcagggctatggccagagggtgctcctggctgttgtgcagtgactgatagcacatagcccttgttcctgctcccctccctgtgccagagcagcctgagagtggctcccttcctcctggaagtccttggcaccctagtcctcctctacggtgggcgactagaaaagcagaaaggaagctgtccgtcctccaaggcatgtggcaggggtctccc

SEQ ID NO: 32038 - DNA, 600 bp, Chicken  19866894255057_2
actgatccagcaggctggctgctgagttcacagcagtgttgatctgcatggctggggcaacaagagagtgcgtgagcacaagaagagatgctgctttgcaccccttcttccccagtcttccaggcagaaactcccttaagctttgggcatctctgcaggtagattccctgccttgccctgcaccacttacgtgcacagagcggggaagagcctgtccattgctgggtggactggcagacccgcagggaggtaccctggcgctcgtagcccccatcgcacagatactcgcatgtggcaccrtagttgttgccatcagaggtgcaggacaggtagccatgctgcggaggcttcaggacagggcagcgtctcactgtgaacaaggaggccaggctagattccactcagtctaggggtggaagggcacaggcccagccctgagtgggcagagtggggagtctgcagcccaatggagctcacttcaccttggacacggatcctgaacttgcagctggctcggttgtatgcctggtcataggcagtgtagcggatcacgtgctctccttcagggaactcagacccaggctctggaccccgcagtgt

SEQ ID NO: 32039 - DNA, 600 bp, Chicken  19866894255057_3
atgtaatgttagcatcgagtgaccaggctcagcctcagtcatggagtgctgcaccttccatcagcctgagctttgtggctaacagcaccttggggagcagaaaggcctgcggttcttgagcacagaggtgcaagacaccagcacttggtcaggcactaggggtggtatctgaaggcaaagagaggatggagggtgctcattccagcagtagggatcacaaacagcctgggaggacagtagggtgagaatttacctacacagattggctcgctcccactccagcgcccatcttccatgcaygtgcggcttcggtcgccctccagctggtagccaggcaagcaggtgtagtcacagcgggaatccatctgcaccccrgctgagcacacatatgagccccgcagcaccgctggcagcacgtggcatctgatctctaggccagagagaacaaagaggggagggacgtggctgggctggctgcccggttgtaccagcaggcagagacccagagctggcagtgcccacggggaggccaacaagcccggtgaatgggatgcactcacgtcggcagtacgccatgccagaccagtggcggctgggtaa

SEQ ID NO: 32040 - DNA, 600 bp, Chicken  19866894255057_4
tggctaacagcaccttggggagcagaaaggcctgcggttcttgagcacagaggtgcaagacaccagcacttggtcaggcactaggggtggtatctgaaggcaaagagaggatggagggtgctcattccagcagtagggatcacaaacagcctgggaggacagtagggtgagaatttacctacacagattggctcgctcccactccagcgcccatcttccatgcaygtgcggcttcggtcgccctccagctggtagccaggcaagcaggtgtagtcacagcgggaatccatctgcaccccrgctgagcacacatatgagccccgcagcaccgctggcagcacgtggcatctgatctctaggccagagagaacaaagaggggagggacgtggctgggctggctgcccggttgtaccagcaggcagagacccagagctggcagtgcccacggggaggccaacaagcccggtgaatgggatgcactcacgtcggcagtacgccatgccagaccagtggcggctgggtaagcactgcacagcactgcggcccaccagtcggtagccacgggcacagctcagctcacagcgtgtccccaggctgct

SEQ ID NO: 32041 - DNA, 599 bp, Chicken  19866894255061_1
  misc_feature (1)..(83): n is any nucleotide
nnnnnnnnnnnnnnnnnnnnnnnnnnnnnnnnnnnnnnnnnnnnnnnnnnnnnnnnnnnnnnnnnnnnnnnnnnnnnnnnnnnttcagcacacactgtaagggaacatatgcaggcaagtatttaggcaagatgagaagtttagagcacaccttaaagacattatttggtttcattttgggagtgcatgtaacttctgagagggggcattgctttgagtatgttataccaaaacaaatctgtggccaaacattcaccaattaatcaactgcgggtacaataaagttggcacatgtgatcmcataatagcaatttcttgttttctgctggagcagaatccttggcaatatattgcctttcaataccgccaatgctattaataaaatattgtcaatctgcgaaagtttatgctgattttgaaaggttaaggtgtccactgaggactgatattctcacagaaagcagcttccaacagccatgtctggataggcccacagcaaacaagggactacacactggttttgcatggagtrtttctgtatcctactgtttccactgtaaagcrgagatacaacataaaatcatactatttgttgaact

SEQ ID NO: 32042 - DNA, 600 bp, Chicken  19866894255061_2
acaaatctgtggccaaacattcaccaattaatcaactgcgggtacaataaagttggcacatgtgatcmcataatagcaatttcttgttttctgctggagcagaatccttggcaatatattgcctttcaataccgccaatgctattaataaaatattgtcaatctgcgaaagtttatgctgattttgaaaggttaaggtgtccactgaggactgatattctcacagaaagcagcttccaacagccatgtctggataggcccacagcaaacaagggactacacactggttttgcatggagtrtttctgtatcctactgtttccactgtaaagcrgagatacaacataaaatcatactatttgttgaacttgttattctatgtatgtaatagcaatatatatcctgtagttatgtattttatgttatatagacatacagacaactaaaacatacatatatcacatctatttacagcatcaaacatatttctatttgtatacacagcctttagcaaatgtaggcaaaatatatagcttgctttgaaagtaatgccttctatttatttatttattctatgttaaaactayaagaggtagaaagaa

SEQ ID NO: 32043 - DNA, 600 bp, Chicken  19866894255061_3
caactgcgggtacaataaagttggcacatgtgatcmcataatagcaatttcttgttttctgctggagcagaatccttggcaatatattgcctttcaataccgccaatgctattaataaaatattgtcaatctgcgaaagtttatgctgattttgaaaggttaaggtgtccactgaggactgatattctcacagaaagcagcttccaacagccatgtctggataggcccacagcaaacaagggactacacactggttttgcatggagtrtttctgtatcctactgtttccactgtaaagcrgagatacaacataaaatcatactatttgttgaacttgttattctatgtatgtaatagcaatatatatcctgtagttatgtattttatgttatatagacatacagacaactaaaacatacatatatcacatctatttacagcatcaaacatatttctatttgtatacacagcctttagcaaatgtaggcaaaatatatagcttgctttgaaagtaatgccttctatttatttatttattctatgttaaaactayaagaggtagaaagaacataagaaaactatttgttagagaaaattctc

SEQ ID NO: 32044 - DNA, 600 bp, Chicken  19866894255061_4
gttttgcatggagtrtttctgtatcctactgtttccactgtaaagcrgagatacaacataaaatcatactatttgttgaacttgttattctatgtatgtaatagcaatatatatcctgtagttatgtattttatgttatatagacatacagacaactaaaacatacatatatcacatctatttacagcatcaaacatatttctatttgtatacacagcctttagcaaatgtaggcaaaatatatagcttgctttgaaagtaatgccttctatttatttatttattctatgttaaaactayaagaggtagaaagaacataagaaaactatttgttagagaaaattctcarctatgaaaaactgtttttcagcatagtcaccaccattagctatgtattctagccagaaatgaaagagagcctacatgctgtacttgtaaaaatcttcatggttgtccagaatgctgttgccactgctgaaatgcaactcccatcacctcactgtgctcatatcccctgtttgatctccataaatgttcagcaagcattgatgaatgccaacaggtgccatttttttttccatacagagggattcaatgaca

SEQ ID NO: 32045 - DNA, 600 bp, Chicken  19866894255061_5
gatacaacataaaatcatactatttgttgaacttgttattctatgtatgtaatagcaatatatatcctgtagttatgtattttatgttatatagacatacagacaactaaaacatacatatatcacatctatttacagcatcaaacatatttctatttgtatacacagcctttagcaaatgtaggcaaaatatatagcttgctttgaaagtaatgccttctatttatttatttattctatgttaaaactayaagaggtagaaagaacataagaaaactatttgttagagaaaattctcarctatgaaaaactgtttttcagcatagtcaccaccattagctatgtattctagccagaaatgaaagagagcctacatgctgtacttgtaaaaatcttcatggttgtccagaatgctgttgccactgctgaaatgcaactcccatcacctcactgtgctcatatcccctgtttgatctccataaatgttcagcaagcattgatgaatgccaacaggtgccatttttttttccatacagagggattcaatgacacacacttgctttatctgctcttctatgcgagatgcctttctgtcagact

SEQ ID NO: 32046 - DNA, 600 bp, Chicken  19866894255075_1
tgctttgttctctcctgaattcaaaacctgcctatgaacgagagcaggcttgaactagacctttcgtgctatacttttttctcactctcaaaggattttattaatacttttatcccactgaaaacatttttttgttcatttttgattacaaactctttgttctaaatttcgtggttaccaagcacagaataagttcacaagcaaagacatacatttatgttccagtttgattttcatttgcatttgagcacttccttcagacatccacagcaatctaatgacagcttaggaatgctacayggttaatcactctttgcccctacataacctgtacatattttctaaagcaaatcagaaaattctaagttcctagttttgagacaaaacagtctagctttttaaataaattttgcacgttgagtatgcatgttaatgttctctgaattacttgactctcacctggagatgctgcttgatatataatcttatcaccttctctttctggaacagctgtatgacacactgccatcattgtcaaaaactcacatataataggtgcagtcggctaaaaaaatggcagaaaatgtttaacaatttaat

SEQ ID NO: 32047 - DNA, 600 bp, Chicken  19866894255083_1
ggccccttgcagagaggggcaaagcttttggggtttttgtccttttctttgataccatgctgtaaattggtgtgctgctgtgacagctgaggccaagaaagggttttctgtggtaaggattttgtggtttgctttggagtttgttcatctgtctgtatctgatcaaaacccgtctacttggaaactgcacttgagctggtttgagtgggagataaggcaaagcatgatcctttgggtgatgtgaacaccttcacgactctgcaacctcttagagcctctgctgccagctgtgcattataygtattctttccagtacttgaggggagcttataagcaggagggagrccgacttcttacacrgtctgatagtgataggatggggaatggctttaaactaaaagactagagatttagattagatgtgaggaggaaaatctttactcagagggygttgaagccccggcactgctgcccagagcagtgtgggtgctccatcccygrgggtgctcagggccaggatggatggggccctgggcagcctgagctgggggggcaatggcaagggttggggctgcgggatctttgaggtcccttccagcc

SEQ ID NO: 32048 - DNA, 600 bp, Chicken  19866894255083_2
tctttgataccatgctgtaaattggtgtgctgctgtgacagctgaggccaagaaagggttttctgtggtaaggattttgtggtttgctttggagtttgttcatctgtctgtatctgatcaaaacccgtctacttggaaactgcacttgagctggtttgagtgggagataaggcaaagcatgatcctttgggtgatgtgaacaccttcacgactctgcaacctcttagagcctctgctgccagctgtgcattataygtattctttccagtacttgaggggagcttataagcaggagggagrccgacttcttacacrgtctgatagtgataggatggggaatggctttaaactaaaagactagagatttagattagatgtgaggaggaaaatctttactcagagggygttgaagccccggcactgctgcccagagcagtgtgggtgctccatcccygrgggtgctcagggccaggatggatggggccctgggcagcctgagctgggggggcaatggcaagggttggggctgcgggatctttgaggtcccttccagcccaaccattctgtgattctatggttctgtattacatacaaggcctc

SEQ ID NO: 32049 - DNA, 600 bp, Chicken  19866894255083_3
tgtaaattggtgtgctgctgtgacagctgaggccaagaaagggttttctgtggtaaggattttgtggtttgctttggagtttgttcatctgtctgtatctgatcaaaacccgtctacttggaaactgcacttgagctggtttgagtgggagataaggcaaagcatgatcctttgggtgatgtgaacaccttcacgactctgcaacctcttagagcctctgctgccagctgtgcattataygtattctttccagtacttgaggggagcttataagcaggagggagrccgacttcttacacrgtctgatagtgataggatggggaatggctttaaactaaaagactagagatttagattagatgtgaggaggaaaatctttactcagagggygttgaagccccggcactgctgcccagagcagtgtgggtgctccatcccygrgggtgctcagggccaggatggatggggccctgggcagcctgagctgggggggcaatggcaagggttggggctgcgggatctttgaggtcccttccagcccaaccattctgtgattctatggttctgtattacatacaaggcctcacattatacttactc

SEQ ID NO: 32050 - DNA, 600 bp, Chicken  19866894255083_4
gtctgtatctgatcaaaacccgtctacttggaaactgcacttgagctggtttgagtgggagataaggcaaagcatgatcctttgggtgatgtgaacaccttcacgactctgcaacctcttagagcctctgctgccagctgtgcattataygtattctttccagtacttgaggggagcttataagcaggagggagrccgacttcttacacrgtctgatagtgataggatggggaatggctttaaactaaaagactagagatttagattagatgtgaggaggaaaatctttactcagagggygttgaagccccggcactgctgcccagagcagtgtgggtgctccatcccygrgggtgctcagggccaggatggatggggccctgggcagcctgagctgggggggcaatggcaagggttggggctgcgggatctttgaggtcccttccagcccaaccattctgtgattctatggttctgtattacatacaaggcctcacattatacttactcaaattgatgtcaaatccttacaggctccactgaggacagggcaggcacaagtctgccttgcaggcagcgtagagacattaagacatccat

SEQ ID NO: 32051 - DNA, 600 bp, Chicken  19866894255083_5
tttgagtgggagataaggcaaagcatgatcctttgggtgatgtgaacaccttcacgactctgcaacctcttagagcctctgctgccagctgtgcattataygtattctttccagtacttgaggggagcttataagcaggagggagrccgacttcttacacrgtctgatagtgataggatggggaatggctttaaactaaaagactagagatttagattagatgtgaggaggaaaatctttactcagagggygttgaagccccggcactgctgcccagagcagtgtgggtgctccatcccygrgggtgctcagggccaggatggatggggccctgggcagcctgagctgggggggcaatggcaagggttggggctgcgggatctttgaggtcccttccagcccaaccattctgtgattctatggttctgtattacatacaaggcctcacattatacttactcaaattgatgtcaaatccttacaggctccactgaggacagggcaggcacaagtctgccttgcaggcagcgtagagacattaagacatccatggtctgcttgcagctgagagaggctttgggtactgttgaatccctcctg

SEQ ID NO: 32052 - DNA, 600 bp, Chicken  19866894255083_6
tgagtgggagataaggcaaagcatgatcctttgggtgatgtgaacaccttcacgactctgcaacctcttagagcctctgctgccagctgtgcattataygtattctttccagtacttgaggggagcttataagcaggagggagrccgacttcttacacrgtctgatagtgataggatggggaatggctttaaactaaaagactagagatttagattagatgtgaggaggaaaatctttactcagagggygttgaagccccggcactgctgcccagagcagtgtgggtgctccatcccygrgggtgctcagggccaggatggatggggccctgggcagcctgagctgggggggcaatggcaagggttggggctgcgggatctttgaggtcccttccagcccaaccattctgtgattctatggttctgtattacatacaaggcctcacattatacttactcaaattgatgtcaaatccttacaggctccactgaggacagggcaggcacaagtctgccttgcaggcagcgtagagacattaagacatccatggtctgcttgcagctgagagaggctttgggtactgttgaatccctcctgct

SEQ ID NO: 32053 - DNA, 599 bp, Chicken  19866894255089_1
  misc_feature (1)..(54): n is any nucleotide
nnnnnnnnnnnnnnnnnnnnnnnnnnnnnnnnnnnnnnnnnnnnnnnnnnnnnntctgggttcgtctcagtggtacgtgcctgtgctatttattgcatagcagcaaaagggagcagtcagccaaaacagagggaaagggaagcactgcattagagggaaggaattctcagctgtgtaccacggcacctgagttgggcagagagctctccctgatgacgaggagtccagtcctgcactactgaattgctctgacggagaaaaggtgcagagggacaaactgcctcagggtcgtcttctgtmtgctctgttgctcacyatcgttgtctctgcagtgtcctttggggatagtgactttaayttcacctcaaaatacctctgtttcttcagcgtttgtagcatgccactgctctcttttaaagccagtctttccctaggaaggttttgaaatagaattttttttttccctctgttgcttcctttcctgttgggtcaggattatttgactggggaaaactggttaggaagcctggccaggtagagatgtcacctgacgaacawctgaagagttgctcattgacctctggaaactgccctttgaa

SEQ ID NO: 32054 - DNA, 599 bp, Chicken  19866894255089_2
  misc_feature (1)..(38): n is any nucleotide
nnnnnnnnnnnnnnnnnnnnnnnnnnnnnnnnnnnnnntctgggttcgtctcagtggtacgtgcctgtgctatttattgcatagcagcaaaagggagcagtcagccaaaacagagggaaagggaagcactgcattagagggaaggaattctcagctgtgtaccacggcacctgagttgggcagagagctctccctgatgacgaggagtccagtcctgcactactgaattgctctgacggagaaaaggtgcagagggacaaactgcctcagggtcgtcttctgtmtgctctgttgctcacyatcgttgtctctgcagtgtcctttggggatagtgactttaayttcacctcaaaatacctctgtttcttcagcgtttgtagcatgccactgctctcttttaaagccagtctttccctaggaaggttttgaaatagaattttttttttccctctgttgcttcctttcctgttgggtcaggattatttgactggggaaaactggttaggaagcctggccaggtagagatgtcacctgacgaacawctgaagagttgctcattgacctctggaaactgccctttgaaccaaacaccacttcct

SEQ ID NO: 32055 - DNA, 600 bp, Chicken  19866894255089_3
ggttcgtctcagtggtacgtgcctgtgctatttattgcatagcagcaaaagggagcagtcagccaaaacagagggaaagggaagcactgcattagagggaaggaattctcagctgtgtaccacggcacctgagttgggcagagagctctccctgatgacgaggagtccagtcctgcactactgaattgctctgacggagaaaaggtgcagagggacaaactgcctcagggtcgtcttctgtmtgctctgttgctcacyatcgttgtctctgcagtgtcctttggggatagtgactttaayttcacctcaaaatacctctgtttcttcagcgtttgtagcatgccactgctctcttttaaagccagtctttccctaggaaggttttgaaatagaattttttttttccctctgttgcttcctttcctgttgggtcaggattatttgactggggaaaactggttaggaagcctggccaggtagagatgtcacctgacgaacawctgaagagttgctcattgacctctggaaactgccctttgaaccaaacaccacttcctcataccttgggcatttataactgatgttggctgkcaaggtgga

SEQ ID NO: 32056 - DNA, 600 bp, Chicken  19866894255089_4
aaaggtgcagagggacaaactgcctcagggtcgtcttctgtmtgctctgttgctcacyatcgttgtctctgcagtgtcctttggggatagtgactttaayttcacctcaaaatacctctgtttcttcagcgtttgtagcatgccactgctctcttttaaagccagtctttccctaggaaggttttgaaatagaattttttttttccctctgttgcttcctttcctgttgggtcaggattatttgactggggaaaactggttaggaagcctggccaggtagagatgtcacctgacgaacawctgaagagttgctcattgacctctggaaactgccctttgaaccaaacaccacttcctcataccttgggcatttataactgatgttggctgkcaaggtggagtcgaaattgaggctgggacttggtatggatctgatccccttcaacagtctggaaatcaagactacacaccttttggcattttgctatttttgaggctttgaatatttgataataacctgagtactcatgaataatctgaattattcatgaatttagggtgagctttagagccaatctgtacttactctagcctagtcga

SEQ ID NO: 32057 - DNA, 600 bp, Chicken  19866894255089_5
gactttaayttcacctcaaaatacctctgtttcttcagcgtttgtagcatgccactgctctcttttaaagccagtctttccctaggaaggttttgaaatagaattttttttttccctctgttgcttcctttcctgttgggtcaggattatttgactggggaaaactggttaggaagcctggccaggtagagatgtcacctgacgaacawctgaagagttgctcattgacctctggaaactgccctttgaaccaaacaccacttcctcataccttgggcatttataactgatgttggctgkcaaggtggagtcgaaattgaggctgggacttggtatggatctgatccccttcaacagtctggaaatcaagactacacaccttttggcattttgctatttttgaggctttgaatatttgataataacctgagtactcatgaataatctgaattattcatgaatttagggtgagctttagagccaatctgtacttactctagcctagtcgatgtgattctggccatcacaagcagaagtctgtgggcttggtactgacccaacagagcagggtctcaggatggcttacagcttgtcatggcc

SEQ ID NO: 32058 - DNA, 600 bp, Chicken  19866894255090_1
aactgctgcagttttccagtttgttcctaaagctgtggaggggaggaatgttacactgatgtctaacagctgcagctaaaaggctgatgggtggaagctgcattttctgttgtttggctgaagcacagcagcatcacagcaagcaggattcaatccattgctggcttacagagacccagacaggctgtgctcagcctgggatgtcagctgtccaaagcaacacatactcatgcaggcaaacatttatgtgtgcaatagctcctctgtgcagaaagagggctgaacgtttacaaacaactrttcctgcagatggaacctcgtaagctcaactgtggccattttwccttcacctccacaaggtatgctgaaacttccacttgctggaaaagccaatgccaaaactgcacgttataccaygcaagagtttctcatgtatgtctgaactaacacgaactgcatttgaacaccagtgttggtgtgcccacctccctgcagcagaggcttctctaagtgctgcatgctgactacccaacacacagaggcactcaagccttgttcygayggatgccgatgacttcagcatggaagctggaaataaag

SEQ ID NO: 32059 - DNA, 600 bp, Chicken  19866894255090_2
aggaatgttacactgatgtctaacagctgcagctaaaaggctgatgggtggaagctgcattttctgttgtttggctgaagcacagcagcatcacagcaagcaggattcaatccattgctggcttacagagacccagacaggctgtgctcagcctgggatgtcagctgtccaaagcaacacatactcatgcaggcaaacatttatgtgtgcaatagctcctctgtgcagaaagagggctgaacgtttacaaacaactrttcctgcagatggaacctcgtaagctcaactgtggccattttwccttcacctccacaaggtatgctgaaacttccacttgctggaaaagccaatgccaaaactgcacgttataccaygcaagagtttctcatgtatgtctgaactaacacgaactgcatttgaacaccagtgttggtgtgcccacctccctgcagcagaggcttctctaagtgctgcatgctgactacccaacacacagaggcactcaagccttgttcygayggatgccgatgacttcagcatggaagctggaaataaaggcaaaaaagtctcctctcctgctgcaatgttcaactaccaaag

SEQ ID NO: 32060 - DNA, 559 bp, Chicken  19866894255090_3
ctgaagcacagcagcatcacagcaagcaggattcaatccattgctggcttacagagacccagacaggctgtgctcagcctgggatgtcagctgtccaaagcaacacatactcatgcaggcaaacatttatgtgtgcaatagctcctctgtgcagaaagagggctgaacgtttacaaacaactrttcctgcagatggaacctcgtaagctcaactgtggccattttwccttcacctccacaaggtatgctgaaacttccacttgctggaaaagccaatgccaaaactgcacgttataccaygcaagagtttctcatgtatgtctgaactaacacgaactgcatttgaacaccagtgttggtgtgcccacctccctgcagcagaggcttctctaagtgctgcatgctgactacccaacacacagaggcactcaagccttgttcygayggatgccgatgacttcagcatggaagctggaaataaaggcaaaaaagtctcctctcctgctgcaatgttcaactaccaaagcaatgatttaagttactcatcagccaaagactt

SEQ ID NO: 32061 - DNA, 417 bp, Chicken  19866894255090_4
tcctctgtgcagaaagagggctgaacgtttacaaacaactrttcctgcagatggaacctcgtaagctcaactgtggccattttwccttcacctccacaaggtatgctgaaacttccacttgctggaaaagccaatgccaaaactgcacgttataccaygcaagagtttctcatgtatgtctgaactaacacgaactgcatttgaacaccagtgttggtgtgcccacctccctgcagcagaggcttctctaagtgctgcatgctgactacccaacacacagaggcactcaagccttgttcygayggatgccgatgacttcagcatggaagctggaaataaaggcaaaaaagtctcctctcctgctgcaatgttcaactaccaaagcaatgatttaagttactcatcagccaaagactt

SEQ ID NO: 32062 - DNA, 414 bp, Chicken  19866894255090_5
tctgtgcagaaagagggctgaacgtttacaaacaactrttcctgcagatggaacctcgtaagctcaactgtggccattttwccttcacctccacaaggtatgctgaaacttccacttgctggaaaagccaatgccaaaactgcacgttataccaygcaagagtttctcatgtatgtctgaactaacacgaactgcatttgaacaccagtgttggtgtgcccacctccctgcagcagaggcttctctaagtgctgcatgctgactacccaacacacagaggcactcaagccttgttcygayggatgccgatgacttcagcatggaagctggaaataaaggcaaaaaagtctcctctcctgctgcaatgttcaactaccaaagcaatgatttaagttactcatcagccaaagactt

SEQ ID NO: 32063 - DNA, 599 bp, Chicken  19866894255093_1
  misc_feature (1)..(39): n is any nucleotide
nnnnnnnnnnnnnnnnnnnnnnnnnnnnnnnnnnnnnnntcctgcagatggaacctcgtaagctcaactgtggccatttttccttcacctccacaaggtatgctgaaacttccacttgctggaaaagccaatgccaaaactgcacgttataccatgcaagagtttctcatgtatgcctgaactaacacgaactgcatttgaacaccagtgctggtgtgcccacctccctgcagcagaggcttctctaagtgctgcatgctgactacccaacacacagaggcactcaagccttgttctgayggatgccgatgacttcagcatggaagctggaaataaaggcaaaaaagtctcctctcctgctgcaatgttcaactaccaaagcaatgatttaagttactcatcagccaaagacttcaggttaacacaaggtaacacctacagagattagaaatgctttcaggcttttctggattagtgcaggcaagcccttcctctttgcccctcccgagccctgtggttctggacatccagaaaagtcagaacacaaaggacatcaccccaagtatctgtgctgagcatacagggtaaacaawcaatca

SEQ ID NO: 32064 - DNA, 600 bp, Chicken  19866894255093_2
ttctgayggatgccgatgacttcagcatggaagctggaaataaaggcaaaaaagtctcctctcctgctgcaatgttcaactaccaaagcaatgatttaagttactcatcagccaaagacttcaggttaacacaaggtaacacctacagagattagaaatgctttcaggcttttctggattagtgcaggcaagcccttcctctttgcccctcccgagccctgtggttctggacatccagaaaagtcagaacacaaaggacatcaccccaagtatctgtgctgagcatacagggtaaacaawcaatcaataggaaagtgagatcagcaaaagtcctttcagttttaaacaaattgaaatctaaatagtacaaataagtgttttaaattacttatcccaatatagacctttgtcagtattttattgcagtaaaattctattgccagggccccttattgcaacgtcagttgtaaagcctgctgagtgacgcctgctccaggaagagttctgctttgaacctgatgcagtctgcagtgtgagtttcgatgagcagaacaggacccagccagcacgcagtttctgatggtgagctgtcactgcaag

SEQ ID NO: 32065 - DNA, 533 bp, Chicken  19866894255098_1
gcccctaggtactacatctacccttttcttaaacatctgcagggaggatgactctgtgggcagcctgggcatgcctaaacactcttcctgagaataattttttcctaatatcaaatatgaacctcccctggtgcaacttgaggccattccctcttcacctgtgactgttacctgggagaagaagctcacccgtagaacttcctttcaggtagttgtagagagtgctatggtctcccctgagcctcctcttctccaacctaaacaatcccagttcccttagctgctccccattagacttgygctccagaaccttcagcagcttcattgccctacccttgatacattccaggactgagccttatctgccttcctccttatgactttttgacatcctgctgagcagctcttgtgctttattttcattgtttagaactggcactttttgttttcagtttgctgtactgtgcccctgaaatatcaaagtacttggaatttcatattcagccccttttcatcagcatatactttttctc

SEQ ID NO: 32066 - DNA, 599 bp, Chicken  19866894255099_1
  misc_feature (1)..(8): n is any nucleotide
nnnnnnnnaaacctgaatagagaatatattactttttaatttcctggacaaggtcacacacaatcggcatgatccaaaagtcactataattaaatctactccatttcttaggccagtgacctaaatatgacatgcataattctcctagatgattaatatagttttcattcattatgtttcttagttattacttcctatgtcaaatgatgaaatgattattaatactacatgtcaagactgacataatatttgaaaatgtgttaataaccatgacataagagatggagtaaaatcagcacktcacatactatgcatgcaaaatatatgcaattcaataatgaagtatgattctcttccgctactgtcattaaggctaccgtatttgacaccaaaagctgttcattttccaaaagccaaaaayatacacattattgctttaatgtatcactcttctttttctaaaaaatcaatttactacctttctcagctttattttatgaccttattacaatattaatgtctgactcctgtgacccttatatcggtttgcacaaaagtatctggtgcatttattgcctgtatcatctttttttaataga

SEQ ID NO: 32067 - DNA, 600 bp, Chicken  19866894255099_2
taaatatgacatgcataattctcctagatgattaatatagttttcattcattatgtttcttagttattacttcctatgtcaaatgatgaaatgattattaatactacatgtcaagactgacataatatttgaaaatgtgttaataaccatgacataagagatggagtaaaatcagcacktcacatactatgcatgcaaaatatatgcaattcaataatgaagtatgattctcttccgctactgtcattaaggctaccgtatttgacaccaaaagctgttcattttccaaaagccaaaaayatacacattattgctttaatgtatcactcttctttttctaaaaaatcaatttactacctttctcagctttattttatgaccttattacaatattaatgtctgactcctgtgacccttatatcggtttgcacaaaagtatctggtgcatttattgcctgtatcatctttttttaatagatagaacagttatgtctaaaacaggtataattgcaatttctttccttccacagaaagttccttcagtttcttyttttctcaataaatgctctatattcacatgctagtaagaggttccctgta

SEQ ID NO: 32068 - DNA, 600 bp, Chicken  19866894255099_3
ggctaccgtatttgacaccaaaagctgttcattttccaaaagccaaaaayatacacattattgctttaatgtatcactcttctttttctaaaaaatcaatttactacctttctcagctttattttatgaccttattacaatattaatgtctgactcctgtgacccttatatcggtttgcacaaaagtatctggtgcatttattgcctgtatcatctttttttaatagatagaacagttatgtctaaaacaggtataattgcaatttctttccttccacagaaagttccttcagtttcttyttttctcaataaatgctctatattcacatgctagtaagaggttccctgtattcccttgcgctagagtttccacacctgactttcctgttctcatcttctcatcaaacaraaggacataaatgtaatattcaaagagttatctgaaagatctttttccttcctttgccttattcattactacgcatgctttttctttctgggagacaagtagtttgcagcatgaacacattgcatataattcagaggaggggcacagaaaaaaataggtttgtgttgctccaaaggtgtagccttctgaca

SEQ ID NO: 32069 - DNA, 600 bp, Chicken  19866894255099_4
ttctcagctttattttatgaccttattacaatattaatgtctgactcctgtgacccttatatcggtttgcacaaaagtatctggtgcatttattgcctgtatcatctttttttaatagatagaacagttatgtctaaaacaggtataattgcaatttctttccttccacagaaagttccttcagtttcttyttttctcaataaatgctctatattcacatgctagtaagaggttccctgtattcccttgcgctagagtttccacacctgactttcctgttctcatcttctcatcaaacaraaggacataaatgtaatattcaaagagttatctgaaagatctttttccttcctttgccttattcattactacgcatgctttttctttctgggagacaagtagtttgcagcatgaacacattgcatataattcagaggaggggcacagaaaaaaataggtttgtgttgctccaaaggtgtagccttctgacatcctgtataaaattgcaaagatgtcttaaactgtctctgataacaaatacatatttttatttcatcataatacttattctacgatttacatagcaatgccatatacaca

SEQ ID NO: 32070 - DNA, 498 bp, Chicken  19866894255100_1
caggtttgctgcaaggcactgtggtggctttggctccttctcagatggagaggctttgctttcctctgctttctgccccgggggagctgagccaggcggttctgcatgtattgcaattatgcctttagtgcacagggaaggcagagtggtttgtgtgcttccatcagctttagagtcacagaatcatggaggctgagatccccaaccccaccaccccctgtgcccactgcccacagccctcagtgccacatctcacggctctgggacacccccaaggatggtgacccccccccctccctstgcagctgtgcagtgctgcaccactcactggagaagagattgttcctcatatccaaccygaatgtgacatgactttgttctccagctcttacagcaccttgtctgatgtgtagctgagtgccaatggggtttaggattctcatgtatgtggtgctctattttgagtttctttactaccaattgactcatttctatgat

SEQ ID NO: 32071 - DNA, 439 bp, Chicken  19866894255100_2
tttcctctgctttctgccccgggggagctgagccaggcggttctgcatgtattgcaattatgcctttagtgcacagggaaggcagagtggtttgtgtgcttccatcagctttagagtcacagaatcatggaggctgagatccccaaccccaccaccccctgtgcccactgcccacagccctcagtgccacatctcacggctctgggacacccccaaggatggtgacccccccccctccctstgcagctgtgcagtgctgcaccactcactggagaagagattgttcctcatatccaaccygaatgtgacatgactttgttctccagctcttacagcaccttgtctgatgtgtagctgagtgccaatggggtttaggattctcatgtatgtggtgctctattttgagtttctttactaccaattgactcatttctatgat

SEQ ID NO: 32072 - DNA, 599 bp, Chicken  19866894255112_1
  misc_feature (1)..(132): n is any nucleotide
nnnnnnnnnnnnnnnnnnnnnnnnnnnnnnnnnnnnnnnnnnnnnnnnnnnnnnnnnnnnnnnnnnnnnnnnnnnnnnnnnnnnnnnnnnnnnnnnnnnnnnnnnnnnnnnnnnnnnnnnnnnnnnnnnnnnccagggctcagccctgccaagggctctccccgacagtcccacacctccgtgacaggccaggaggtgctcagcagcccccaagggtgtgaaggggacccccagcctcagcccacacgtggtgcattgggaagggacggggagatgacggaagaggtttcccacgggacrggaggtggtcgggaatgggatacccaatggagctccccatgggatggcaggaggccaggagcacgacgcgcaacgaagagcccatcccgctcttggacayggggagatggagacgcacctgtggcacggccccaaccccactcaccagcgcactgtgggagcttacccttgccgccttggatgaatagggatcctcaaagagcgcccacatcctgggctgccaattccgacagcagccgccccctccggcagcccccgccgcccccggcgccctgtcctccatgcccaggcgttgaagg

SEQ ID NO: 32073 - DNA, 599 bp, Chicken  19866894255112_2
  misc_feature (1)..(32): n is any nucleotide
nnnnnnnnnnnnnnnnnnnnnnnnnnnnnnnnccagggctcagccctgccaagggctctccccgacagtcccacacctccgtgacaggccaggaggtgctcagcagcccccaagggtgtgaaggggacccccagcctcagcccacacgtggtgcattgggaagggacggggagatgacggaagaggtttcccacgggacrggaggtggtcgggaatgggatacccaatggagctccccatgggatggcaggaggccaggagcacgacgcgcaacgaagagcccatcccgctcttggacayggggagatggagacgcacctgtggcacggccccaaccccactcaccagcgcactgtgggagcttacccttgccgccttggatgaatagggatcctcaaagagcgcccacatcctgggctgccaattccgacagcagccgccccctccggcagcccccgccgcccccggcgccctgtcctccatgcccaggcgttgaagggccatctccctccccccttcctcttcgggctcctctcctccggcccctcctccgggctcaggactctcgaagatatccagggcctcttcagcatcgcggt

SEQ ID NO: 32074 - DNA, 599 bp, Chicken  19866894255118_1
  misc_feature (1)..(1): n is any nucleotide
nacaaaagatctttcattcaatagctcatacttcgcaaaactataatttatagaacgttggtaacacacgcagcattgtagttaacatcagcctagtggccactaagtatttattatcctcaaaaggctggccagatctttaatatccacagagttctctcctgtatacaacatttgttctagctgcagagatttagtagaatttgttaaccaactgtaactacttgccacccataaaactgacggaaagaagggaaaaaacagctagtgggatccaaagacaaacacttttacttaaarctctgtgaagagaaatcccgctctctccatatgtttttttcttggctcttaatcatcttttcattggcttccagctggctgtctcactatcatctagcagtatcactagcaagaccaacttgttatgctgaagtcaggcayagaaagaggagaactgcagagcagcgtgactaggtgcagcaatcttgactwggaacaaatcaagtagaagcaacgcatggcagggtcgcttcccttgtgtcagcacagcaaccaatgccacgctccagaaatgcatcagcaggtctgtgctggtgctt

SEQ ID NO: 32075 - DNA, 600 bp, Chicken  19866894255118_2
aatatccacagagttctctcctgtatacaacatttgttctagctgcagagatttagtagaatttgttaaccaactgtaactacttgccacccataaaactgacggaaagaagggaaaaaacagctagtgggatccaaagacaaacacttttacttaaarctctgtgaagagaaatcccgctctctccatatgtttttttcttggctcttaatcatcttttcattggcttccagctggctgtctcactatcatctagcagtatcactagcaagaccaacttgttatgctgaagtcaggcayagaaagaggagaactgcagagcagcgtgactaggtgcagcaatcttgactwggaacaaatcaagtagaagcaacgcatggcagggtcgcttcccttgtgtcagcacagcaaccaatgccacgctccagaaatgcatcagcaggtctgtgctggtgctttttaggagtgggagtgaagaacgactactacaattgaagctacagggaaattctgcaggcagaagcstaattacctgagtgggaactctggcagaaaacccaaacctctttctctccttaaatagaaacaaacgctgtgcag

SEQ ID NO: 32076 - DNA, 600 bp, Chicken  19866894255118_3
tttagtagaatttgttaaccaactgtaactacttgccacccataaaactgacggaaagaagggaaaaaacagctagtgggatccaaagacaaacacttttacttaaarctctgtgaagagaaatcccgctctctccatatgtttttttcttggctcttaatcatcttttcattggcttccagctggctgtctcactatcatctagcagtatcactagcaagaccaacttgttatgctgaagtcaggcayagaaagaggagaactgcagagcagcgtgactaggtgcagcaatcttgactwggaacaaatcaagtagaagcaacgcatggcagggtcgcttcccttgtgtcagcacagcaaccaatgccacgctccagaaatgcatcagcaggtctgtgctggtgctttttaggagtgggagtgaagaacgactactacaattgaagctacagggaaattctgcaggcagaagcstaattacctgagtgggaactctggcagaaaacccaaacctctttctctccttaaatagaaacaaacgctgtgcagtcaccatggagagattacgtatggtacttggatcacacacaatactgaaat

SEQ ID NO: 32077 - DNA, 600 bp, Chicken  19866894255118_4
gcttccagctggctgtctcactatcatctagcagtatcactagcaagaccaacttgttatgctgaagtcaggcayagaaagaggagaactgcagagcagcgtgactaggtgcagcaatcttgactwggaacaaatcaagtagaagcaacgcatggcagggtcgcttcccttgtgtcagcacagcaaccaatgccacgctccagaaatgcatcagcaggtctgtgctggtgctttttaggagtgggagtgaagaacgactactacaattgaagctacagggaaattctgcaggcagaagcstaattacctgagtgggaactctggcagaaaacccaaacctctttctctccttaaatagaaacaaacgctgtgcagtcaccatggagagattacgtatggtacttggatcacacacaatactgaaatacaacacacacaagaaagtcagccatggagctggtttagctatacacaaccagcagtcagtcctctattgactacagccactcagtcagctcatctccttctcatyatctacccattcctcgttttccaagtattaaggctcataccacagctcaggctccacrtgaaagtcca

SEQ ID NO: 32078 - DNA, 600 bp, Chicken  19866894255118_5
ttttaggagtgggagtgaagaacgactactacaattgaagctacagggaaattctgcaggcagaagcstaattacctgagtgggaactctggcagaaaacccaaacctctttctctccttaaatagaaacaaacgctgtgcagtcaccatggagagattacgtatggtacttggatcacacacaatactgaaatacaacacacacaagaaagtcagccatggagctggtttagctatacacaaccagcagtcagtcctctattgactacagccactcagtcagctcatctccttctcatyatctacccattcctcgttttccaagtattaaggctcataccacagctcaggctccacrtgaaagtccagctctgtgaggtgtttagctcttctatgaagggaaggtcaggctctaggcacctcccagacagcctagatatcttgtagagctggggtaaatcttcagtgaggcaatgccctcttggaggaatgcttcagcccaaaattgtcaactccccccccccccccccccccatgtactgaaaacagctgatttgttttttggggggctgaaactcttccactcaccaccactttttg

SEQ ID NO: 32079 - DNA, 598 bp, Chicken  19866894255118_6
ggcagaagcstaattacctgagtgggaactctggcagaaaacccaaacctctttctctccttaaatagaaacaaacgctgtgcagtcaccatggagagattacgtatggtacttggatcacacacaatactgaaatacaacacacacaagaaagtcagccatggagctggtttagctatacacaaccagcagtcagtcctctattgactacagccactcagtcagctcatctccttctcatyatctacccattcctcgttttccaagtattaaggctcataccacagctcaggctccacrtgaaagtccagctctgtgaggtgtttagctcttctatgaagggaaggtcaggctctaggcacctcccagacagcctagatatcttgtagagctggggtaaatcttcagtgaggcaatgccctcttggaggaatgcttcagcccaaaattgtcaactccccccccccccccccccccatgtactgaaaacagctgatttgttttttggggggctgaaactcttccactcaccaccactttttgtgctttctgttgttctttgaaaagctcttgtgccccattgctccaggtcaaaatta

SEQ ID NO: 32080 - DNA, 600 bp, Chicken  19866894255122_1
tgttacggccagtagcacatttcagcatttgtctgatgatttctttaaataatgtccatcttaaaagcactgtgaagataaattaacatggtagagaacattgtaggccacttgaagtgtgggatttacaattaaataggtaagtagatatgtgtactttcttcttctaagaaatttgataggggaatttgggcattttttactgttttccaaatgaatgaggcttatgattcttttattaacttatgtcaaatgtggttaaaaaatacataggaatccggagttcatttattctgttgmtcacagaattacttgggggcattcagagtctgagcagaactttttcttattttagatccatagatactcttgcattamctttagtatcagtagtagcaaatacttaggatggtgataaggaataaggcctactttccaagctgttcctttgtgttttgtgaatagcatgatgcgtttgcatttctgagacatgtgaactaggggcatgatttagatattgtccattggtctcttgtagtagaagctctactccatgaacagatgataattggaatgagatctgactgttttctgtggmtc

SEQ ID NO: 32081 - DNA, 600 bp, Chicken  19866894255122_2
taaattaacatggtagagaacattgtaggccacttgaagtgtgggatttacaattaaataggtaagtagatatgtgtactttcttcttctaagaaatttgataggggaatttgggcattttttactgttttccaaatgaatgaggcttatgattcttttattaacttatgtcaaatgtggttaaaaaatacataggaatccggagttcatttattctgttgmtcacagaattacttgggggcattcagagtctgagcagaactttttcttattttagatccatagatactcttgcattamctttagtatcagtagtagcaaatacttaggatggtgataaggaataaggcctactttccaagctgttcctttgtgttttgtgaatagcatgatgcgtttgcatttctgagacatgtgaactaggggcatgatttagatattgtccattggtctcttgtagtagaagctctactccatgaacagatgataattggaatgagatctgactgttttctgtggmtctgagcttccaggtttattgcctctgcccaagacaggagtttggttatactttgcactcagctactgaaattgtttcct

SEQ ID NO: 32082 - DNA, 600 bp, Chicken  19866894255122_3
gmtcacagaattacttgggggcattcagagtctgagcagaactttttcttattttagatccatagatactcttgcattamctttagtatcagtagtagcaaatacttaggatggtgataaggaataaggcctactttccaagctgttcctttgtgttttgtgaatagcatgatgcgtttgcatttctgagacatgtgaactaggggcatgatttagatattgtccattggtctcttgtagtagaagctctactccatgaacagatgataattggaatgagatctgactgttttctgtggmtctgagcttccaggtttattgcctctgcccaagacaggagtttggttatactttgcactcagctactgaaattgtttcctactatttgacaggaattttgacttctcaccggaaagcttctgaattttctgttttaagaacctatcctttctaagtcccattagctaattgttcccttcatgtaatctcctgcactcaaaagcagaagatagttcaagcacttatatcatgcaactatttaattagctatcctcgtcattctccctagtgagattgtcaggtcaacctggtggttgcacg

SEQ ID NO: 32083 - DNA, 600 bp, Chicken  19866894255122_4
tcagctactgaaattgtttcctactatttgacaggaattttgacttctcaccggaaagcttctgaattttctgttttaagaacctatcctttctaagtcccattagctaattgttcccttcatgtaatctcctgcactcaaaagcagaagatagttcaagcacttatatcatgcaactatttaattagctatcctcgtcattctccctagtgagattgtcaggtcaacctggtggttgcacgagacttgcatattttcatggatacttcgcacggtgtcatggagctaaacctaaaaggrctaatttgagcataaaaagacaatgtcatattttttcttttcttttgcagtgcaattttccagggaaccaggatggctagaaggcacactaaatggcaagagaggactgattccacaaaattatgttcagtttttatagctttatgcattgaacgccaagaaggtgtacatggtatccatggatttttgttatagtcacttctctccactttcgtgaccatttttaatcaacgaagagcctgattatgggttgaagatcccagtgtgtttaaagacattaaatgttgccaaatacgagct

SEQ ID NO: 32084 - DNA, 600 bp, Chicken  19866894255124_1
cagctcccggcatcccctcccttgctcacctagtaaatctcttagtgactcttaatatgaaagagccaagtgggaaccttgtgttcagcttggctttctgtcatggtgtcaggatgggagacgttgctttgaatatatggggcaagaaagagtttgaccttactctcattttctgtccaaatgctccctgcatttccataacattctcaggatggaactttagagagatggttcctgtgtagaccaaggcaactctaacagagtttcattcacctctccagcatttccttgcatttcacytggggcagctgtctgcgtgatttagtggtctcataagtcagtgtaatggctgmgctggatcgcatccttaagcatctttatgctatatttgaattgcatgtatttctgtactaaggatcctggatttcactgcagagccatgcgcttcgtatttgagtgcctaacacatttgctgtagcgtggtttcactgaatggagaagagaaagaagcaggtttaaggtcaccacatcatttgagacyagtggttaattcttcattactcaactgacatcagagagaaatcctaaaagaattgaact

SEQ ID NO: 32085 - DNA, 600 bp, Chicken  19866894255124_2
aatatgaaagagccaagtgggaaccttgtgttcagcttggctttctgtcatggtgtcaggatgggagacgttgctttgaatatatggggcaagaaagagtttgaccttactctcattttctgtccaaatgctccctgcatttccataacattctcaggatggaactttagagagatggttcctgtgtagaccaaggcaactctaacagagtttcattcacctctccagcatttccttgcatttcacytggggcagctgtctgcgtgatttagtggtctcataagtcagtgtaatggctgmgctggatcgcatccttaagcatctttatgctatatttgaattgcatgtatttctgtactaaggatcctggatttcactgcagagccatgcgcttcgtatttgagtgcctaacacatttgctgtagcgtggtttcactgaatggagaagagaaagaagcaggtttaaggtcaccacatcatttgagacyagtggttaattcttcattactcaactgacatcagagagaaatcctaaaagaattgaactcaacaaagcagctatcatcaaatccacacaaagcctacaggagctcaaataga

SEQ ID NO: 32086 - DNA, 600 bp, Chicken  19866894255124_3
gaccaaggcaactctaacagagtttcattcacctctccagcatttccttgcatttcacytggggcagctgtctgcgtgatttagtggtctcataagtcagtgtaatggctgmgctggatcgcatccttaagcatctttatgctatatttgaattgcatgtatttctgtactaaggatcctggatttcactgcagagccatgcgcttcgtatttgagtgcctaacacatttgctgtagcgtggtttcactgaatggagaagagaaagaagcaggtttaaggtcaccacatcatttgagacyagtggttaattcttcattactcaactgacatcagagagaaatcctaaaagaattgaactcaacaaagcagctatcatcaaatccacacaaagcctacaggagctcaaatagaaaggtaccatatgggtaaggctgcagaagctaattttaacattatttagttcagcaaagaacacatcctgattcaaaatgtggctttattcttagctcgtatttgttatacttacttattttttctgaagatcgattctcacttttagtaattattaagacatgcttttttgaaagtaagtgaggtgt

SEQ ID NO: 32087 - DNA, 600 bp, Chicken  19866894255125_1
ctcccctgcccatcaatgagctgtcatccatctgtcgggaggttttgcactgtaagcccagctggatgaaaccaacttaagcaacaaccacgggtttttctcctccatgaggcaggcatcctgtggaaaggtccaggatgctcctgcagtgctcccggactgggggtgggagcaggaagaatggaagttctggggctgggaggataacttgggggaatggcagaaaagcctgactcaaatgaaccagcacacagctgtgccacctgagcagctttatatcactgtcagtgccactcagcrctaaagcacatcagtcctgtagtgytttgcagarccycgtgcccctttcagtgctgtgaaggtgcctgacgtccatccattggtcagcttccctcattcccagctgggacattctgtcagtgarggtgaatatttttgctgtgccataaacaccccatttagaaccagttccttgcctcagtttccttctgctttctttcctttccacacaacagagctgtgaatgctctgagcggggctggttcccggagtggggatgtaccccacacgcaggagacctgcagccactgtaataatcat

SEQ ID NO: 32088 - DNA, 600 bp, Chicken  19866894255125_2
atccatctgtcgggaggttttgcactgtaagcccagctggatgaaaccaacttaagcaacaaccacgggtttttctcctccatgaggcaggcatcctgtggaaaggtccaggatgctcctgcagtgctcccggactgggggtgggagcaggaagaatggaagttctggggctgggaggataacttgggggaatggcagaaaagcctgactcaaatgaaccagcacacagctgtgccacctgagcagctttatatcactgtcagtgccactcagcrctaaagcacatcagtcctgtagtgytttgcagarccycgtgcccctttcagtgctgtgaaggtgcctgacgtccatccattggtcagcttccctcattcccagctgggacattctgtcagtgarggtgaatatttttgctgtgccataaacaccccatttagaaccagttccttgcctcagtttccttctgctttctttcctttccacacaacagagctgtgaatgctctgagcggggctggttcccggagtggggatgtaccccacacgcaggagacctgcagccactgtaataatcataattattgattttccagtttacttt

SEQ ID NO: 32089 - DNA, 600 bp, Chicken  19866894255125_3
tcgggaggttttgcactgtaagcccagctggatgaaaccaacttaagcaacaaccacgggtttttctcctccatgaggcaggcatcctgtggaaaggtccaggatgctcctgcagtgctcccggactgggggtgggagcaggaagaatggaagttctggggctgggaggataacttgggggaatggcagaaaagcctgactcaaatgaaccagcacacagctgtgccacctgagcagctttatatcactgtcagtgccactcagcrctaaagcacatcagtcctgtagtgytttgcagarccycgtgcccctttcagtgctgtgaaggtgcctgacgtccatccattggtcagcttccctcattcccagctgggacattctgtcagtgarggtgaatatttttgctgtgccataaacaccccatttagaaccagttccttgcctcagtttccttctgctttctttcctttccacacaacagagctgtgaatgctctgagcggggctggttcccggagtggggatgtaccccacacgcaggagacctgcagccactgtaataatcataattattgattttccagtttactttatgttttgc

SEQ ID NO: 32090 - DNA, 600 bp, Chicken  19866894255125_4
ggaggttttgcactgtaagcccagctggatgaaaccaacttaagcaacaaccacgggtttttctcctccatgaggcaggcatcctgtggaaaggtccaggatgctcctgcagtgctcccggactgggggtgggagcaggaagaatggaagttctggggctgggaggataacttgggggaatggcagaaaagcctgactcaaatgaaccagcacacagctgtgccacctgagcagctttatatcactgtcagtgccactcagcrctaaagcacatcagtcctgtagtgytttgcagarccycgtgcccctttcagtgctgtgaaggtgcctgacgtccatccattggtcagcttccctcattcccagctgggacattctgtcagtgarggtgaatatttttgctgtgccataaacaccccatttagaaccagttccttgcctcagtttccttctgctttctttcctttccacacaacagagctgtgaatgctctgagcggggctggttcccggagtggggatgtaccccacacgcaggagacctgcagccactgtaataatcataattattgattttccagtttactttatgttttgcagg

SEQ ID NO: 32091 - DNA, 600 bp, Chicken  19866894255125_5
ggaaaggtccaggatgctcctgcagtgctcccggactgggggtgggagcaggaagaatggaagttctggggctgggaggataacttgggggaatggcagaaaagcctgactcaaatgaaccagcacacagctgtgccacctgagcagctttatatcactgtcagtgccactcagcrctaaagcacatcagtcctgtagtgytttgcagarccycgtgcccctttcagtgctgtgaaggtgcctgacgtccatccattggtcagcttccctcattcccagctgggacattctgtcagtgarggtgaatatttttgctgtgccataaacaccccatttagaaccagttccttgcctcagtttccttctgctttctttcctttccacacaacagagctgtgaatgctctgagcggggctggttcccggagtggggatgtaccccacacgcaggagacctgcagccactgtaataatcataattattgattttccagtttactttatgttttgcagggtgttttgctggaaatgatataaatagctgtctccatccctatcccagggcgtgatacagcagtgtattttttcacagtccgaggaa

SEQ ID NO: 32092 - DNA, 600 bp, Chicken  19866894255127_1
gggacaagtacaactggagaagcagaaaatatgggagcctgggctgggctttgagagagaccagagtttgggtttggagagcaggaggcagagggtgtaggactggggtgcacaagggtggctccaggctgcactgaagttctggaaaagaactcacttcctccagcctgttactggatacttgtagggggaaatggtaagaaaaatcacacctttgctaaaaggcgattctgaatgtagtttcagactgattacatcaggatctgtagttttgtgcatcttggtgatggagggctgtgwctggttgaaggattggaaaatgatcagtctgcccatgtcctttcagaacttcagagactgttagtaggcaaccatagagaaaaggatgagaataaagtctttagtggagcaatacttgcaaagcaatctggctaccttggtttattatgaaagtcttttgtggctggggcaactttaggatcactttcatataagctacagcctttcaagtcctacctgatcctgtggttggaatgaatgcaggagtaattaaaagtaatcattattcatctctctctctctctctcycactctctcact

SEQ ID NO: 32093 - DNA, 374 bp, Chicken  19866894255127_2
ggagggctgtgwctggttgaaggattggaaaatgatcagtctgcccatgtcctttcagaacttcagagactgttagtaggcaaccatagagaaaaggatgagaataaagtctttagtggagcaatacttgcaaagcaatctggctaccttggtttattatgaaagtcttttgtggctggggcaactttaggatcactttcatataagctacagcctttcaagtcctacctgatcctgtggttggaatgaatgcaggagtaattaaaagtaatcattattcatctctctctctctctctcycactctctcactctctctctctctctctctctctctctctctctctctctctctctctctctcccactttgctg

SEQ ID NO: 32094 - DNA, 600 bp, Chicken  19866894255132_1
atttcaattgttaatatgattgcacattaaggagagaaatttcaactcgtgttattctcatcattctgtttgttctcacctcttatgttttcatggaaatctacatcacatgataattggagtgattccttttcaataagaagcagtctttttgatatactgtagacaaagcatacaaaggagcattgtgctgagttctctttccatcttcagctgctatgtttgtcttctcaagtcttttaggcatcaacatagtagaattaaaaattgaagattatagaaatagtcttttcagtttawcaattcaactggtgtatgatagcatgcataggttggatgtgagtccttttcagtgctcctgtttggggaagaaaatgttcctgctttgggtaataactattttgagctctggcacagaactcagattcttaagagatcatttatattacaaaggctcactctgtacttcctcagtgcttggaggcgcatttcagcttccaaaccaaaatctttatatgggttttgaaaacaaattgggagatttacttgggattcttaaactaaaactaaagatgagatagcaaaaggactattagtatt

SEQ ID NO: 32095 - DNA, 599 bp, Chicken  19866894255144_1
  misc_feature (1)..(193): n is any nucleotide
nnnnnnnnnnnnnnnnnnnnnnnnnnnnnnnnnnnnnnnnnnnnnnnnnnnnnnnnnnnnnnnnnnnnnnnnnnnnnnnnnnnnnnnnnnnnnnnnnnnnnnnnnnnnnnnnnnnnnnnnnnnnnnnnnnnnnnnnnnnnnnnnnnnnnnnnnnnnnnnnnnnnnnnnnnnnnnnnnnnnnnnnnnnnnnnnncaaaaaaaaaaagctaggagatgaacgaaaacttaaatgtgcatctttgaaataaataactctgaaactcagtcacaaattttggaaaggaaatagtttctcagttyttttctccctcaagtttttttttatgtaaagccaaaaatcaactctgatatttaaaaatgcaaggtataagaactggtttttaaaagcttctaaactttaatgaaatgtgaaagtccatccttaggcactaaaatcttcttgtgccttggtctggtatctctcattttgtccacttcttttgctttcctcttcactttaataagcgatcacatgtgcaccagctaaatgtctgataaatctccaggcaaagctgggttgacttgtgtggaactgactttaaaaatatttgatggaacat

SEQ ID NO: 32096 - DNA, 600 bp, Chicken  19866894255144_2
agtccatccttaggcactaaaatcttcttgtgccttggtctggtatctctcattttgtccacttcttttgctttcctcttcactttaataagcgatcacatgtgcaccagctaaatgtctgataaatctccaggcaaagctgggttgacttgtgtggaactgactttaaaaatatttgatggaacattgcttcagtctctgaatacttgtcagcttagatttattacagctgctcccattacagagatgtgcactttggtccttagggatctttccctctctctcttgctgtgtagcccrggctcttgtggtgtcacagccaatcagtttctcactctgatgctttcagtccatcccagtgtttagcaccccaacttcatcyttctatggaggagcattttcttgagtgaaagtacttattgtttttatcctttactatctgttgacgaatcgtgttctgtatatctttgaaatacatggatcaaatggcagtaaccctccttaatatgtatcatttatacttttgactgtattttatgtagacacatccgaggtttatcaatgcatgggtagataactatatacagattttgtgggaat

SEQ ID NO: 32097 - DNA, 523 bp, Chicken  19866894255144_3
ctttaataagcgatcacatgtgcaccagctaaatgtctgataaatctccaggcaaagctgggttgacttgtgtggaactgactttaaaaatatttgatggaacattgcttcagtctctgaatacttgtcagcttagatttattacagctgctcccattacagagatgtgcactttggtccttagggatctttccctctctctcttgctgtgtagcccrggctcttgtggtgtcacagccaatcagtttctcactctgatgctttcagtccatcccagtgtttagcaccccaacttcatcyttctatggaggagcattttcttgagtgaaagtacttattgtttttatcctttactatctgttgacgaatcgtgttctgtatatctttgaaatacatggatcaaatggcagtaaccctccttaatatgtatcatttatacttttgactgtattttatgtagacacatccgaggtttatcaatgcatgggtagataactatatacagattttgtgggaataggaa

SEQ ID NO: 32098 - DNA, 600 bp, Chicken  19866894255146_1
aaccaggagcacctgagggcaaagagatggaagtaaaagactttgcagtctgagctgagtgtcctggccatggacttgtgttccaggaggactcagagccacccagtgctggtgtccgctcctctatctactccctagctttcctgccacgtccttcccaagcacatgctgcagatttggctttcacagcacagaaagaaaagcagtctcacttagtcattgtatcatttgcacagccatcaactgggagaattaattaacttgaacatatttatctccagtcattatggatttgctttkctctgcaaggtctctatcaacaaagcctctgatagattcacctagcccaccaccaccttyttttccatgagttttggatctctaaaagcatcaccatcaatccccgctctgtcttcatcctttctgtttctcagttctttccaaagctctggggatcctgggacattttggataacaaccttgtggtgcttcagtgtggtggtggctgaggttgtgtttggcttttcaggtgactcagctggccctgcttctctctgggattttgctgcatcagcaagaagaatttaatccatgtggctg

SEQ ID NO: 32099 - DNA, 600 bp, Chicken  19866894255146_2
gtcctggccatggacttgtgttccaggaggactcagagccacccagtgctggtgtccgctcctctatctactccctagctttcctgccacgtccttcccaagcacatgctgcagatttggctttcacagcacagaaagaaaagcagtctcacttagtcattgtatcatttgcacagccatcaactgggagaattaattaacttgaacatatttatctccagtcattatggatttgctttkctctgcaaggtctctatcaacaaagcctctgatagattcacctagcccaccaccaccttyttttccatgagttttggatctctaaaagcatcaccatcaatccccgctctgtcttcatcctttctgtttctcagttctttccaaagctctggggatcctgggacattttggataacaaccttgtggtgcttcagtgtggtggtggctgaggttgtgtttggcttttcaggtgactcagctggccctgcttctctctgggattttgctgcatcagcaagaagaatttaatccatgtggctgttgggacttccttgcatgactcccattcacagagtccccctctaagaccacagggatcac

SEQ ID NO: 32100 - DNA, 600 bp, Chicken  19866894255146_3
tcctttctgtttctcagttctttccaaagctctggggatcctgggacattttggataacaaccttgtggtgcttcagtgtggtggtggctgaggttgtgtttggcttttcaggtgactcagctggccctgcttctctctgggattttgctgcatcagcaagaagaatttaatccatgtggctgttgggacttccttgcatgactcccattcacagagtccccctctaagaccacagggatcacataatatattcttgatttgtttctgagcttgattcctcacctcggatagtgttggargctgctgcgatgtgggttggttctgcacgccatgcaaactccccagaaaatgctccagtgaacaaatgttcattaaaaaaaacagcaaatgtgaattgcagctgactgcgtagaggtgctggtgaattgacaacatacgcacacggtcaaaacaaatgatctggaacacagcagagagagatggaaactctctcacgtcccagtctgacacgtactggaggtgatgctgagctgctggctggagcagatccttcacacgtccctcctgctgcatattcaccagcgtgaacccattactgc

SEQ ID NO: 32101 - DNA, 600 bp, Chicken  19866894255157_1
tgtatgtacatcacatgtatcaaacaaattccaccgttcaaaagcacatggaatttgtaactcaattgttatataaattccactgtgtttatcaaaaatatctgtatttaaaatgtaccaagaaaaaatgttcaagaactcttcgtggtacattcatgtgtgtatcagggagatgggcacttgtttttacactaaactttttcctgtaagtgtccataaactacaaagttcatgctggaaaaatctaagagctttttcaagccagccataattaccatgagaagttaataactatttctmaactttcttttaggcaccacatcccaggaccataatttaaaacagaaaaataaactctaccacaggcatctgaaaatacatcagaaatttgtatgtagttatacctaacagtataattagatagccatgccctcattacagaccaactctatgctgttctgacttgagggctagcatagccagccccagtaaaattagaaatcgaagcctgaattagtaccataatgcttctacagtactaatattggcacaggtgacataatacctaacacttctaaaacttaagaagcatgagaaatc

SEQ ID NO: 32102 - DNA, 600 bp, Chicken  19866894255161_1
tcatctgtatctgacagtaattattgatgcagacggttgcagttatcccgcctgctctcattagcgcaacagctggaccccactgctgcaaagccaagaggagagtttttaattaggatgacttcaaagcttaataaatatgatgggaccaaaatgcagctaggttcacctggcttcatgccagctcccggcagtgtaaagcctgccacgtggctgagtcagtggcctgtgggtgaggggagagggccagggggcatggatgggcccatagagcagcacatggtgagagctacaagcccygcagccctctctgcattacaacccactcatctccaatgggagacctatctccagttccttcctgtgccagaggaatggaagtcagcatttacagtagagagacgatgacccaggcaaaagcgagctgaatttttggtatggaaaacattttttttccccccctctctaagcctggcacaggaaaatcggaaataaactttatatccacattttctcccagaataaatggctggagtatttttacagtagtcttaaaaaatagtgctaccaactgatttcataacttccaagacttcttgt

SEQ ID NO: 32103 - DNA, 600 bp, Chicken  19866894255167_1
tgctcagtttcatgtctcatggcacattaaatattctgagacctcccaagcagaagtctattctttgaaaaggcaaggtttgactaattgatgacataatctctcatcaatttctgcatgacgggagaaatgggttgtggacttgcattttatcccaagctgaggcatgcaagggatggaggtgtttttgttgatgttttatttcttattgctgttcctacaacccataggatagagtaatatctgtgctctcttggacttggtgggtcagtcagaccatctgtgaaaacagagccctgytctcatccatcccccactaatattttggaaattagttatgcaaatttctgtaataaagttattttttcctctacccgtgtctaataacagcagcaaattccaaggccagatggaaatgctgggtgctataataatcttatgctcacttgatgaaaactctctactaaggccggggataattgctgccgtgtcaggctgaaaggtgaatgcaattaactttgaccaggccagggacaggagtaccagaagtacaggagaaccaaaattaagcaaggaggacccaggggaggtcctgctagc

SEQ ID NO: 32104 - DNA, 569 bp, Chicken  19866894255169_1
aaagcaaggagtctgggaagcagctggccctgtacctagatgaagccagagcaaactctgcttctcacaagtgggctgggacagctcactaactcccagctttttttttccaagtgggttttcttaattgatcgattgaaaaaggaacagtgtggggtttgtggttccagtacttgcttaagaaataaaaaaagcccctttctttaccttcactgttggcaacaccttcaaccaacctgctagtctattccatgtgggacaaccaaccctaacatcaagaaagtgaatatcctgaagcayaggctaaagagtactgttcagatactgtcacttgcccaaagactatttagttgttccatgcaaagcaaaatacctttaagatgagaaattccccacttcagaaaagcatacattttagtggtcaggtttagagcgtgtatgtgggaggtaagtattgagtcatctcaaccaaaggaaaagatattccaggggttttgcattacaggtaagtgctttaatcagtagtccatggaaaatggctgaaacacacattttgaattgctgctgtg

SEQ ID NO: 32105 - DNA, 600 bp, Chicken  19866894255175_1
gtcaaggaggatctggtcagagatcatctggggcaaacgtgatgcaaacaaatccatgggactcaacgagatgcacccatgagtgctgagggaactggcagaattcattgccaaaccactctctaccatcttttaaatgtcatggagaatgggagaggtccctgggaactagaggaaagctaatgttgcttcagtcttcaagtagggcaagaaagaagactcgggaaactgctgcacctccatccctgggaaggtgatggagaagcttccaactattacaaggcttttgacgctctcccrtaacattcttgtaggtaagcctaggaaatgtagaagaaaagggttgacagtgaagaagactgaaaactgactgattgacagaacattgagtttgtagaagttccaggatagctatcaaggatctgaaccacttcagttatatagataaaatattgcaacagaattttacaatatttagggattcctttttttatatgtttgttgagaaaatatatttttatactgacttacttggctcttagcatacactgcaaagcatagttattgctgacttagtcaagcagtcaggactaaggtcag

SEQ ID NO: 32106 - DNA, 600 bp, Chicken  19866894255176_1
tccacaagcaccgtgggaggccagttttctccatgccttgccctgactacaagctgtcacctccatcatctcacccacccctaagaggactttggtgcccacctccacggatggagctgagatgacttcttaacagtcaaaatggaaatgaattccacaagccagatatctaaagcagagcaaacctgacttcttagattaaagcttacaaacttttcccaagctgtattcacaaagcagcttcccttacagctagacttaatggcttttaaaactcttttgctcccttccctcagaaaygccatagctggctttgaaccggagcttgtcagcaccacagttcagagcagagctagttcatacctgctggtgagtgcctaggaaacaaatagagacaaagaacattcaagccaagagtgctactacatgatggaggtcaagttttataggtgcccacaatctaatgcctaaataatggagaataactacggtggagaacaacttacagattggtctgatgcttcttcccctgggtatgtgctaagtaacttccctggggagaataaagaaagttagacgaagactgaactgttcctgaac

SEQ ID NO: 32107 - DNA, 600 bp, Chicken  19866894255176_2
tgctggtgagtgcctaggaaacaaatagagacaaagaacattcaagccaagagtgctactacatgatggaggtcaagttttataggtgcccacaatctaatgcctaaataatggagaataactacggtggagaacaacttacagattggtctgatgcttcttcccctgggtatgtgctaagtaacttccctggggagaataaagaaagttagacgaagactgaactgttcctgaacagaaagatattcgtcacggatgagaggtgacatttcacatggacaaagatattttaatcctcaragcgcagcrgaatcaaactcaaaaattgcagattgctcacaactgctgaactgtcagaaacttgtcatgcttaacacagacagcctctgctccccccatcaccactccagcaatcagccaacgagaacagcttcagttccagcacttggagctagcattattytaaaatatctgttgccatggagatgcagacagacagctgctcaactcacctcattgttatggagcgtcaggcaaagcttgcattcataagaacccaagtgatttttcataaaataggggtcctaggaagagagatat

SEQ ID NO: 32108 - DNA, 600 bp, Chicken  19866894255176_3
gtgcctaggaaacaaatagagacaaagaacattcaagccaagagtgctactacatgatggaggtcaagttttataggtgcccacaatctaatgcctaaataatggagaataactacggtggagaacaacttacagattggtctgatgcttcttcccctgggtatgtgctaagtaacttccctggggagaataaagaaagttagacgaagactgaactgttcctgaacagaaagatattcgtcacggatgagaggtgacatttcacatggacaaagatattttaatcctcaragcgcagcrgaatcaaactcaaaaattgcagattgctcacaactgctgaactgtcagaaacttgtcatgcttaacacagacagcctctgctccccccatcaccactccagcaatcagccaacgagaacagcttcagttccagcacttggagctagcattattytaaaatatctgttgccatggagatgcagacagacagctgctcaactcacctcattgttatggagcgtcaggcaaagcttgcattcataagaacccaagtgatttttcataaaataggggtcctaggaagagagatatttaaaaaag

SEQ ID NO: 32109 - DNA, 513 bp, Chicken  19866894255176_4
ccctgggtatgtgctaagtaacttccctggggagaataaagaaagttagacgaagactgaactgttcctgaacagaaagatattcgtcacggatgagaggtgacatttcacatggacaaagatattttaatcctcaragcgcagcrgaatcaaactcaaaaattgcagattgctcacaactgctgaactgtcagaaacttgtcatgcttaacacagacagcctctgctccccccatcaccactccagcaatcagccaacgagaacagcttcagttccagcacttggagctagcattattytaaaatatctgttgccatggagatgcagacagacagctgctcaactcacctcattgttatggagcgtcaggcaaagcttgcattcataagaacccaagtgatttttcataaaataggggtcctaggaagagagatatttaaaaaagtcacatacaaaatccgtgttggaacaactgaacaatcaaaatactaaagcagagctgcaccgcaaca

SEQ ID NO: 32110 - DNA, 600 bp, Chicken  19866894255177_1
accctgcggtgactgtgccccgtgcaaagggaatgtgcacacacagcagctaagttgttgtcatctcttactctgtaaggaaaggcagcctacggagagctcatgtcgcataggagaatgcattctgccttaagaggtgttttaaaagagcagtcttgttacttgtcccttagtatgcttggaggacaatctcatccttcccaaaggccttttacaactgctgtgggaaacaggagctccttccccagccaggaatgatggaaggatcctgactataccaaacgatttcctccccagcaytggtgtgaaaccacctccgccctccaagccagagagtcttataaaaccaattcccatcgcagagagattgcacttctatcatgtttatttcatcacacgagctttactttccactcctgtacagaacagtgcagagaaaacagagattgttttacgtttctgtattaaccraaggttggcagtgtattttttgttacttttctaatatatcgctgaaggaagagagaggcagagtctactgcttcccttttttagctcagccaaaattggggcattaacaacaacaagccctgctttcca

SEQ ID NO: 32111 - DNA, 561 bp, Chicken  19866894255177_2
agtatgcttggaggacaatctcatccttcccaaaggccttttacaactgctgtgggaaacaggagctccttccccagccaggaatgatggaaggatcctgactataccaaacgatttcctccccagcaytggtgtgaaaccacctccgccctccaagccagagagtcttataaaaccaattcccatcgcagagagattgcacttctatcatgtttatttcatcacacgagctttactttccactcctgtacagaacagtgcagagaaaacagagattgttttacgtttctgtattaaccraaggttggcagtgtattttttgttacttttctaatatatcgctgaaggaagagagaggcagagtctactgcttcccttttttagctcagccaaaattggggcattaacaacaacaagccctgctttccagatattacagcatttccagttaattggtacacgatctgcaaagcaatacacaactgctattgccaaaagggctcccatcagcttttcctaagggcaacacgctcccgtgacacaagcacggcgcgctgccgg

SEQ ID NO: 32112 - DNA, 600 bp, Chicken  19866894255180_1
tggattaatttgtttctgacttctcttttccctttaaccagaggaaaggagagaacaattcctcgaatcctgtgactccagtcaagattccagattgcccagtgcctgcagccttgctggaagagctgctaaagccatccacagctgtgagcaaggagcctttaaaaaatctgaacagctgtctccggcaactgaagtatgacctgttcttaaaactgtattaaatatttccaggaaaccagctgccaactaaggggggggaaaaaaaggatttgtgaaatgcattattttcctcttatkggggctgtatttaggacagtaaggtgttctgtatcttaagtgtttgcttatatggcagtggaataaggaaagaacaagtagacaaagtgctcatcctaaatttctcagtacacaaatagatatactgcagaacaaaccaggaacagctatttttagtcgctcttgctagtggagaaactggtgtttgtttcttctcgctatcagcagggttgcttgtgataagagcccaagcaatgaattaatggatccctacagtggaattttattctgccaagagtttgtttttgtgtctgtcctcac

SEQ ID NO: 32113 - DNA, 600 bp, Chicken  19866894255184_1
cagcagcgctcacagaaaatttaaatacaaaaaatattatcagatgtagtgttgtcttgtatcttaaatacacttgtgtgtcagccacatctcctctttcctactgaatgaattaaaaatgaaaagtctctgtcttgctgtatgctctactgggctttgttgcagaaagggtgaaagggaacttgaaatctctacagatctttttgaacgcatgttcttagagagaagactgctattgttttattctgaatttgtgcagcagataatccagtcttgaaaaggaggtttatgaggtataayaagattccagaaatagcaggcttgaatattagggtggtgagcatatcactgtggatgattttctttgtctgttatgctactctcattcacctcaaggtgaaagctatttccaagtagaaaatctcttgttcaagtaactttgaataaggacttctacttgcatctacacatctacacgagttctcatactgctttgagtgaaaccaatgtgaaatatttatcctttcacttgccctggttttagtcatgtcrtaggtattttgaaagtataaatacttggacaacagggattaatatccc

SEQ ID NO: 32114 - DNA, 600 bp, Chicken  19866894255184_2
tgtgcagcagataatccagtcttgaaaaggaggtttatgaggtataayaagattccagaaatagcaggcttgaatattagggtggtgagcatatcactgtggatgattttctttgtctgttatgctactctcattcacctcaaggtgaaagctatttccaagtagaaaatctcttgttcaagtaactttgaataaggacttctacttgcatctacacatctacacgagttctcatactgctttgagtgaaaccaatgtgaaatatttatcctttcacttgccctggttttagtcatgtcrtaggtattttgaaagtataaatacttggacaacagggattaatatccccatttttatctgctaatccacttgaacttctacagtgctctgggttggacactatttttgaaactccatcttgttatctttgctctgtgctgtttgcctaaatttacttgggtcttgcactgttygtctcccatcttctacatragaactgtgacggcatgtggagctatgcagctggctatttgtaggagcagtaactgttgtactctactttccaaatgcagcaggcatttatttgccttctgttgcagg

SEQ ID NO: 32115 - DNA, 600 bp, Chicken  19866894255184_3
ttgttcaagtaactttgaataaggacttctacttgcatctacacatctacacgagttctcatactgctttgagtgaaaccaatgtgaaatatttatcctttcacttgccctggttttagtcatgtcrtaggtattttgaaagtataaatacttggacaacagggattaatatccccatttttatctgctaatccacttgaacttctacagtgctctgggttggacactatttttgaaactccatcttgttatctttgctctgtgctgtttgcctaaatttacttgggtcttgcactgttygtctcccatcttctacatragaactgtgacggcatgtggagctatgcagctggctatttgtaggagcagtaactgttgtactctactttccaaatgcagcaggcatttatttgccttctgttgcaggtaagatggtagcagataactcagcagtttgtagcctgctggccaaaagaaaaaatgtttgtatttgtgcagaataaaagatgcaaagctgtaactattaaagtggtctgagttgtctcgttaatattgcccataatgcttggtgaactaggttctctgaaataatcttgtgga

SEQ ID NO: 32116 - DNA, 600 bp, Chicken  19866894255184_4
taaggacttctacttgcatctacacatctacacgagttctcatactgctttgagtgaaaccaatgtgaaatatttatcctttcacttgccctggttttagtcatgtcrtaggtattttgaaagtataaatacttggacaacagggattaatatccccatttttatctgctaatccacttgaacttctacagtgctctgggttggacactatttttgaaactccatcttgttatctttgctctgtgctgtttgcctaaatttacttgggtcttgcactgttygtctcccatcttctacatragaactgtgacggcatgtggagctatgcagctggctatttgtaggagcagtaactgttgtactctactttccaaatgcagcaggcatttatttgccttctgttgcaggtaagatggtagcagataactcagcagtttgtagcctgctggccaaaagaaaaaatgtttgtatttgtgcagaataaaagatgcaaagctgtaactattaaagtggtctgagttgtctcgttaatattgcccataatgcttggtgaactaggttctctgaaataatcttgtggattatttcagctaatgcaag

SEQ ID NO: 32117 - DNA, 600 bp, Chicken  19866894255184_5
tttccaaatgcagcaggcatttatttgccttctgttgcaggtaagatggtagcagataactcagcagtttgtagcctgctggccaaaagaaaaaatgtttgtatttgtgcagaataaaagatgcaaagctgtaactattaaagtggtctgagttgtctcgttaatattgcccataatgcttggtgaactaggttctctgaaataatcttgtggattatttcagctaatgcaaggcctttaattgccatataaacctttatactggttattccatagtttgatagccaagtatgtgaattyaaggaattcggagttctctatgatctcaataatttaagaagtgagatgtatcaagatgatgtatttttactccataagttgatctctgtaaggtgaagaatccatttctggtccagtgacaagacagggatttgtgttatgttatagtacttactatagtacttggatatggatgtgaaaggcagagccagcacaacaataaacatggcatatatttaaggatcaggaagcttttctgcttcttgaccactgagtgagtttttttggctaatagttttcctcttttggactactgtcttt

SEQ ID NO: 32118 - DNA, 600 bp, Chicken  19866894255184_6
ttgtatacattgcatatgcatgggttgggtaagatagaccttgatggttgcttgctgattaattcctattgctaatactaataagctgtaccgaggtcttttgttgacattaaacaaaagtttctaatgctggactacatgtatatgggttaagcagtgggtggtgttctgtgcttttagcatgttttgtttttcctttcaggtaactttgaaaagcagtatgatgatgtgacaatcaaaatgatctttgcaattgttcaaatcataggattcttcaattctatttgcaaccctattgtktatgctttcatgaatgagaacttcaagaaaaattttctgtctgccatctgcttctgcgttgtcaaagaaaatgcatcaccaaccaggcaacttgggaactcggggattactatgaggcggcaaaaggcaggtgattctcagagggctcccactgactcggatgaggccaggagagaggcgttcagtgatggcaacattgaagtgaagttctgtgaccaaccgtcttcaaaaaggaatttgaaaaggcacctcactttattcagctctgagcttcctgcgcattctgcaagtgcacagtag

SEQ ID NO: 32119 - DNA, 599 bp, Chicken  19866894255186_1
  misc_feature (1)..(98): n is any nucleotide
nnnnnnnnnnnnnnnnnnnnnnnnnnnnnnnnnnnnnnnnnnnnnnnnnnnnnnnnnnnnnnnnnnnnnnnnnnnnnnnnnnnnnnnnnnnnnnnnnnctaaatacatggttttctactttagatgtgttatgtgagtctttaagtgctgcacaaagggcatctttatcacctgacttttatcagctttgagtttagactccagaggtatgctttatatccttcttgcttattggagtctttcaattctttacagaactctgccactatatgccggaaagtgtcttgccctctcatgccytgttccaaygccactgtgcctgatggggagtgctgcccccgatgctggcgtaagtacttaaaaataccttcacacctctctacagtcggtagacatacacagatgtatagagaacaattggatagtctgcatctttaaattaaaactcaaatgtctatcctccgctaaatagcttatagtaatagaaacctgctatattaatttccaattgccacttcttatataaggaattgctattgtcctattaaaaattacaatgcttcagagtggttttggatgccactgcatttctgtaggga

SEQ ID NO: 32120 - DNA, 599 bp, Chicken  19866894255186_2
  misc_feature (1)..(89): n is any nucleotide
nnnnnnnnnnnnnnnnnnnnnnnnnnnnnnnnnnnnnnnnnnnnnnnnnnnnnnnnnnnnnnnnnnnnnnnnnnnnnnnnnnnnnnnnnctaaatacatggttttctactttagatgtgttatgtgagtctttaagtgctgcacaaagggcatctttatcacctgacttttatcagctttgagtttagactccagaggtatgctttatatccttcttgcttattggagtctttcaattctttacagaactctgccactatatgccggaaagtgtcttgccctctcatgccytgttccaaygccactgtgcctgatggggagtgctgcccccgatgctggcgtaagtacttaaaaataccttcacacctctctacagtcggtagacatacacagatgtatagagaacaattggatagtctgcatctttaaattaaaactcaaatgtctatcctccgctaaatagcttatagtaatagaaacctgctatattaatttccaattgccacttcttatataaggaattgctattgtcctattaaaaattacaatgcttcagagtggttttggatgccactgcatttctgtagggaaagaaggag

SEQ ID NO: 32121 - DNA, 600 bp, Chicken  19866894255186_3
atagagaacaattggatagtctgcatctttaaattaaaactcaaatgtctatcctccgctaaatagcttatagtaatagaaacctgctatattaatttccaattgccacttcttatataaggaattgctattgtcctattaaaaattacaatgcttcagagtggttttggatgccactgcatttctgtagggaaagaaggagtttaggaatatgttggatcaatatcatgaagagaattgaaatggagctctgaaatccaaagaatataacacataagtacattcaggcagaacagattwttgaggtgtattaggtgctccactgtactgtattcaccagtgaatacttttctgtagtgcatgcattccacatctcagcaaactaaaatatatcagccaacaatattgttttccttatcctcatagcagctatgaaccaaacatatttacaaaaatgtttaaatgggtttctggacaataatacttttagttatcaatgctgattaaacttgagttttcttagaaaccttgttgaccatgaactagcatcagtgtctaacctatgtatttctctgaattcatcattattatgtaaaacta

SEQ ID NO: 32122 - DNA, 600 bp, Chicken  19866894255192_1
atgagaaatgagtgcctgatgggtgcgtgccattaaatggggccttatttcaaagcagttttcagtggggaaatggcactgtcaccccaggctgaagaggaaaactccttatctccacactgcgggatcctcagccatggttttcagttctgaggagaacttcattgaaaaaagggggaaaatgcagtgaagttcattctgcataggcggctgcttctattgggctgagggaagactgaattacaaaagaaaccttaaggggtgtattgtttttaattttacatttgtaacacacacatytccaagaagtaaatgctgccagtattatttagtaggaaatgagtgcggggaaagtcaattttatattcattttaatataaaaaaaattataaatttctcctttgttcatctctcaaatacctccctaatagcctgaggtaccacatcttcatgtgagcatcaccctgaattgcacagcacgatgctgctactccagagcaggcctggggagtccaaccccaaagcagactgggatttgtttggcagttttgatcttacctgcatgctttccacatggattagctgctttcctctcaaaaa

SEQ ID NO: 32123 - DNA, 600 bp, Chicken  19866894255207_1
gtaccatcacttttctcattgccttcaattaattttctctctgtcacatccagataaatgctggcactctctgccgctcaagtctataagctgtttttcattcctggtaatacaaagtctacataatgtgtgaggaagaatatgatttaagagtactgtaatactttaaagatgtattaatatataataacttctcctatttaatctgagacattttttaaattaaaaatacatcaaataaatatctctgtggctcttgtccaaaattactcaaaccacacaataaatccattataaaaytctctgctttgctgatggactcctgaaatgattctgtcacacgcacatataattgcacatttcaacctttcaaagaagagtaaaatatgctgaaaacgaaattcttacgtaattctgagaaactgcagttctgtgcatctaaatagaagatgtacttggaactaaatatattaaaattaagcttattaagtatcaagtgattaagtgccaaaattaaagctgtaaaagcatctaacgggaagaaaaattatttgtaaaaagcccaaagggataactgcacagtctaaaatgctttgcact

SEQ ID NO: 32124 - DNA, 600 bp, Chicken  19866894255208_1
acttctacaaagctgtgatagaaagaaggacaggttgttctttctctgctcctgcctaggtaagctggcatgagacctgaaatttagataacattgcagaacctggtttcactttatttggcaaataatggacttaagatagtgtatgcacacagcatggaagtaagagaacagtaagagctggcgatcatcatctttgatggatataaggaggataagcttattgctattgtttgaagaaataaggtactgtgaggaaaagcagagaaaaagaagagaggaagcactgcaaattgattrgtaaatgaaatcgtgagtaattgtttccagcctaaaacagttgtgtttgattaaaaaaaacaacacaacgtactatttctgttttctactgcatctagaaaatgtagattttctttctcattccttctacagaagttttacattctccttgatgctatggcctgctctttagttaatgcatgatgtctgatagaactacgtcagttcaacttttctggaagttacaaaatcattgtatttgtggcacatatattaatataaggcaagacttttaaacacattgtacttactctatattcc

SEQ ID NO: 32125 - DNA, 600 bp, Chicken  19866894255208_2
tgtgatagaaagaaggacaggttgttctttctctgctcctgcctaggtaagctggcatgagacctgaaatttagataacattgcagaacctggtttcactttatttggcaaataatggacttaagatagtgtatgcacacagcatggaagtaagagaacagtaagagctggcgatcatcatctttgatggatataaggaggataagcttattgctattgtttgaagaaataaggtactgtgaggaaaagcagagaaaaagaagagaggaagcactgcaaattgattrgtaaatgaaatcrtgagtaattgtttccagcctaaaacagttgtgtttgattaaaaaaaacaacacaacgtactatttctgttttctactgcatctagaaaatgtagattttctttctcattccttctacagaagttttacattctccttgatgctatggcctgctctttagttaatgcatgatgtctgatagaactacgtcagttcaacttttctggaagttacaaaatcattgtatttgtggcacatatattaatataaggcaagacttttaaacacattgtacttactctatattcctccaatctgatct

SEQ ID NO: 32126 - DNA, 600 bp, Chicken  19866894255208_3
gtgatagaaagaaggacaggttgttctttctctgctcctgcctaggtaagctggcatgagacctgaaatttagataacattgcagaacctggtttcactttatttggcaaataatggacttaagatagtgtatgcacacagcatggaagtaagagaacagtaagagctggcgatcatcatctttgatggatataaggaggataagcttattgctattgtttgaagaaataaggtactgtgaggaaaagcagagaaaaagaagagaggaagcactgcaaattgattrgtaaatgaaatcgrgagtaattgtttccagcctaaaacagttgtgtttgattaaaaaaaacaacacaacgtactatttctgttttctactgcatctagaaaatgtagattttctttctcattccttctacagaagttttacattctccttgatgctatggcctgctctttagttaatgcatgatgtctgatagaactacgtcagttcaacttttctggaagttacaaaatcattgtatttgtggcacatatattaatataaggcaagacttttaaacacattgtacttactctatattcctccaatctgatcta

SEQ ID NO: 32127 - DNA, 600 bp, Chicken  19866894255208_4
tgatagaaagaaggacaggttgttctttctctgctcctgcctaggtaagctggcatgagacctgaaatttagataacattgcagaacctggtttcactttatttggcaaataatggacttaagatagtgtatgcacacagcatggaagtaagagaacagtaagagctggcgatcatcatctttgatggatataaggaggataagcttattgctattgtttgaagaaataaggtactgtgaggaaaagcagagaaaaagaagagaggaagcactgcaaattgattrgtaaatgaaatcgtragtaattgtttccagcctaaaacagttgtgtttgattaaaaaaaacaacacaacgtactatttctgttttctactgcatctagaaaatgtagattttctttctcattccttctacagaagttttacattctccttgatgctatggcctgctctttagttaatgcatgatgtctgatagaactacgtcagttcaacttttctggaagttacaaaatcattgtatttgtggcacatatattaatataaggcaagacttttaaacacattgtacttactctatattcctccaatctgatctat

SEQ ID NO: 32128 - DNA, 600 bp, Chicken  19866894255208_5
gatagaaagaaggacaggttgttctttctctgctcctgcctaggtaagctggcatgagacctgaaatttagataacattgcagaacctggtttcactttatttggcaaataatggacttaagatagtgtatgcacacagcatggaagtaagagaacagtaagagctggcgatcatcatctttgatggatataaggaggataagcttattgctattgtttgaagaaataaggtactgtgaggaaaagcagagaaaaagaagagaggaagcactgcaaattgattrgtaaatgaaatcgtgrgtaattgtttccagcctaaaacagttgtgtttgattaaaaaaaacaacacaacgtactatttctgttttctactgcatctagaaaatgtagattttctttctcattccttctacagaagttttacattctccttgatgctatggcctgctctttagttaatgcatgatgtctgatagaactacgtcagttcaacttttctggaagttacaaaatcattgtatttgtggcacatatattaatataaggcaagacttttaaacacattgtacttactctatattcctccaatctgatctatt

SEQ ID NO: 32129 - DNA, 600 bp, Chicken  19866894255214_1
cttggccacgtacagaagaaagcaatcagcagctgaggaggggagctgacagcctgccagctgagtacaggcatcctactgctggaaaatagaaaataccagcaagtgtgtattaaaccactgcctgtctcctttgtgcattgtgctatttaagcttaatgatttaaaacactgtcttagagctggaactttgtgcatccaccctggagggaatctgaacacagctgcctcctccccagctagtcaccatcccactgctggtgctgcaatacctgatggcctcatgctattctgctgcargaaatactgcttccctgggtcagtgttgcagaagtagagacaagtccacataggaatctctcctctgctggtgataatgttgatctgggttctgacagmaagcactgatatattttgtaataagcagccattgcctgaaagctatggatggccagtatggcatcctctagttaaatcctgtctttttgagttcagctccaagtgtccaggtagaaacaaagactgcggaagmagatgacccaaccctgaaggtaacagctgtccatagagcagcgatcacctttctttgcttcagtggaa

SEQ ID NO: 32130 - DNA, 600 bp, Chicken  19866894255214_2
cagcaagtgtgtattaaaccactgcctgtctcctttgtgcattgtgctatttaagcttaatgatttaaaacactgtcttagagctggaactttgtgcatccaccctggagggaatctgaacacagctgcctcctccccagctagtcaccatcccactgctggtgctgcaatacctgatggcctcatgctattctgctgcargaaatactgcttccctgggtcagtgttgcagaagtagagacaagtccacataggaatctctcctctgctggtgataatgttgatctgggttctgacagmaagcactgatatattttgtaataagcagccattgcctgaaagctatggatggccagtatggcatcctctagttaaatcctgtctttttgagttcagctccaagtgtccaggtagaaacaaagactgcggaagmagatgacccaaccctgaaggtaacagctgtccatagagcagcgatcacctttctttgcttcagtggaacccgtatgtgatcaaatttctttttttccccatgtctttatcacccaagaactgtatttaattatcacttatatacatgctatgaagaatgacctgtaa

SEQ ID NO: 32131 - DNA, 600 bp, Chicken  19866894255214_3
tccccagctagtcaccatcccactgctggtgctgcaatacctgatggcctcatgctattctgctgcargaaatactgcttccctgggtcagtgttgcagaagtagagacaagtccacataggaatctctcctctgctggtgataatgttgatctgggttctgacagmaagcactgatatattttgtaataagcagccattgcctgaaagctatggatggccagtatggcatcctctagttaaatcctgtctttttgagttcagctccaagtgtccaggtagaaacaaagactgcggaagmagatgacccaaccctgaaggtaacagctgtccatagagcagcgatcacctttctttgcttcagtggaacccgtatgtgatcaaatttctttttttccccatgtctttatcacccaagaactgtatttaattatcacttatatacatgctatgaagaatgacctgtaaaaatctttccatagatacactgtcctcttaaatgtagattgytcatatctcatagaaaagttgtacagtgaaaccttttgttccactgaagaataatggtctttacctattggcagcagtaggacttgaattt

SEQ ID NO: 32132 - DNA, 600 bp, Chicken  19866894255214_4
ctatggatggccagtatggcatcctctagttaaatcctgtctttttgagttcagctccaagtgtccaggtagaaacaaagactgcggaagmagatgacccaaccctgaaggtaacagctgtccatagagcagcgatcacctttctttgcttcagtggaacccgtatgtgatcaaatttctttttttccccatgtctttatcacccaagaactgtatttaattatcacttatatacatgctatgaagaatgacctgtaaaaatctttccatagatacactgtcctcttaaatgtagattgytcatatctcatagaaaagttgtacagtgaaaccttttgttccactgaagaataatggtctttacctattggcagcagtaggacttgaatttrttccttatatcgcatttcttggaaaaaaacagaatttgtacaatgtatttagcattttgttgctgtatttttaatatcccttatttctatcaaatatgttgtatggctgttcagtaagaaaggtgttaataggagatcctgaacattttctaatgtaccttctggatgctttcatatgcttaataaatctcttctaaaaaaaaaaaag

SEQ ID NO: 32133 - DNA, 511 bp, Chicken  19866894255214_5
gatgacccaaccctgaaggtaacagctgtccatagagcagcgatcacctttctttgcttcagtggaacccgtatgtgatcaaatttctttttttccccatgtctttatcacccaagaactgtatttaattatcacttatatacatgctatgaagaatgacctgtaaaaatctttccatagatacactgtcctcttaaatgtagattgytcatatctcatagaaaagttgtacagtgaaaccttttgttccactgaagaataatggtctttacctattggcagcagtaggacttgaatttrttccttatatcgcatttcttggaaaaaaacagaatttgtacaatgtatttagcattttgttgctgtatttttaatatcccttatttctatcaaatatgttgtatggctgttcagtaagaaaggtgttaataggagatcctgaacattttctaatgtaccttctggatgctttcatatgcttaataaatctcttctaaaaaaaaaaaagaaa

SEQ ID NO: 32134 - DNA, 599 bp, Chicken  19866894255220_1
  misc_feature (1)..(48): n is any nucleotide
nnnnnnnnnnnnnnnnnnnnnnnnnnnnnnnnnnnnnnnnnnnnnnnnatacagaaggcagcaatgtattttgcagctagctgtaagatccatctagccctatgtacaatccacattagcaaacactgtctctctttcttctagggttcgttatttccaaataggctacagttccttttatttttaacattagtccttttcatagaatcatagaatcaccaagattggaaaagtcctccaagaggtccacttctactcaggtagccaggcagagctctgtagatagggaacatctcctcrgycctggctaggccaaccatgtttgaaataatctgaatttataggctgcagttgaagttgaagcactcattgaagattcagcaggtgaaaagaggcagctacaatcagggaagagaggtagctgttttagagtatgacatactgaattccaaagtagtcatctagaatcaggtcagaggaattgttcctaaaaagtgcctatttctgggaagaggctctggtaatcaatcatgatacagaatcgttsatcagataagtgtctcaggttgttgtggtgagtcccatctcagacttctgtc

SEQ ID NO: 32135 - DNA, 599 bp, Chicken  19866894255220_2
  misc_feature (1)..(46): n is any nucleotide
nnnnnnnnnnnnnnnnnnnnnnnnnnnnnnnnnnnnnnnnnnnnnnatacagaaggcagcaatgtattttgcagctagctgtaagatccatctagccctatgtacaatccacattagcaaacactgtctctctttcttctagggttcgttatttccaaataggctacagttccttttatttttaacattagtccttttcatagaatcatagaatcaccaagattggaaaagtcctccaagaggtccacttctactcaggtagccaggcagagctctgtagatagggaacatctcctcrgycctggctaggccaaccatgtttgaaataatctgaatttataggctgcagttgaagttgaagcactcattgaagattcagcaggtgaaaagaggcagctacaatcagggaagagaggtagctgttttagagtatgacatactgaattccaaagtagtcatctagaatcaggtcagaggaattgttcctaaaaagtgcctatttctgggaagaggctctggtaatcaatcatgatacagaatcgttsatcagataagtgtctcaggttgttgtggtgagtcccatctcagacttctgtccc

SEQ ID NO: 32136 - DNA, 600 bp, Chicken  19866894255220_3
cacttctactcaggtagccaggcagagctctgtagatagggaacatctcctcrgycctggctaggccaaccatgtttgaaataatctgaatttataggctgcagttgaagttgaagcactcattgaagattcagcaggtgaaaagaggcagctacaatcagggaagagaggtagctgttttagagtatgacatactgaattccaaagtagtcatctagaatcaggtcagaggaattgttcctaaaaagtgcctatttctgggaagaggctctggtaatcaatcatgatacagaatcgttsatcagataagtgtctcaggttgttgtggtgagtcccatctcagacttctgtcccacctacctcagaccaargccatggacggtgcacacagagctgtattccttcaggttaaagtaaacatgagtgttaaagcctgtgttccagtcctggcctcttaaggccactttgttctctagtaactgtggtgaaatggcagagggtctgggttcaatattaagggacttgaacccccacagctcctatgctgacttcagcttagccagtgtgtctgaacacatgccagatgttgctggacacaga

SEQ ID NO: 32137 - DNA, 600 bp, Chicken  19866894255220_4
atgtttgaaataatctgaatttataggctgcagttgaagttgaagcactcattgaagattcagcaggtgaaaagaggcagctacaatcagggaagagaggtagctgttttagagtatgacatactgaattccaaagtagtcatctagaatcaggtcagaggaattgttcctaaaaagtgcctatttctgggaagaggctctggtaatcaatcatgatacagaatcgttsatcagataagtgtctcaggttgttgtggtgagtcccatctcagacttctgtcccacctacctcagaccaargccatggacggtgcacacagagctgtattccttcaggttaaagtaaacatgagtgttaaagcctgtgttccagtcctggcctcttaaggccactttgttctctagtaactgtggtgaaatggcagagggtctgggttcaatattaagggacttgaacccccacagctcctatgctgacttcagcttagccagtgtgtctgaacacatgccagatgttgctggacacagacattcctcagtgggaatactgcagggccatagagacaaatacactgccccgcagcgtatttgagtattgag

SEQ ID NO: 32138 - DNA, 600 bp, Chicken  19866894255222_1
ctatcaggtaatgcagctgtcacttctttaacccctctctctgttctttcagtacttctggctgtacaggaacgtcagacactatcagaaagttgatgctggggttttttctgatttatctgctgtttgtgttgtgtgggtttttttttcccctatggttaagtttataagcacagctctgatgggttgcaccaacgtatctttctgatttagagatgttagttgtgacttcttcttaacttgaaaattaagaacttgaacactgcctttacttctgaccttcagcagctgggggcagcragtctggaattactgtgcattgcatggagaggttccctttatttttaaacaccttgctgataagttgttgatatcttaaacccagccactatgaaatactgaagtaagattcaatactcactcttcacccttgctgtacagctacgaattaattgtatgtgaccagttgcatgtctccatttcccttgggaggaggaaagagatgcctgaaaagtcttgggctatcacatctttggccatatagaaatgttttgtgcattggattacacttgttgttgttctctggttccctggtgacca

SEQ ID NO: 32139 - DNA, 600 bp, Chicken  19866894255223_1
ggtgcaatggatttataactacacaaaatcactggaacacttgtggaaatcacaaagattgtgatattatcagatttgaatgcaggaaaacaagcaattacacccccacttgcctcccccaacaaaacaagacaaaacagaaggctaaacaagacacaacacaataaaacagaaaatgggaaaaggcagactgggaataacaaataacgtatatacaggttacacttagagacagaaatacttccttgattcactatgttagaactatacctacctatatttctgtagttaaaacaatgkatggatgagatgagtcagtattaaatttccagatctgaatcaatgtcagtgatcatagtaaataagtttaaactagacatcattttttaatttctgctttgcattaaacacaacaaaatgaagaccatcatatgactgccagttaaaaacaacaacaacagaaatttgtctcaattaagggaccaaaacatagcatgagtccaaactcataataatatggtaaagagggaagcagtgaaaaagaacaattacggaaatattagatccaagagactcacctaatatggaatgtgatttttt

SEQ ID NO: 32140 - DNA, 600 bp, Chicken  19866894255228_1
aatctgttccagtgtgtcaccaccctctgggtgaaaaacttcctcccaaacgacatcagtgatctatagaatgaatctttagtttcactgcaaagaggtctgtgtataatttgcagtattctctaagagggctttgcgggcgaaacaattgagctctgcctctaactgcttcgtgattaaaggcaaggcactcccaaactttctgtctcctggttgcctccatctgtaagatggagataacctcagagggatgccttgaatattcatcagtgatttatggtacgctgccgatgaaaagtrttatgggcaatgttaatgaagcgtatagctcagcctctgctgcacattgatcgatacttcaggcatcttcagtctccacacagagcactagcaaattctgaaccgggcttagtctgtagatgacaataataactcccgtttatgcagggcttttcctttggaagaactccaaagaattttatgaactgtcatgcgagctcttggtgctgcgtgatkggttttgtaatgcgtttggcagcagtgtgtgagaggagaggaagagagaaataatgctgcgtgtggtgaggacagcacaggtag

SEQ ID NO: 32141 - DNA, 600 bp, Chicken  19866894255228_2
cctccatctgtaagatggagataacctcagagggatgccttgaatattcatcagtgatttatggtacgctgccgatgaaaagtrttatgggcaatgttaatgaagcgtatagctcagcctctgctgcacattgatcgatacttcaggcatcttcagtctccacacagagcactagcaaattctgaaccgggcttagtctgtagatgacaataataactcccgtttatgcagggcttttcctttggaagaactccaaagaattttatgaactgtcatgcgagctcttggtgctgcgtgatkggttttgtaatgcgtttggcagcagtgtgtgagaggagaggaagagagaaataatgctgcgtgtggtgaggacagcacaggtagctgagcaaggagtcaagctattgctgccagagctgtggcttagctttgaggtgatctgggattcctagagctcaagtggctgtcatgcaaaatgcgacatgtttcttgcggtcccattgcactgcaatgtgggttcaatcccagtcaagcagaaagagcagtttgctctcaggggtttccttcctgcggagcgtatgcacttctgaagatcattgt

SEQ ID NO: 32142 - DNA, 600 bp, Chicken  19866894255229_1
taagtaaattgtccagatgtctatatttaaattatgcaaagaggcataataccagattaaagaagttatgggtaaaactgtgcaatggcaaaactctttgcattaatatttaacctgattacatattacagcaaatacttatgctaacaggtactttgggtgcattcgatgtcattgcaaatgtgctattatgtcctaggttcacaaaaatgtctgaagatcttcagtggcaaagcagtaacataaagctccctataaaatatagatacgtacactgtacataaaggaagttcttaattyttgtttccctccagataagtattcccagtrttttgcattccctttaaatcagcagaaagaaatgcttcatacctacagaaaaakatactccaaatcactcagaattcagaggctcctgaaaacgtttatttcaaaatccagcagatacaccacattaaagaggctatgcaaatggaggccgtaagaagcacggatcagctggtcatccactaatcaaggtgggtaacaaacctaggatttcactagctcttcagcaatttttatcacctccatcccagagagggaaaggttaggggactt

SEQ ID NO: 32143 - DNA, 587 bp, Chicken  19866894255229_2
attatgcaaagaggcataataccagattaaagaagttatgggtaaaactgtgcaatggcaaaactctttgcattaatatttaacctgattacatattacagcaaatacttatgctaacaggtactttgggtgcattcgatgtcattgcaaatgtgctattatgtcctaggttcacaaaaatgtctgaagatcttcagtggcaaagcagtaacataaagctccctataaaatatagatacgtacactgtacataaaggaagttcttaattyttgtttccctccagataagtattcccagtrttttgcattccctttaaatcagcagaaagaaatgcttcatacctacagaaaaakatactccaaatcactcagaattcagaggctcctgaaaacgtttatttcaaaatccagcagatacaccacattaaagaggctatgcaaatggaggccgtaagaagcacggatcagctggtcatccactaatcaaggtgggtaacaaacctaggatttcactagctcttcagcaatttttatcacctccatcccagagagggaaaggttaggggacttacaatacagttccacag

SEQ ID NO: 32144 - DNA, 533 bp, Chicken  19866894255229_3
atggcaaaactctttgcattaatatttaacctgattacatattacagcaaatacttatgctaacaggtactttgggtgcattcgatgtcattgcaaatgtgctattatgtcctaggttcacaaaaatgtctgaagatcttcagtggcaaagcagtaacataaagctccctataaaatatagatacgtacactgtacataaaggaagttcttaattyttgtttccctccagataagtattcccagtrttttgcattccctttaaatcagcagaaagaaatgcttcatacctacagaaaaakatactccaaatcactcagaattcagaggctcctgaaaacgtttatttcaaaatccagcagatacaccacattaaagaggctatgcaaatggaggccgtaagaagcacggatcagctggtcatccactaatcaaggtgggtaacaaacctaggatttcactagctcttcagcaatttttatcacctccatcccagagagggaaaggttaggggacttacaatacagttccacag

SEQ ID NO: 32145 - DNA, 600 bp, Chicken  19866894255237_1
tctagtcacacagcatacatgctgaatattcattctgaacacgaagtttgccattaccagaagagttcagtagggtgtacccaatgtcacttttttttttgtggaggaagataaagaattcccagtgcttcagcagctgctgagaagtttcctccctgatcccatctagtgaaaacagtaggctttaatggagaatgttaatagcttgtgttgctcttagcctaaattcatatgtcttactaaattcaggtactttttatttgctttggccttcccccaaaaatttaaatctagaatggsaggcttgggtaattaacagtatggatatcagttgttggtaaccacttgatttttgagttatttgacgttggccttcctgctaccactgtggggtttggctttaggaggagggaagtgrgcgtcctgacrtgggctgtgagccatgggtggaggcacagccggcggggaggctggtgggcccaggtggctatcagcatctcaggggaatattctgaatacagatagtcacacagagcctctatagcagataatccatgtattgtttccacagtaaaataaagtagtctcttgaaatagttg

SEQ ID NO: 32146 - DNA, 600 bp, Chicken  19866894255237_2
ttcccagtgcttcagcagctgctgagaagtttcctccctgatcccatctagtgaaaacagtaggctttaatggagaatgttaatagcttgtgttgctcttagcctaaattcatatgtcttactaaattcaggtactttttatttgctttggccttcccccaaaaatttaaatctagaatggsaggcttgggtaattaacagtatggatatcagttgttggtaaccacttgatttttgagttatttgacgttggccttcctgctaccactgtggggtttggctttaggaggagggaagtgrgcgtcctgacrtgggctgtgagccatgggtggaggcacagccggcggggaggctggtgggcccaggtggctatcagcatctcaggggaatattctgaatacagatagtcacacagagcctctatagcagataatccatgtattgtttccacagtaaaataaagtagtctcttgaaatagttgttaaggattgtttattttgccctgctctacctctttgacaaccattttaaaatggttagcaagggtgcatttggtgttaggaggattctgtgaagtgagtgaggggcagatgctgtgg

SEQ ID NO: 32147 - DNA, 600 bp, Chicken  19866894255237_3
tcagcagctgctgagaagtttcctccctgatcccatctagtgaaaacagtaggctttaatggagaatgttaatagcttgtgttgctcttagcctaaattcatatgtcttactaaattcaggtactttttatttgctttggccttcccccaaaaatttaaatctagaatggsaggcttgggtaattaacagtatggatatcagttgttggtaaccacttgatttttgagttatttgacgttggccttcctgctaccactgtggggtttggctttaggaggagggaagtgrgcgtcctgacrtgggctgtgagccatgggtggaggcacagccggcggggaggctggtgggcccaggtggctatcagcatctcaggggaatattctgaatacagatagtcacacagagcctctatagcagataatccatgtattgtttccacagtaaaataaagtagtctcttgaaatagttgttaaggattgtttattttgccctgctctacctctttgacaaccattttaaaatggttagcaagggtgcatttggtgttaggaggattctgtgaagtgagtgaggggcagatgctgtgggattgataatg

SEQ ID NO: 32148 - DNA, 600 bp, Chicken  19866894255238_1
ggtggttactaccaataataccattcagctaaagagaagatacaattaactgttagcacaaaagaataacgacgtgttgggaaatgcaaaggtatgcaaaagccttctatgaactcatcttttatgtaattgagcagtttgatattttgaccctgagtttgtgtatcatgttaactcacttccctctacctcttccagaaaacaaagcctctataaactttaacaagtgaaggtcaaaaattactcacttttccacaacttggccatgtggcgatgtgaatgaacaaatagcagagttckcytgtaacaacagctgctgaatggagacagatctggagactaagtacagctgttaacttggagaatctggcatgaagcccttcccttacataaaatccagcaaacatgaggtgcaatacttgaaagataatcagtaattgcagaatacacattccacaatgtgcaacggtcactccaatgtgtactctcattgtatttaaagaggctgtttaacagatatgtgaacatacccgtttctgagtgaacctcattaattggatcatcacttgctttatcaagaaaacttaaaagcaaggacct

SEQ ID NO: 32149 - DNA, 600 bp, Chicken  19866894255238_2
tggttactaccaataataccattcagctaaagagaagatacaattaactgttagcacaaaagaataacgacgtgttgggaaatgcaaaggtatgcaaaagccttctatgaactcatcttttatgtaattgagcagtttgatattttgaccctgagtttgtgtatcatgttaactcacttccctctacctcttccagaaaacaaagcctctataaactttaacaagtgaaggtcaaaaattactcacttttccacaacttggccatgtggcgatgtgaatgaacaaatagcagagttckcytgtaacaacagctgctgaatggagacagatctggagactaagtacagctgttaacttggagaatctggcatgaagcccttcccttacataaaatccagcaaacatgaggtgcaatacttgaaagataatcagtaattgcagaatacacattccacaatgtgcaacggtcactccaatgtgtactctcattgtatttaaagaggctgtttaacagatatgtgaacatacccgtttctgagtgaacctcattaattggatcatcacttgctttatcaagaaaacttaaaagcaaggacctaa

SEQ ID NO: 32150 - DNA, 600 bp, Chicken  19866894255245_1
gagccgcatgctcacctggccctgcatggcaacaggcaatggagctgtaggtcccgtcgggagcggacccgcgcccggttcgagaggcagcagcgggtggcagaggagggagggcaaactggcagcccctggcaacctggggctgacggcaggaggctgggcgcaccgcgggtttccccccgccagcaggatggtgaacctggagtccgtgcacgcaggtaacgagcgcggcaggaaggattgggctgcaggaaatggggttgctgcgattcctatggcttctccccctcctctcctctsctgtcggagtcagcgatcgcagctggcacgcagggatggatgctcccctgaccccttttagggtgcgcagtgtggaagcgctgctcgcagtgctggcaccaacgtgggctgcagagcagagcagaggggaaggcactggggcagctggaaagtggggaggcagtgcctgagccccaggtctggtgtcagtggggtaaagctgggagcagtgagaggggtgaagtcgcagagggatgcgggaaggatgtgtgartgagagggaggtggggaggtgggctgcaagaaggaaagggaatgaca

SEQ ID NO: 32151 - DNA, 483 bp, Chicken  19866894255245_2
aatggggttgctgcgattcctatggcttctccccctcctctcctctsctgtcggagtcagcgatcgcagctggcacgcagggatggatgctcccctgaccccttttagggtgcgcagtgtggaagcgctgctcgcagtgctggcaccaacgtgggctgcagagcagagcagaggggaaggcactggggcagctggaaagtggggaggcagtgcctgagccccaggtctggtgtcagtggggtaaagctgggagcagtgagaggggtgaagtcgcagagggatgcgggaaggatgtgtgartgagagggaggtggggaggtgggctgcaagaaggaaagggaatgacaaggagggaaaaggagggagaaatgaatgagcagggagctgtaggaggatggggcgactcctcgtgggatgggggaggacagggaatgaatgaagggtgatacgcagaaagagcacacgcttctcccaggggggctg

SEQ ID NO: 32152 - DNA, 567 bp, Chicken  19866894255251_1
tggggaataaaagtattgtattatactgccatggtagcagcctatctgcagtacaagtacaaaagtagaagaaaattgaaagtttaagcacagaactgagtatgaaatccagagttgtggtgtttctcattagcaggtgtcatttttgagatatctgtgcaagtctacagctgtttcttcccttttaagtatggcagctctatttcaaatgactggctacagcaaactcagcaaaaaagactgcaaacctaaaattctgggaagcagagggagcgtacctaacttctgaagaagcaacaragtattacatgagcttcctgcagcattactgatgggaattgcccccagagcctaaccagttctaggacttcagtggaagttatgagcmcagagattttgtccaaaccagtccctttatgtgtactgcaagtggctcaggatagatttgtcagaatgaattgcactgctgtttaggcagcctctgctggttcaaaaaaatgccctggcaatgcacatcactaggtgtccagacagataagctagcgagagtggttacagagcagggag

SEQ ID NO: 32153 - DNA, 479 bp, Chicken  19866894255251_2
cacagaactgagtatgaaatccagagttgtggtgtttctcattagcaggtgtcatttttgagatatctgtgcaagtctacagctgtttcttcccttttaagtatggcagctctatttcaaatgactggctacagcaaactcagcaaaaaagactgcaaacctaaaattctgggaagcagagggagcgtacctaacttctgaagaagcaacaragtattacatgagcttcctgcagcattactgatgggaattgcccccagagcctaaccagttctaggacttcagtggaagttatgagcmcagagattttgtccaaaccagtccctttatgtgtactgcaagtggctcaggatagatttgtcagaatgaattgcactgctgtttaggcagcctctgctggttcaaaaaaatgccctggcaatgcacatcactaggtgtccagacagataagctagcgagagtggttacagagcagggag

SEQ ID NO: 32154 - DNA, 600 bp, Chicken  19866894255253_1
acagtaattatcccaaaacctcccccccccacaacacacctttcacatgtcccagctgtgggatccatgggcatgggccatgtcatcccttccaggagcctacactgctcctcattgaaatgtagcagggaacaccaacaggaggatatgggaatgggctgtaaaccaccctggaaatgcttatattaggaggtaaaatgcttctggtctgatctctaccactgagggcaggaggcattggacaacctccatgaacaccatcacgtggcagcactccacagcccatcccatttccctccrttgtgcccagccacctgtctctccttcccctagtcttccacgttgtayttcattccctcagtcccagcacgttccatggctcatgctcacaagaagagacagcaaagcaatttatggtcttgctgagtccagcctttcctgtccccatggccattcagcctgtgccctctcttgtacctgtacrcttttcatgagctgtgtcagactttttaagaagaaaaacgagtgtgggggttttcatccagaaatgacatttttagaagcagcctcatcagtctaaacctcaaataaacttaaatt

SEQ ID NO: 32155 - DNA, 597 bp, Chicken  19866894255253_2
gtcccagctgtgggatccatgggcatgggccatgtcatcccttccaggagcctacactgctcctcattgaaatgtagcagggaacaccaacaggaggatatgggaatgggctgtaaaccaccctggaaatgcttatattaggaggtaaaatgcttctggtctgatctctaccactgagggcaggaggcattggacaacctccatgaacaccatcacgtggcagcactccacagcccatcccatttccctccrttgtgcccagccacctgtctctccttcccctagtcttccacgttgtayttcattccctcagtcccagcacgttccatggctcatgctcacaagaagagacagcaaagcaatttatggtcttgctgagtccagcctttcctgtccccatggccattcagcctgtgccctctcttgtacctgtacrcttttcatgagctgtgtcagactttttaagaagaaaaacgagtgtgggggttttcatccagaaatgacatttttagaagcagcctcatcagtctaaacctcaaataaacttaaatttcaggcacagaaagaggctatctatctaccagtagtatataatgt

SEQ ID NO: 32156 - DNA, 461 bp, Chicken  19866894255253_3
attaggaggtaaaatgcttctggtctgatctctaccactgagggcaggaggcattggacaacctccatgaacaccatcacgtggcagcactccacagcccatcccatttccctccrttgtgcccagccacctgtctctccttcccctagtcttccacgttgtayttcattccctcagtcccagcacgttccatggctcatgctcacaagaagagacagcaaagcaatttatggtcttgctgagtccagcctttcctgtccccatggccattcagcctgtgccctctcttgtacctgtacrcttttcatgagctgtgtcagactttttaagaagaaaaacgagtgtgggggttttcatccagaaatgacatttttagaagcagcctcatcagtctaaacctcaaataaacttaaatttcaggcacagaaagaggctatctatctaccagtagtatataatgt

SEQ ID NO: 32157 - DNA, 600 bp, Chicken  19866894255254_1
gccctgctcagccctgtggctcctgcagcggggacagcccaaggagggggaccagaggggctatggacagcccggataacttcccacattggagctggagggtgccagggatccaatccagcagcaacattcctgcactgccatcagcaggagctctcagatgtggctctcagcccttctacctccagcaagaaggcagatgcttagaggggagcagcccccacctccaggtgccagggccagccctgctgtccctccatgcaccatcatcacaccagtttccttaccacccagccggcrggacgctgccccccaccaaacagccatcagtgcaactcagatatggccacctgtcccagaacagaagggccatgaagcagccgtggcagtcgctgaatgcttggcaccacgcagcccctctctgacctcctgtggccacagctcccctctgacattacaaacctaaaaagcgcccagcatggccacatcactctcatcccagcrcattgctaccttgcttctgccatcaagtgccarcagcttcggtctgaagcagccctgcatggtcagggttcagcagcccctggcgatgggctgctt

SEQ ID NO: 32158 - DNA, 600 bp, Chicken  19866894255254_2
tagaggggagcagcccccacctccaggtgccagggccagccctgctgtccctccatgcaccatcatcacaccagtttccttaccacccagccggcrggacgctgccccccaccaaacagccatcagtgcaactcagatatggccacctgtcccagaacagaagggccatgaagcagccgtggcagtcgctgaatgcttggcaccacgcagcccctctctgacctcctgtggccacagctcccctctgacattacaaacctaaaaagcgcccagcatggccacatcactctcatcccagcrcattgctaccttgcttctgccatcaagtgccarcagcttcggtctgaagcagccctgcatggtcagggttcagcagcccctggcgatgggctgctttgtttccccaaaactctcaagcccagcaactttccctactcacagccagtgctcaggaacatggaaaccagagcagagtcctcagctgcaggagacgggagccccacggggcaagcgttagcagaaggtgttttaggagacagcaggcagagcatgctcctttctcttgtcctgggacctccacgcaaggcatgggccatcatg

SEQ ID NO: 32159 - DNA, 600 bp, Chicken  19866894255254_3
ggccagccctgctgtccctccatgcaccatcatcacaccagtttccttaccacccagccggcrggacgctgccccccaccaaacagccatcagtgcaactcagatatggccacctgtcccagaacagaagggccatgaagcagccgtggcagtcgctgaatgcttggcaccacgcagcccctctctgacctcctgtggccacagctcccctctgacattacaaacctaaaaagcgcccagcatggccacatcactctcatcccagcrcattgctaccttgcttctgccatcaagtgccarcagcttcggtctgaagcagccctgcatggtcagggttcagcagcccctggcgatgggctgctttgtttccccaaaactctcaagcccagcaactttccctactcacagccagtgctcaggaacatggaaaccagagcagagtcctcagctgcaggagacgggagccccacggggcaagcgttagcagaaggtgttttaggagacagcaggcagagcatgctcctttctcttgtcctgggacctccacgcaaggcatgggccatcatggagaggcacaggggatggcacatccctgcccca

SEQ ID NO: 32160 - DNA, 596 bp, Chicken  19866894255254_4
tgaagcagccctgcatggtcagggttcagcagcccctggcgatgggctgctttgtttccccaaaactctcaagcccagcaactttccctactcacagccagtgctcaggaacatggaaaccagagcagagtcctcagctgcaggagacgggagccccacggggcaagcgttagcagaaggtgttttaggagacagcaggcagagcatgctcctttctcttgtcctgggacctccacgcaaggcatgggccatcatggagaggcacaggggatggcacatccctgccccaccagccatgcmaccgggagaccccagtgaggcaccccaagggcagccaggggctgaagctcttccctcaggtcttgcacgctgaactgcagcccccctccaagggctcccttttgttaccagcacggtcagagccctttgccaggacccggtgccaccgctcacagctccaggatatgcccccacctgggccacagctgtgtgcacggggcygagcccrgaaagcagctgcaaaraggatgaggcacgttcatcatccacccctggaaccagagggagcacggggcacaaaacccctcactcgggag

SEQ ID NO: 32161 - DNA, 395 bp, Chicken  19866894255254_5
gagcatgctcctttctcttgtcctgggacctccacgcaaggcatgggccatcatggagaggcacaggggatggcacatccctgccccaccagccatgcmaccgggagaccccagtgaggcaccccaagggcagccaggggctgaagctcttccctcaggtcttgcacgctgaactgcagcccccctccaagggctcccttttgttaccagcacggtcagagccctttgccaggacccggtgccaccgctcacagctccaggatatgcccccacctgggccacagctgtgtgcacggggcygagcccrgaaagcagctgcaaaraggatgaggcacgttcatcatccacccctggaaccagagggagcacggggcacaaaacccctcactcgggag

SEQ ID NO: 32162 - DNA, 388 bp, Chicken  19866894255254_6
ctcctttctcttgtcctgggacctccacgcaaggcatgggccatcatggagaggcacaggggatggcacatccctgccccaccagccatgcmaccgggagaccccagtgaggcaccccaagggcagccaggggctgaagctcttccctcaggtcttgcacgctgaactgcagcccccctccaagggctcccttttgttaccagcacggtcagagccctttgccaggacccggtgccaccgctcacagctccaggatatgcccccacctgggccacagctgtgtgcacggggcygagcccrgaaagcagctgcaaaraggatgaggcacgttcatcatccacccctggaaccagagggagcacggggcacaaaacccctcactcgggag

SEQ ID NO: 32163 - DNA, 372 bp, Chicken  19866894255254_7
tgggacctccacgcaaggcatgggccatcatggagaggcacaggggatggcacatccctgccccaccagccatgcmaccgggagaccccagtgaggcaccccaagggcagccaggggctgaagctcttccctcaggtcttgcacgctgaactgcagcccccctccaagggctcccttttgttaccagcacggtcagagccctttgccaggacccggtgccaccgctcacagctccaggatatgcccccacctgggccacagctgtgtgcacggggcygagcccrgaaagcagctgcaaaraggatgaggcacgttcatcatccacccctggaaccagagggagcacggggcacaaaacccctcactcgggag

SEQ ID NO: 32164 - DNA, 600 bp, Chicken  19866894255264_1
tgttgcagctgtcagactgcagctgtgccgctgcactcagggcagaccagcagcagctccccgcagcctgctcactctgtgctgcacccagcccgctcctgccccgttcccagtgtgcccatgcacaggtgatgggctttggccagctcacagccagcagtgataggctgtgtcgcacttttcccctttgcactggcaattttagtacctgcacaagtgagtcggcaactcatgggcatgctgaagggcagtccctttgttgctgagtgagtgaagtcttcactccagccctcaggtttmacctctgagtggttttgctgtgtttccggtcacttccatgcgtgcctctttgcagtgactgctgcagcacctgtgcatgacccctatggtgaactctttgttcctgctgggtcttagagcatatgtccagaggttgccttcccccaggcctagagtgtgtttggggtggcagcagcataataagaagggaataagggaagagcagtgctgcgaaatggattgagcaaaaagcagtcttggaaatacccagtgagagatgtgcgtggccatgtatctcccagtatcagatggtttgttcct

SEQ ID NO: 32165 - DNA, 600 bp, Chicken  19866894255264_2
ccgttcccagtgtgcccatgcacaggtgatgggctttggccagctcacagccagcagtgataggctgtgtcgcacttttcccctttgcactggcaattttagtacctgcacaagtgagtcggcaactcatgggcatgctgaagggcagtccctttgttgctgagtgagtgaagtcttcactccagccctcaggtttmacctctgagtggttttgctgtgtttccggtcacttccatgcgtgcctctttgcagtgactgctgcagcacctgtgcatgacccctatggtgaactctttgttmctgctgggtcttagagcatatgtccagaggttgccttcccccaggcctagagtgtgtttggggtggcagcagcataataagaagggaataagggaagagcagtgctgcgaaatggattgagcaaaaagcagtcttggaaatacccagtgagagatgtgcgtggccatgtatctcccagtatcagatggtttgttcctgcagccagtcatcaggtcacacagaagagaaggcgtctgtctggaaatctcattttcacactcccactgtctgtgttttcaattcaaatgctgccccaaacat

SEQ ID NO: 32166 - DNA, 600 bp, Chicken  19866894255268_1
tggcagctaacacacaacacttgctaacccagctagtgtaagtcaaattgtcattacatgacaatatcaacacttattccacaacatttgctccttctaggcattcaaagggagtttttatcttgatacttgttctactttcttaatattttaactcagctatattattcacaccaacatttcaacgataactcagtctgcacctggctttattctccttaccttgacgaatgttactctttctattggcagctcctcaagagcactgtgctgctctgaaaaccactcagctaaacacamgctttattttgttaacttttgataactcgggtgtgtgactctgacggcagtgctttctttgctaaagctcccttttcatctgcaggcaaagcaaagagagctgacaccccatctgtggctctacagccgtgtccctgcatgcagcaggggaccaggcagcactctgtgcaccggttttgcactcctgctgctgtgagaacagcacctggctgttcacaaaagctgttcacctcttctgagaccgtgcaaagtttttgcatgacagaatcagcaacgtgaggcaaaagttaagcttattta

SEQ ID NO: 32167 - DNA, 600 bp, Chicken  19866894255275_1
ttccccaactctaataaacttggatttaccactgatgtgactcacagggaaagaaagcatgaagagaccgtgagaggaaaatagctaatgtgttagtctatttgatggcacaggattatttggtacagtaattagtgcagcatgtttaggaagcctacaaaaaaatactagtatcagagaaaaaaagaaaaaagatactgtcaaatacttccaataattttagtactgtttcaatacattattatgcaggttttctaataaaatttatttctgtgtagtagactaggcaggagggagggraaaaaaaagagatataattctgttcttgcagatggtaacgtgacaacttgcactgaattcgaggggacctttcacctgaggagctcacactcattaccatatcttctgcattaacctggcatagcaccctgctagcactgctttgcagcatcttgctgaatgggaacactgcgactgctaaaagcagygtgactgaaggtggctacctttctgctggaaaaacgtagtacacggcaaataaccctttaaaaataaagacacggcagctcatagtgaacacacrcttttcctgctgttcat

SEQ ID NO: 32168 - DNA, 600 bp, Chicken  19866894255275_2
aaaaagatactgtcaaatacttccaataattttagtactgtttcaatacattattatgcaggttttctaataaaatttatttctgtgtagtagactaggcaggagggagggraaaaaaaagagatataattctgttcttgcagatggtaacgtgacaacttgcactgaattcgaggggacctttcacctgaggagctcacactcattaccatatcttctgcattaacctggcatagcaccctgctagcactgctttgcagcatcttgctgaatgggaacactgcgactgctaaaagcagygtgactgaaggtggctacctttctgctggaaaaacgtagtacacggcaaataaccctttaaaaataaagacacggcagctcatagtgaacacacrcttttcctgctgttcatacctagcatgtaaacacacaacctacaccacagcagaggctgaagatctgagagcctcaaggatctccttctaaattgcaagtgggattgttaattctgttaggagaaataaaggttttccctgggtggaacaaaggtgacttrggaatttcctccctgctccatcacatcccatgtctgaagctgac

SEQ ID NO: 32169 - DNA, 600 bp, Chicken  19866894255275_3
taggcaggagggagggraaaaaaaagagatataattctgttcttgcagatggtaacgtgacaacttgcactgaattcgaggggacctttcacctgaggagctcacactcattaccatatcttctgcattaacctggcatagcaccctgctagcactgctttgcagcatcttgctgaatgggaacactgcgactgctaaaagcagygtgactgaaggtggctacctttctgctggaaaaacgtagtacacggcaaataaccctttaaaaataaagacacggcagctcatagtgaacacacrcttttcctgctgttcatacctagcatgtaaacacacaacctacaccacagcagaggctgaagatctgagagcctcaaggatctccttctaaattgcaagtgggattgttaattctgttaggagaaataaaggttttccctgggtggaacaaaggtgacttrggaatttcctccctgctccatcacatcccatgtctgaagctgacttaggaggactctataaacagctcagaaaaaggtcccaaaaatatgcagctgggatcaaagcccattgcctatgagcacatggtcctccacaggg

SEQ ID NO: 32170 - DNA, 499 bp, Chicken  19866894255275_4
gcagcatcttgctgaatgggaacactgcgactgctaaaagcagygtgactgaaggtggctacctttctgctggaaaaacgtagtacacggcaaataaccctttaaaaataaagacacggcagctcatagtgaacacacrcttttcctgctgttcatacctagcatgtaaacacacaacctacaccacagcagaggctgaagatctgagagcctcaaggatctccttctaaattgcaagtgggattgttaattctgttaggagaaataaaggttttccctgggtggaacaaaggtgacttrggaatttcctccctgctccatcacatcccatgtctgaagctgacttaggaggactctataaacagctcagaaaaaggtcccaaaaatatgcagctgggatcaaagcccattgcctatgagcacatggtcctccacaggggaaactcatttgacccagagacgatgcaaaccagtcatcatacactcaacatttgaaagt

SEQ ID NO: 32171 - DNA, 599 bp, Chicken  19866894255277_1
  misc_feature (1)..(2): n is any nucleotide
nnctgttatgctgtttcacatgagctggtaggggggtggaggggatttaagtttcataaattatagaatggattgagttggaaggaatcttcaagatcatctggtttcaatacgactcataaacaataactgatagtgttttgtttgggataccactagacttggcttttatatcacactattttaaagtactttctaacatgaggaatttggtaaagaaaatctcagattttagctcactcatttttgtaattgaattgcaagaaatcaaacaaaaccattgggcttgctgccacttcyataagaagaaaatggcacaaggcagctagcatatctgtttgcaggatatgaaccacagagttgattagttgatctgaaagcctgagacacacaaatgatggataactcttayctctgatgctttggttcagcaaagcatctacacatatgcctaatcttaaaaaccttggacaaaatcattactccacagaagtcaatataattgagctctggcttctccagagcaagtactatatcatccactgcatgtactggcattccttgccaaatagcaacctaaatgcatataacaagaaggg

SEQ ID NO: 32172 - DNA, 600 bp, Chicken  19866894255277_2
cgactcataaacaataactgatagtgttttgtttgggataccactagacttggcttttatatcacactattttaaagtactttctaacatgaggaatttggtaaagaaaatctcagattttagctcactcatttttgtaattgaattgcaagaaatcaaacaaaaccattgggcttgctgccacttcyataagaagaaaatggcacaaggcagctagcatatctgtttgcaggatatgaaccacagagttgattagttgatctgaaagcctgagacacacaaatgatggataactcttayctctgatgctttggttcagcaaagcatctacacatatgcctaatcttaaaaaccttggacaaaatcattactccacagaagtcaatataattgagctctggcttctccagagcaagtactatatcatccactgcatgtactggcattccttgccaaatagcaacctaaatgcatataacaagaagggtgcttcgtggtgtcagttgacctatacttggtgagatttatctacctctaaaatatgtggagtgaaaaaatattttgtagttcatgctgtcttacaagattacgaatatttat

SEQ ID NO: 32173 - DNA, 600 bp, Chicken  19866894255278_1
aaacacttgcagcacagaactacagcgtggacagactgtgccaatgctgtaaaaaggtgaatttggatcataaaatggcagctctaacgagaagtttcatgtgcagataaaattgcttgcaaagtgctatccatctttgtccttggaagggaagcatcaaattgctgcatggcacagctaacacagcattcagttttgcagctcgagatgctttgaaacatttccttctgtctaatgttgaaaatatataaagctcaatttcaaaacaatgcatcgatcacctaccaactggtccacttyttgataattctacagtgccaaacctttctggatcagcagaaaaaaatacttcctttgctaatgatgtatgctgctggtaaaactgaaagcctacagttaggaaacgaccttagcactgagctaacacagccagcttgtgtgctcactcctcttcctccagtaacccagctctctgcctgtgcagcttgtaactcctgccctgcagtgcttctggtccccctycttgcccccttcctcaggmtggctgatcagcagacacacaggtcttactttggactgataaacacagcagtgagaacg

SEQ ID NO: 32174 - DNA, 600 bp, Chicken  19866894255278_2
tccttctgtctaatgttgaaaatatataaagctcaatttcaaaacaatgcatcgatcacctaccaactggtccacttyttgataattctacagtgccaaacctttctggatcagcagaaaaaaatacttcctttgctaatgatgtatgctgctggtaaaactgaaagcctacagttaggaaacgaccttagcactgagctaacacagccagcttgtgtgctcactcctcttcctccagtaacccagctctctgcctgtgcagcttgtaactcctgccctgcagtgcttctggtccccctycttgcccccttcctcaggmtggctgatcagcagacacacaggtcttactttggactgataaacacagcagtgagaacgctctttctctgctagytctagcctaaccatttccagggctgtgatgtggcattgtgaatgatgcacataagaatgttcttggcatcccaagatgttgctaaagctgcaaatactcttctaaacaaaacagccatgttaattgaaagtggtttaaaagaaagaaaagcaacaaraataagcaaagttatttgaaacaccccctgccactccagatttcatcgg

SEQ ID NO: 32175 - DNA, 600 bp, Chicken  19866894255278_3
aaatatataaagctcaatttcaaaacaatgcatcgatcacctaccaactggtccacttyttgataattctacagtgccaaacctttctggatcagcagaaaaaaatacttcctttgctaatgatgtatgctgctggtaaaactgaaagcctacagttaggaaacgaccttagcactgagctaacacagccagcttgtgtgctcactcctcttcctccagtaacccagctctctgcctgtgcagcttgtaactcctgccctgcagtgcttctggtccccctycttgcccccttcctcaggmtggctgatcagcagacacacaggtcttactttggactgataaacacagcagtgagaacgctctttctctgctagytctagcctaaccatttccagggctgtgatgtggcattgtgaatgatgcacataagaatgttcttggcatcccaagatgttgctaaagctgcaaatactcttctaaacaaaacagccatgttaattgaaagtggtttaaaagaaagaaaagcaacaaraataagcaaagttatttgaaacaccccctgccactccagatttcatcggggctatactgtagcagtta

SEQ ID NO: 32176 - DNA, 600 bp, Chicken  19866894255278_4
gccaaacctttctggatcagcagaaaaaaatacttcctttgctaatgatgtatgctgctggtaaaactgaaagcctacagttaggaaacgaccttagcactgagctaacacagccagcttgtgtgctcactcctcttcctccagtaacccagctctctgcctgtgcagcttgtaactcctgccctgcagtgcttctggtccccctycttgcccccttcctcaggmtggctgatcagcagacacacaggtcttactttggactgataaacacagcagtgagaacgctctttctctgctagytctagcctaaccatttccagggctgtgatgtggcattgtgaatgatgcacataagaatgttcttggcatcccaagatgttgctaaagctgcaaatactcttctaaacaaaacagccatgttaattgaaagtggtttaaaagaaagaaaagcaacaaraataagcaaagttatttgaaacaccccctgccactccagatttcatcggggctatactgtagcagttacatatgaaagtgtttcctggtttaggagtttgcaaggtactgagaataaaaagggagaggtgggtgcaggaaaag

SEQ ID NO: 32177 - DNA, 600 bp, Chicken  19866894255278_5
tgcctgtgcagcttgtaactcctgccctgcagtgcttctggtccccctycttgcccccttcctcaggmtggctgatcagcagacacacaggtcttactttggactgataaacacagcagtgagaacgctctttctctgctagytctagcctaaccatttccagggctgtgatgtggcattgtgaatgatgcacataagaatgttcttggcatcccaagatgttgctaaagctgcaaatactcttctaaacaaaacagccatgttaattgaaagtggtttaaaagaaagaaaagcaacaaraataagcaaagttatttgaaacaccccctgccactccagatttcatcggggctatactgtagcagttacatatgaaagtgtttcctggtttaggagtttgcaaggtactgagaataaaaagggagaggtgggtgcaggaaaagaatgttttgtcattaaaagcactatctagggtatacactgcagacagtagttcattttcctcatcagagaccatatttttgaagtggtcttggttttcagttcactgatagaagggcaggattgaacagtcagcagaagaaggaaaaagctttctag

SEQ ID NO: 32178 - DNA, 600 bp, Chicken  19866894255282_1
agatatttttaataaaggaaagcttgttaaaaataaactgtaaagaggatttgggtggaatcacaaatcatctcattagcatttggggaaaaaaaagcaaagatgaaatatcagcttgtaaagtcttttctgcaaagccaactttctcccccttccatctggcttattgtatcagcattccaaaattcgcattttcaaagaagtttctaaaatggcaattccagactgtttttcttcttactaaagaaaggaatatacacccaatatagaaatataaagaggaatataatgaattagatytttttgtgtgtgtgtctgacagttgatttttaaagaggaaaaactgtgggtggtttcaggcctgtattgcctcttatgctaaaaagcaagcatggtgctgagtctttggtctctggtcaaacaaaaactgacctcagtgatctaacaaggctcagcatcataagatcacacctttaatgttgggggaagcccccatcacttacaggactgatcgagaagaagaagatgtggcaagagcaagagcagtgcatgaagggcaaactggaaaatctgctttagataaggaatttgaaattttcc

SEQ ID NO: 32179 - DNA, 599 bp, Chicken  19866894255288_1
  misc_feature (1)..(195): n is any nucleotide
nnnnnnnnnnnnnnnnnnnnnnnnnnnnnnnnnnnnnnnnnnnnnnnnnnnnnnnnnnnnnnnnnnnnnnnnnnnnnnnnnnnnnnnnnnnnnnnnnnnnnnnnnnnnnnnnnnnnnnnnnnnnnnnnnnnnnnnnnnnnnnnnnnnnnnnnnnnnnnnnnnnnnnnnnnnnnnnnnnnnnnnnnnnnnnnnnnnagaagcagcccatgcttcagcacttctgttcacctgctcccagggcagtgcatgaatagccctaggagcatgttttaaaaatccctcacttttcaggatctagcyttttgggascgggacttaatttctcatgagtagctttttcttccatggcagcatcaaattgctgctggttgggttagccagcagtgcctggttctgctctgctgttgggtgctcatatgactgggatgcaaactcttgtcctccagagcctgcacattgggtcttggccttttctttctttcacttgtaccctttctgctactgacaggtcccagctccagcacctgccaagatgatggggaggatcaccaccactcagtgacctagaatttcaaagggaggatgcccagctttttcca

SEQ ID NO: 32180 - DNA, 599 bp, Chicken  19866894255288_2
  misc_feature (1)..(186): n is any nucleotide
nnnnnnnnnnnnnnnnnnnnnnnnnnnnnnnnnnnnnnnnnnnnnnnnnnnnnnnnnnnnnnnnnnnnnnnnnnnnnnnnnnnnnnnnnnnnnnnnnnnnnnnnnnnnnnnnnnnnnnnnnnnnnnnnnnnnnnnnnnnnnnnnnnnnnnnnnnnnnnnnnnnnnnnnnnnnnnnnnnnnnnnnnnagaagcagcccatgcttcagcacttctgttcacctgctcccagggcagtgcatgaatagccctaggagcatgttttaaaaatccctcacttttcaggatctagcyttttgggascgggacttaatttctcatgagtagctttttcttccatggcagcatcaaattgctgctggttgggttagccagcagtgcctggttctgctctgctgttgggtgctcatatgactgggatgcaaactcttgtcctccagagcctgcacattgggtcttggccttttctttctttcacttgtaccctttctgctactgacaggtcccagctccagcacctgccaagatgatggggaggatcaccaccactcagtgacctagaatttcaaagggaggatgcccagctttttccatggtcatac

SEQ ID NO: 32181 - DNA, 599 bp, Chicken  19866894255289_1
  misc_feature (1)..(8): n is any nucleotide
nnnnnnnnatttactaaatacagacaacggaaatcttacgtatgggctgcaatcagatcaaactgcatttaggccagacttcattagcactgcctatattgtcaaagctcaactgaccagttgtgctgcaaggaccccaacactgtgagcttgcttaagcagaaagagtgcagcatcagcagttcctctggcttccatcaaaaaaaaaaaacaccaacaaatcatcactattaggaagtgaaagcacagagacagcttccgaccccccttccacaggcattgcttactcagtgtgaaatragaaacagggagaaatcctgtgggagcaccrattaggrtccacatgcaccaagctgcctgctctatgaacactttccacagtgtgcatggagcaccttgtcttcttaagtcttgaccccttacattgccctrcttgtgtattagaagtgcatcaggatcacgctgacttaagaaatacttggtcacagaatgggacggctctgatccacagtcccaaaaccagaaggcacaggggacaggaggggctgcgtgaacacagctcacaggagctgaacagctctctcagcgccaaaaataaa

SEQ ID NO: 32182 - DNA, 600 bp, Chicken  19866894255289_2
aatcttacgtatgggctgcaatcagatcaaactgcatttaggccagacttcattagcactgcctatattgtcaaagctcaactgaccagttgtgctgcaaggaccccaacactgtgagcttgcttaagcagaaagagtgcagcatcagcagttcctctggcttccatcaaaaaaaaaaaacaccaacaaatcatcactattaggaagtgaaagcacagagacagcttccgaccccccttccacaggcattgcttactcagtgtgaaatragaaacagggagaaatcctgtgggagcaccrattaggrtccacatgcaccaagctgcctgctctatgaacactttccacagtgtgcatggagcaccttgtcttcttaagtcttgaccccttacattgccctrcttgtgtattagaagtgcatcaggatcacgctgacttaagaaatacttggtcacagaatgggacggctctgatccacagtcccaaaaccagaaggcacaggggacaggaggggctgcgtgaacacagctcacaggagctgaacagctctctcagcgccaaaaataaaccactcccactttaattatgtcaactgatctt

SEQ ID NO: 32183 - DNA, 600 bp, Chicken  19866894255289_3
cgtatgggctgcaatcagatcaaactgcatttaggccagacttcattagcactgcctatattgtcaaagctcaactgaccagttgtgctgcaaggaccccaacactgtgagcttgcttaagcagaaagagtgcagcatcagcagttcctctggcttccatcaaaaaaaaaaaacaccaacaaatcatcactattaggaagtgaaagcacagagacagcttccgaccccccttccacaggcattgcttactcagtgtgaaatragaaacagggagaaatcctgtgggagcaccrattaggrtccacatgcaccaagctgcctgctctatgaacactttccacagtgtgcatggagcaccttgtcttcttaagtcttgaccccttacattgccctrcttgtgtattagaagtgcatcaggatcacgctgacttaagaaatacttggtcacagaatgggacggctctgatccacagtcccaaaaccagaaggcacaggggacaggaggggctgcgtgaacacagctcacaggagctgaacagctctctcagcgccaaaaataaaccactcccactttaattatgtcaactgatctttagcatc

SEQ ID NO: 32184 - DNA, 600 bp, Chicken  19866894255289_4
gaccccaacactgtgagcttgcttaagcagaaagagtgcagcatcagcagttcctctggcttccatcaaaaaaaaaaaacaccaacaaatcatcactattaggaagtgaaagcacagagacagcttccgaccccccttccacaggcattgcttactcagtgtgaaatragaaacagggagaaatcctgtgggagcaccrattaggrtccacatgcaccaagctgcctgctctatgaacactttccacagtgtgcatggagcaccttgtcttcttaagtcttgaccccttacattgccctrcttgtgtattagaagtgcatcaggatcacgctgacttaagaaatacttggtcacagaatgggacggctctgatccacagtcccaaaaccagaaggcacaggggacaggaggggctgcgtgaacacagctcacaggagctgaacagctctctcagcgccaaaaataaaccactcccactttaattatgtcaactgatctttagcatcggccaaactcaaattctctctgctgtcatcggcagaatcaccaacagtgattgcaaagccagtggcacgccctatttattccacaacaacaggc

SEQ ID NO: 32185 - DNA, 600 bp, Chicken  19866894255290_1
cacctacctaaaacactttttaaattcccacagctttaaaatccccatgtgcagggatggagtcaggaaagtcaaggtgcagataaaatttaactctgtgatggatgtggaaaacaagaaaggattctttagctacattaggcagaaaggactggcaaaggagagtggaacctccctctgataaatggaaaggtagagctattctcctcagacatgtagaaggctgaggtacttaacaaggtctttgcctcagccttcatagccagacttctgcctcacatgtccctaaacttctaagcrgggagttgggggagcaaaatcccacccagtgaaagagcagagcaaattcaagaccacctcaggaggtggaatgtgtacaagtctatgggggcagatgacacgtatcttgagattccaaagggactggctgatgcagttgccaagacactttctatcatatttgaaaaattgtgtctgtcagatcaagtttctggtgactggaaaaagggaaacgtcactcccattcttaagaaagtgaaaaaggaagacctggggaactacaggctggtgggcctcatgtctgtgcctggaaaggtcagg

SEQ ID NO: 32186 - DNA, 600 bp, Chicken  19866894255295_1
ccctcctggcattgcaggtgagtaggtaacaattgatttcaaatattatctgtgcaaattctggtttattttgttagtgtttttagaagttaacagtggaggcttctgcaccttccatctcccatcagacagtgagacagtgacagaaagacagccgactgcttaaacatccaggatttctctcttaaaaataaggcttttttaacatacagtaaactctgggtagcaaatacagagtatactgtaaattatgctgtgataagactgcttcaggattgcatcatacatttcaagacaagraaaacaccattaggtcaattaaaggtccattctagctctttgtaggatgctggcagcagaagttaattcaagttaataacctraagctgtttgctttgcawtctagcaggaaaccyggaaggaccttgtccttatgcagctcaccatacaatcttaagaactgaagagcactgtaagagacaagcctacagaagtcatacttgttcaacatctttgaaagtcacattacaaaattgaagtttacctgctaaaagaactgttttgttttagaaggacatcactctactaagaagcagatca

SEQ ID NO: 32187 - DNA, 600 bp, Chicken  19866894255295_2
tagaagttaacagtggaggcttctgcaccttccatctcccatcagacagtgagacagtgacagaaagacagccgactgcttaaacatccaggatttctctcttaaaaataaggcttttttaacatacagtaaactctgggtagcaaatacagagtatactgtaaattatgctgtgataagactgcttcaggattgcatcatacatttcaagacaagraaaacaccattaggtcaattaaaggtccattctagctctttgtaggatgctggcagcagaagttaattcaagttaataacctraagctgtttgctttgcawtctagcaggaaaccyggaaggaccttgtccttatgcagctcaccatacaatcttaagaactgaagagcactgtaagagacaagcctacagaagtcatacttgttcaacatctttgaaagtcacattacaaaattgaagtttacctgctaaaagaactgttttgttttagaaggacatcactctactaagaagcagatcatgcaagtttctgtttgcatttccaggaaggcaagagaaggccgcagttggcaaaatgaaatctgttcatatactactattgtg

SEQ ID NO: 32188 - DNA, 600 bp, Chicken  19866894255295_3
gcttctgcaccttccatctcccatcagacagtgagacagtgacagaaagacagccgactgcttaaacatccaggatttctctcttaaaaataaggcttttttaacatacagtaaactctgggtagcaaatacagagtatactgtaaattatgctgtgataagactgcttcaggattgcatcatacatttcaagacaagraaaacaccattaggtcaattaaaggtccattctagctctttgtaggatgctggcagcagaagttaattcaagttaataacctraagctgtttgctttgcawtctagcaggaaaccyggaaggaccttgtccttatgcagctcaccatacaatcttaagaactgaagagcactgtaagagacaagcctacagaagtcatacttgttcaacatctttgaaagtcacattacaaaattgaagtttacctgctaaaagaactgttttgttttagaaggacatcactctactaagaagcagatcatgcaagtttctgtttgcatttccaggaaggcaagagaaggccgcagttggcaaaatgaaatctgttcatatactactattgtgttacagcacaatgtacca

SEQ ID NO: 32189 - DNA, 600 bp, Chicken  19866894255295_4
atctcccatcagacagtgagacagtgacagaaagacagccgactgcttaaacatccaggatttctctcttaaaaataaggcttttttaacatacagtaaactctgggtagcaaatacagagtatactgtaaattatgctgtgataagactgcttcaggattgcatcatacatttcaagacaagraaaacaccattaggtcaattaaaggtccattctagctctttgtaggatgctggcagcagaagttaattcaagttaataacctraagctgtttgctttgcawtctagcaggaaaccyggaaggaccttgtccttatgcagctcaccatacaatcttaagaactgaagagcactgtaagagacaagcctacagaagtcatacttgttcaacatctttgaaagtcacattacaaaattgaagtttacctgctaaaagaactgttttgttttagaaggacatcactctactaagaagcagatcatgcaagtttctgtttgcatttccaggaaggcaagagaaggccgcagttggcaaaatgaaatctgttcatatactactattgtgttacagcacaatgtaccatatatgcttatagct

SEQ ID NO: 32190 - DNA, 600 bp, Chicken  19866894255297_1
atacaaggtggccaagctgcatctggttctccatggcagctccgtgcctgccatcccactgctcccccagtgcaaggaaccccagacaacacagctgggacagcaacccacatccatactgggatgactgggagctgctctgaacagcttacaagcctcaccacttggccacctctgttgtctgagatcaagagtcacgaaataaaatcatactcctgttccccagcatggaagctcatgccttcattagagcctgaggctcgtccattctggtggctctttatagctgagcagggcacrgtttgcagactattaatgatctctttacttttctatctatattcaaggagagtttaatcaarttttgttcttggcagccaagcaggttgcgattaaacagggaggatttttctttctcatgagaaagaaaaattactctattttaaatttcaaagaaatccaatgctcgttcccagatttttttttttcttgagcagtatgtactcttctaaatcccaaagaatgttcccttctagaaatttcttccccatccaatgtactggtatgcagctcttggaaatgccaccttcctttctggga

SEQ ID NO: 32191 - DNA, 600 bp, Chicken  19866894255297_2
tcccccagtgcaaggaaccccagacaacacagctgggacagcaacccacatccatactgggatgactgggagctgctctgaacagcttacaagcctcaccacttggccacctctgttgtctgagatcaagagtcacgaaataaaatcatactcctgttccccagcatggaagctcatgccttcattagagcctgaggctcgtccattctggtggctctttatagctgagcagggcacrgtttgcagactattaatgatctctttacttttctatctatattcaaggagagtttaatcaarttttgttcttggcagccaagcaggttgcgattaaacagggaggatttttctttctcatgagaaagaaaaattactctattttaaatttcaaagaaatccaatgctcgttcccagatttttttttttcttgagcagtatgtactcttctaaatcccaaagaatgttcccttctagaaatttcttccccatccaatgtactggtatgcagctcttggaaatgccaccttcctttctgggagaggtatcacagaaaaagagattgtattaaaagcttttggctgatcataaagtacctgaagg

SEQ ID NO: 32192 - DNA, 600 bp, Chicken  19866894255297_3
aaaacttgttttttatacttacatattctatactttttaggtattatatatatctatatatttaaatatctaagtacacatgtatatataacacatatggcatattcagtattctaaccactttaaatgttccagctttgtgattttccgctgatgctgcttacttttcattttcactgctcacattgtggctgctgtgcacaaaccattggcacaactgaaatgttccctaaattagtcctaaggggacattggcctccccagaacctgcaggaaagtgttgttcctactccatgctcytgtgtctggcaaacccatttcttcattgcagctgaggagagaagaagcccttcttgcacagagtggctccatctttttggtaccaggtaccagttttggtaccttgcatcattcaggtgtgctcacagaagctgtggatgccccatccatgaaggtgctcaagaccaacttgcatggggtcctgggcagcctgatctggtggggggcaaccaccccatggcaggggtaggggctgggtggcttttgaggtcccttccaaccccaccattctatgattctgtaatctttaaggtcccttcc

SEQ ID NO: 32193 - DNA, 577 bp, Chicken  19866894255307_1
cccaaaccaaccccagtgggggagaagccacactcagtgcccactctgtgcacccaccgtgtggcccagccaccccccacagcctcacctgcaaccatcagggtgaagtcaaaacccttcttcacagatttccggtggacctggttcggcagagtggcaaagcccacgtactgcttctcatggtcctgcagggcagaggcggacagaagcaggtcagggtgtgccatcactcctgcttgagcaacagggagttggattcagaagagctgaaaagccgcaggacagaggtgggtccctgcyggtgcacgcacaccctcaagactcagggagctctcccaggtcacagccacttcccagggaagcagtggagtcaccatccctggaggcattcaagaaccatggagatgtggcacctaaggacatggtttattgggcatggtggggatgggttgtcagttggacccgatgatcctagaggtcttttccaacctgaaagcttccatgattgtatgattcatgcatctctccccacagagagctgtgcagcccacactggaccctgattagcacccctggg

SEQ ID NO: 32194 - DNA, 600 bp, Chicken  19866894255308_1
tgtatattgatgttgattggtatataaaaatccatgatgattggtatataaaaatctatgataagtgaattgagtaaagcttatttaatactatgcctgaaaggatgagtctttgctgagaatgctttgcagtagaatttctgggtgacctccaagtgctgtttgccctttagaaaaaaaaaaaaaaagtgtttttgatggtgtcaggctttctttgtgggatgtgtagatagttatatgtcatggaaatgcagattgtcctagtctagcctaacgcctgttccagtttttgtgtaaggraaacattacagccttgattccttggggtagatgagttaggtatgactgaggaaagaaccttccaggaagcaggaatctgttcctttgatttaaaaaaactccagtgtttacaagtcacaagtgagtacctggtggaggtgcagagaaccttgcctaattttgcctgtctgttcccataacagacttttcgtgatcacagggactgcttttgcatgctgcacctttagctcagagggctgaggtgcacagcaagtcttttccctcttcaggtcataatgttgggtgttggtgtagggcagt

SEQ ID NO: 32195 - DNA, 600 bp, Chicken  19866894255309_1
ctgaattttacaatttcacagtgattttcacctaaggtgcctatcattttttgtccttgattagtctttccctagtagaattcctatcctccattgcttccagcaagctcagaattatcacctgtcttgctgtcttgctgtcttctttccctgatgactgatgaaaaattccaggcagaccctgatctttagatggacagcttatgtaaagcttcatccacttgatcatcatggtggtctacctcaacctctattgcagttcctatgcgtgcttccctttccattgctacttatatttcrtcaggcttacactgtgatttcaagtcactctttgtcacyttctccacatgtccttaataagtaatctgcattgtcaccagtggaaggtagaatataatattgagaaaaccacggtcttcattgggataacagcacttcatctatgccttaaatttcagtcacaattgtgcattttggaatgtttattcatgactgaaaggattatacaggcagattataaaaccaaattatttcatttctttttcccaagacaacttagctctgttttggctcttctakttatttctacatggataaaca

SEQ ID NO: 32196 - DNA, 600 bp, Chicken  19866894255309_2
cctatcattttttgtccttgattagtctttccctagtagaattcctatcctccattgcttccagcaagctcagaattatcacctgtcttgctgtcttgctgtcttctttccctgatgactgatgaaaaattccaggcagaccctgatctttagatggacagcttatgtaaagcttcatccacttgatcatcatggtggtctacctcaacctctattgcagttcctatgcgtgcttccctttccattgctacttatatttcrtcaggcttacactgtgatttcaagtcactctttgtcacyttctccacatgtccttaataagtaatctgcattgtcaccagtggaaggtagaatataatattgagaaaaccacggtcttcattgggataacagcacttcatctatgccttaaatttcagtcacaattgtgcattttggaatgtttattcatgactgaaaggattatacaggcagattataaaaccaaattatttcatttctttttcccaagacaacttagctctgttttggctcttctakttatttctacatggataaacagcatgrcaaaggtaatatgccagatgattattgtctgtc

SEQ ID NO: 32197 - DNA, 600 bp, Chicken  19866894255309_3
tccattgctacttatatttcrtcaggcttacactgtgatttcaagtcactctttgtcacyttctccacatgtccttaataagtaatctgcattgtcaccagtggaaggtagaatataatattgagaaaaccacggtcttcattgggataacagcacttcatctatgccttaaatttcagtcacaattgtgcattttggaatgtttattcatgactgaaaggattatacaggcagattataaaaccaaattatttcatttctttttcccaagacaacttagctctgttttggctcttctakttatttctacatggataaacagcatgrcaaaggtaatatgccagatgattattgtctgtcaaattacagagctcaaacgtttttctgtccgttgtgcctgaataagacaagcaatgtcacagacagtatttttagrtgaaacgtggctctctgttctgcctatatttcctgatgccacacattagatagttccaacatttggcgctgattccagcttcataggaaaacatgagcttagcatgctaaaatgcattaaacgttaagaarggattaagagaaggcctcaggtcagaaccaagt

SEQ ID NO: 32198 - DNA, 600 bp, Chicken  19866894255309_4
ttacactgtgatttcaagtcactctttgtcacyttctccacatgtccttaataagtaatctgcattgtcaccagtggaaggtagaatataatattgagaaaaccacggtcttcattgggataacagcacttcatctatgccttaaatttcagtcacaattgtgcattttggaatgtttattcatgactgaaaggattatacaggcagattataaaaccaaattatttcatttctttttcccaagacaacttagctctgttttggctcttctakttatttctacatggataaacagcatgrcaaaggtaatatgccagatgattattgtctgtcaaattacagagctcaaacgtttttctgtccgttgtgcctgaataagacaagcaatgtcacagacagtatttttagrtgaaacgtggctctctgttctgcctatatttcctgatgccacacattagatagttccaacatttggcgctgattccagcttcataggaaaacatgagcttagcatgctaaaatgcattaaacgttaagaarggattaagagaaggcctcaggtcagaaccaagtttgtgcttgttcatttgttctctctct

SEQ ID NO: 32199 - DNA, 600 bp, Chicken  19866894255309_5
cttcattgggataacagcacttcatctatgccttaaatttcagtcacaattgtgcattttggaatgtttattcatgactgaaaggattatacaggcagattataaaaccaaattatttcatttctttttcccaagacaacttagctctgttttggctcttctakttatttctacatggataaacagcatgrcaaaggtaatatgccagatgattattgtctgtcaaattacagagctcaaacgtttttctgtccgttgtgcctgaataagacaagcaatgtcacagacagtatttttagrtgaaacgtggctctctgttctgcctatatttcctgatgccacacattagatagttccaacatttggcgctgattccagcttcataggaaaacatgagcttagcatgctaaaatgcattaaacgttaagaarggattaagagaaggcctcaggtcagaaccaagtttgtgcttgttcatttgttctctctctctcttgctttcctgttacagagctgaatgagaaaggctgaccatgaggcccaggatgctttgttgcagatgacaaaggtacaaacagtggcatagtggcctttagcagc

SEQ ID NO: 32200 - DNA, 600 bp, Chicken  19866894255309_6
caagacaacttagctctgttttggctcttctakttatttctacatggataaacagcatgrcaaaggtaatatgccagatgattattgtctgtcaaattacagagctcaaacgtttttctgtccgttgtgcctgaataagacaagcaatgtcacagacagtatttttagrtgaaacgtggctctctgttctgcctatatttcctgatgccacacattagatagttccaacatttggcgctgattccagcttcataggaaaacatgagcttagcatgctaaaatgcattaaacgttaagaarggattaagagaaggcctcaggtcagaaccaagtttgtgcttgttcatttgttctctctctctcttgctttcctgttacagagctgaatgagaaaggctgaccatgaggcccaggatgctttgttgcagatgacaaaggtacaaacagtggcatagtggcctttagcagcacagagtcctcatgtctttcccaaataataaacagcaagctctcacctaacacactgcccagagcagcactaaatagcacactcatttctgggctttatgctggcatttgtatctaacccccattttctca

SEQ ID NO: 32201 - DNA, 509 bp, Chicken  19866894255316_1
tctttaagaactgtctacaggtgtgatatatgcattgaaggcgaagtatacatttcataaatcctttttgaaggactgtaaacaactcagtcaaggaaatgatctgttgaatttgaggacacagctataatctaaatctgcttaacagacctttgactaatcataaatccgttctgtttttctcaggattatttagcagtaaaatttcttggagtttagtatgtgtatgtaatagctacattttatacaatgatgaaaatataaatgccttgctttgtaacattacaacctaaataaacytgtagctaaaaacttggaaggcaggtaatatgacagcccaaatgcaaaaactgcatgctttagaagctccatagaaaaagagttctgcatacagatcaaaacctgtcaagagttaaatcacagactagacaccagcaatgttagctatttccaataattcaaaattgtacaccccaaattagagaaaattatttatcagtgtactagat

SEQ ID NO: 32202 - DNA, 600 bp, Chicken  19866894255317_1
ccttaacgctggaatttattttgtggaactcatctctaatatcccacagaactgtccaaaaaaaaacttagccaagcttaccaagtggaggataggagaaagggtccttcagatgttttagaaaacattgtatttgcaaaagtgagaaagattcctaggctcagaaagacctgaactcaagagactggggtatttgggataaaatagctccactctgggaacagctgagataacagtatgcataataaactgtaaaacatgcagtcttattttaaaattaccttatgcttgtttgaagcwtggaggaggttgttgtttgttgttgtttagttgctcttatcaaaggagaaggtgctgaaggactaattcccactgatgtgtagttcagcagatgttccatagcatggaatgaggagagtgacagactgctcttccagttattgtctactatagctacattcatcttcgctaccaattagttacttaaggaaagaatcagtagtgccacatcattactttctgagaactgcgtgtgcagaactgtgataaacataatcaaaatatggacgtgagggcataacactgaaggaagtacgttca

SEQ ID NO: 32203 - DNA, 600 bp, Chicken  19866894255318_1
agatagtagatggctctcacactaagaagtcaccttccatgcccaacaggtctcatccttcttttctgttccccatccaattttctaaggaaacaaacactgtgttcatatgttgcagaacactgtgcctcttccaaatgatatttaacagacttgtaacaggaacctcaatgtcagctcagaggagagaggggaataattctgttgcatgtctccactttctatgaaaggagatatactcctcttttaatcgccaaaggtccatattaaagtaaatcatgtaatgctctacttaactgytaacatctttcccacttcttcaaatgmatctaayagaaaacaggaaatgyggcaatgtaatattgttttttttcctttttaaatagtgctttctcytattcaagtcactattagtggaagatgacaacaatagatgacttcagtgaacacagataagatttttatgcttcccatcagtatatggcaatattcctgttttactgtaggtagcttagtctctgttaaggcatttcatcttccagacagtcttcagagttcctcttcacttaatatccaaagctgcacaaacccagaaatttt

SEQ ID NO: 32204 - DNA, 600 bp, Chicken  19866894255318_2
agtcaccttccatgcccaacaggtctcatccttcttttctgttccccatccaattttctaaggaaacaaacactgtgttcatatgttgcagaacactgtgcctcttccaaatgatatttaacagacttgtaacaggaacctcaatgtcagctcagaggagagaggggaataattctgttgcatgtctccactttctatgaaaggagatatactcctcttttaatcgccaaaggtccatattaaagtaaatcatgtaatgctctacttaactgytaacatctttcccacttcttcaaatgmatctaayagaaaacaggaaatgyggcaatgtaatattgttttttttcctttttaaatagtgctttctcytattcaagtcactattagtggaagatgacaacaatagatgacttcagtgaacacagataagatttttatgcttcccatcagtatatggcaatattcctgttttactgtaggtagcttagtctctgttaaggcatttcatcttccagacagtcttcagagttcctcttcacttaatatccaaagctgcacaaacccagaaattttcacttccaaaccttcccagtctgaact

SEQ ID NO: 32205 - DNA, 600 bp, Chicken  19866894255318_3
ttccatgcccaacaggtctcatccttcttttctgttccccatccaattttctaaggaaacaaacactgtgttcatatgttgcagaacactgtgcctcttccaaatgatatttaacagacttgtaacaggaacctcaatgtcagctcagaggagagaggggaataattctgttgcatgtctccactttctatgaaaggagatatactcctcttttaatcgccaaaggtccatattaaagtaaatcatgtaatgctctacttaactgytaacatctttcccacttcttcaaatgmatctaayagaaaacaggaaatgyggcaatgtaatattgttttttttcctttttaaatagtgctttctcytattcaagtcactattagtggaagatgacaacaatagatgacttcagtgaacacagataagatttttatgcttcccatcagtatatggcaatattcctgttttactgtaggtagcttagtctctgttaaggcatttcatcttccagacagtcttcagagttcctcttcacttaatatccaaagctgcacaaacccagaaattttcacttccaaaccttcccagtctgaactaactaat

SEQ ID NO: 32206 - DNA, 600 bp, Chicken  19866894255318_4
tctcatccttcttttctgttccccatccaattttctaaggaaacaaacactgtgttcatatgttgcagaacactgtgcctcttccaaatgatatttaacagacttgtaacaggaacctcaatgtcagctcagaggagagaggggaataattctgttgcatgtctccactttctatgaaaggagatatactcctcttttaatcgccaaaggtccatattaaagtaaatcatgtaatgctctacttaactgytaacatctttcccacttcttcaaatgmatctaayagaaaacaggaaatgyggcaatgtaatattgttttttttcctttttaaatagtgctttctcytattcaagtcactattagtggaagatgacaacaatagatgacttcagtgaacacagataagatttttatgcttcccatcagtatatggcaatattcctgttttactgtaggtagcttagtctctgttaaggcatttcatcttccagacagtcttcagagttcctcttcacttaatatccaaagctgcacaaacccagaaattttcacttccaaaccttcccagtctgaactaactaatgagcttttagtattga

SEQ ID NO: 32207 - DNA, 600 bp, Chicken  19866894255318_5
tgttccccatccaattttctaaggaaacaaacactgtgttcatatgttgcagaacactgtgcctcttccaaatgatatttaacagacttgtaacaggaacctcaatgtcagctcagaggagagaggggaataattctgttgcatgtctccactttctatgaaaggagatatactcctcttttaatcgccaaaggtccatattaaagtaaatcatgtaatgctctacttaactgytaacatctttcccacttcttcaaatgmatctaayagaaaacaggaaatgyggcaatgtaatattgytttttttcctttttaaatagtgctttctcytattcaagtcactattagtggaagatgacaacaatagatgacttcagtgaacacagataagatttttatgcttcccatcagtatatggcaatattcctgttttactgtaggtagcttagtctctgttaaggcatttcatcttccagacagtcttcagagttcctcttcacttaatatccaaagctgcacaaacccagaaattttcacttccaaaccttcccagtctgaactaactaatgagcttttagtattgagctatctgccctccaa

SEQ ID NO: 32208 - DNA, 600 bp, Chicken  19866894255318_6
acactgtgttcatatgttgcagaacactgtgcctcttccaaatgatatttaacagacttgtaacaggaacctcaatgtcagctcagaggagagaggggaataattctgttgcatgtctccactttctatgaaaggagatatactcctcttttaatcgccaaaggtccatattaaagtaaatcatgtaatgctctacttaactgytaacatctttcccacttcttcaaatgmatctaayagaaaacaggaaatgyggcaatgtaatattgttttttttcctttttaaatagtgctttctcytattcaagtcactattagtggaagatgacaacaatagatgacttcagtgaacacagataagatttttatgcttcccatcagtatatggcaatattcctgttttactgtaggtagcttagtctctgttaaggcatttcatcttccagacagtcttcagagttcctcttcacttaatatccaaagctgcacaaacccagaaattttcacttccaaaccttcccagtctgaactaactaatgagcttttagtattgagctatctgccctccaacagagtggtcctaacaaatgataaactatg

SEQ ID NO: 32209 - DNA, 600 bp, Chicken  19866894255319_1
ttctcatttactaattttgaaaacaggtttattaaagtttcatgtcattctgcactagagtgtataattcatattaatatcccctctttgtttttttaattacagttttacattttgatacatattctaatttttgtgaaattagacatgctaatttgtgcttttatagtatgtttacactttgcttctttcaaaattggggtaaatttaggtatgctttaatttattgtatttaatgtatttaatgtatatttggtgtatacattgcggattgccatattttgaatacatgcatgtatrtgtgtgtcagattagtgaaatctcagtggtggtttacagatccttagacactgcttccttcagaattaattattgctgcttggctgtggggtaataaaaaacattaaattaatgtcataggaactgttggtatcataccaactacaggaatatattcccttgcagaagggaattgagtatgggagagttccccctcctagtgttcaatttctgctgatcttgcaggagtgtcttgagctagctccttagctagcactgtttttgtataggtctgtgccctgggggaaatgtacaaagtta

SEQ ID NO: 32210 - DNA, 599 bp, Chicken  19866894255320_1
  misc_feature (1)..(30): n is any nucleotide
nnnnnnnnnnnnnnnnnnnnnnnnnnnnnnataaaaacaacgactttcctatctctgccaaattacctaaagagaatacccacgctatagttttaaaagaaatcttcaggtagattcccacctgttaatacaactccatcctctccagggcttttgttagttagtgttagctagataaaacatacatttttatttttattttttaagggaaaacgtgcctaagactttcctttgctagaagaaaaaataagtcaaagagaacaaagaacaaattaccagtgtatggtgaagtttagcaayttcagcctctggcaaatcaagcccttctgctgagcttctcattgagaacattctgccaacagacagccctttcacagttaagccaagggttttttttttcctgcaaaagctctttgcatagtttcagattttgtggcacaatacagcaaaagtcgtgatctgagataaagctccaatccaactgaygctttaaatggtagcactagtaatgttctggcaccatctgatgtttttgttttgcttgcctgggtataatctccyggcagccgtgctttgtttggtcagtgaaactaaaaaaa

SEQ ID NO: 32211 - DNA, 600 bp, Chicken  19866894255320_2
tttttatttttattttttaagggaaaacgtgcctaagactttcctttgctagaagaaaaaataagtcaaagagaacaaagaacaaattaccagtgtatggtgaagtttagcaayttcagcctctggcaaatcaagcccttctgctgagcttctcattgagaacattctgccaacagacagccctttcacagttaagccaagggttttttttttcctgcaaaagctctttgcatagtttcagattttgtggcacaatacagcaaaagtcgtgatctgagataaagctccaatccaactgaygctttaaatggtagcactagtaatgttctggcaccatctgatgtttttgttttgcttgcctgggtataatctccyggcagccgtgctttgtttggtcagtgaaactaaaaaaaaatggactgctgaggtcatgggcagcctggaaaagactgttatcaaagtgagcaaactgggcttcaagatggactcacacattagctagattaaactggtaacaccaygcataaacacagcagcaggtgaccctaaggggcattctaaagtcaaaactaggaacttgacttgataacaaactagtga

SEQ ID NO: 32212 - DNA, 600 bp, Chicken  19866894255320_3
caaagaacaaattaccagtgtatggtgaagtttagcaayttcagcctctggcaaatcaagcccttctgctgagcttctcattgagaacattctgccaacagacagccctttcacagttaagccaagggttttttttttcctgcaaaagctctttgcatagtttcagattttgtggcacaatacagcaaaagtcgtgatctgagataaagctccaatccaactgaygctttaaatggtagcactagtaatgttctggcaccatctgatgtttttgttttgcttgcctgggtataatctccyggcagccgtgctttgtttggtcagtgaaactaaaaaaaaatggactgctgaggtcatgggcagcctggaaaagactgttatcaaagtgagcaaactgggcttcaagatggactcacacattagctagattaaactggtaacaccaygcataaacacagcagcaggtgaccctaaggggcattctaaagtcaaaactaggaacttgacttgataacaaactagtgagcaatgtggtgttgaaatgggagggtgtattagaaatatggaatcaaacatagaaactctgccttggactgattc

SEQ ID NO: 32213 - DNA, 600 bp, Chicken  19866894255320_4
agctctttgcatagtttcagattttgtggcacaatacagcaaaagtcgtgatctgagataaagctccaatccaactgaygctttaaatggtagcactagtaatgttctggcaccatctgatgtttttgttttgcttgcctgggtataatctccyggcagccgtgctttgtttggtcagtgaaactaaaaaaaaatggactgctgaggtcatgggcagcctggaaaagactgttatcaaagtgagcaaactgggcttcaagatggactcacacattagctagattaaactggtaacaccaygcataaacacagcagcaggtgaccctaaggggcattctaaagtcaaaactaggaacttgacttgataacaaactagtgagcaatgtggtgttgaaatgggagggtgtattagaaatatggaatcaaacatagaaactctgccttggactgattcttcttcacaattggaaaaactagggagctttttctgttaaagttacttgagtttagtaaacaagtgcggtgctgtagggcactagatccacttcagctctactttaaagagctctttatatttaaataatagaatatatatatata

SEQ ID NO: 32214 - DNA, 600 bp, Chicken  19866894255321_1
gataaggaagtgttcatcacagactttctttgaaactagcaaaatggctggtaccagtagctatccaacacgcttctggaaatgtagtttgggaaaagcaagctttttttgtttgcagattgcactatgaatttgtgggcatttcttaattaccagatctatactgcttctaaataaagctgtatacactttgaaaatattctgagttgtagatttaagagccatagaaattatttgagcgggaaacggtgcttgatttcatggcagaggcttagtgttttacatcaaaaaccagttccrgtatcyctttctatttaaagccaaaacatgggagtctgtaatgatctttaatagtgttggaattgcatgagacacacgagggtgttctaggagctcagtaaaggtgtttcacatatgtcgtgttagatccagtcctggtcagcaattaagcaattaaagagaaatgaatagggtttcccagtgggtttgtatagaatgatttactgtttacaggccatgtcctaacagactgtaagtcagacgccacctatgcagaactggttgtagtttggtcttcttgcagtcaatggattggccaag

SEQ ID NO: 32215 - DNA, 600 bp, Chicken  19866894255321_2
gaagtgttcatcacagactttctttgaaactagcaaaatggctggtaccagtagctatccaacacgcttctggaaatgtagtttgggaaaagcaagctttttttgtttgcagattgcactatgaatttgtgggcatttcttaattaccagatctatactgcttctaaataaagctgtatacactttgaaaatattctgagttgtagatttaagagccatagaaattatttgagcgggaaacggtgcttgatttcatggcagaggcttagtgttttacatcaaaaaccagttccrgtatcyctttctatttaaagccaaaacatgggagtctgtaatgatctttaatagtgttggaattgcatgagacacacgagggtgttctaggagctcagtaaaggtgtttcacatatgtcgtgttagatccagtcctggtcagcaattaagcaattaaagagaaatgaatagggtttcccagtgggtttgtatagaatgatttactgtttacaggccatgtcctaacagactgtaagtcagacgccacctatgcagaactggttgtagtttggtcttcttgcagtcaatggattggccaagataatg

SEQ ID NO: 32216 - DNA, 600 bp, Chicken  19866894255322_1
taacacaccaaatacagttttttgtttgtttgtttgttttttaagaagcagttaaagaagagcaattttctgagctcagtacactatattcactaagagaagcatagcctgtaagggttaattgttttgatgcacgtcaattaatgaattaatgtttggacacattaactaaagtgggtggaagctcaaagaggaatcatgtaaatttgaagtggaggagtatttacaaagtaactacttttaaaatacaaattttgaagaagagcattagaaagttggactgctgttccttggtttatrtctttacaagatgtatctgactttttatgttagtgtttgtacaaaaagaatttgtatggaagaataaaatcatgaaataactactggtaagtctttttaatttctcttctttttagactaacacactctttcagtgccgggcaatgatgataaacttcatctctactactgttttctgtcacagctttggattaaagatttattttcaaagatctatcacaattaataagctttttaatgttcacagtttatcaggatgtcccagagctacttcagcaatgaagaaagcaaagctgtctg

SEQ ID NO: 32217 - DNA, 600 bp, Chicken  19866894255322_2
atcatgaaataactactggtaagtctttttaatttctcttctttttagactaacacactctttcagtgccgggcaatgatgataaacttcatctctactactgttttctgtcacagctttggattaaagatttattttcaaagatctatcacaattaataagctttttaatgttcacagtttatcaggatgtcccagagctacttcagcaatgaagaaagcaaagctgtctggagaacaaatgctaacaataaagcagcgggccagtaatggtaaatttttaatcattaccttttaatamaatgtttcattggtagctgaagttgtcactgtgggctgttttttctgtgtgtggaaaccttcgtataaactgtgaattcaaggtcaatagaatttaacctgggctttatgttgtggaaatctgagccaacagtggaatgagtcagactggcctgttacactcaaaaaactctaaaatgtttcaaagtataggataccattgtaattttctggttctctgattcctatctcattcactcaagtagatgggtgaccttaggttgttgcaggacttaaaggaggaaaaatttatttccagagg

SEQ ID NO: 32218 - DNA, 600 bp, Chicken  19866894255323_1
aactgcagcttgagacatggcaagtttttgctgtgcttaatgctgattcatgtgcgtgcaagagaagagaggaaactgagtgctgtcatcagctgaaaccaaggggaagttttctgcagtagaagctgataaaatagattgtgatttagcatgctgtactagattagagaactttattttttgtggatcatttattcattcagaaaaataatttcaaagcactagaaactatctgcctctaattatggcctaccaaagatacatacatgcatacatatattcccccagatggttcacttyagcatatccataacgaaacattttagttgcaggctgggttcgcaagatggaggaaaagagcagtgataatgatactatctgtacttctcctgagaaacttcccatgatttaaagaaaaaaaaaagcacagaaagtcaaggtctggtgagatgggagaccgcgctgtcaagtctttgcttgttggtctattttgagctttaatggcctatttatgactaattgtttgtagttgttttaatcacagtatcagaaatgttttagtattagttggcaaatgtgccatgtgttcaaaatttaaag

SEQ ID NO: 32219 - DNA, 600 bp, Chicken  19866894255324_1
agtcattgttgcttgtcttcattagcttttagaatcatttaaaacaaagaactccccaaacatagtgttctgacttatgttttctgttgctatgctcatgtagaagatcttttgttacttctcaaattgtgaaaactgcaaatagtggtttgaatgctgaaatgcttgtctttgatccccaggctccactgaggattagcacctgtttcatggaaagcttaggagaagcaagggcttgagtcaatttcaatttgtatctgcctgtatacttgagtgttgttcatcagacaagagcagagygatagaaaamagcaccagaacctggtagaaggaccgcccccccataggctggccttgatcacaatccttttccctcagctaactcagtttaacaagtagtcaaatttctcatgtctaatatagaggttgatttccaaaacctttgttacaggtgcaagattgcttgcacatttccacatttgataatggaatttggttggtgggactgtattatatttcagagcaactgcttgagatttgaagttacaaagcaaattaagttctgacctaaataaatacatacagtgactttatattaaa

SEQ ID NO: 32220 - DNA, 600 bp, Chicken  19866894255324_2
gcttgtcttcattagcttttagaatcatttaaaacaaagaactccccaaacatagtgttctgacttatgttttctgttgctatgctcatgtagaagatcttttgttacttctcaaattgtgaaaactgcaaatagtggtttgaatgctgaaatgcttgtctttgatccccaggctccactgaggattagcacctgtttcatggaaagcttaggagaagcaagggcttgagtcaatttcaatttgtatctgcctgtatacttgagtgttgttcatcagacaagagcagagygatagaaaamagcaccagaacctggtagaaggaccgcccccccataggctggccttgatcacaatccttttccctcagctaactcagtttaacaagtagtcaaatttctcatgtctaatatagaggttgatttccaaaacctttgttacaggtgcaagattgcttgcacatttccacatttgataatggaatttggttggtgggactgtattatatttcagagcaactgcttgagatttgaagttacaaagcaaattaagttctgacctaaataaatacatacagtgactttatattaaatgctgtggag

SEQ ID NO: 32221 - DNA, 600 bp, Chicken  19866894255327_1
tgtcactaacttgtctcacagtaacagcttcacagctgactatagtgaaatctttgtgaaagcttctactgacgcacgtttcttgatgccacacagtttggaaagaagtgtaacagaaacagaaaggcttgggatgtttttggagagggaatgcagaggggatccacagctgtaagcggacatctgctaggacagcagggtaatacaaatacaagagatgaattccccatttaatcctggtgcattacgcaagaattaactgtacaaccagcaacacttaaggataaaaaagtattccartataagttatagaccattctgttgccattaaaataaaatagagagaaaaaaatggtgattttttcctgggaagagcatatttttcaagcattcctattcctgagcaggtgacaaatcactaaatgccaactttccagtacttccttcagtttgagatggagaaggttggtgcgtttaaaaaaagtctagacacaaccagaagcaaacaagcttgacttttcagtsatcactgatcgtatctactggtttcagtggagatgaaagtgaaatatccaaatatcttactaacagttgacattt

SEQ ID NO: 32222 - DNA, 600 bp, Chicken  19866894255327_2
cccatttaatcctggtgcattacgcaagaattaactgtacaaccagcaacacttaaggataaaaaagtattccartataagttatagaccattctgttgccattaaaataaaatagagagaaaaaaatggtgattttttcctgggaagagcatatttttcaagcattcctattcctgagcaggtgacaaatcactaaatgccaactttccagtacttccttcagtttgagatggagaaggttggtgcgtttaaaaaaagtctagacacaaccagaagcaaacaagcttgacttttcagtsatcactgatcgtatctactggtttcagtggagatgaaagtgaaatatccaaatatcttactaacagttgacattttttgagccttgggacctgaacttagggggcccttacatatttcattggtacctaagagatttgtccagagagaaaggatttcagcacctgaccaaaggaagttctccaccacttttatgagtcaaggctctgctacttggctgtaggtacgcaagagtcaataacagtcttcaggctggaaaaatgcaatggttgttgtcatctatggctatgtccatgttgctg

SEQ ID NO: 32223 - DNA, 600 bp, Chicken  19866894255328_1
taagaatcttattgttcccttttgtaattatgttagcacttgggcacttcaaagaagaaaagcattcttcactgagcgctttctttcccttcttctcccccactcctctgagccacattttaactgaaaaccatttgaaaacacagcggcgcgtttcagaaggcctcaccagagaatgtggttctgggttctccgttaacatatgctgatctcattgttttcatagattaatcttctcgaattgagttgtgcaactacaaaacccacataccttttgctgtggtgtcttttatgtctttmgatgcaagggaacttaagctttcaattccaaaaaaactgtaagataaagcagtgtagtttcctctgatgaacagaaccattggcccagtagataaaacacaactcgatgagaaaccgtcttataaggtctgaatttttttcctatcctattacagtattatgtttaaattaagtgttgacttggagtgttcacctgctaactaaaattacccaataacgggaaggtactgaaggtacattagactctttaaaacctattaactttctggatttcttttttaaattggttctttcataatg

SEQ ID NO: 32224 - DNA, 600 bp, Chicken  19866894255330_1
gagattacaggaacagattgctactctcaggaaaaaactggtacaggagaggtactgcaggttcgtgtcacggttactacagcttgcttcggtgtccgagtctgactctctctgctcattttcatacaaaatgcatgagctgtttggagaaaagcacttaaccacaatgagaagcactgtttctcacatctctattgcaacccggggcatttgtaacagtttctttttttaggtctctgactaatcagcaaccaaagtaagaagtatttcaaagaggaccagatcactgaactctcagarragctcaaaagttacaggccatggaactgtcaaaacagcctgacgtcaccacatggtctgaggacttagtgttaattggttttagaagcaagcagagctttaggcagattgcatacatcttccctacggaggggcttttcagatttgtgaccaagtagtaaaattatacttgtctcatttgtgtagtcgtcgtygtcatttttcatgttgaaggtgatatagratgtataatctgtgctgctctgtcaaactagctgctgtttgctgttctgattcattatttttgtcaagggaaaatgc

SEQ ID NO: 32225 - DNA, 600 bp, Chicken  19866894255330_2
agattacaggaacagattgctactctcaggaaaaaactggtacaggagaggtactgcaggttcgtgtcacggttactacagcttgcttcggtgtccgagtctgactctctctgctcattttcatacaaaatgcatgagctgtttggagaaaagcacttaaccacaatgagaagcactgtttctcacatctctattgcaacccggggcatttgtaacagtttctttttttaggtctctgactaatcagcaaccaaagtaagaagtatttcaaagaggaccagatcactgaactctcagarragctcaaaagttacaggccatggaactgtcaaaacagcctgacgtcaccacatggtctgaggacttagtgttaattggttttagaagcaagcagagctttaggcagattgcatacatcttccctacggaggggcttttcagatttgtgaccaagtagtaaaattatacttgtctcatttgtgtagtcgtcgtygtcatttttcatgttgaaggtgatatagratgtataatctgtgctgctctgtcaaactagctgctgtttgctgttctgattcattatttttgtcaagggaaaatgcc

SEQ ID NO: 32226 - DNA, 600 bp, Chicken  19866894255330_3
ttgcaacccggggcatttgtaacagtttctttttttaggtctctgactaatcagcaaccaaagtaagaagtatttcaaagaggaccagatcactgaactctcagarragctcaaaagttacaggccatggaactgtcaaaacagcctgacgtcaccacatggtctgaggacttagtgttaattggttttagaagcaagcagagctttaggcagattgcatacatcttccctacggaggggcttttcagatttgtgaccaagtagtaaaattatacttgtctcatttgtgtagtcgtcgtygtcatttttcatgttgaaggtgatatagratgtataatctgtgctgctctgtcaaactagctgctgtttgctgttctgattcattatttttgtcaagggaaaatgccataccccagagctgaggagaaaacgttcagttgaaatttgtttgaattttttcttaaygatttctttacaatatattttttggtttttctgtatagatcatttcttgtcactttgagttcagtattttatgtttttgattgtgcttgggttttatttcaagaaaaccgcttttctttatgctcagtacagaac

SEQ ID NO: 32227 - DNA, 600 bp, Chicken  19866894255330_4
tttttttaggtctctgactaatcagcaaccaaagtaagaagtatttcaaagaggaccagatcactgaactctcagarragctcaaaagttacaggccatggaactgtcaaaacagcctgacgtcaccacatggtctgaggacttagtgttaattggttttagaagcaagcagagctttaggcagattgcatacatcttccctacggaggggcttttcagatttgtgaccaagtagtaaaattatacttgtctcatttgtgtagtcgtcgtygtcatttttcatgttgaaggtgatatagratgtataatctgtgctgctctgtcaaactagctgctgtttgctgttctgattcattatttttgtcaagggaaaatgccataccccagagctgaggagaaaacgttcagttgaaatttgtttgaattttttcttaaygatttctttacaatatattttttggtttttctgtatagatcatttcttgtcactttgagttcagtattttatgtttttgattgtgcttgggttttatttcaagaaaaccgcttttctttatgctcagtacagaactgcttacagaaataacaacttttcattaa

SEQ ID NO: 32228 - DNA, 597 bp, Chicken  19866894255330_5
gaggacttagtgttaattggttttagaagcaagcagagctttaggcagattgcatacatcttccctacggaggggcttttcagatttgtgaccaagtagtaaaattatacttgtctcatttgtgtagtcgtcgtygtcatttttcatgttgaaggtgatatagratgtataatctgtgctgctctgtcaaactagctgctgtttgctgttctgattcattatttttgtcaagggaaaatgccataccccagagctgaggagaaaacgttcagttgaaatttgtttgaattttttcttaaygatttctttacaatatattttttggtttttctgtatagatcatttcttgtcactttgagttcagtattttatgtttttgattgtgcttgggttttatttcaagaaaaccgcttttctttatgctcagtacagaactgcttacagaaataacaacttttcattaaccttttcagagagttgtaatataactaatagtataactcttcatcccttagtctagcttcttaaacactgacaagataaattagagcttcattaaattaatgatttggtaattaaggaggattcagaggaaag

SEQ ID NO: 32229 - DNA, 600 bp, Chicken  19866894255331_1
tctgcaatcaggtctctgcatgctaccaagtttggcacagtattttgccaatagcgcaggcatcgatgacgctgtttgcaggctcctctgacgtcagctgggaaactcatggctgagttgggcatcactacagcagtggcagcaagggctccatctgtcctgtagacctggctcttccatctccttcccagtgctgaggctgaggggaaataagcaacctctctgcctcaagagcttggctgcccacttgtttgccctacgaggaagaaaagcatgccacctcctgttgacctctcagtkactcctgtcttgactttgtggggaaaaatgccccctctgctttgcaagggaggaacatctgytttgctcctcctttgcagtggaagaacagtttcatgctaccagtcccatatatgtctgaaacaggcaagaaaaatgagaagtgaagcccttctcaccttccagccagcagctgcagacctaagcagcacaagacccttgtcattgtcttttagctgcctctgagcagtcctcaggcagtagcatgctatgggcacatccccatatgtagatgtttcctccctctgtgtatgaattgct

SEQ ID NO: 32230 - DNA, 600 bp, Chicken  19866894255331_2
tcgatgacgctgtttgcaggctcctctgacgtcagctgggaaactcatggctgagttgggcatcactacagcagtggcagcaagggctccatctgtcctgtagacctggctcttccatctccttcccagtgctgaggctgaggggaaataagcaacctctctgcctcaagagcttggctgcccacttgtttgccctacgaggaagaaaagcatgccacctcctgttgacctctcagtkactcctgtcttgactttgtggggaaaaatgccccctctgctttgcaagggaggaacatctgytttgctcctcctttgcagtggaagaacagtttcatgctaccagtcccatatatgtctgaaacaggcaagaaaaatgagaagtgaagcccttctcaccttccagccagcagctgcagacctaagcagcacaagacccttgtcattgtcttttagctgcctctgagcagtcctcaggcagtagcatgctatgggcacatccccatatgtagatgtttcctccctctgtgtatgaattgcttcagaaggtccgtgcccatctcacgatgagggattcaggacttcactgggatgctgcttttc

SEQ ID NO: 32231 - DNA, 600 bp, Chicken  19866894255342_1
aatcaagctctgacgttataagctgttcaggtctcatttcagcctctctgcagtcccaccagggtgagtcaatcaggctacctgacagcttgctgccaaacagcactgaattctcagaagcaagcaggcaggcagttttatttgtaataaagcttaaaatcctctgctttgtgcagcacagcaatctgcagggactcacggcacagtcacacctgaccaccagatgggcaccaaagcaacacccagagttggagcagcactgggagggcagcatgcagataatagacagctccaggcagktgtctgtaggcagaggagacagtaaatctcaagctttaaccagaaatggatacgagatccagagaggactgcaagcacgtggctactgagggacaaggaaggctctggaaccacatcatgaactgagtgccagagccacagcagccaagctgggcagcccagcaaaccctctggcacccagccctgccaccagactgcaaaggaaacaattgacatctccacctctggccacgttttaaagtgttgatccctttgtcctttaagaagatatacaactcatgctcataccaggatgggatt

SEQ ID NO: 32232 - DNA, 600 bp, Chicken  19866894255349_1
tgtgcgtttcagagccaagctttgtcggcatggaaatagtacctgaaagtgagtttagtccagatggagatgatgataaaatttatgtgttcttcactgaaacagctgttgagtttgaattctatgacaagattctggtgtccagaattgcccgtatctgcaaagttagtgtttgaaatacaaagattttgtttacagtatttcagatgaagtttcgtagttgagtgtttaacattgttctagccaaacaaaattctgttctgtatgttttattcctgccttttctccctcttttatttyrtgctagaacagaaccagctgctcaggttgcatttgacatttaaaccttttttctatgtattagaactgagatttgtattgaaaggacaactatatttttttgtacagcaatgttatctatcagatgataatctgtttacatgtttgtaaatagattgcaattatttatatctatattctatgtgttccgcagtgttgatgttattcctttatttagggtgatcttggtggaaaacgcttactgcagagaagatggacttcatttttaaaagcccgactttcctgttccattccagaact

SEQ ID NO: 32233 - DNA, 600 bp, Chicken  19866894255349_2
gtgcgtttcagagccaagctttgtcggcatggaaatagtacctgaaagtgagtttagtccagatggagatgatgataaaatttatgtgttcttcactgaaacagctgttgagtttgaattctatgacaagattctggtgtccagaattgcccgtatctgcaaagttagtgtttgaaatacaaagattttgtttacagtatttcagatgaagtttcgtagttgagtgtttaacattgttctagccaaacaaaattctgttctgtatgttttattcctgccttttctccctcttttatttyrtgctagaacagaaccagctgctcaggttgcatttgacatttaaaccttttttctatgtattagaactgagatttgtattgaaaggacaactatatttttttgtacagcaatgttatctatcagatgataatctgtttacatgtttgtaaatagattgcaattatttatatctatattctatgtgttccgcagtgttgatgttattcctttatttagggtgatcttggtggaaaacgcttactgcagagaagatggacttcatttttaaaagcccgactttcctgttccattccagaactc

SEQ ID NO: 32234 - DNA, 600 bp, Chicken  19866894255349_3
tcctcattttgttacctatttcaatttattggagggtggttatatgatttttaacagaaacatatttaatacagtattttgtgaatgtctgttttattcccttagggaatcatgaaaactgcaacagagaaatagtattaggtattttttgactgatcctgaaaaagatacatctatgcattgtggagactgggttattttacagtatttctttctatatacattatttctttcaatctggtggtcagttattttgtaatatatcttcccatataaaacctgcttttattttgtgggagrttttttttyttcttcttcttctaaggggaagattggacatatcagctgtttgtgcatacagcatggcaagtattcaggaagccttctccaarggaagctacagaggaccagtaactgtggaacattcccatgttagatggatggtttttagaggagaggtgccggttccacgtcctggtgctgtaaatacaactttacttgttctcattaaacaatarttactcctatctttttttggtagcaaaccattggcgctactgatataaatgctgtgtttctaatcagcagagagctgctttc

SEQ ID NO: 32235 - DNA, 600 bp, Chicken  19866894255349_4
tgttacctatttcaatttattggagggtggttatatgatttttaacagaaacatatttaatacagtattttgtgaatgtctgttttattcccttagggaatcatgaaaactgcaacagagaaatagtattaggtattttttgactgatcctgaaaaagatacatctatgcattgtggagactgggttattttacagtatttctttctatatacattatttctttcaatctggtggtcagttattttgtaatatatcttcccatataaaacctgcttttattttgtgggagtttttttttyttcttcttcttctaaggggaagattggacatatcagctgtttgtgcatacagcatggcaagtattcaggaagccttctccaarggaagctacagaggaccagtaactgtggaacattcccatgttagatggatggtttttagaggagaggtgccggttccacgtcctggtgctgtaaatacaactttacttgttctcattaaacaatarttactcctatctttttttggtagcaaaccattggcgctactgatataaatgctgtgtttctaatcagcagagagctgctttctcactgtgt

SEQ ID NO: 32236 - DNA, 600 bp, Chicken  19866894255349_5
tttattcccttagggaatcatgaaaactgcaacagagaaatagtattaggtattttttgactgatcctgaaaaagatacatctatgcattgtggagactgggttattttacagtatttctttctatatacattatttctttcaatctggtggtcagttattttgtaatatatcttcccatataaaacctgcttttattttgtgggagtttttttttyttcttcttcttctaaggggaagattggacatatcagctgtttgtgcatacagcatggcaagtattcaggaagccttctccaarggaagctacagaggaccagtaactgtggaacattcccatgttagatggatggtttttagaggagaggtgccggttccacgtcctggtgctgtaaatacaactttacttgttctcattaaacaatarttactcctatctttttttggtagcaaaccattggcgctactgatataaatgctgtgtttctaatcagcagagagctgctttctcactgtgtcacaggccaccctcaggacagctgccctgcagttctgctctgcaggaattgtggggttattagctggtttgtagaccgaggaa

SEQ ID NO: 32237 - DNA, 530 bp, Chicken  19866894255349_6
atacattatttctttcaatctggtggtcagttattttgtaatatatcttcccatataaaacctgcttttattttgtgggagtttttttttyttcttcttcttctaaggggaagattggacatatcagctgtttgtgcatacagcatggcaagtattcaggaagccttctccaarggaagctacagaggaccagtaactgtggaacattcccatgttagatggatggtttttagaggagaggtgccggttccacgtcctggtgctgtaaatacaactttacttgttctcattaaacaatarttactcctatctttttttggtagcaaaccattggcgctactgatataaatgctgtgtttctaatcagcagagagctgctttctcactgtgtcacaggccaccctcaggacagctgccctgcagttctgctctgcaggaattgtggggttattagctggtttgtagaccgaggaaaatgattgttcttgtttgaagttagatggaaataccagcatttagagaaaattcac

SEQ ID NO: 32238 - DNA, 600 bp, Chicken  19866894255351_1
tgcagaggcacaggcagaacagaacattaatgagtccagagaaaatgctccaaaagttgtatttgaaaacaaaccaaacaaaaatattttacacatgttgttattgaactaattgtgactctacctggtggtcatgagagacacagaacctgcagagtgcaagatttgggcatccctgtctgctaccaagctttctgctgaaagctcatgtgcctcactgtgcttgtgatgctggaccatagacagactgaatgctgccttgctgctgggagctgctcccagaccggcagcactgcccayagcagcatccaattgtgaaccaatgtccawatactaattgctagccatccattcaggagtgtgtgctcagcccatttttgagtctttatactgtctcaggttggcttttataagacagtaagacattctaattctaccactgttacaggtagaagttttacaggttcttggaataaaattacaaatcattttttacactgacaaagactggctatttcacaagcactataaactgtggaacttcacctaagctccaaatccagattctggaatctgacttggccaaagttcatatcastg

SEQ ID NO: 32239 - DNA, 600 bp, Chicken  19866894255351_2
tgagtccagagaaaatgctccaaaagttgtatttgaaaacaaaccaaacaaaaatattttacacatgttgttattgaactaattgtgactctacctggtggtcatgagagacacagaacctgcagagtgcaagatttgggcatccctgtctgctaccaagctttctgctgaaagctcatgtgcctcactgtgcttgtgatgctggaccatagacagactgaatgctgccttgctgctgggagctgctcccagaccggcagcactgcccayagcagcatccaattgtgaaccaatgtccawatactaattgctagccatccattcaggagtgtgtgctcagcccatttttgagtctttatactgtctcaggttggcttttataagacagtaagacattctaattctaccactgttacaggtagaagttttacaggttcttggaataaaattacaaatcattttttacactgacaaagactggctatttcacaagcactataaactgtggaacttcacctaagctccaaatccagattctggaatctgacttggccaaagttcatatcastgtcaaacatgttcatagttacggattttttt

SEQ ID NO: 32240 - DNA, 600 bp, Chicken  19866894255351_3
ayagcagcatccaattgtgaaccaatgtccawatactaattgctagccatccattcaggagtgtgtgctcagcccatttttgagtctttatactgtctcaggttggcttttataagacagtaagacattctaattctaccactgttacaggtagaagttttacaggttcttggaataaaattacaaatcattttttacactgacaaagactggctatttcacaagcactataaactgtggaacttcacctaagctccaaatccagattctggaatctgacttggccaaagttcatatcastgtcaaacatgttcatagttacggatttttttatgcagagagtttttatactttgtaaaacttggaagagcttcagattaatttctaaaggaaattttaagcatcgtatgcaatacacagagataccatattctgttatttttgcagtcaatttgtgttaccttatcgctgccaaaatatatcgaacataacaggaagaacagatagtctcctagcacacaaacactaactaattaaagcagtttatctgaagcaaaactgaaataaatctctttagttctagtcacaaaatcctggaga

SEQ ID NO: 32241 - DNA, 600 bp, Chicken  19866894255354_1
cctggccgatggcagggtttgtatttatgcttcttggtaatttgtccatacatcagtttatttataagcagagcacttgcccagaaaggcccatgttttctttggccaccccaagggtttctctctgtttggtttccaaagcacacacgtggaaagtggaggagcgaactgctgcaccaggaagagttagtcatttgtccaggattatttttccaggtggattttataagaagcacaaggcaggaggaggtacagcccaacggagtcagccacatggtgtgcagttttgccccatccttkaggcatgatcccctcaagtgtgagagcaccagaagtgaagatgatgaagctaaggtgggttaaaaatgcacctttggttttctttccatgggaaggagcatccaatgtgctgaaggatattttggggctggatctgctcttttatgcagcagaacataactyggacccagcagctggttctcgataggctggtgatgacaccaagcagcccaattgcccatggcttttggacattccctgggtctcccctgaaggcagaggctgtgggcctgatgccctgggacatctgatgtagtgggg

SEQ ID NO: 32242 - DNA, 500 bp, Chicken  19866894255354_2
agcgaactgctgcaccaggaagagttagtcatttgtccaggattatttttccaggtggattttataagaagcacaaggcaggaggaggtacagcccaacggagtcagccacatggtgtgcagttttgccccatccttkaggcatgatcccctcaagtgtgagagcaccagaagtgaagatgatgaagctaaggtgggttaaaaatgcacctttggttttctttccatgggaaggagcatccaatgtgctgaaggatattttggggctggatctgctcttttatgcagcagaacataactyggacccagcagctggttctcgataggctggtgatgacaccaagcagcccaattgcccatggcttttggacattccctgggtctcccctgaaggcagaggctgtgggcctgatgccctgggacatctgatgtagtggggccgacgtggctgttgccaaagcagtgggagcaacaccactgagctgggggaaatcatggctg

SEQ ID NO: 32243 - DNA, 600 bp, Chicken  19866894255358_1
attcatcatgctccacaattgctgtaccaagtacacaactcagccagcaaaatacaacaagcaagatacacaactcacctcagttaagtttcagtataagcgatcatctacatttttttggttgtttctgtattaagtatcactacagcaaactgtgttagaagtgtatacctttaaatgctttttatcttctcaccgtgttgaaattgatggtaagtaattgcgtcacccaccttagcttctcattagatatttacagaatcaatagaggcaaggaaaaaagaaaagactagtaccatytctacaaatgaacgtgyacactggtatatagagcaggtttcaactgtgtacctttgtcgattctcagatgttgacagctttgtttagctctaaccatttatatttacaaagggatcagaagaataatatcttctaagcatttcacagtcaagtacctgaggccatttctttcccacttgtactcaagctatatagccaaaatttcttaagagttagaagactggctttgtttggagggtgcttgttctttgctgttaaaaacagggtagctgggcggccctgaggattgctcaggcagac

SEQ ID NO: 32244 - DNA, 600 bp, Chicken  19866894255358_2
attgctgtaccaagtacacaactcagccagcaaaatacaacaagcaagatacacaactcacctcagttaagtttcagtataagcgatcatctacatttttttggttgtttctgtattaagtatcactacagcaaactgtgttagaagtgtatacctttaaatgctttttatcttctcaccgtgttgaaattgatggtaagtaattgcgtcacccaccttagcttctcattagatatttacagaatcaatagaggcaaggaaaaaagaaaagactagtaccatytctacaaatgaacgtgyacactggtatatagagcaggtttcaactgtgtacctttgtcgattctcagatgttgacagctttgtttagctctaaccatttatatttacaaagggatcagaagaataatatcttctaagcatttcacagtcaagtacctgaggccatttctttcccacttgtactcaagctatatagccaaaatttcttaagagttagaagactggctttgtttggagggtgcttgttctttgctgttaaaaacagggtagctgggcggccctgaggattgctcaggcagacagtaaatttgtatgtct

SEQ ID NO: 32245 - DNA, 599 bp, Chicken  19866894255362_1
  misc_feature (1)..(15): n is any nucleotide
nnnnnnnnnnnnnnncccgaaaggtaaataacacaaatgtgtgcgtgtgtattcataaggtgaatgtagcccattttagagagagatttgggttacagcagttgtctgatggggccgtgctccaggagtccccaagcccttgctgactgatggctgaagggtccttccctactggcacccccaacagaagcccagaagctctaacaaccactgctgctctggcatggagtagggctggaggttgcctttaggtggttagttttagcttttcatctgcttcgtttccaagggtgagagaaraggtggaaaggagggaatgttttggctgtattcttcttctctctgcttccacaagcttttctcccccctccagtcatccccgtgagctttgtactgggctcatcacagcacgagttacctctgggagtgcacagttggtcmtacagtgggtataatggcagtgtggctgttggytctgtggctgggaagctttgtggggtgtctcagggtgcccctcaaagtgccctccctgtatgcagaaggaagtcagtgtggttctgtcctgctccattcccatgcagcccagtccctccttctat

SEQ ID NO: 32246 - DNA, 600 bp, Chicken  19866894255362_2
gctgactgatggctgaagggtccttccctactggcacccccaacagaagcccagaagctctaacaaccactgctgctctggcatggagtagggctggaggttgcctttaggtggttagttttagcttttcatctgcttcgtttccaagggtgagagaaraggtggaaaggagggaatgttttggctgtattcttcttctctctgcttccacaagcttttctcccccctccagtcatccccgtgagctttgtactgggctcatcacagcacgagttacctctgggagtgcacagttggtcmtacagtgggtataatggcagtgtggctgttggytctgtggctgggaagctttgtggggtgtctcagggtgcccctcaaagtgccctccctgtatgcagaaggaagtcagtgtggttctgtcctgctccattcccatgcagcccagtccctccttctatctgtcttgttcctgcagtgggagcaaataaatgcctgaggagaaaagagaacaagcatatatatagtgcttccaaggactctgagcctcagcctactttctgctgcagggattttctaactcaggtgtggtttctgcattct

SEQ ID NO: 32247 - DNA, 600 bp, Chicken  19866894255362_3
gcacccccaacagaagcccagaagctctaacaaccactgctgctctggcatggagtagggctggaggttgcctttaggtggttagttttagcttttcatctgcttcgtttccaagggtgagagaaraggtggaaaggagggaatgttttggctgtattcttcttctctctgcttccacaagcttttctcccccctccagtcatccccgtgagctttgtactgggctcatcacagcacgagttacctctgggagtgcacagttggtcmtacagtgggtataatggcagtgtggctgttggytctgtggctgggaagctttgtggggtgtctcagggtgcccctcaaagtgccctccctgtatgcagaaggaagtcagtgtggttctgtcctgctccattcccatgcagcccagtccctccttctatctgtcttgttcctgcagtgggagcaaataaatgcctgaggagaaaagagaacaagcatatatatagtgcttccaaggactctgagcctcagcctactttctgctgcagggattttctaactcaggtgtggtttctgcattcttgaacctgtgcaggaagtttcttccacatacct

SEQ ID NO: 32248 - DNA, 600 bp, Chicken  19866894255365_1
acagcaagcagtgcatctacacgttcttttcccactgttcaatcaaaggttgttgtttctgttccttagcaaaacttctgccttcttgaaagaagctgctgctttccatttcctttctgaaatcctttcctgggaaacagaccttttaacgagagctttaaaggcaaattaacacaccttataaaagaaagcaaatgaaatgtatgtcttcttatcagatgcaggctccagcacccttaatgtgccccttggtgggatttcacacacacaagaggcagcatgtccctgctcaccagctgyataagcacagctctgaatcagatggctcttgtgattgtaaacctgagattcttcccgagaacaatctgcagtgtttgttttaaatctgctggttccatgaactgtcttgtctttaaatacatttgggtcacattccacagaacacacaactcattgaagagtctgaggcacgtgtatgagggatgtcctgccttgttctgccaagagcaggtactgatttaggaaaacgggcccccctgagcaactgaccacattgtgaagacttctccactgctcttgcagatttggtgaaacatagaa

SEQ ID NO: 32249 - DNA, 600 bp, Chicken  19866894255369_1
ccatcgttaaatgtgttcagtcccattttagactgccttactcataaacactgaattcttcaatgtgtatgtcacatctttctcatacatatctagagtaaaatacattatctcttaaattcaagcagtataactcagcaacttattttgcaaagtattcaaaagtcagaactgatatacaaagcaatcacataaattgcaaattcagcttttcccagatggatgaatgaaaaggatacagataaaaaatgcttgtgggtatgtacataggaaaggtctgcctaaaggtaacaacaattwaaaaaaaaaggaagaagaaaattactataatttggcattggaaatttctatgtataattgctgttgaaaatacagaaatatcattgttaacaactttggttaycttggcaagaaaagtttctagtaattagaaaaacacttattccagaaagctgtctcgatggataagtaaatacaaatcttcatgccagattttaaacattcttatatcttgaaagaaatcagaactatgtttatagcaataagtatttttattgccactttgtaacagaaatgaacacaagcattaaacatttactt

SEQ ID NO: 32250 - DNA, 600 bp, Chicken  19866894255369_2
tacattatctcttaaattcaagcagtataactcagcaacttattttgcaaagtattcaaaagtcagaactgatatacaaagcaatcacataaattgcaaattcagcttttcccagatggatgaatgaaaaggatacagataaaaaatgcttgtgggtatgtacataggaaaggtctgcctaaaggtaacaacaattwaaaaaaaaaggaagaagaaaattactataatttggcattggaaatttctatgtataattgctgttgaaaatacagaaatatcattgttaacaactttggttaycttggcaagaaaagtttctagtaattagaaaaacacttattccagaaagctgtctcgatggataagtaaatacaaatcttcatgccagattttaaacattcttatatcttgaaagaaatcagaactatgtttatagcaataagtatttttattgccactttgtaacagaaatgaacacaagcattaaacatttacttgaagtttttaccctatggccaaggttgaatagaagaatggatttttgctatcttatttttgaagaaatttcttatgttgaaggatttcccaagcccagataat

SEQ ID NO: 32251 - DNA, 600 bp, Chicken  19866894255376_1
tgcagcaccagactgacagtgctgctgttagagccgaggtattgttggaaattattaaccctatttattaggtatttgtagctcctgctcaatagttgtcaagagcagaacgcaggcataataaagtttcagtgcaagaatgaacataattttggtgccctctttcaaagagcggtttttgctattacaaataaagcttggaaatagcaattagtatagctgtagttagccagctttgaatgatgacagatttgtccagccaaggtagctctgtctggctctatccaaagctcttccctyattgagactgctaatatcgctatcagtattcttgctgtttgaccaactacagctttaagccagaaattgagctcctagttctattattcacatgtaattgttcataggtctgcatatatttttatgactcagtacataaaatctgtaccatgaaatcctgattgaaaggacaaatgctttttagattaatggtatgggatacggaaagttccatgcagctttaagaaggactgcttgcaataggagagtatcaaaagcaataaaagggttataaccaatggatcatcagtgaagcagtgc

SEQ ID NO: 32252 - DNA, 600 bp, Chicken  19866894255376_2
agctcctagttctattattcacatgtaattgttcataggtctgcatatatttttatgactcagtacataaaatctgtaccatgaaatcctgattgaaaggacaaatgctttttagattaatggtatgggatacggaaagttccatgcagctttaagaaggactgcttgcaataggagagtatcaaaagcaataaaagggttataaccaatggatcatcagtgaagcagtgctgctgggccttttgtaaatcgtttacagtaacaatacaaaagggcaaactaaatatcagacagtcaacygagacttggattttcattgcggccttccagtacttgaagggagcataaaaacaggagggggaagggctgctcatgagggtggatagtgataggacaaaggggaatggtcttaaactgagacagggaggtttaggttgggtactggaaggaagtttttcactcagagggtggtgacgcactgaacaggttgcccaaggaggctgtggatgccccatccctggaggcattcaaggccaggctggatgtggctctgggcagtctggtctgctggttggtgactgcacatagcagggggttgaa

SEQ ID NO: 32253 - DNA, 600 bp, Chicken  19866894255395_1
aatagaagggccaagaaggaattcaacagcatcatggggaaaaaacctacatacaaaacacttaaagtttagagattccacaattagctggcaaattcccttggttagtgttcattgactagttcatagaatcatagaatggcgtggcttgaaaaggatcataatgatcatttagtttcaaccccctccgctatgggcagggttgccaaccactagaccagggctgcccagagccacaacagagttcaacaactgctggagaactagagagtactttgggtaaacatcgctgttttactwctttgttattacatgyttttcccgtctgcttactttttttagtatctgctaaaagggggatattgatctcattgcacttcttgtcatcttgcacagatctcatatgttcttaaagacttgcaaatggcccagtaccatttgttgtagtaactcataattagtactaataccagaacagatgatggttgctttcccttatgcctttcacagaaatgaatatccttatatgtgtatgagcttagaagctttctgttgcctgagacttggttagaaaatgaagactcttttttgatggggaaa

SEQ ID NO: 32254 - DNA, 600 bp, Chicken  19866894255395_2
aggaattcaacagcatcatggggaaaaaacctacatacaaaacacttaaagtttagagattccacaattagctggcaaattcccttggttagtgttcattgactagttcatagaatcatagaatggcgtggcttgaaaaggatcataatgatcatttagtttcaaccccctccgctatgggcagggttgccaaccactagaccagggctgcccagagccacaacagagttcaacaactgctggagaactagagagtactttgggtaaacatcgctgttttactwctttgttattacatgyttttcccgtctgcttactttttttagtatctgctaaaagggggatattgatctcattgcacttcttgtcatcttgcacagatctcatatgttcttaaagacttgcaaatggcccagtaccatttgttgtagtaactcataattagtactaataccagaacagatgatggttgctttcccttatgcctttcacagaaatgaatatccttatatgtgtatgagcttagaagctttctgttgcctgagacttggttagaaaatgaagactcttttttgatggggaaaaaactggattgtgtct

SEQ ID NO: 32255 - DNA, 600 bp, Chicken  19866894255395_3
attcttgagtatagtgccatactgtgatctcccaagcacatcacagaatgtgctagcaaagcatgtcctgcttacttatctgcatttcttccctgctacttagtaatgaaattcacctttgtggtttccagtcctgtaactgagtctccctgagaagttccacaggatctggcttcatgccccatcttcactccagagtttcccctcagctttgcctctgacttctgctgtatcaaggtaatccctgctgactcgattcagcctgactgaagtgaacagattttatccaatgtcacttgygtgtccctgcttcaattctgtgaacactgtgtgacccacacttctaggacagagcatattcatttgggatctgcatgtgcctccaaacagaatacttcgtgccttaccacaggtgtaagcggcagtaacttccatggtgctggccagtctatccacgttgtcactgtgttctattgaaatgctggacaatatgtgcagagcaaaatgttccactattagcagccaggtttattgacctgtgttaggtgagtttctacatacatctctgcattgcagtcagactctaagtcagtggtgttc

SEQ ID NO: 32256 - DNA, 600 bp, Chicken  19866894255397_1
aaccactgttttcacataatttctcttataaaatttcatctcatgcttcagcagatgttaaagacctcaattgcttctgaaccagatgttttacatttgcagatgagtttattttgctaaaagtctaatctgctaaagataaagcagacgctaccatatcaaatgtctttcattgactgttgcattgtttttaatgagtaatggagaaccactcctcaagtatctttttccttgaataagaaataagctccctattttaagaggcatactggggatgacttgcacacatattttcaaacrttcatttggatccatcacattcamctttcaccctgctttaaaaggaagaagcaggcatctcaattccagcgtaagtacatgtctatcaagcatcatcttctgcgcaggtgcagttgtattcagcactgaagagagaagcaatttcacagagttgacagtgttctaagaaggggattagtctaaaggatcaacaatgattgtttcaatgctacactacacaaaggcagggagcttaaaataaaagctttcagatactcactacgtactgtatctgaaagactattccattctctttttcag

SEQ ID NO: 32257 - DNA, 600 bp, Chicken  19866894255397_2
cttataaaatttcatctcatgcttcagcagatgttaaagacctcaattgcttctgaaccagatgttttacatttgcagatgagtttattttgctaaaagtctaatctgctaaagataaagcagacgctaccatatcaaatgtctttcattgactgttgcattgtttttaatgagtaatggagaaccactcctcaagtatctttttccttgaataagaaataagctccctattttaagaggcatactggggatgacttgcacacatattttcaaacrttcatttggatccatcacattcamctttcaccctgctttaaaaggaagaagcaggcatctcaattccagcgtaagtacatgtctatcaagcatcatcttctgcgcaggtgcagttgtattcagcactgaagagagaagcaatttcacagagttgacagtgttctaagaaggggattagtctaaaggatcaacaatgattgtttcaatgctacactacacaaaggcagggagcttaaaataaaagctttcagatactcactacgtactgtatctgaaagactattccattctctttttcagagtattccaggcatcagttctgag

SEQ ID NO: 32258 - DNA, 600 bp, Chicken  19866894255408_1
cgtactcatcagcaggtgagactgcactgagcaggtgtggggtggtggtgtttaggctgtgcctggctaggttgtagtggttttggtgggggctgtttcatcttttgctttcttctttcttatgtttcatcacgtcctctactacaatgtaatttttattcctttcaggacttcattatttgtatagcttgcttacgtattctaatgcaagttatatcggtaacacacatgacttgtgctagttttgatctttgtttggccctttgtatgacccttgagatctttaggtattgaaatacygactcacaatgcaactcactgatcagacacatgaagacagtggttctgggcccatggctaaaccagctggtcacccttcccagcatttattacsacgttayacaccgggtaggttagaagctctcctgaagaacacacaaactactgccaatagaaatgtaatcccaagctgtgcttttaataagaggaaaaagctccccaaagaccgcatctggaagacagacaaggaaacagctcaagtaaaatgttcagacctcttatcttcagacatgaaagtatgttgtttcgcaacagcaccca

SEQ ID NO: 32259 - DNA, 600 bp, Chicken  19866894255408_2
gtttcatcttttgctttcttctttcttatgtttcatcacgtcctctactacaatgtaatttttattcctttcaggacttcattatttgtatagcttgcttacgtattctaatgcaagttatatcggtaacacacatgacttgtgctagttttgatctttgtttggccctttgtatgacccttgagatctttaggtattgaaatacygactcacaatgcaactcactgatcagacacatgaagacagtggttctgggcccatggctaaaccagctggtcacccttcccagcatttattacsacgttayacaccgggtaggttagaagctctcctgaagaacacacaaactactgccaatagaaatgtaatcccaagctgtgcttttaataagaggaaaaagctccccaaagaccgcatctggaagacagacaaggaaacagctcaagtaaaatgttcagacctcttatcttcagacatgaaagtatgttgtttcgcaacagcacccatgaagagaaaggcagatgggatgaatcagcaattgcttttcctgaggcaaacatgcagcatatcctcttctctcatttctctcccatggagaca

SEQ ID NO: 32260 - DNA, 600 bp, Chicken  19866894255408_3
cttttgctttcttctttcttatgtttcatcacgtcctctactacaatgtaatttttattcctttcaggacttcattatttgtatagcttgcttacgtattctaatgcaagttatatcggtaacacacatgacttgtgctagttttgatctttgtttggccctttgtatgacccttgagatctttaggtattgaaatacygactcacaatgcaactcactgatcagacacatgaagacagtggttctgggcccatggctaaaccagctggtcacccttcccagcatttattacsacgttayacaccgggtaggttagaagctctcctgaagaacacacaaactactgccaatagaaatgtaatcccaagctgtgcttttaataagaggaaaaagctccccaaagaccgcatctggaagacagacaaggaaacagctcaagtaaaatgttcagacctcttatcttcagacatgaaagtatgttgtttcgcaacagcacccatgaagagaaaggcagatgggatgaatcagcaattgcttttcctgaggcaaacatgcagcatatcctcttctctcatttctctcccatggagacacccctaa

SEQ ID NO: 32261 - DNA, 499 bp, Chicken  19866894255410_1
cattatctttcaacctcatcaaattgagcctgggtagaagaagaacattgttctgttttaactcattttattgaaataccaaaatatttaaatatggtcacacgttacatcaggagtgtgcacgtgtcaaactccaggtgttcttatttcttgtgcgaaaaacctctgtcttagaataatcacttagggacatggtttgatgggcatggtggtgatgggctgatggttgactagatgatcttagtggtcttttccaaccttcatgactctacgatagcttctgcaataaggagaaacaarcttgctgttgagagtcctcatctcagcagtatggccagccagctaaagacaagactttgtcccttgagcatcctggagataaacagcagagcctgcattgccaagcagaccagcagctgttgttttactgtctgtggcttcccacgyggtgaacactgcacatccagggctgctgccttaccctcagccagccaaggga

SEQ ID NO: 32262 - DNA, 352 bp, Chicken  19866894255410_2
ttcttgtgcgaaaaacctctgtcttagaataatcacttagggacatggtttgatgggcatggtggtgatgggctgatggttgactagatgatcttagtggtcttttccaaccttcatgactctacgatagcttctgcaataaggagaaacaarcttgctgttgagagtcctcatctcagcagtatggccagccagctaaagacaagactttgtcccttgagcatcctggagataaacagcagagcctgcattgccaagcagaccagcagctgttgttttactgtctgtggcttcccacgyggtgaacactgcacatccagggctgctgccttaccctcagccagccaaggga

SEQ ID NO: 32263 - DNA, 600 bp, Chicken  19866894255412_1
tctttcaactgtaaatggacaaacagatatcaatgtgttaggataacatttttattacttgctgagtaggcaacattatttccagtttgtggaaaattgaagatgaaacttctagatctcccatcctgtggattgtttacttggcataatgaaaagttgcattgtgatactagatctgattacgtgctctgagatcctatactaatgctgccatatttacgtactgtttcacatacattagtaatctgcttctcggtatcgttcgttaacatacgctagatgcagtgctgtgttttttcmttaaggtaacatttttacagttgttgtagtatgccattttactgccctgcataatgtactgtggttcttcagacaaaatcataattactagataactgtttctagaactgtaggtcatcaagaaatactgtgttcagtggaacaagaaaacaaacaaatgcggacttgtttgttggatcttagcagagcttgcctttctgagactgatggtttcttgagcactacattttgatatttaatcttgtgagaactcataggcttgtcgtctttgttttgacaatctttaaatattctctgaat

SEQ ID NO: 32264 - DNA, 600 bp, Chicken  19866894255412_2
tgttcagtggaacaagaaaacaaacaaatgcggacttgtttgttggatcttagcagagcttgcctttctgagactgatggtttcttgagcactacattttgatatttaatcttgtgagaactcataggcttgtcgtctttgttttgacaatctttaaatattctctgaatttctctgaatgttttggaacatcagtagtatttctcagaagtggggaaaagtgtattatttaatgcatgcactatgtctttaataatactcttgtattttatctgaattcaacatatttgtataagctgkctgtcacatctacaggtatctcttaccagggcctattcctttgttcaactgaagtaaaatcttgcatggattcagttcatattcttacatacacctgatgaggtccactcagctataatttaaccaggagaaatatcaggtgtaattattggaagatcacttttgttcgtttttatctataatagctctgttggggtaagaaaagtgactaatcaaagtaaaaggctgcttaagaatgaagcgatataaggctcatcaacaacggaattcagtgatagacccccaaggcaattttcaagc

SEQ ID NO: 32265 - DNA, 600 bp, Chicken  19866894255414_1
tgtattttaaattcagaaagtagaaagctccagcaagtacttcaaagcactgtaatatatttgatgccatattcctttagactctgtgctaaacctataaaagaagtcagctgctctctgggctatgtaagctctccctctgtcctcttagctcagtgcaagtgacaaagtgactccaacagccttccattcagctaattacttccagatgacaatataaaaacttcatcagcaccttatggctgcacagttcccataaaggaaaaagacatacgcgacattgaactaaacatatcttgytttcctttgcaggtgcaaatgctaaagggcgtactcagacaraatattttgcataatgtcgtagactgtttcagtaagagctgccgtaatgaatcccaktatccgttgagctatcttgcctcaaacagcagctgcatgcttctcaggcatttgagacattccttctgtaaagcctctgtctactcagactgataaggcctctttacagctcttgatttcggtcttccaaaggtagccctggcagcagcactgggccaccatcaggcaatctatcccagagctctctcctatttgttagca

SEQ ID NO: 32266 - DNA, 600 bp, Chicken  19866894255414_2
caaagcactgtaatatatttgatgccatattcctttagactctgtgctaaacctataaaagaagtcagctgctctctgggctatgtaagctctccctctgtcctcttagctcagtgcaagtgacaaagtgactccaacagccttccattcagctaattacttccagatgacaatataaaaacttcatcagcaccttatggctgcacagttcccataaaggaaaaagacatacgcgacattgaactaaacatatcttgytttcctttgcaggtgcaaatgctaaagggcgtactcagacaraatattttgcataatgtcgtagactgtttcagtaagagctgccgtaatgaatcccaktatccgttgagctatcttgcctcaaacagcagctgcatgcttctcaggcatttgagacattccttctgtaaagcctctgtctactcagactgataaggcctctttacagctcttgatttcggtcttccaaaggtagccctggcagcagcactgggccaccatcaggcaatctatcccagagctctctcctatttgttagcagctctctgcagacagtcacatcctcacagtttagccagagag

SEQ ID NO: 32267 - DNA, 600 bp, Chicken  19866894255414_3
aaagaagtcagctgctctctgggctatgtaagctctccctctgtcctcttagctcagtgcaagtgacaaagtgactccaacagccttccattcagctaattacttccagatgacaatataaaaacttcatcagcaccttatggctgcacagttcccataaaggaaaaagacatacgcgacattgaactaaacatatcttgytttcctttgcaggtgcaaatgctaaagggcgtactcagacaraatattttgcataatgtcgtagactgtttcagtaagagctgccgtaatgaatcccaktatccgttgagctatcttgcctcaaacagcagctgcatgcttctcaggcatttgagacattccttctgtaaagcctctgtctactcagactgataaggcctctttacagctcttgatttcggtcttccaaaggtagccctggcagcagcactgggccaccatcaggcaatctatcccagagctctctcctatttgttagcagctctctgcagacagtcacatcctcacagtttagccagagagcagaatatgtgagctctcttcacccattccagtgcaaaagctgctgagttacttgac

SEQ ID NO: 32268 - DNA, 599 bp, Chicken  19866894255422_1
  misc_feature (1)..(66): n is any nucleotide
nnnnnnnnnnnnnnnnnnnnnnnnnnnnnnnnnnnnnnnnnnnnnnnnnnnnnnnnnnnnnnnnnnggagcatcagggaagtgcatggctgtgttggtccctgagctgcatacctgaggcactgcactgccatgagggttggtgccatgctgagcacaagagcacagtcccatccaactgagctgctctgctccgctgcttgagagtaattggtgcattctggccttttggatttctgtaggaaaagcgcatagataactgaacaaatggctgttatttgtatggcagttgaatcagcartgtcgcacagatgactctgggttcaggtatttaattatattaaaaatagagataaggctgaaacaaaaaaatgctgctgctttctgcagctttatggctttatctggtgcgtttagcagccccgtaatccatgctgtagtctcagctgtatgtcagttgatatattccttgttttatggatcactggaagacaattctgttgttttccattggacctgtagtaaataaatgtcaggatttttccagyrctgtgtactccactttccagctggtatattaatttctgtcaagtgctttgg

SEQ ID NO: 32269 - DNA, 600 bp, Chicken  19866894255422_2
cgcatagataactgaacaaatggctgttatttgtatggcagttgaatcagcartgtcgcacagatgactctgggttcaggtatttaattatattaaaaatagagataaggctgaaacaaaaaaatgctgctgctttctgcagctttatggctttatctggtgcgtttagcagccccgtaatccatgctgtagtctcagctgtatgtcagttgatatattccttgttttatggatcactggaagacaattctgttgttttccattggacctgtagtaaataaatgtcaggatttttccagyrctgtgtactccactttccagctggtatattaatttctgtcaagtgctttggcttcgtacttgttccagagatggtctgttttcatgctgggttaaatcattaatcccaatcctatttttaacaaactaaaagtaagtatttaaaatgtgcattcgagagtattttcctcatgtcttctctaccacttctataagcaaacaagcagccctcttgcagcaccccggagctgatgtgtgcatttaacgtaaatgtactacgtgtgctttgtagcttctaaggcttgtgacaaagcacagcac

SEQ ID NO: 32270 - DNA, 600 bp, Chicken  19866894255422_3
gcatagataactgaacaaatggctgttatttgtatggcagttgaatcagcartgtcgcacagatgactctgggttcaggtatttaattatattaaaaatagagataaggctgaaacaaaaaaatgctgctgctttctgcagctttatggctttatctggtgcgtttagcagccccgtaatccatgctgtagtctcagctgtatgtcagttgatatattccttgttttatggatcactggaagacaattctgttgttttccattggacctgtagtaaataaatgtcaggatttttccagyrctgtgtactccactttccagctggtatattaatttctgtcaagtgctttggcttcgtacttgttccagagatggtctgttttcatgctgggttaaatcattaatcccaatcctatttttaacaaactaaaagtaagtatttaaaatgtgcattcgagagtattttcctcatgtcttctctaccacttctataagcaaacaagcagccctcttgcagcaccccggagctgatgtgtgcatttaacgtaaatgtactacgtgtgctttgtagcttctaaggcttgtgacaaagcacagcact

SEQ ID NO: 32271 - DNA, 600 bp, Chicken  19866894255425_1
ctaaaagagatttttaacctttcaaggatacaaagaaaatgcctaaaaagatgtcatcacagttcaaaagccctagttgcccaaaaaaacccacagtacacaaagaaaataaagtcaatattaaagtcaatatatgcacacatgaagccagaatggctggtcttcagcatgtgaggactggttgattttgtcactggatcatacaggatgcaggacacgagagttgccaccattcaaagctccagggcagggagtggattcctccaagcaattccaattttgtcttagctggtgccttcrtaaatctttctccatcacactcgtcattactaaagttggagctcttaccacaacctttctctagatagaagttgtcaagtctgcttcttcatttattatcttttctcagaaaggggttctttgaatccacaaggggaatcccattcacaggcaggttgtgaatacatgcatttctatgcgtgggccatcaagcagcatttcttccaaagctcagagcttagacctagagctttagacttcattttgctgccacaaatggtctagactttgacctataaacatgtctgtgactgggaggaa

SEQ ID NO: 32272 - DNA, 600 bp, Chicken  19866894255426_1
gaaggcatgttaagtaaggctgctcagaaccaggctttaagggagtgaaagaggtggttttagaccagatgatcagcaaaaagcctcagatgtgtgaactgtgatcctctgagaatcccagctacggagaaggtgctaagagaagggcaatcctcgagaaaagaggctgaagacaaaaatatggtccttgggaggacttacgataatggttgctaagataaaagtacattcaagataggaaacagaggtatatagacgcaccacatttgctcaaaatactcaaaacaacaacaaaaaaayacagcattttagaagttgctctttcaggggtggaagtacagcctttttggaaatccaggccatttgcaaacatctttggctgtgcaaagaaaacaaatgraagcggcaacaaggactggtccctttggcatcagggctaacgcagcccaggagaaagacagagaaagttggatgtgatccccaaactcctttcatatgtgaatccattctcccagaaacaaagcctggcaatgaaccttccctgccaagagcagcctattgccagcccaggtgctcccacgcgctgtcactgcctttggc

SEQ ID NO: 32273 - DNA, 600 bp, Chicken  19866894255426_2
gtgatcctctgagaatcccagctacggagaaggtgctaagagaagggcaatcctcgagaaaagaggctgaagacaaaaatatggtccttgggaggacttacgataatggttgctaagataaaagtacattcaagataggaaacagaggtatatagacgcaccacatttgctcaaaatactcaaaacaacaacaaaaaaayacagcattttagaagttgctctttcaggggtggaagtacagcctttttggaaatccaggccatttgcaaacatctttggctgtgcaaagaaaacaaatgraagcggcaacaaggactggtccctttggcatcagggctaacgcagcccaggagaaagacagagaaagttggatgtgatccccaaactcctttcatatgtgaatccattctcccagaaacaaagcctggcaatgaaccttccctgccaagagcagcctattgccagcccaggtgctcccacgcgctgtcactgcctttggcaccagggttgtccacagaagtgaatcaattctcttaccaccccacaatttccacaccactgacaactcagaaaacaattaaaaagagaattcaaaggatc

SEQ ID NO: 32274 - DNA, 600 bp, Chicken  19866894255426_3
aaatctgagtgagtgagcatatgtaaataggaagaatgagtagcacataattacatcaaattgttacttagcaggggaagtaaataacccaaaatatgcggagcaaaaaatggcgatgaattagaactaattacttaaggctaattaaaataagaatggcttgaattgaaatatgttaatagcattgaacctgccacctacgagggaatttaaataaaaatgataatgttgcatcaactttcacctgatgggggtgagaagttgggaatcggagctcagtctgctgtggaggtattgacrgcaacaaggcattatttatgatcactttagagctggaattttctggtaggtggaggactcctggtcaagggaagagagagattgtgttggataatggatgtgaagaaagtactgcaacaggcaaaccctaaatcatctccagatctgttcatctttgagggcctcgtgctggggagggctttggctgagagtaaggcatagaggtaatgggatgatggggaaggaaagagaaacagcaaataagagagactgagggagcaaaaaggagtgaaagagatagggagagcctagagccatgac

SEQ ID NO: 32275 - DNA, 600 bp, Chicken  19866894255427_1
cctgtttgtgagaaaagttattcttctctggtatgtttctgctgcactgaagatgctgcaattcacagagggaaaatagtccagacccagtttattaagcacagtcagcatctaaagctcatccagaggacaaggggctccagtgatcacagaatgtctgataagcatatactcagttaattaggtgaaatgatgattgctaaggtatcgtttttttatgtgttttagattgtaaccatgagctgaaattcaccaatttgctttttccactacacctaaatgtggtcacagagacataakttccctattcagaataagtcatacttaggctaaggtcaggctcattattttttctttttttttagatcaaccccatctctactcaatattaattgaagcattgatctacattaagcaaagacaatgaaaaatgcaagatcatacatcttttaaataaaaatagccagtgctaacagcatatatctatctctgatcttgctgaccatctcttaaaatttccatgcacgcactgaagattagcaataacagaactgcattctatgggatcccaaacatgcgaccactacagaaaacaagagt

SEQ ID NO: 32276 - DNA, 600 bp, Chicken  19866894255435_1
tgatttagaatagcccattgattttccagaaatgaacgtctcggtgcaaaatgtaagtctagttatcaagactaaattctgctccaatgactgagtccccagaggtcaattatgtctctgtgaaagccttcctggaatagtgaatttagtactgaaatctgtgtgattaagcacttggctttaataggtattcattcctctttgatgtactgaacttcattagggttctgaggcatgcttcttagaagtagtgtcacaccagataaatgtggtgtttagtgactggctgtgttagggaartgttggttttttttgtttgtgtcttgcatctgcaaagctcctgctcagaaactttttaagggaaacaccaaattcctaaaatactgaggtgtctccatagcattttaaaacatttttcaagcacactaagatttgaatgcatgaaatacttttcagatactgaagtcgttctgtttacatttctgtgtttaaaaaaagcaattcacatcgcttaataaaattcagacaaagagaatataatttccttatgagtagaggccaagtatatagattttggatttcatctgcttccttatagtt

SEQ ID NO: 32277 - DNA, 600 bp, Chicken  19866894255435_2
agaaactttttaagggaaacaccaaattcctaaaatactgaggtgtctccatagcattttaaaacatttttcaagcacactaagatttgaatgcatgaaatacttttcagatactgaagtcgttctgtttacatttctgtgtttaaaaaaagcaattcacatcgcttaataaaattcagacaaagagaatataatttccttatgagtagaggccaagtatatagattttggatttcatctgcttccttatagttacagcagattagtttctgatgtgcaaaagtcaggttcctaactccycactaccagctccttggttgcatccacttctcagctctctcatccacttctcagctctctcccatgcttccagctggcttctgctcagggagggatgtaggtgcattgtatgttcagggaccctgaccctagggctggacaccactctgggagctccttctctttccagctgatcttctcaaatcagttgcccttgggcctgggaaatactctatactgtattgtcaagttaattatttcgtagtgctagggtagtgcagtgaaactgcatgaaagataggaaagtgaatttttagctca

SEQ ID NO: 32278 - DNA, 600 bp, Chicken  19866894255443_1
caaaatctctgtgcagcatattacgacccagcagtgtcaagactgttttaacgcactctgtagcggtagccttggacaggcaaattatttagataatttactgtataaaatgctgagaaagcaggagggaaaatagtgactagttttttgcctttttactttttatttttttaaaggatctctactgcacatgtctgagcagtagttgtaaaacttgtaattttagtggatgctcatgggaagagcaaaatgcacatctccaaaacaactgctattttcaaagatctgattcaggtcttyggggaaatggggcttttcaggaaagtttttcagagtggttcttctgttttcttggttttagtaagggaaaaatatccagctttttgcatagctttgttcttagaaacagccgggtggcaatgcatgaaatttcaatgatatttagcccaaagcatacagtatggaaagtatctatcaagagagtggagttagacagacctattgataactgagagtttgtttgtttatttgtttgtttgtttttaaaaagagaagagtctggctgtgctacctgctccatccacagcactatctccatgg

SEQ ID NO: 32279 - DNA, 599 bp, Chicken  19866894255459_1
  misc_feature (1)..(76): n is any nucleotide
nnnnnnnnnnnnnnnnnnnnnnnnnnnnnnnnnnnnnnnnnnnnnnnnnnnnnnnnnnnnnnnnnnnnnnnnnnnnacttggtccctgggaaagtgctggagctgcaatcctgaaaaccatttccagacatgtgaacaaccagaaaatcatcaggagccatgctagaccaacaagataaggttctataatgaaataactgccctggtagatgaggggagagtggtggatattgtctacctgcacttcatttaggcctttgaggctatcccataagatcctcatagagaagtagttgatgygtggactggattggcagacagtgaagtgggttgaaagctgactgactggccgagtccagagggcagtcgtcagcagtgaaaagcctagttggaggccagtaactagtggtgtactacagaggccaatatttcatccggtcctattcaacaccttcattaatgatctagatgagtgcgacaatgggccacaaagatgattgagagactggagtacttctcctaccaggaaaggttgagagagctgagactgttctgcctggagaagagaaagctcaggtggatctcattagtgtccataa

SEQ ID NO: 32280 - DNA, 600 bp, Chicken  19866894255467_1
tcaggataaaagtgtgaggaagcaggaagaaagagggacagaaacaccccctttagtattcccattttcattccgtctttgctcactgtaggtgatgtattagatcaatgatatattggttgtgctggttcaaaagcaactgctgtgatatacatacagcatccctccaacacattctccaaagtgactttgggaaagtaagtgattggttttcaactagtatgctctatgatagaaggagaagttgttctatgctgcttcactgcaggaatgagtatcagtccagtataaattgcaaaraaaaataatatacgcagtttcattaatacttattacaaaataacacgtaaacaaatcataaggttaatcataaggaaaattaaaataataaggaaaataaaagtattaattattacttaaaatggtatttcctttawtatgccagaatgaagctgttaatatcttaccaaagacagacaragaggaatgttctcataaatgagatcatgaattttatctgctctcttctttcttcctcaattgaggaggaaaattaatattattttgcatctagagttgtgtgcaatcagtacccaatct

SEQ ID NO: 32281 - DNA, 544 bp, Chicken  19866894255467_2
aactgctgtgatatacatacagcatccctccaacacattctccaaagtgactttgggaaagtaagtgattggttttcaactagtatgctctatgatagaaggagaagttgttctatgctgcttcactgcaggaatgagtatcagtccagtataaattgcaaaraaaaataatatacgcagtttcattaatacttattacaaaataacacgtaaacaaatcataaggttaatcataaggaaaattaaaataataaggaaaataaaagtattaattattacttaaaatggtatttcctttawtatgccagaatgaagctgttaatatcttaccaaagacagacaragaggaatgttctcataaatgagatcatgaattttatctgctctcttctttcttcctcaattgaggaggaaaattaatattattttgcatctagagttgtgtgcaatcagtacccaatcttatactgaaattaagtttatgataaagctaaaatatcctctgtgcaataaatgatactcgtatccttatgggagatttaat

SEQ ID NO: 32282 - DNA, 501 bp, Chicken  19866894255467_3
aaagtgactttgggaaagtaagtgattggttttcaactagtatgctctatgatagaaggagaagttgttctatgctgcttcactgcaggaatgagtatcagtccagtataaattgcaaaraaaaataatatacgcagtttcattaatacttattacaaaataacacgtaaacaaatcataaggttaatcataaggaaaattaaaataataaggaaaataaaagtattaattattacttaaaatggtatttcctttawtatgccagaatgaagctgttaatatcttaccaaagacagacaragaggaatgttctcataaatgagatcatgaattttatctgctctcttctttcttcctcaattgaggaggaaaattaatattattttgcatctagagttgtgtgcaatcagtacccaatcttatactgaaattaagtttatgataaagctaaaatatcctctgtgcaataaatgatactcgtatccttatgggagatttaat

SEQ ID NO: 32283 - DNA, 600 bp, Chicken  19866894255473_1
atctcacctgattatatccacctgcagagacagatgctctgaaccatgcatgaagtaacatggtgctcctggtgcagagaaatgggatcgataaaagagccttgtctcaccggacatgaaggcagtttggaaagtgaacccagatgtagagatatgcacttagcctggttcccacatgattttcctatctataattagttgtaactcaaatgaattaacaggcccaaaatgtatatcctaatgagtacagattttaggttaagtattttctctttgctattttagatccatgccatccaygtagcattacaggggaagaatctgtgcaaagtcccagagctgtatacttgggtgctcctggcctgaggagctctcttggctgtctcagagtgagattctgggraagcacattggtctggatgcttcagggactgagtctctgagctccgtatgcccaagccagaccatttcgggctttaaatctcctggttcagtcagaggaaactcccaaagcccttggatgatctaggtactatggaagcattgttttcgaagattctgaaggtcacgtttaccttcagtttacaattgtagttggtt

SEQ ID NO: 32284 - DNA, 600 bp, Chicken  19866894255473_2
gtctcaccggacatgaaggcagtttggaaagtgaacccagatgtagagatatgcacttagcctggttcccacatgattttcctatctataattagttgtaactcaaatgaattaacaggcccaaaatgtatatcctaatgagtacagattttaggttaagtattttctctttgctattttagatccatgccatccaygtagcattacaggggaagaatctgtgcaaagtcccagagctgtatacttgggtgctcctggcctgaggagctctcttggctgtctcagagtgagattctgggraagcacattggtctggatgcttcagggactgagtctctgagctccgtatgcccaagccagaccatttcgggctttaaatctcctggttcagtcagaggaaactcccaaagcccttggatgatctaggtactatggaagcattgttttcgaagattctgaaggtcacgtttaccttcagtttacaattgtagttggttaagcacccttaaaaataccacttaatgtgagcagcagggagctgagctgcacttagaaatacctgtaacccacggagcatatgtttgactcagaagcacaaga

SEQ ID NO: 32285 - DNA, 600 bp, Chicken  19866894255474_1
ggctctgcccaagctgggctgtgccatggcgtgcctcaactgcaacgtgcggggccgtgcgctgctgcatgcacggagcgctgcgcaggcagacatcgtgctcagctgtagtggtgagctggggggctgggggctgcccagggtgtgtgtgtgtgtgtgtgtgccgtggtggggggctgcacagcgtggtgtctgtctgcaggcaggctggcatttgcgtgctttgggatgggtctcactgctggtgcacgttttccacacggggacttacgcacacatcagcgtgtgcaagagtttgcrtgtgtcagtgtctgtgcacgcgtgtgtcagtgcgtgccattgcccccgtgcgtctgcatggctgtcagtgtctgtgcgtggacttgcacacatctatacctgtgcatgtttgcatgtatgttgttgtctgtgcatgtttgtgcgtggcagtgtccgtggatggatgtgcacatgtgtctgtgcacgtctgcacaggtgttagtgcgtggatttgcatgtatgttgttctccatgcatggggaacgcgtgcacatgcacagacatacatgtatgttagtgtccctgcatgtttgcacatct

SEQ ID NO: 32286 - DNA, 600 bp, Chicken  19866894255474_2
gtggacttgcacacatctatacctgtgcatgtttgcatgtatgttgttgtctgtgcatgtttgtgcgtggcagtgtccgtggatggatgtgcacatgtgtctgtgcacgtctgcacaggtgttagtgcgtggatttgcatgtatgttgttctccatgcatggggaacgcgtgcacatgcacagacatacatgtatgttagtgtccctgcatgtttgcacatctcagcacacggatttgatgtccatgcatgcatttaccatgcatgtcaccatctgtgcgcgtgagcagatgtcagcacycgcacgtgcatttgcaacgtgtgtcaatcagtgcatgtttgcacgcatgttggtgtccacgtacgggtttgcacggattccagtgtctgtgcacatttgcagatgtcagtgtccgtgcacagacttgtatgtttgtatttctgcatgcaaccccaggcgtatcagcaactgcatgagtcagtgtccctgcaaatatttgcacatgtgctggtgtctctgcatggatttgcacatcagtgtctctgcccgtgtgtccgcacacctgtcagtgcccctgcatgcatttgcacacctgacagt

SEQ ID NO: 32287 - DNA, 600 bp, Chicken  19866894255474_3
cgtggccacagccatgtgtgctgccctttgcacacgcgtgagcacccctgaccccagtgagggtactttggtgcctccaaggctgtggtttaattattgccagatcattactgggggccaaaggtcctttggtttccgtcgcatgaggacgttttggggagcagaagaaaatccatatgtacatacctggacagggcacccatttggggtgctcagggtgcccatttgggatccttggggttcccacatggggtactctgagtgctggtcctgttggggtccccatctaatcaaggtgcycatctggaacccattgagagcccatctgggatctccagagaacccaaccttggcgtcctggggcacattcaatcagaatacacatctggggtccctcaggtgaccatatgggatctttgaggaacycatccgtgatgccctgggtgcacatctgggttctgtcaggtgcctggatgggaccttcagggatccaaaccacgatgggtgcccatcacgaccagggttctcatttggagtacatgctgtgcctctccatctggggacctcctcaccctggtccctgttcccacagagctccag

SEQ ID NO: 32288 - DNA, 600 bp, Chicken  19866894255474_4
ctttggtttccgtcgcatgaggacgttttggggagcagaagaaaatccatatgtacatacctggacagggcacccatttggggtgctcagggtgcccatttgggatccttggggttcccacatggggtactctgagtgctggtcctgttggggtccccatctaatcaaggtgcycatctggaacccattgagagcccatctgggatctccagagaacccaaccttggcgtcctggggcacattcaatcagaatacacatctggggtccctcaggtgaccatatgggatctttgaggaacycatccgtgatgccctgggtgcacatctgggttctgtcaggtgcctggatgggaccttcagggatccaaaccacgatgggtgcccatcacgaccagggttctcatttggagtacatgctgtgcctctccatctggggacctcctcaccctggtccctgttcccacagagctccaggccgccgtggaggaagtgctgccagacctgaagcaggaaggtgtccgtgtcttctatctcaactccacatcgcccaccccaggggtcgaggctctgctgcccgccatcgaggccgcctctgacgag

SEQ ID NO: 32289 - DNA, 600 bp, Chicken  19866894255476_1
acagctcagaaggaactccgcaacaacctcaactgcaagagcttcaagtggttcatgaatgaggttgcatgggacttgcccaagttttacccaccagtggagcctcccgcagctgcctggggagaggcaagtttgtgctctgaaacctgcagcgggcaaacacgctccatttaagacagtaaagttgccctagccctgtgctccagtattggtttgttgtaagtgacaaacaagtatttaaagatcctgcttgatatgtttcaaagaccagaatccctatactgttacgtaggtttgatygatgaaagcagttaagcagcagcttctattagtgcgcaaatacaaacaaaacaaaaaagggacttgggttggtctgcatgctgcgtatctagtcaaaggcagaacatgccaatggggtgaactaggaagagggggcagctgagcaatagtaggaatcttatatttccaaagggctgttcagctgttctgagctactctgccccttcatttccacatgtgaaaaccaggaaagacatcttcttctttgaaagagtcaccccagtggtgaggtattgaattgttacacgcaacagcacagtg

SEQ ID NO: 32290 - DNA, 600 bp, Chicken  19866894255480_1
gggcacatccgtaccggtcagcgccctcctcagtctccccagagtgaggtgccgggaaggggaaaagatcctcaccgggcagatccacagtgaggtgagaggactgcaaacgaagcataaaaatcagagcacaagttctcaggggacacaaatcagcacaagttctcccctctcagggggcaggttgtggctgagctgaagatgagtactgcctcctcacagctcagtctttgcgtgtagaggatttccaggaaaggctgttaagggccattaaggcctcctggagtgctcggaacaatkacggccttctctccagctgtgctcacaagcacctgctgccccagagagtggaggtgaggggaagatggccaccccagctgactgaggatggctgcaggttttggcgccaacakctccaaaccgtgtactgaggtgcaggctgcaggttttggcgccaacagctccaaagtgtgtactgaggtgcgagatggccgccacacatcatagcaggcccattagctagctggtctgtgctaatgaaccccatgcttccacaagcagggaaggaactcggccatcctcatcccttacaggctatct

SEQ ID NO: 32291 - DNA, 600 bp, Chicken  19866894255480_2
agcataaaaatcagagcacaagttctcaggggacacaaatcagcacaagttctcccctctcagggggcaggttgtggctgagctgaagatgagtactgcctcctcacagctcagtctttgcgtgtagaggatttccaggaaaggctgttaagggccattaaggcctcctggagtgctcggaacaatkacggccttctctccagctgtgctcacaagcacctgctgccccagagagtggaggtgaggggaagatggccaccccagctgactgaggatggctgcaggttttggcgccaacakctccaaaccgtgtactgaggtgcaggctgcaggttttggcgccaacagctccaaagtgtgtactgaggtgcgagatggccgccacacatcatagcaggcccattagctagctggtctgtgctaatgaaccccatgcttccacaagcagggaaggaactcggccatcctcatcccttacaggctatctggttgtcacttgtgtcctttagtctctctctcgtgctgacaatgaaaccagtctgcagctaggcagcagaggctgttcctcagcctggaacagttgcatgcagctgccccctc

SEQ ID NO: 32292 - DNA, 600 bp, Chicken  19866894255496_1
tcatggcactgtggatgcactgaggtggctgtgaagagaagatatcacagctgcagagagtgggaagtgtgggataagtagtatggctgtaggagagcttctccaactttctaatcttctgttttttttaaccattgtcttttctgtgttagtaaatgcgtgtaactcaataagctcatgcttttattgaacatatatttttaacacatattaaatgtatgtgtgttttggaggggagattggatttaatttcaaataacctgtagaagagttgagaggctgttcaatctgaaaccaatrcaaaatctgaagacagttggagacatcaaataattctaggagtgttaacggtaaaagttcagyacttaaagaatgagaacaaccctcagttgttttcccttactgtgtgtcgctgaaacatcggatttcttttctgaaaatctctgaagtctttcagtgggatatggcctagccttgtaagaagagttagccccaggaacagcaattactcatattccgatattttttgtgcagtatctgtttttacagccataactgaagtaagcagttgtttgcaaaacaagtgactagccaatgttt

SEQ ID NO: 32293 - DNA, 600 bp, Chicken  19866894255496_2
gaagtgtgggataagtagtatggctgtaggagagcttctccaactttctaatcttctgttttttttaaccattgtcttttctgtgttagtaaatgcgtgtaactcaataagctcatgcttttattgaacatatatttttaacacatattaaatgtatgtgtgttttggaggggagattggatttaatttcaaataacctgtagaagagttgagaggctgttcaatctgaaaccaatrcaaaatctgaagacagttggagacatcaaataattctaggagtgttaacggtaaaagttcagyacttaaagaatgagaacaaccctcagttgttttcccttactgtgtgtcgctgaaacatcggatttcttttctgaaaatctctgaagtctttcagtgggatatggcctagccttgtaagaagagttagccccaggaacagcaattactcatattccgatattttttgtgcagtatctgtttttacagccataactgaagtaagcagttgtttgcaaaacaagtgactagccaatgtttaaggcttgtgttctccatatcaaatgggaatattcaccttgtgaagttaaataatacgctttg

SEQ ID NO: 32294 - DNA, 600 bp, Chicken  19866894255498_1
ctttgtccaagagtgacttctaccagcaggaagaaatctcttgaagacatacactggcatgcccaaatttgttgttagtccaggcacaacaaatatctctctgccaaacctattggctttctctactgcttttttagatggacaagaggactgcagtgcagttttaatgggcagtgtaaaaggtaaaagagctacttcaagcctgcagaagagctagttacatcatcttcttggtaataaaatttctataaaattctgttggataatgaatatattaaagtatagttcttgaaatgcacygagaggtaagctccaaggggtaaagtctttaagagtatttttgttataatcagttacctgaggaaggaggaaaatctctctgtggaagcataaagtgctcaccagctaatgaaaaggaatcaataccaagaatattaagtgactacatcatgttcgccactaatttgctctgcactcatttatcttgaagcttcttttaagctggtaaaaagacgtatctcttgaaagcatgaggatttatttttggaaagtgcctattgttatcagccccatgtgacagccatctaatggtatcattgg

SEQ ID NO: 32295 - DNA, 600 bp, Chicken  19866894255500_1
caatgaaatgccttagagcttgtttgtggaaaagcgaggagagctactgcagtgttgtgcaaagccacgagctcccagcctggcagtgcaccagcgtgtttgtcaggtgtgagctggtgcatgaagctatggtggttacttcgccattggcagcacagtttcttctcatcttccttggtctttgcaaagtgagctgttgccccaaaacaatttgtttcaggttcaatcatttagaacgtgggaaagagcaatttcttgtctgtgagcccatttctttgtcttagatccaccaatccgatrccccactaacgcaggtgttaccggtaaggtgtattggccctgtctctaacagcgctagcagtgcgtaattgggatttcattcaagcaaggagtagatgcaccaagctgaagatgattggctgctctcttttaacagaaaagaaggaaagcccattcgaatcccctttcattctggattggtggatctgaagcgcagaaacaaagtttcaggtaagcagtcaccctgtactatatcctgctgcttctgcttagatgagtttgtccgcaaattcagtacccgctttaactgcttcatgcccc

SEQ ID NO: 32296 - DNA, 600 bp, Chicken  19866894255500_2
attggtggatctgaagcgcagaaacaaagtttcaggtaagcagtcaccctgtactatatcctgctgcttctgcttagatgagtttgtccgcaaattcagtacccgctttaactgcttcatgcccctcggatagcagaacacaccaagctggctgccagtgtgagttgagtgaggaggggcgtgttcagagaagacagctgtgctttgttaggatgctgctgatctctgaaggcaaggcctaggaacgtggggtagatgtaccatctgcggagctacacagcagtatgtacagataaaggrgcattaagcaaacacttcccagatcttgcttctggaaggaggaggcagccttatcagtgacttggaactcttctgttgagttcagaatttaacggctatctgctctgacttctggctgtattttcttgtgagttccttggaaatgtagaaaacttctccagccgtttgtgttacaaattccagtagccctgtcctgctgaaatgccatttgaagttctgttctgggcaacacttgcaatctgcattttaaatccttggggagatttcagcttcaggttctgttattgatggttctcaaag

SEQ ID NO: 32297 - DNA, 600 bp, Chicken  19866894255507_1
gggcttcccaggcgagcgcggtccccccggacttaagggagtgaaggtgcgtgtccaggagaaaggagcggggcagcgatggagccagaatctgagttctttgaggagggacgatgtgatgactgccagctgcaatgagctgggagagcgggcgggcatcccaaactgcagcacgtgggtctgatggtatctccctcctcctccctgcagggtgagcctggtgccgagggcgagcgaggacccaaaggagataaggtctgagtgtagtaagtctcctgtggctcctctgcttctctgttyctcacactccctttctgggctcgtcatcggtctctgctctcccctcttcgtgtgctgccaacagggtgaccccacagaatgaagccctgggcaggggcacatctggggacatccctctctgggtgcaagcgggatgtgagggcacgtgggggacagggacatccctgcctgttgcacaggtcctrcaactctgcacctctccccacatcagggtgaaggcggctcacggggcgagcgaggagagcctggcgagaagggcagggatggctctccagtgagtatggtgccgaacctccattc

SEQ ID NO: 32298 - DNA, 600 bp, Chicken  19866894255507_2
ggtatctccctcctcctccctgcagggtgagcctggtgccgagggcgagcgaggacccaaaggagataaggtctgagtgtagtaagtctcctgtggctcctctgcttctctgttyctcacactccctttctgggctcgtcatcggtctctgctctcccctcttcgtgtgctgccaacagggtgaccccacagaatgaagccctgggcaggggcacatctggggacatccctctctgggtgcaagcgggatgtgagggcacgtgggggacagggacatccctgcctgttgcacaggtcctrcaactctgcacctctccccacatcagggtgaaggcggctcacggggcgagcgaggagagcctggcgagaagggcagggatggctctccagtgagtatggtgccgaacctccattctcatttccccctccatcatccttgtcatctccatccccgtcacatctgcatcacccctgtgctttccacctccgtctccatcatgtttcccgccaccccaatggtctccatctccaccatgttctccatcacccccatggactccatctccatccccatggcattctccactctcatggactcca

SEQ ID NO: 32299 - DNA, 600 bp, Chicken  19866894255508_1
atcagaagaggggtggccagaagggacagggaggcaattgcccctctctactctgcccttgtgaggcaccatctggaatggtgtgtccaggtctggagcccccaatacaagaaagacaagagagctgttggagagggtccagaggagggccacagagatgatcagagggctgaagtgcctcccctatgaagataggctaagggagctggatttgttcagcctggagaaaagaaggctgcagggtgaccacattgcagccttcccagtacctaaagggcgcctataaacaggagaggagtsaactctttaaaagggtagataacagcaggacaaggggaaatggttttaagttgaaggagggaagttttaggttggatgttaaggggaagttctttactactagagtggtgaggtgctggaacaggctgcccagagaggttgtggacgctccatccckgtaattgttcaaggcyagattggatrgggccctgggcagcctggtctaatattaaatgcggaggttggtggccctagctgtggcrggggggttgaatattaatgatccttgaggtcccttccaacccaggccatcctgtgata

SEQ ID NO: 32300 - DNA, 600 bp, Chicken  19866894255508_2
atgatcagagggctgaagtgcctcccctatgaagataggctaagggagctggatttgttcagcctggagaaaagaaggctgcagggtgaccacattgcagccttcccagtacctaaagggcgcctataaacaggagaggagtsaactctttaaaagggtagataacagcaggacaaggggaaatggttttaagttgaaggagggaagttttaggttggatgttaaggggaagttctttactactagagtggtgaggtgctggaacaggctgcccagagaggttgtggacgctccatccckgtaattgttcaaggcyagattggatrgggccctgggcagcctggtctaatattaaatgcggaggttggtggccctagctgtggcrggggggttgaatattaatgatccttgaggtcccttccaacccaggccatcctgtgataccagctggctctgtgaatgaatgcccycaaagaaatcccacaggatatttttctggcaataacacttttgttaaagaggacacgatgactaggcttttcctcattttattcttgctcatatattctgaagtaattatcacagaaggacagaataaaa

SEQ ID NO: 32301 - DNA, 600 bp, Chicken  19866894255508_3
agtgcctcccctatgaagataggctaagggagctggatttgttcagcctggagaaaagaaggctgcagggtgaccacattgcagccttcccagtacctaaagggcgcctataaacaggagaggagtsaactctttaaaagggtagataacagcaggacaaggggaaatggttttaagttgaaggagggaagttttaggttggatgttaaggggaagttctttactactagagtggtgaggtgctggaacaggctgcccagagaggttgtggacgctccatccckgtaattgttcaaggcyagattggatrgggccctgggcagcctggtctaatattaaatgcggaggttggtggccctagctgtggcrggggggttgaatattaatgatccttgaggtcccttccaacccaggccatcctgtgataccagctggctctgtgaatgaatgcccycaaagaaatcccacaggatatttttctggcaataacacttttgttaaagaggacacgatgactaggcttttcctcattttattcttgctcatatattctgaagtaattatcacagaaggacagaataaaatatcctgaacatgttt

SEQ ID NO: 32302 - DNA, 600 bp, Chicken  19866894255508_4
ctatgaagataggctaagggagctggatttgttcagcctggagaaaagaaggctgcagggtgaccacattgcagccttcccagtacctaaagggcgcctataaacaggagaggagtsaactctttaaaagggtagataacagcaggacaaggggaaatggttttaagttgaaggagggaagttttaggttggatgttaaggggaagttctttactactagagtggtgaggtgctggaacaggctgcccagagaggttgtggacgctccatccckgtaattgttcaaggcyagattggatrgggccctgggcagcctggtctaatattaaatgcggaggttggtggccctagctgtggcrggggggttgaatattaatgatccttgaggtcccttccaacccaggccatcctgtgataccagctggctctgtgaatgaatgcccycaaagaaatcccacaggatatttttctggcaataacacttttgttaaagaggacacgatgactaggcttttcctcattttattcttgctcatatattctgaagtaattatcacagaaggacagaataaaatatcctgaacatgtttcatacacata

SEQ ID NO: 32303 - DNA, 600 bp, Chicken  19866894255508_5
gtgaccacattgcagccttcccagtacctaaagggcgcctataaacaggagaggagtsaactctttaaaagggtagataacagcaggacaaggggaaatggttttaagttgaaggagggaagttttaggttggatgttaaggggaagttctttactactagagtggtgaggtgctggaacaggctgcccagagaggttgtggacgctccatccckgtaattgttcaaggcyagattggatrgggccctgggcagcctggtctaatattaaatgcggaggttggtggccctagctgtggcrggggggttgaatattaatgatccttgaggtcccttccaacccaggccatcctgtgataccagctggctctgtgaatgaatgcccycaaagaaatcccacaggatatttttctggcaataacacttttgttaaagaggacacgatgactaggcttttcctcattttattcttgctcatatattctgaagtaattatcacagaaggacagaataaaatatcctgaacatgtttcatacacatagtttttatgtcattttaccctacttaaatactgatgctaagtccctcaggcagaaactg

SEQ ID NO: 32304 - DNA, 600 bp, Chicken  19866894255508_6
ggacaaggggaaatggttttaagttgaaggagggaagttttaggttggatgttaaggggaagttctttactactagagtggtgaggtgctggaacaggctgcccagagaggttgtggacgctccatccckgtaattgttcaaggcyagattggatrgggccctgggcagcctggtctaatattaaatgcggaggttggtggccctagctgtggcrggggggttgaatattaatgatccttgaggtcccttccaacccaggccatcctgtgataccagctggctctgtgaatgaatgcccycaaagaaatcccacaggatatttttctggcaataacacttttgttaaagaggacacgatgactaggcttttcctcattttattcttgctcatatattctgaagtaattatcacagaaggacagaataaaatatcctgaacatgtttcatacacatagtttttatgtcattttaccctacttaaatactgatgctaagtccctcaggcagaaactgaagaaagaaaaagttaaacctctagatgaccagagtaataatgaggaatcagagaaagcagctgaactgatttggtaaagcagac

SEQ ID NO: 32305 - DNA, 600 bp, Chicken  19866894255511_1
atcccattcctagtatgataagatttgcagtcctgtgtagtgtgaaagctttcatgatgaattcagggtgagtagtatctgtctactctctttgacttcaatttgctttcttaaaggaaaagaataaatctcacctagatcaaaatgtgttcttatgtcaatgcacatgaggtggtttaaggctcctgtggtttatctcacaagggagcacacattttggaaaaaacttgtatagagagccaaaaaaatttcagtagaaatgttgcccctcacaatcattcatctcagttctctctctcytttttttttttttctattaccaaagccacatcttcagcagagtaaatatcagcctgtgactcacttatttaatgtttgtggcatttgactcagatttgcaaattttcagtcttgcagactcatgagtaarctgtagctgaatcatgtggagtcccagaagaaargtttttaaaactggggggtttattttccttccactttagatactatgtacactaatctctagctcccaatgtgcattttgacatcaytttgatactcagctgccaggttatattcgatacagaaccctcatttttt

SEQ ID NO: 32306 - DNA, 600 bp, Chicken  19866894255511_2
tcacctagatcaaaatgtgttcttatgtcaatgcacatgaggtggtttaaggctcctgtggtttatctcacaagggagcacacattttggaaaaaacttgtatagagagccaaaaaaatttcagtagaaatgttgcccctcacaatcattcatctcagttctctctctcttttttttttttttctattaccaaagccacatcttcagcagagtaaatatcagcctgtgactcacttatttaatgtttgtggcatttgactcagatttgcaaattttcagtcttgcagactcatgagtaarctgtagctgaatcatgtggagtcccagaagaaargtttttaaaactggggggtttattttccttccactttagatactatgtacactaatctctagctcccaatgtgcattttgacatcaytttgatactcagctgccaggttatattcgatacagaaccctcattttttgtctcagcatctgtccggagcacaactttcagtcacaaattgaaaaatgagaaataacaggcrttgtttgtctttagaaagtattcattattcctttttcctcttcatttaatgatgtcttttcatttcg

SEQ ID NO: 32307 - DNA, 600 bp, Chicken  19866894255511_3
acatgaggtggtttaaggctcctgtggtttatctcacaagggagcacacattttggaaaaaacttgtatagagagccaaaaaaatttcagtagaaatgttgcccctcacaatcattcatctcagttctctctctcttttttttttttttctattaccaaagccacatcttcagcagagtaaatatcagcctgtgactcacttatttaatgtttgtggcatttgactcagatttgcaaattttcagtcttgcagactcatgagtaarctgtagctgaatcatgtggagtcccagaagaaargtttttaaaactggggggtttattttccttccactttagatactatgtacactaatctctagctcccaatgtgcattttgacatcaytttgatactcagctgccaggttatattcgatacagaaccctcattttttgtctcagcatctgtccggagcacaactttcagtcacaaattgaaaaatgagaaataacaggcrttgtttgtctttagaaagtattcattattcctttttcctcttcatttaatgatgtcttttcatttcgcaatgttattggtgtttctaactgagccctatgg

SEQ ID NO: 32308 - DNA, 600 bp, Chicken  19866894255511_4
cagtagaaatgttgcccctcacaatcattcatctcagttctctctctcttttttttttttttctattaccaaagccacatcttcagcagagtaaatatcagcctgtgactcacttatttaatgtttgtggcatttgactcagatttgcaaattttcagtcttgcagactcatgagtaarctgtagctgaatcatgtggagtcccagaagaaargtttttaaaactggggggtttattttccttccactttagatactatgtacactaatctctagctcccaatgtgcattttgacatcaytttgatactcagctgccaggttatattcgatacagaaccctcattttttgtctcagcatctgtccggagcacaactttcagtcacaaattgaaaaatgagaaataacaggcrttgtttgtctttagaaagtattcattattcctttttcctcttcatttaatgatgtcttttcatttcgcaatgttattggtgtttctaactgagccctatgggcagatttcaataaacatctctaagtttaaatatgaaaacagatgtagaaataatttatttcttcttcaggggtcctgtagaccaat

SEQ ID NO: 32309 - DNA, 552 bp, Chicken  19866894255511_5
cttatttaatgtttgtggcatttgactcagatttgcaaattttcagtcttgcagactcatgagtaarctgtagctgaatcatgtggagtcccagaagaaargtttttaaaactggggggtttattttccttccactttagatactatgtacactaatctctagctcccaatgtgcattttgacatcaytttgatactcagctgccaggttatattcgatacagaaccctcattttttgtctcagcatctgtccggagcacaactttcagtcacaaattgaaaaatgagaaataacaggcrttgtttgtctttagaaagtattcattattcctttttcctcttcatttaatgatgtcttttcatttcgcaatgttattggtgtttctaactgagccctatgggcagatttcaataaacatctctaagtttaaatatgaaaacagatgtagaaataatttatttcttcttcaggggtcctgtagaccaatatcccactagaaaacagaacatcctcgacacaatcgtgttagctattgctttgtctaactaaat

SEQ ID NO: 32310 - DNA, 600 bp, Chicken  19866894255515_1
aatgtctatgtgtgacattttttccacacagaagaattcagttccacacctttgcttcacctgcacttccatgtctgacatcattctgttggactgcccctctgctgccatctgtcacatagcaacaccattgaatgggatattggtgtaaaggttccgtctctactgccataccaccatcgtctgcctctgacaccatgggccaatgtaataaaacaggatgccttacttttggaacatccctcataagatatatatgatagttcatgtatgtaagtatcaaaacttattttaatcttygattcttttttatttaaaaagagagagagagagagagcaacaacaacaaacccagtgggatacgtgaccttgttttggtgaaactagtgcatcaatacatggtttgatatcagtggctgcaattcttagtgaatactgaaagtgttcatcagagatttttgatgaaattttactcttcctcttcttcatccctgaaaagaattcgtcaagaatgtgagtactgccaaaaagcgatgacgagaataaggtgtgattgtgaagaaaggaatgtttttctctggtaggatagggcttatagaa

SEQ ID NO: 32311 - DNA, 600 bp, Chicken  19866894255517_1
tttctgccctctagttaggaaataggtggtagacgtttgttggtgtaccaatagctgcatgttatccctttttaaatcaagaggtgcaactctagactcccctacctttagtggaaaataatggcaaatgcaacagtgatttacagagtgatatctgaaaagccctttgtagaggaactcgctgagctgacagcagccccagcctgatctgtgcagtgcagacacatcatcacacagcactcagctcctgctcctgccagctccacacccgctgacagcttgagaagcgtcagcagccarttctctgaggaggaggcaaacaagcagagctgtgagaaaragcggctccatcccctcctccaggcttcagaacaaagatccttgtggttataatcaagatgcttctctctttggtgttccaggcccggtgcctacttgaaaaggcgcgttcaaccctgagcccttcgcacttgtcagcagcctttcagctgtcacctccctcagccttcctgtactcgtgccctccccccacttctaattaaaccagtttttacaaaacaatattttgacaaaagcaatgagcttcgtgccccgcagacc

SEQ ID NO: 32312 - DNA, 600 bp, Chicken  19866894255517_2
tggtgtaccaatagctgcatgttatccctttttaaatcaagaggtgcaactctagactcccctacctttagtggaaaataatggcaaatgcaacagtgatttacagagtgatatctgaaaagccctttgtagaggaactcgctgagctgacagcagccccagcctgatctgtgcagtgcagacacatcatcacacagcactcagctcctgctcctgccagctccacacccgctgacagcttgagaagcgtcagcagccarttctctgaggaggaggcaaacaagcagagctgtgagaaaragcggctccatcccctcctccaggcttcagaacaaagatccttgtggttataatcaagatgcttctctctttggtgttccaggcccggtgcctacttgaaaaggcgcgttcaaccctgagcccttcgcacttgtcagcagcctttcagctgtcacctccctcagccttcctgtactcgtgccctccccccacttctaattaaaccagtttttacaaaacaatattttgacaaaagcaatgagcttcgtgccccgcagaccgtgaaatgtctgcaacaggagttctgcctttcttccttgg

SEQ ID NO: 32313 - DNA, 552 bp, Chicken  19866894255530_1
gtaaccaagcctaatggtgcatggattattatgcttccagcaaatctgtcttttttagttgaaaatgaggttttagtcaattaaattctcagtgaaaataaagacatgtacaacatacatacaataattcaatttaaaaacacactgaaagaaaggagcttttaagaatggtgctgtgaatgaaagataagaatattcttttgtggtatgaataaattgccactcttgttagcactcttacgaagtgatcacaggatgaatccgcctgcaaatatggccaacctctctgctttccaagakactcactgcctggacgaacatatccactgccactgctttatggatcaccggggtaagtcagttcttcatactgtcagtatggaatactgacagtaagttcaccatttgcagagtgacagagaaactctttcagtgaactgtgtgtgacttgcaaagcataagtagagcttaaatgaggacgaggatacctctttattacatctctttttcaaggttaatgcaactcctgggaagtccagagcccgtaaaaat

SEQ ID NO: 32314 - DNA, 600 bp, Chicken  19866894255531_1
caaggagcccttgagatgatgttttaaagaaatcccaaatatgttgcagtgtacgcattagcacatccttctcagggaatggtgactggctgttagcaaaagttttcaggaaatatgcaggcatttagagaatgtgttttctgtcactccaagctggctgtgtatagaattgaatggcttcccaggatgggtagattgttagcagttctgtaaggtgatgtagaaagtagaatgtggctgatgagatatggctgatgtgatatgaagacatgaccaagtggtgataaaggtaggagagtraaagaataaaaggaaaaccagggtgtccaaactggctgcttttcagtctccccagcaggatttttttatgctacgttaatcttgctgctgcgtaagtgcttgataaattcagatggtaaacccgaagcatttcccttgctcttactctccagtgcagttyttacctttctgcctcctgttcttttccactcgagtgctgtttccagggaagccacttcatgcattttgaaagtgaacagtgcttcagggagctctcaaatcatcagactaaaagcagcataaaggcataagtgaagtagt

SEQ ID NO: 32315 - DNA, 600 bp, Chicken  19866894255531_2
tgtatagaattgaatggcttcccaggatgggtagattgttagcagttctgtaaggtgatgtagaaagtagaatgtggctgatgagatatggctgatgtgatatgaagacatgaccaagtggtgataaaggtaggagagtraaagaataaaaggaaaaccagggtgtccaaactggctgcttttcagtctccccagcaggatttttttatgctacgttaatcttgctgctgcgtaagtgcttgataaattcagatggtaaacccgaagcatttcccttgctcttactctccagtgcagttyttacctttctgcctcctgttcttttccactcgagtgctgtttccagggaagccacttcatgcattttgaaagtgaacagtgcttcagggagctctcaaatcatcagactaaaagcagcataaaggcataagtgaagtagtggaagacctagtaatgcaaggagtgatgygtatgatgaggtttttcctcattcccagtgctgctgttctagaagaagcacctctgtaccttatcagctttttggtttaaatgctgaagggaargttgctgaaataccaaacacttctgaatgtgggtgta

SEQ ID NO: 32316 - DNA, 600 bp, Chicken  19866894255531_3
aactggctgcttttcagtctccccagcaggatttttttatgctacgttaatcttgctgctgcgtaagtgcttgataaattcagatggtaaacccgaagcatttcccttgctcttactctccagtgcagttyttacctttctgcctcctgttcttttccactcgagtgctgtttccagggaagccacttcatgcattttgaaagtgaacagtgcttcagggagctctcaaatcatcagactaaaagcagcataaaggcataagtgaagtagtggaagacctagtaatgcaaggagtgatgygtatgatgaggtttttcctcattcccagtgctgctgttctagaagaagcacctctgtaccttatcagctttttggtttaaatgctgaagggaargttgctgaaataccaaacacttctgaatgtgggtgtaaggtccaaatggtcagagtatcttcttacatcttgaagtaccattctgaacactgtatcatacaaggggtcttgttcatgttgctacacatgttgtgtctgcctgagtttatagagccagctcctaccatttaactttacagtctgacactgggcaggaaggtgactgc

SEQ ID NO: 32317 - DNA, 600 bp, Chicken  19866894255531_4
gaagcatttcccttgctcttactctccagtgcagttyttacctttctgcctcctgttcttttccactcgagtgctgtttccagggaagccacttcatgcattttgaaagtgaacagtgcttcagggagctctcaaatcatcagactaaaagcagcataaaggcataagtgaagtagtggaagacctagtaatgcaaggagtgatgygtatgatgaggtttttcctcattcccagtgctgctgttctagaagaagcacctctgtaccttatcagctttttggtttaaatgctgaagggaargttgctgaaataccaaacacttctgaatgtgggtgtaaggtccaaatggtcagagtatcttcttacatcttgaagtaccattctgaacactgtatcatacaaggggtcttgttcatgttgctacacatgttgtgtctgcctgagtttatagagccagctcctaccatttaactttacagtctgacactgggcaggaaggtgactgcattgaatatgattgtgaataaagctttctgatctttaagcaataatactcatagtgaagttttgatctgtgaaacaacaacaaaaaaacgtgtt

SEQ ID NO: 32318 - DNA, 353 bp, Chicken  19866894255531_5
ttgttcatgttgctacacatgttgtgtctgcctgagtttatagagccagctcctaccatttaactttacagtctgacactgggcaggaaggtgactgcattgaatatgattgtgaataaagctttctgatctttaagcaataatactcatagtgaagttttgatctgtgaaacaacaacaaaaaaacgtgttatgtcctatgtatctgataccaaaactcaattctctggtaattagcaacagaattgcagtagtagtaatatcgggactgcttagattatatgtgtcactgaatgaaargctggtcatgataattgagaaggtcactgcatcaaaaaaaaagttcataagca

SEQ ID NO: 32319 - DNA, 522 bp, Chicken  19866894255542_1
atttggatgatttatttgaagctctagataggtgtgtgctgtagttaccatagtatgttcatttcctactatccaactttttcgcaagtttatttcagtcaaccatctagtcagcctcatggacaattattacagctttctctcagttgagagaatttaaagtccttctctgtgggcgttagttctgcatacctaaggttatcagagattaatacattttagaaaactaaatttatcctttattttctccctctctttagatgatagtaatatacaaataaaaatattaggattaatttwcttttctgctcattcaagcaaattctaacatttagaatcaactatttactgttgatatatactcrtaagccacatctatatctattctggaatttcatgttacttttaaaaatgttttagaataattccaggcctcatgaaccaattttgaattgaaggaattttggtggtagaggagacgattattgtatctggtagtgtgttatttgtttgtttgttttt

SEQ ID NO: 32320 - DNA, 457 bp, Chicken  19866894255542_2
ctactatccaactttttcgcaagtttatttcagtcaaccatctagtcagcctcatggacaattattacagctttctctcagttgagagaatttaaagtccttctctgtgggcgttagttctgcatacctaaggttatcagagattaatacattttagaaaactaaatttatcctttattttctccctctctttagatgatagtaatatacaaataaaaatattaggattaatttwcttttctgctcattcaagcaaattctaacatttagaatcaactatttactgttgatatatactcrtaagccacatctatatctattctggaatttcatgttacttttaaaaatgttttagaataattccaggcctcatgaaccaattttgaattgaaggaattttggtggtagaggagacgattattgtatctggtagtgtgttatttgtttgtttgttttt

SEQ ID NO: 32321 - DNA, 600 bp, Chicken  19866894255546_1
aaaacacctgttcaaatctgtagccctttattttcactgtgttcctatccttgcttctgatagtgatggataaaaatagctttactaattctatttttgttaatttggataaatactggctaacagatcacagtgtaaccatgtactgctccttttctttcaaaagaaaatgaaaaaaagtaaaacctctggctctgtgacaccataatttttataatggcatgtttctttaaagaatgagcacgcttagatgctctatttaacaacacttcagacatacatgtagaggatggagatacrggaagaagcaacacattacaaagcttttcgtttaagaataaatagatttcagaataagtacatgaataaaagtcttcatcaagaatacatcagaaatcaaaggaaacaaatgagattagagtattacataatgtattctgtaagtattatcaggatacatgcaggtcaagaaggttccagttagcttcagcttgtattttaagacctggctatacttcagcttgcttgaaacactcagttcttttcaaagactttcagaaagactaataactgaatacatccaaaatgctatctagatga

SEQ ID NO: 32322 - DNA, 600 bp, Chicken  19866894255546_2
gaagaagcaacacattacaaagcttttcgtttaagaataaatagatttcagaataagtacatgaataaaagtcttcatcaagaatacatcagaaatcaaaggaaacaaatgagattagagtattacataatgtattctgtaagtattatcaggatacatgcaggtcaagaaggttccagttagcttcagcttgtattttaagacctggctatacttcagcttgcttgaaacactcagttcttttcaaagactttcagaaagactaataactgaatacatccaaaatgctatctagatgawagaatactatagtttgcaagtgcttaaaccccttagttttaagagctctttttagaggaaaaaccatctcctaactgaaggtcagcaattatagaaatccccttgcatcataaatactacaatcatattatacgggaaaaccttgctacttggtacatgtgcatctgttacaagaacatggagctagtggtcacaataagcagatctattacaacactaacccaccttgactatagtaaaagacaaatgcacagagcagcagaaactgctgcaaaacagaacagtggaagtacacttacc

SEQ ID NO: 32323 - DNA, 600 bp, Chicken  19866894255547_1
gagtggcacaggggaggaaaagatgcagatcaggtctggaaaactccttagattttatccaaggctgtgttttaggctaaggcacttttcaccagctcagctgaaagccccatctcatttcagagccaagagccagcttgggtggctgctgagcagcaggtgtgctggaagtggtactgttgttctgggctccccatctggagcagctgtgatgccaggcaccaccggtgaataaatatgtgggacaggagctgcttctaagatgtgtgaaaccaaccactgatattccacttagaaagmcctggtctcacctttgccacatctcaattaagtggcatttgttggacaatccgtctgccccagccagatgaggcaagagcctctggggcatgaaatccttgctcttggcgggggatgattggatggacaggtgacagatgctagtcaggtgctttacacactgtgcagcaacctccgcacagcagaataaaggaatataaaaaggcttggctttaatccactctggaaggagagctaggcttggtcccgtgtcaccgtgcagcccagaagtagggtaatccaggcgtgacctgctgcaag

SEQ ID NO: 32324 - DNA, 600 bp, Chicken  19866894255547_2
tgaaatccttgctcttggcgggggatgattggatggacaggtgacagatgctagtcaggtgctttacacactgtgcagcaacctccgcacagcagaataaaggaatataaaaaggcttggctttaatccactctggaaggagagctaggcttggtcccgtgtcaccgtgcagcccagaagtagggtaatccaggcgtgacctgctgcaaggtgctgtgagctccagagctgcctgctgccagctcagccccggtcccatggcttggctggagggcccgtttctccttctttgccttcacrcactgaaagggaagctgctcttgttcccttcagcacagacgtcagccgagcgcccgcgtagctgttgctagcagggtctgtgtagctccatgagtgagggatgcttacatcttaacaaaaaagtgtcagcacagattaggttgttaaaaggaatgaagtaagcctttgaatccccaacatgacagtcttaatcccagagtcattacagcatcaagcaacaagtctgaaaaagccgcggagctggaggctgctgcccaggacggctgcaaccggagcagcctggctccacggctccctccc

SEQ ID NO: 32325 - DNA, 600 bp, Chicken  19866894255549_1
accacgttaacatccttgtaagatgtggtgcataacacgcagccacgagagttgattttggaatttatctatttattcccagccgaacttcttaatatttaaaataaataatattgaaaaagattgcaaatatttaattaagaacttcggaagctacaactacccagaggatgtaagaaagcccgcagatgaagtaaggctttgtggaaagccaacccaattccagaggacatgcagcaggtggtactaattctgcagcaatcccctaagaaatactgagttccaccaaggagaggtgcrctgctgggagtcctgcagttaagaagcaccgatcgtctttcacctcagcacagagttaaattcaagtaaatccacaacactgcattttcattttttaagcagatagtagtagttcagttccaacttctcaaagccctctcagaagcaagatctaagtgcagaaasatagtgcctgctgttaraccaaccatytcattcccctgttagaactccagacctaatagaaagatctaaaaggtgctcaggatcattgtttgcaaaaaatattaaaatagacaaaactcaaattattcatatcat

SEQ ID NO: 32326 - DNA, 600 bp, Chicken  19866894255549_2
agaggatgtaagaaagcccgcagatgaagtaaggctttgtggaaagccaacccaattccagaggacatgcagcaggtggtactaattctgcagcaatcccctaagaaatactgagttccaccaaggagaggtgcrctgctgggagtcctgcagttaagaagcaccgatcgtctttcacctcagcacagagttaaattcaagtaaatccacaacactgcattttcattttttaagcagatagtagtagttcagttccaacttctcaaagccctctcagaagcaagatctaagtgcagaaasatagtgcctgctgttaraccaaccatytcattcccctgttagaactccagacctaatagaaagatctaaaaggtgctcaggatcattgtttgcaaaaaatattaaaatagacaaaactcaaattattcatatcatgtgctttgtgatagcacaaaattaattaactgaagaaatattactttcagagcacttctcgtgcctcttatttcattacgttggcccatgacatcagaggtgaatgaggagaggctgaacattcccaccagcattccattacatgttgttgccatgcaacagata

SEQ ID NO: 32327 - DNA, 600 bp, Chicken  19866894255549_3
ccgcagatgaagtaaggctttgtggaaagccaacccaattccagaggacatgcagcaggtggtactaattctgcagcaatcccctaagaaatactgagttccaccaaggagaggtgcrctgctgggagtcctgcagttaagaagcaccgatcgtctttcacctcagcacagagttaaattcaagtaaatccacaacactgcattttcattttttaagcagatagtagtagttcagttccaacttctcaaagccctctcagaagcaagatctaagtgcagaaasatagtgcctgctgttaraccaaccatytcattcccctgttagaactccagacctaatagaaagatctaaaaggtgctcaggatcattgtttgcaaaaaatattaaaatagacaaaactcaaattattcatatcatgtgctttgtgatagcacaaaattaattaactgaagaaatattactttcagagcacttctcgtgcctcttatttcattacgttggcccatgacatcagaggtgaatgaggagaggctgaacattcccaccagcattccattacatgttgttgccatgcaacagatagcagcagaggggcagtc

SEQ ID NO: 32328 - DNA, 600 bp, Chicken  19866894255549_4
agtaaggctttgtggaaagccaacccaattccagaggacatgcagcaggtggtactaattctgcagcaatcccctaagaaatactgagttccaccaaggagaggtgcrctgctgggagtcctgcagttaagaagcaccgatcgtctttcacctcagcacagagttaaattcaagtaaatccacaacactgcattttcattttttaagcagatagtagtagttcagttccaacttctcaaagccctctcagaagcaagatctaagtgcagaaasatagtgcctgctgttaraccaaccatytcattcccctgttagaactccagacctaatagaaagatctaaaaggtgctcaggatcattgtttgcaaaaaatattaaaatagacaaaactcaaattattcatatcatgtgctttgtgatagcacaaaattaattaactgaagaaatattactttcagagcacttctcgtgcctcttatttcattacgttggcccatgacatcagaggtgaatgaggagaggctgaacattcccaccagcattccattacatgttgttgccatgcaacagatagcagcagaggggcagtctgacaaaatg

SEQ ID NO: 32329 - DNA, 600 bp, Chicken  19866894255551_1
aagaaaaaaatcactaggagaggttttttttttcatttttgcgagtttgcctactctttaccttttctttaacttaatatgggggaaaaaaaggaaaacaaaaaaaaaatctcaatccagaatgctgaatatttcccatcacaaggaaatttttcatgaaaattttgagttctgatttgttagtggaaagcctgcagcaaaagtaacagaactgagtgataccttggcagcctaatgggacaaagtacctcacttttctaaaacaatggccaaaaattctcactgacagtcctaccatastttgaagctagtggaatgttttttgagcttgttgtttgtatttagtttctgtttcccaacatgcagcatgcaaaatacaaaacacaaacttagtcatgtgctttgaaatacatgaacatgactcttcagtgtagaagagaaagagcctgcatcttgaaaatgtagtacagcggtcttaatgcaggtgcaatgttactgatgtagggcaaacatttcagtaatttgaacaatactctgttgaagccagtacttgcctcattacttataaatagctagtggcatagaaacccattattctga

SEQ ID NO: 32330 - DNA, 600 bp, Chicken  19866894255551_2
gtagatagaaattttaaccactctcaactgtgaattttaaattcattgagagatgaaattctgcagaagaattagccttctgtcgttccaaggcagtgggttgaaagtgctctctaccagtgttttaaaacctcagggtgaattcagaaatcctgtgtcttacgtagagcgttggaaagtatttaaaaacaaaactcaagagaaatacaaacatttttctaagtgtgacaaactgcttaatttttttcaagcaggtttgtctcaagctttgtgtttcagttacattgcagatcttttaaygaagacttcaggctctccaactgcgcaagtttagcttttctttgcacttggtgaatacttttggagattatcttgagtacctgtgtaactcacatatgcagggagaaatagggggattcttctccgcctactcctgtcttttactacagcttattcagcatacacagaaattaaccctttctgtgaggcactgttcctttgctacagtgactgcctgaatgcctttctttttccttgtcgagcagtacgtttttaatgtgatgatgcagtactgtgattactggttagctgcacatatat

SEQ ID NO: 32331 - DNA, 600 bp, Chicken  19866894255554_1
cataaaaatcatattattcaatattcacaaactttaattggtgagactctcaaagcagccactacagatactacaaaacttgcaaatgtgcatattttaaaagaacctgaataggaactaaaaaagagtcttctttaaaagtatgttaacagatatattaaaggactaaaatgggtattttcagacaatgacaaagaatatgtaaacgaaaacaatatgcaacaaatgaaaagaaatattactgcatagcaggatatgtttaacttagttatgcaaaactgaacaggcactgagaggtgkktttttttgtttgtttttaacagtgagtgagttgtagagtgactcctaggcctttgatccagtcatggtggaaacctaccctggcagctcaatttgctctgattctcatactctgcagtctgacagaacagcactattagcagagagctgatcagcaagatgtataatggggagaggtcagaatcaataaggacttgcttctgacactagtgctgaacaccacagttcatgcagcaatacttgtagctaaaagtatcttcaggtttgcaggccagctggtgttttaacaccagtgacaga

SEQ ID NO: 32332 - DNA, 600 bp, Chicken  19866894255554_2
ataaaaatcatattattcaatattcacaaactttaattggtgagactctcaaagcagccactacagatactacaaaacttgcaaatgtgcatattttaaaagaacctgaataggaactaaaaaagagtcttctttaaaagtatgttaacagatatattaaaggactaaaatgggtattttcagacaatgacaaagaatatgtaaacgaaaacaatatgcaacaaatgaaaagaaatattactgcatagcaggatatgtttaacttagttatgcaaaactgaacaggcactgagaggtgkktttttttgtttgtttttaacagtgagtgagttgtagagtgactcctaggcctttgatccagtcatggtggaaacctaccctggcagctcaatttgctctgattctcatactctgcagtctgacagaacagcactattagcagagagctgatcagcaagatgtataatggggagaggtcagaatcaataaggacttgcttctgacactagtgctgaacaccacagttcatgcagcaatacttgtagctaaaagtatcttcaggtttgcaggccagctggtgttttaacaccagtgacagat

SEQ ID NO: 32333 - DNA, 600 bp, Chicken  19866894255554_3
taaaaatcatattattcaatattcacaaactttaattggtgagactctcaaagcagccactacagatactacaaaacttgcaaatgtgcatattttaaaagaacctgaataggaactaaaaaagagtcttctttaaaagtatgttaacagatatattaaaggactaaaatgggtattttcagacaatgacaaagaatatgtaaacgaaaacaatatgcaacaaatgaaaagaaatattactgcatagcaggatatgtttaacttagttatgcaaaactgaacaggcactgagaggtgkkkttttttgtttgtttttaacagtgagtgagttgtagagtgactcctaggcctttgatccagtcatggtggaaacctaccctggcagctcaatttgctctgattctcatactctgcagtctgacagaacagcactattagcagagagctgatcagcaagatgtataatggggagaggtcagaatcaataaggacttgcttctgacactagtgctgaacaccacagttcatgcagcaatacttgtagctaaaagtatcttcaggtttgcaggccagctggtgttttaacaccagtgacagatt

SEQ ID NO: 32334 - DNA, 600 bp, Chicken  19866894255566_1
agctacacagacatacatcctaagcaaggtttacagtgacctttctcccgttctgctgggaagagaatccaacatcagacagaccgcaaaaggctcaccgggagtgaccgggacattttgcaaccatatacataaatgctccctgacactgtatctccatctgagtgggttagggcaggaaaatactgcttgttttaaaagaaaacataatcagttttagccatgctggtctggagaaccagacgtaaaacccacacgcacagacatatactttgctcctagctgcagtcctcctgctcragctgaaaggaattggtaagacagagtaccgctggaaatagtcacacttctcattgcctgcacttacatctgtaaagcaaacattttaatagatggacactgttaataatggaggcttaaatgccacagtaattacaaaagatgttcccaaagctctactgtgccagacactatataaaaacaacatagcaccyacagaggagacagtgctttcagtttgagcttctacacaaaattcaacaactagacttgcatttatcacatttcttatgattttaaatgaagttcctctacagtttc

SEQ ID NO: 32335 - DNA, 600 bp, Chicken  19866894255566_2
ttaaaagaaaacataatcagttttagccatgctggtctggagaaccagacgtaaaacccacacgcacagacatatactttgctcctagctgcagtcctcctgctcragctgaaaggaattggtaagacagagtaccgctggaaatagtcacacttctcattgcctgcacttacatctgtaaagcaaacattttaatagatggacactgttaataatggaggcttaaatgccacagtaattacaaaagatgttcccaaagctctactgtgccagacactatataaaaacaacatagcaccyacagaggagacagtgctttcagtttgagcttctacacaaaattcaacaactagacttgcatttatcacatttcttatgattttaaatgaagttcctctacagtttcaagcttgaagtgttgagctccaaagggaattcattacagattactgactttcacaaattaaggaagaaaacagacacatcttccaagtgggcccctgaagagaagctgcagttaccctcaattcagctgctagctccttcctcccccagtggcttccttagcctgatgaacctcatttgccttaatcaactcat

SEQ ID NO: 32336 - DNA, 599 bp, Chicken  19866894255569_1
  misc_feature (1)..(46): n is any nucleotide
nnnnnnnnnnnnnnnnnnnnnnnnnnnnnnnnnnnnnnnnnnnnnncaaattaaactctactgacagacactcagcacgcaagcggagctgttcttgagtagtatagagtggtatgaacagacctaatgaatgaaacattgcctaaaaaagacaaataactgatcaaaacctgaaaaacaccaatagttgagatcatcttattacaaacactcagctaccacacttatagagcataaggatacaaagagcaacagactactataaagcacagacgtgtgcatctgttggtggttgcttcrgaaggctctgatatgcagacaacatctagacgtggtatttttgcatggtcctagttaagcaatagtgcagaggcaagtcattaggcaaggtatcagttcactgaaaaactgccctgcaggaaagagaccttgccaatggaaatactttttttttttttttaaacaccagcaaaggctcctcgcccttctggtaaatctcattgatggctgcagctgttaaagacttaatgggctagaggcactctggtaggtaacattttaaaatctatacaaaattagaaaagtgtaactctaagggt

SEQ ID NO: 32337 - DNA, 600 bp, Chicken  19866894255572_1
atctttaatttgattgcttcatttgtcatcttttttaccacttacaggtgataaatgaagacagaggttttttttaataagaaacatgttaaaggtgtgatcatcttttctgcagcgagagaagaacaaatttactttgaaagtggcgaaattatgacatcagttcagtatagaggagatcaccttggaaaataatgccattttgctcataactgtaatgaattggtaaaaatgaaaatctttattataagcataccaaaaccgttgttttttcttttaaggaaacttggaggaaattcrgtttttaggtcygttgtgtagttgagaatttcagccctatgttcaaacttgtcagtgtttacatttatgttgtatactcttcttctaacttctgagtttacatagtttaggaagtaattgcaacatctcctgcacattaaataagcaaatcttctgaattctactgatatctgctactgtctcattttaacactgacttcagtattttttttatgcctggaagtatgtgaatatggtataaagagtcagtcttctgtcatgggaatagctagattttggccctctgagaggttctattta

SEQ ID NO: 32338 - DNA, 600 bp, Chicken  19866894255572_2
attgcttcatttgtcatcttttttaccacttacaggtgataaatgaagacagaggttttttttaataagaaacatgttaaaggtgtgatcatcttttctgcagcgagagaagaacaaatttactttgaaagtggcgaaattatgacatcagttcagtatagaggagatcaccttggaaaataatgccattttgctcataactgtaatgaattggtaaaaatgaaaatctttattataagcataccaaaaccgttgttttttcttttaaggaaacttggaggaaattcrgtttttaggtcygttgtgtagttgagaatttcagccctatgttcaaacttgtcagtgtttacatttatgttgtatactcttcttctaacttctgagtttacatagtttaggaagtaattgcaacatctcctgcacattaaataagcaaatcttctgaattctactgatatctgctactgtctcattttaacactgacttcagtattttttttatgcctggaagtatgtgaatatggtataaagagtcagtcttctgtcatgggaatagctagattttggccctctgagaggttctatttatatcaactgttt

SEQ ID NO: 32339 - DNA, 600 bp, Chicken  19866894255572_3
ctcataactgtaatgaattggtaaaaatgaaaatctttattataagcataccaaaaccgttgttttttcttttaaggaaacttggaggaaattcrgtttttaggtcygttgtgtagttgagaatttcagccctatgttcaaacttgtcagtgtttacatttatgttgtatactcttcttctaacttctgagtttacatagtttaggaagtaattgcaacatctcctgcacattaaataagcaaatcttctgaattctactgatatctgctactgtctcattttaacactgacttcagtaytttttttatgcctggaagtatgtgaatatggtataaagagtcagtcttctgtcatgggaatagctagattttggccctctgagaggttctatttatatcaactgtttatatcagctactgggagttttgttgctcaggaagcttggcttctgtgggactgtttctggggagctaagagtgacttctcctcaaatgtctttactgtcccctgttcccaaaatagctattactcagcattaatggacagttccccagaaaattgtgtcatattaactttgcaaatctgtatcattcttcaga

SEQ ID NO: 32340 - DNA, 600 bp, Chicken  19866894255578_1
cagctaacaaaactcccactttttttttgttgtttttatcttttttcttttttttttcttttttcttttttttttttttttgcactaaacaacattcaaataaaacatggcacaggacgtattttaagagatatcaaagctcagggatttctccctttcctgcccacccctgctgcccccaccaccaaatctccccagcatcagtcctttagcttattttttaaaaccgtttttcattagttagttgcaaaatttagaatcctctttttttcttttctttttttcccctcccattcttcrttatactttttattttttctttctttaaattaaaaattttgtctcgtgtaaattgtgcaaatatagcagttaacactagtggcagaaggccagagagagagaaggggggaaagagacagaaaaagaaacagagggaggaggagagggggcagacagccgggggcaaggaggggagagcaagtcaagtacagtacaaacaggagcccacccccctccctccaccaaagtaacaacaacatccaaatgccgtcctaaaaagccccacggtcccgaccctccttccccgtgggctcaggggct

SEQ ID NO: 32341 - DNA, 600 bp, Chicken  19866894255588_1
agatcaacgaatcccacaaaaaatacaacagataaaagaaatatcaccttctgaaatgaaaagcatgaataataaaggaaacgaaacaaacacaaaccaaatgctcaagtaccaaagatagtgaaatacaaaaacacttctgactgagtactatgaacagcaaagtattccatgtgaaaacattcaagagaacactctcattacatatacacattatgcacaacagaacatagtattcatctttacctttctttagggaaagtgcaaaattttgcatgctagaagtatagctccaacatwacagctgcaagcatgcattgtttttgcactccttaaaaagagaaataaagacacagtacagtagaattctccaaattgcctggtgtcacattttagaaatacaaaatgcatttttttcctattacaaaaatagaaaaatctgattgttttaagtggtaggtggaaaaagaggcttattaaaagataatatcaaattttaacaggataaaacaattgcatttttctcctgaaacgcattatagggtcctttaaaaaccatttataaacaaaataaactgaaataacaacagaacaacaagg

SEQ ID NO: 32342 - DNA, 599 bp, Chicken  19866894255592_1
  misc_feature (1)..(13): n is any nucleotide
nnnnnnnnnnnnncgagacctcctccgacacggcgcagtaatatggtgctgacggccccctgctccgccgactgccggggggcggtaagggcagagcggaggcaccgccccctcatccccaccgccccccccctctgcccacccggagccccatccgtcgccggggacggccccgctcaccttgatgaaggggctgatgaggaagaagaggccgcgcaccaccaagctgaagttgcgcatgatgccggtgctcaccacgccggggttcaggctgttggcggtcacccctgcccggcggcrccgtcaccaactgccccacagcrggcagatcccccccgtgccaagcaggggtccgtgggcagcgggacggccccagagaagtggggctgaggccacgcacccggccggggcagcaggaaaggccccgaccccgctggtgcactctcgcagggatgcagccatccccgagcccgtgtccatgggggtcctggggcattcctaaagggctgcagcccctgcagccgcccctgtaggccctgagccacggcactgcagtgcagttggaatgggtgggcagccctggggtgctgctgcgcctg

SEQ ID NO: 32343 - DNA, 600 bp, Chicken  19866894255592_2
tccgacacggcgcagtaatatggtgctgacggccccctgctccgccgactgccggggggcggtaagggcagagcggaggcaccgccccctcatccccaccgccccccccctctgcccacccggagccccatccgtcgccggggacggccccgctcaccttgatgaaggggctgatgaggaagaagaggccgcgcaccaccaagctgaagttgcgcatgatgccggtgctcaccacgccggggttcaggctgttggcggtcacccctgcccggcggcrccgtcaccaactgccccacagcrggcagatcccccccgtgccaagcaggggtccgtgggcagcgggacggccccagagaagtggggctgaggccacgcacccggccggggcagcaggaaaggccccgaccccgctggtgcactctcgcagggatgcagccatccccgagcccgtgtccatgggggtcctggggcattcctaaagggctgcagcccctgcagccgcccctgtaggccctgagccacggcactgcagtgcagttggaatgggtgggcagccctggggtgctgctgcgcctgggagcccgcagccaaatgcaacag

SEQ ID NO: 32344 - DNA, 600 bp, Chicken  19866894255605_1
atattgcacagtttgggagtaggttcttgtcccagatgctcatgcccaagactctctattcattttcattggagtactatgtatcataagattttaacttttggctgctacaaatgtggtttgtaaatacaggtgaagaggatgaaaggctgtagatgccctctctggccttaataatgcttgtaagcacttggtcagagggaggaaacctggcattcaggtattcaccagtagcttcttcatgccctgtgcaaggctgaggttactggaaaactaagcatcttgtaaaccttgtatgcrtatatagtrggaaataagagagatgcagtcaggtgagttacagtatatttgttgccagccattaccaggtagctgctatgttatttctatgaaataccacaaccacgtaaataactcaagtaataattgtaaatggatgactgtgtgaagggaggtgggggcaggagccataactgcgcagctgctatggctgtgaaaattcaaccttaagcagcctaaacattcattttacagtgtacaccactgattacttaattacatctaaaatataagtcagacacactaaaaaccccagggagt

SEQ ID NO: 32345 - DNA, 600 bp, Chicken  19866894255605_2
agtttgggagtaggttcttgtcccagatgctcatgcccaagactctctattcattttcattggagtactatgtatcataagattttaacttttggctgctacaaatgtggtttgtaaatacaggtgaagaggatgaaaggctgtagatgccctctctggccttaataatgcttgtaagcacttggtcagagggaggaaacctggcattcaggtattcaccagtagcttcttcatgccctgtgcaaggctgaggttactggaaaactaagcatcttgtaaaccttgtatgcrtatatagtrggaaataagagagatgcagtcaggtgagttacagtatatttgttgccagccattaccaggtagctgctatgttatttctatgaaataccacaaccacgtaaataactcaagtaataattgtaaatggatgactgtgtgaagggaggtgggggcaggagccataactgcgcagctgctatggctgtgaaaattcaaccttaagcagcctaaacattcattttacagtgtacaccactgattacttaattacatctaaaatataagtcagacacactaaaaaccccagggagtaaattacaa

SEQ ID NO: 32346 - DNA, 600 bp, Chicken  19866894255606_1
gtcttcaaagagcatagaaagcaattatagaaaaaaaaagttgacagttaagaaaatctagagtttttgtttgttttgttttttccccataagcatggtatttaacaataaccaattgaaataccaagataaactcatactctacatggataaatcggaagagacagatcttgtaaaatgtagactgtatatatgtgctgtttttgtattcaattaaatgcttttcaaacagataaattgagcaggaaaaatttcaggagtcacactgtgtttctttcctagtttaagatctatggatakaaggactcaaatttcattttcttaactaagtatacagaattttgtatactgaaccttaaaccttaaaggtttatgtttcttcattttcagaataaatagcttgtttcctctctgcatggagtgtattgtaatgctaattttttgaatcatcctttacccaagactttacacaagtgtagttacaatgttttgccccttgcgtcattgtttggtgcagcaggaaaggtgccgtttttactactgctktttgactgtttaaatttgtatcctttgcttagaatcagcttccaaggtgcacaa

SEQ ID NO: 32347 - DNA, 600 bp, Chicken  19866894255606_2
aaaaatttcaggagtcacactgtgtttctttcctagtttaagatctatggatakaaggactcaaatttcattttcttaactaagtatacagaattttgtatactgaaccttaaaccttaaaggtttatgtttcttcattttcagaataaatagcttgtttcctctctgcatggagtgtattgtaatgctaattttttgaatcatcctttacccaagactttacacaagtgtagttacaatgttttgccccttgcgtcattgtttggtgcagcaggaaaggtgccgtttttactactgctktttgactgtttaaatttgtatcctttgcttagaatcagcttccaaggtgcacaaggtgtcccgtttttcaatatttgtttgaatatgtgtctatattcatatccttctgctttgtgatcaaatgaagaagaaacagctacactgcactgtcactgctgttgatatcttaggggccttaaaggtgaaaaatctgagaaataacttttcattaacaacatattccttacgcagagtaaaatttgagaaaggctctgatcctgcaagaactgtttattattgttgcactggtatctatgttaa

SEQ ID NO: 32348 - DNA, 600 bp, Chicken  19866894255607_1
aacagtgatattcaagatattcttctgttttgttaggtgtgcgtctttgtgatcagcacgttaattccagtgaagtggcaacctggtgaattttttgtctctagctatgtgcgatctcaagacttaagaaacttagcttagtcaagatttgtattggttggaagttttattggctactctaacttaagggagtttgcttattaaattatgaaaaatatttatttaaaaataaagactggtgagagtgatgataactgtgtcattagacttaaattgaaaagtggaagatgtctgaggaaraaacaccttttttttctgaactattgtgagtgtatctttagtgtaatttttctttcattgtgagctatgctcaaatcctgaaaagtgaaaatactttacattttttaactttaggatttgattttataagttttcttataatttccctgcacattttgtagtgtttttcacaggagtgtaggaatatattataaataaaatggattttatgaaccagaaaatattttacgattctaggaaaggtagtttgaaagctgctgcattcatccagatttgctaatatttaaacttcttcaattt

SEQ ID NO: 32349 - DNA, 600 bp, Chicken  19866894255609_1
ttcatcagctatatacttgttgcagaaaggttgggatatgactcaagctgaaggtcttctttacctttcagatgagctattgactaagttgactgccgctgcaacagtgaggaaaatctttctgaggtagccaagatgagcttggggaagtgctagtgctgagcatgcacattctttccatcatggaaacgagccaaacttctcaaagtaattgctgctatttctttctattcagactgcccaacttactgtggtaccaagagatacaaagcttattgaagtagaaaagtagaaactttyagaaagttccagaaagaaatcagtgcaggcataaaatttaaagagcaggagttacatttctgctcttgtgaattacttatttagttacacaatggtacatgctgttacagtgagtatatgagagatgttgtattgggtttatcctagccttttgtttgctgtcttattttaggtgcaagtggaagctgtggttattttacagttgacctgatttctaattggaccttttccaagtgccttacaattgctctattctccaaaactatagttactggaaagagaatgacatcagtgataggc

SEQ ID NO: 32350 - DNA, 600 bp, Chicken  19866894255615_1
tcagcttgcatgtcttccttcaatgctatagatcacgtacaagcccttgcgcagcacgtgtgggcattgctaataagatttactgtttatccatgcctggtttcatcaaccactgagaatgcagcttgctgaacagagggaagagttgagttcttgtgggtgctgctgatactaataagagaagaaatttggcaagaatacggcagaatattgccataacacagaaatggtcttaaaacgatcgtatatatgtgtgtaatttccaaacttctttgaaaagcaggggcacgattcataggmgatkatttggattcaaggaggcaaaccagttacagcaggtctttgcagagcccactgaaataatcatcacaggcaggaaggaagaagagatgaggctgcagtccgtttcccctcttgatatgataaaatatctgggggcatattgctcccctcgtgggtgcacaaagaattagttgccatgactgggaaatatgccctggtgacaatttgtttwaaaagtgttcctctgaggacagatgcagattttcttcttgtttttatttctctcttctcctgctgctctgcgattccrtggctgga

SEQ ID NO: 32351 - DNA, 600 bp, Chicken  19866894255615_2
cttgcatgtcttccttcaatgctatagatcacgtacaagcccttgcgcagcacgtgtgggcattgctaataagatttactgtttatccatgcctggtttcatcaaccactgagaatgcagcttgctgaacagagggaagagttgagttcttgtgggtgctgctgatactaataagagaagaaatttggcaagaatacggcagaatattgccataacacagaaatggtcttaaaacgatcgtatatatgtgtgtaatttccaaacttctttgaaaagcaggggcacgattcataggmgatkatttggattcaaggaggcaaaccagttacagcaggtctttgcagagcccactgaaataatcatcacaggcaggaaggaagaagagatgaggctgcagtccgtttcccctcttgatatgataaaatatctgggggcatattgctcccctcgtgggtgcacaaagaattagttgccatgactgggaaatatgccctggtgacaatttgtttwaaaagtgttcctctgaggacagatgcagattttcttcttgtttttatttctctcttctcctgctgctctgcgattccrtggctggagatc

SEQ ID NO: 32352 - DNA, 600 bp, Chicken  19866894255615_3
cataacacagaaatggtcttaaaacgatcgtatatatgtgtgtaatttccaaacttctttgaaaagcaggggcacgattcataggmgatkatttggattcaaggaggcaaaccagttacagcaggtctttgcagagcccactgaaataatcatcacaggcaggaaggaagaagagatgaggctgcagtccgtttcccctcttgatatgataaaatatctgggggcatattgctcccctcgtgggtgcacaaagaattagttgccatgactgggaaatatgccctggtgacaatttgtttwaaaagtgttcctctgaggacagatgcagattttcttcttgtttttatttctctcttctcctgctgctctgcgattccrtggctggagatctcatttacccaacagctgaatgcagatccagccatggtctgtcttctctactgtaaactctaaggaatggattgttgcttgataatttcatggattagtttttcacttcccggtgtcaatataggtcatactggtgtccttccctgtgtcctaacattaatggaagagctatggtgtagtcaccttaccgtaaggactgtaggttccata

SEQ ID NO: 32353 - DNA, 600 bp, Chicken  19866894255615_4
tcataggmgatkatttggattcaaggaggcaaaccagttacagcaggtctttgcagagcccactgaaataatcatcacaggcaggaaggaagaagagatgaggctgcagtccgtttcccctcttgatatgataaaatatctgggggcatattgctcccctcgtgggtgcacaaagaattagttgccatgactgggaaatatgccctggtgacaatttgtttwaaaagtgttcctctgaggacagatgcagattttcttcttgtttttatttctctcttctcctgctgctctgcgattccrtggctggagatctcatttacccaacagctgaatgcagatccagccatggtctgtcttctctactgtaaactctaaggaatggattgttgcttgataatttcatggattagtttttcacttcccggtgtcaatataggtcatactggtgtccttccctgtgtcctaacattaatggaagagctatggtgtagtcaccttaccgtaaggactgtaggttccataacactctgcaatctttcagcacatagtaattatgagcatatcttgagaaatatgcatggtattatatttatgtataaa

SEQ ID NO: 32354 - DNA, 600 bp, Chicken  19866894255617_1
acactactgcagcacttaattgggaatttgtgttttaatttgtctattttgatctggaagcatactgaccaagctattgcactaaggatacgcatgtgaactgctgaatagaacaaactacttcttagagggagagcaaatattacagtaaaccactttctgagcagatggcggcgatgtgttggatgtcaacttgcctagataggacattatttagggacttggtagcagtgtattggtgagcgctagcatgctcttcagtactgcttctgacctaatgccaaaggttggcatcatctrtattttaggcttatagtaatatgtgtagtaacaatccgttaactctgatttttaaattgcctcmtttgtctaaagaactgtaagtgtagcacagggacgctttcagtaatgtggataatttgtttctctttgcttatatgttagttgtttctcccacaggctccaacaaaggcagcacctaagcagaaaattgtgaagccagtcaaggtttctgctcctcgtgttggtggaaagcgctagcttgccagtctgttagccatactgaataaacatctgacttgctttcacaacttgtgccat

SEQ ID NO: 32355 - DNA, 539 bp, Chicken  19866894255617_2
ctgaccaagctattgcactaaggatacgcatgtgaactgctgaatagaacaaactacttcttagagggagagcaaatattacagtaaaccactttctgagcagatggcggcgatgtgttggatgtcaacttgcctagataggacattatttagggacttggtagcagtgtattggtgagcgctagcatgctcttcagtactgcttctgacctaatgccaaaggttggcatcatctrtattttaggcttatagtaatatgtgtagtaacaatccgttaactctgatttttaaattgcctcmtttgtctaaagaactgtaagtgtagcacagggacgctttcagtaatgtggataatttgtttctctttgcttatatgttagttgtttctcccacaggctccaacaaaggcagcacctaagcagaaaattgtgaagccagtcaaggtttctgctcctcgtgttggtggaaagcgctagcttgccagtctgttagccatactgaataaacatctgacttgctttcacaacttgtgccatgtt

SEQ ID NO: 32356 - DNA, 600 bp, Chicken  19866894255620_1
tttcatcctgggtgccaaggcatgcactatttctgttatgatacatgtatcctggtccttagaggcagtgatgcttgtctgcgaatcgaatgtattttgcaaaagttgctgtcacggatgaggtctgggaggtgaaaggattaattgagaagaactgacatttatgaagatgaaggggaggaagaacagtagaatggtgtggaggcagatgtcccttgcaaatgcaaaattagagcctcaacagatccaagtgggtgacctcattgtacaactgcatgtagagctgcatgcatatctacrtcagtctctgttgccttcataccaaagtccacggtggtttcttctggtgtgtgagttggtaacttgttggaagtgttcgtgaactgagagcaagaccggggtctccagctgttccagtatccaagtctgcagctatagtgagggaaagcaatcagtcaagactgtctagaggtcaaggaacggcagaaattatttctgagtcacttctgtacgcactctcatttccttgcttggttcagttttccattgggaacacagtgcatgtgacatgcaatctgagtttcttcttgagaaataagt

SEQ ID NO: 32357 - DNA, 599 bp, Chicken  19866894255627_1
  misc_feature (1)..(81): n is any nucleotide
nnnnnnnnnnnnnnnnnnnnnnnnnnnnnnnnnnnnnnnnnnnnnnnnnnnnnnnnnnnnnnnnnnnnnnnnnnnnnnnnnaatttctccttgctatgttttgtgtgttcttttctctttgtttaaaagattctgaagattaataagcaacacataatgacactggaaagtgtgatacttcccctgttataactagctgtcctttagctgataaccaaagttctttcctttcatgtgacttaagacttctattttatgtggcctaaggaagcttacaacaataaaaggtcaaattgcccyacaagaaatagagcatctttaatattttttaggtccaagtcagttcaaagcccctgccatgagcacagctgccacccaccagctcaggctgcccagggtcccatcctaggccttgagtgcttccaggratggagcacccagracttctctgggcagcagtgccagtgcctcatcactctctgagtaaagaatttcctcttaacatttaacccaagtctccccacttttagtttaaaaccattcccccctgccctatcgctatctgcctatgtaaaaagtcagtcttcctttygtttatt

SEQ ID NO: 32358 - DNA, 600 bp, Chicken  19866894255627_2
gattctgaagattaataagcaacacataatgacactggaaagtgtgatacttcccctgttataactagctgtcctttagctgataaccaaagttctttcctttcatgtgacttaagacttctattttatgtggcctaaggaagcttacaacaataaaaggtcaaattgcccyacaagaaatagagcatctttaatattttttaggtccaagtcagttcaaagcccctgccatgagcacagctgccacccaccagctcaggctgcccagggtcccatcctaggccttgagtgcttccaggratggagcacccagracttctctgggcagcagtgccagtgcctcatcactctctgagtaaagaatttcctcttaacatttaacccaagtctccccacttttagtttaaaaccattcccccctgccctatcgctatctgcctatgtaaaaagtcagtcttcctttygtttattagctccctgtaagtgctgaaaggctgcagtgaggtctctccaggtggaataaatccagttccctcagccttcctttcgtaggagaggtgctccacccctctgaataatttaatgaaacctgtcttagac

SEQ ID NO: 32359 - DNA, 600 bp, Chicken  19866894255627_3
ataagcaacacataatgacactggaaagtgtgatacttcccctgttataactagctgtcctttagctgataaccaaagttctttcctttcatgtgacttaagacttctattttatgtggcctaaggaagcttacaacaataaaaggtcaaattgcccyacaagaaatagagcatctttaatattttttaggtccaagtcagttcaaagcccctgccatgagcacagctgccacccaccagctcaggctgcccagggtcccatcctaggccttgagtgcttccaggratggagcacccagracttctctgggcagcagtgccagtgcctcatcactctctgagtaaagaatttcctcttaacatttaacccaagtctccccacttttagtttaaaaccattcccccctgccctatcgctatctgcctatgtaaaaagtcagtcttcctttygtttattagctccctgtaagtgctgaaaggctgcagtgaggtctctccaggtggaataaatccagttccctcagccttcctttcgtaggagaggtgctccacccctctgaataatttaatgaaacctgtcttagacctaaattaaattcg

SEQ ID NO: 32360 - DNA, 518 bp, Chicken  19866894255627_4
attgcccyacaagaaatagagcatctttaatattttttaggtccaagtcagttcaaagcccctgccatgagcacagctgccacccaccagctcaggctgcccagggtcccatcctaggccttgagtgcttccaggratggagcacccagracttctctgggcagcagtgccagtgcctcatcactctctgagtaaagaatttcctcttaacatttaacccaagtctccccacttttagtttaaaaccattcccccctgccctatcgctatctgcctatgtaaaaagtcagtcttcctttygtttattagctccctgtaagtgctgaaaggctgcagtgaggtctctccaggtggaataaatccagttccctcagccttcctttcgtaggagaggtgctccacccctctgaataatttaatgaaacctgtcttagacctaaattaaattcggactagaatagcttgaattaaaaacaatttaaaacttaaaaataaaattaaataaacctatttcttaa

SEQ ID NO: 32361 - DNA, 599 bp, Chicken  19866894255635_1
  misc_feature (1)..(180): n is any nucleotide
nnnnnnnnnnnnnnnnnnnnnnnnnnnnnnnnnnnnnnnnnnnnnnnnnnnnnnnnnnnnnnnnnnnnnnnnnnnnnnnnnnnnnnnnnnnnnnnnnnnnnnnnnnnnnnnnnnnnnnnnnnnnnnnnnnnnnnnnnnnnnnnnnnnnnnnnnnnnnnnnnnnnnnnnnnnnnnnnnnnncattctgcccaagaagtgctcgctcactcccttgtattctcaaggccaagttttttgtatttctcttgctgtttgcttgacctttttcttagtctctctcagaattgcttcaatctgttyctgcattttatgtacttcattaaataacacccactgaaacatcctatgattcattagattattgtgtcatgggtcttgcaagtgggttgtgtttaggtggtggatcccacagtttgaagttctgaacttcagtaagggacttcacatctttcctcatcgaaagatgactgccagcaccaacacagtctccccctaaatatattgcaacagtagatttttgctgcaatggaacccattaaaggctcttgttcattttagcggagttctggggcttctttggtccttcccttctggtaaca

SEQ ID NO: 32362 - DNA, 600 bp, Chicken  19866894255635_2
ctatgattcattagattattgtgtcatgggtcttgcaagtgggttgtgtttaggtggtggatcccacagtttgaagttctgaacttcagtaagggacttcacatctttcctcatcgaaagatgactgccagcaccaacacagtctccccctaaatatattgcaacagtagatttttgctgcaatggaacccattaaaggctcttgttcattttagcggagttctggggcttctttggtccttcccttctggtaacaaaattgtaacaaaagtttctattgagagacaattacaggaataytttaattgggcaggaaaacyggtggtaccaatgatgacaggatgcaaggtaatgtctgattcactcatctagactttcatagtaaaaagctgcctgaaatctcatgatatatcatagaggaacttttgcaacatcgtgctgggggtgtaatgcatgcagagcattttttttttttcaagaatataaaaaatatctcaagataccaaatatttcaagatatttcaaatatttcaagatatcagaaatatcttgaagattacagaatgggataaaaaggaagctaacaatgtaggaacattt

SEQ ID NO: 32363 - DNA, 600 bp, Chicken  19866894255635_3
gtgtcatgggtcttgcaagtgggttgtgtttaggtggtggatcccacagtttgaagttctgaacttcagtaagggacttcacatctttcctcatcgaaagatgactgccagcaccaacacagtctccccctaaatatattgcaacagtagatttttgctgcaatggaacccattaaaggctcttgttcattttagcggagttctggggcttctttggtccttcccttctggtaacaaaattgtaacaaaagtttctattgagagacaattacaggaatagtttaattgggcaggaaaacyggtggtaccaatgatgacaggatgcaaggtaatgtctgattcactcatctagactttcatagtaaaaagctgcctgaaatctcatgatatatcatagaggaacttttgcaacatcgtgctgggggtgtaatgcatgcagagcattttttttttttcaagaatataaaaaatatctcaagataccaaatatttcaagatatttcaaatatttcaagatatcagaaatatcttgaagattacagaatgggataaaaaggaagctaacaatgtaggaacatttttgacttttccaggtagggg

SEQ ID NO: 32364 - DNA, 578 bp, Chicken  19866894255638_1
atcaatgtgttaaaaccaggacagcctccacacgaaccaccctagatcaattcaatcctaatttgcattaactcaatttaatcattgactgatgattaatcctaaaccaaggttaagtgtgacacaagttctcgcaactaaacttgtttccaaatgagttgctgggccttgcctacagggcaaagctgcaaagctcagtcgttctccagctcgtgcagctaaaccagcctaagctccccatgtgaatacttatatttcacttaatttattgcagcttgacttgctcccagccagctgagratacgtgggaaggagcagagccatcctttggggatttctaccagttctatacagcagattgaaaagctctgtggaaatttttgtgaattcagatgcacttgcagcaccttattcccaggtatttcaaaggctccaccactccctcgcttgcagggcagccctggttttcatcataggtgctccaagaggtcacgatgctggacctcagcacgacactgtgctacacacacccaaccacagcagctggggggagatgctggctcacatagtcatcaaat

SEQ ID NO: 32365 - DNA, 599 bp, Chicken  19866894255640_1
  misc_feature (1)..(221): n is any nucleotide
nnnnnnnnnnnnnnnnnnnnnnnnnnnnnnnnnnnnnnnnnnnnnnnnnnnnnnnnnnnnnnnnnnnnnnnnnnnnnnnnnnnnnnnnnnnnnnnnnnnnnnnnnnnnnnnnnnnnnnnnnnnnnnnnnnnnnnnnnnnnnnnnnnnnnnnnnnnnnnnnnnnnnnnnnnnnnnnnnnnnnnnnnnnnnnnnnnnnnnnnnnnnnnnnnnnnnnnnnnnnnttgtttaaaacataactgaatatatattaaagcccatgctcaaactgaagctagggacttcatgcagatatcactgaaytggattccatggtttattttatttaggaagtcaccagaggcctttgttacctctaattacaggaacctgtgaaggtcttgacagaagagccatgtgaaattgatacctaaactatgcattcactacatttggacaaacaagagcctcaaatcttgctccagcaatgtttggtcagaagaagcagagggctaaaatgtcatctgtttgctgataacaaagaagttgtcacagtcctttccacaaagtatttcagacttcagaaatcacttcctacttctcttcttacatttggttaaaac

SEQ ID NO: 32366 - DNA, 600 bp, Chicken  19866894255645_1
tctgcttggtctgtggggctgaagggttaaaaccttgggttcttgggatcagtgccttgctgtcagcgaagaatctgatacagagcatgtgatataattacactaataacccgtctcatctcttgttggagaaagctgacttaattctgaagcctcacagccattgagaaggatgagccagaggaattctgctttattaggtgtttatttgttcttcctttctgccacttcaagatcatgtggatggtccctaaggggagaagatctttggagaatcctggagccagaagatacctcagstctttggagagctggtcatgcccagcagtatgagacctgaactctttggcaggcagttggttgtcctggcagggtgtccacgtttctcccgagactacagtgtgagggaatgctcatcctcccacgctcccctggcttcagctgaggaccgggctgctggaaagcccgctgttgctggggagggcrgagggygagcacagctgaggttagctgttttcatactgggggtgccttgctcttctcagcctcatccgctgctctgtgcagaggcccgcagtcctgggccgtaacgtgggaaga

SEQ ID NO: 32367 - DNA, 600 bp, Chicken  19866894255645_2
ttctgctttattaggtgtttatttgttcttcctttctgccacttcaagatcatgtggatggtccctaaggggagaagatctttggagaatcctggagccagaagatacctcagstctttggagagctggtcatgcccagcagtatgagacctgaactctttggcaggcagttggttgtcctggcagggtgtccacgtttctcccgagactacagtgtgagggaatgctcatcctcccacgctcccctggcttcagctgaggaccgggctgctggaaagcccgctgttgctggggagggcrgagggygagcacagctgaggttagctgttttcatactgggggtgccttgctcttctcagcctcatccgctgctctgtgcagaggcccgcagtcctgggccgtaacgtgggaagagctggagtgtgtttgctccrgttccagccaaggcactcagctgacaaaaccttcacatttgtaaagtgaatttctgcaccttttctacccccttgctaattcctggaaggaatcacagggaatgggaaactcagttcccagttgtggtagatgcctgtaaattctcagaaatgtgtgtttggcatg

SEQ ID NO: 32368 - DNA, 600 bp, Chicken  19866894255645_3
tttattaggtgtttatttgttcttcctttctgccacttcaagatcatgtggatggtccctaaggggagaagatctttggagaatcctggagccagaagatacctcagstctttggagagctggtcatgcccagcagtatgagacctgaactctttggcaggcagttggttgtcctggcagggtgtccacgtttctcccgagactacagtgtgagggaatgctcatcctcccacgctcccctggcttcagctgaggaccgggctgctggaaagcccgctgttgctggggagggcrgagggygagcacagctgaggttagctgttttcatactgggggtgccttgctcttctcagcctcatccgctgctctgtgcagaggcccgcagtcctgggccgtaacgtgggaagagctggagtgtgtttgctccrgttccagccaaggcactcagctgacaaaaccttcacatttgtaaagtgaatttctgcaccttttctacccccttgctaattcctggaaggaatcacagggaatgggaaactcagttcccagttgtggtagatgcctgtaaattctcagaaatgtgtgtttggcatgggtgtg

SEQ ID NO: 32369 - DNA, 600 bp, Chicken  19866894255645_4
cccagcagtatgagacctgaactctttggcaggcagttggttgtcctggcagggtgtccacgtttctcccgagactacagtgtgagggaatgctcatcctcccacgctcccctggcttcagctgaggaccgggctgctggaaagcccgctgttgctggggagggcrgagggygagcacagctgaggttagctgttttcatactgggggtgccttgctcttctcagcctcatccgctgctctgtgcagaggcccgcagtcctgggccgtaacgtgggaagagctggagtgtgtttgctccrgttccagccaaggcactcagctgacaaaaccttcacatttgtaaagtgaatttctgcaccttttctacccccttgctaattcctggaaggaatcacagggaatgggaaactcagttcccagttgtggtagatgcctgtaaattctcagaaatgtgtgtttggcatgggtgtgctgagtttaaactcactgcggttgtctgccctaacatctgagaaaatggaagtaactgagaaccagtttgttttgaaagggaacttaacagcagaaagtccttgaccttgacttcttgcgtcgtatgt

SEQ ID NO: 32370 - DNA, 600 bp, Chicken  19866894255647_1
gccccaaaataaccccagcttttcgctgggccctcgtgaaatattcattctctccccccaccggcctccatgctgtcccctctctggggatggaaggaggaaccaatcgatggcatcgacccatgcggagccgcagctgctgcgggcagggggggggggggggaagcagctgatgcagcaggaagggaggaaggagccctctgtgcctgtggatgctgctggggggcaaaacgagggcacccctgtggccgtcccccagctggcgtggctgcgtccctcctgctgtcacccagctgtccygcatggggatggggacaggagggaggggataaggcatccagaccttgcatcccatcgcgctgctgggggaacactttcgtgcctcagtttccccactgcactgagagcagcgtgctctgcattgctgcttttaatgtgtcacggggactctgatgcagaaaacacttctggaccagggctgcagccccccttgcccacctcccaccccccccagaaggtcccctctgctcccccaccgtcagtgagcagcgctgctgaatttacggctgtcagcactgcagctgcacaccagcaatcctc

SEQ ID NO: 32371 - DNA, 599 bp, Chicken  19866894255649_1
  misc_feature (1)..(90): n is any nucleotide
nnnnnnnnnnnnnnnnnnnnnnnnnnnnnnnnnnnnnnnnnnnnnnnnnnnnnnnnnnnnnnnnnnnnnnnnnnnnnnnnnnnnnnnnnncagaacccatccctccctcccacacgccccaaaacatctatctttcgataagggaaattaccacaagaacggcctaaaaacatcttctgacaaaagcttcaattctttgagatacctcaacaaaccccagtgggccagcacaagtgagagcagctagaagcccctgccccccctgctcagctgtaactcagttcaaccgattgctttttyctctggtccaacacaacctcgtgaacctggtcacaagataactccaaaccargtctaggttgacattcagcagtttattctgcctgaaagaggtgctggacaacacgtaagaagggaagactyacacagtaagtttgacaaactgactaacactgaaccaagcttcctctgcagcagttttcagttaccccttcctcatgcttccaagwgcaaaggccaaacgtacacccagtgtgaagctgaaacatttcaacttatggcacaaaacgcttcagtgtgtgtacgaaggctgctcagaa

SEQ ID NO: 32372 - DNA, 599 bp, Chicken  19866894255649_2
  misc_feature (1)..(38): n is any nucleotide
nnnnnnnnnnnnnnnnnnnnnnnnnnnnnnnnnnnnnncagaacccatccctccctcccacacgccccaaaacatctatctttcgataagggaaattaccacaagaacggcctaaaaacatcttctgacaaaagcttcaattctttgagatacctcaacaaaccccagtgggccagcacaagtgagagcagctagaagcccctgccccccctgctcagctgtaactcagttcaaccgattgctttttyctctggtccaacacaacctcgtgaacctggtcacaagataactccaaaccargtctaggttgacattcagcagtttattctgcctgaaagaggtgctggacaacacgtaagaagggaagactyacacagtaagtttgacaaactgactaacactgaaccaagcttcctctgcagcagttttcagttaccccttcctcatgcttccaagwgcaaaggccaaacgtacacccagtgtgaagctgaaacatttcaacttatggcacaaaacgcttcagtgtgtgtacgaaggctgctcagaagtacagagaacggcctcccatcacaagcagcaggagcttcagaaaggygcgt

SEQ ID NO: 32373 - DNA, 600 bp, Chicken  19866894255649_3
acatctatctttcgataagggaaattaccacaagaacggcctaaaaacatcttctgacaaaagcttcaattctttgagatacctcaacaaaccccagtgggccagcacaagtgagagcagctagaagcccctgccccccctgctcagctgtaactcagttcaaccgattgctttttyctctggtccaacacaacctcgtgaacctggtcacaagataactccaaaccargtctaggttgacattcagcagtttattctgcctgaaagaggtgctggacaacacgtaagaagggaagactyacacagtaagtttgacaaactgactaacactgaaccaagcttcctctgcagcagttttcagttaccccttcctcatgcttccaagwgcaaaggccaaacgtacacccagtgtgaagctgaaacatttcaacttatggcacaaaacgcttcagtgtgtgtacgaaggctgctcagaagtacagagaacggcctcccatcacaagcagcaggagcttcagaaaggygcgtaacagaagggcgtcatcctaagctaagtaatgaaccaaaacaatctactgctgggtagagaacaccgcttcc

SEQ ID NO: 32374 - DNA, 600 bp, Chicken  19866894255649_4
acaaaccccagtgggccagcacaagtgagagcagctagaagcccctgccccccctgctcagctgtaactcagttcaaccgattgctttttyctctggtccaacacaacctcgtgaacctggtcacaagataactccaaaccargtctaggttgacattcagcagtttattctgcctgaaagaggtgctggacaacacgtaagaagggaagactyacacagtaagtttgacaaactgactaacactgaaccaagcttcctctgcagcagttttcagttaccccttcctcatgcttccaagwgcaaaggccaaacgtacacccagtgtgaagctgaaacatttcaacttatggcacaaaacgcttcagtgtgtgtacgaaggctgctcagaagtacagagaacggcctcccatcacaagcagcaggagcttcagaaaggygcgtaacagaagggcgtcatcctaagctaagtaatgaaccaaaacaatctactgctgggtagagaacaccgcttccacatccggggtaagactgcccatctactgaggtctggcgagaaggcaaagcatcaaccaaacacccacatgtgctgatgcacaaac

SEQ ID NO: 32375 - DNA, 600 bp, Chicken  19866894255649_5
accargtctaggttgacattcagcagtttattctgcctgaaagaggtgctggacaacacgtaagaagggaagactyacacagtaagtttgacaaactgactaacactgaaccaagcttcctctgcagcagttttcagttaccccttcctcatgcttccaagwgcaaaggccaaacgtacacccagtgtgaagctgaaacatttcaacttatggcacaaaacgcttcagtgtgtgtacgaaggctgctcagaagtacagagaacggcctcccatcacaagcagcaggagcttcagaaaggygcgtaacagaagggcgtcatcctaagctaagtaatgaaccaaaacaatctactgctgggtagagaacaccgcttccacatccggggtaagactgcccatctactgaggtctggcgagaaggcaaagcatcaaccaaacacccacatgtgctgatgcacaaacagcttccctgccgagcagggtaccgctgcactgccagtcttgcttggtggcagctgaagtgcttgcaaggaagcagccgaaggaaaaacactgtactgaacagagcatcttgttaataaaatggaagaagctgcaata

SEQ ID NO: 32376 - DNA, 499 bp, Chicken  19866894255656_1
caactcaccccagttcagaggcaggttctaatagctgctaaaccaatgttaactcaaaacaaataaacaatgacccaccccaaggcaggaagtcttgtcttcgttttcaaagataggagcaaaagcaaagtcaagacaggtatttaatttgttccaaagcattacaggacaagatcacacaaaagaaacagctctacagactacaaatgtagcttgcattgtttaagagaccaaatagttctactttatgtttcaaaccaattttctcatgcatgttaaaaattttcaagaccatttaascccctaaacgtatctcaaattctgtccctgtgcatttagccttttgacttacacccaaccagattaattaccgttaagtaaaatgaacaatctaatgaatgacacaaaaaggcaacactcaaaaatcttcaaacataactgtaaaagatgagaatttaagtaagaatcgaactataccaaccaggacagccaaactcat

SEQ ID NO: 32377 - DNA, 600 bp, Chicken  19866894255663_1
ttccaaccttggtgattctatgagaggaaatcacatgcaaaggagagcaatctcgttgcaattcaggaggctagagagttgatatgctgagtagacttgcacaattgaggtaaatgaatactgaatagggcagaatatttttttctaaattaatttcaattgaaggtttcagtgaaaaaggatagtaagattgttccagaattatttatgaaatgtttcttcctctcaatatttttgttagcttaatctagatttgacaagctatggtgaaggacaacataattttctgaaagaattatkattcagctgaagcttattttttatccttcgtctctggctatacagggaacttgtgtcggtgtacaggatacagacccattctggagggatacaggacttttgctgtggtaggtggcctcagacaatcttcaaaacattctggaagagtgactggctttctcttttattgaaatacagcacaagctgaaatgggttggaggaaaataacacgcatgcttcaatccagctttgacttttgacccctttgtatgcactttatgcattgaaaatgcaaaaccaactcatttacttactctagtt

SEQ ID NO: 32378 - DNA, 600 bp, Chicken  19866894255663_2
aaagctgttgagatatccctgaataagcttggaaaaaaatagtgtgcagtggtctaagaagataagatcactgatgatgccaagttagtttgggtagagattacagagagattttgagcaatttcagaaagcctttataaccctgatactggtgaatagaacagggtacaaagttaaggacaaataaatacaaagcaatcaacggagtgagaggtagtcttcatttcacatgtaaaatgatgatgagcaggttattattgtgcagcaagatgatgttggaggtgtggtagatagttccayggaagcaygaccaccagtgagtactcaaaacarcgttccaaagrgtagaggacaaaacagtagacagtgttatgccagtgtatcatagctcaccagcacctgagtactctgtgccattctgattgcctcatctctagtaaagtatagcagaaattaaaaagaaaataaaaattatcagagaagtggaatgaggatcacagctatggtaacctggcttccatgccaagtaatgctgggctaactgtgactccagcttggaagagaggtgtcaggatcagagtggggagagggaattctctc

SEQ ID NO: 32379 - DNA, 600 bp, Chicken  19866894255663_3
tgagatatccctgaataagcttggaaaaaaatagtgtgcagtggtctaagaagataagatcactgatgatgccaagttagtttgggtagagattacagagagattttgagcaatttcagaaagcctttataaccctgatactggtgaatagaacagggtacaaagttaaggacaaataaatacaaagcaatcaacggagtgagaggtagtcttcatttcacatgtaaaatgatgatgagcaggttattattgtgcagcaagatgatgttggaggtgtggtagatagttccayggaagcaygaccaccagtgagtactcaaaacarcgttccaaagrgtagaggacaaaacagtagacagtgttatgccagtgtatcatagctcaccagcacctgagtactctgtgccattctgattgcctcatctctagtaaagtatagcagaaattaaaaagaaaataaaaattatcagagaagtggaatgaggatcacagctatggtaacctggcttccatgccaagtaatgctgggctaactgtgactccagcttggaagagaggtgtcaggatcagagtggggagagggaattctctcagaaggga

SEQ ID NO: 32380 - DNA, 600 bp, Chicken  19866894255663_4
aaaaaatagtgtgcagtggtctaagaagataagatcactgatgatgccaagttagtttgggtagagattacagagagattttgagcaatttcagaaagcctttataaccctgatactggtgaatagaacagggtacaaagttaaggacaaataaatacaaagcaatcaacggagtgagaggtagtcttcatttcacatgtaaaatgatgatgagcaggttattattgtgcagcaagatgatgttggaggtgtggtagatagttccayggaagcaygaccaccagtgagtactcaaaacarcgttccaaagrgtagaggacaaaacagtagacagtgttatgccagtgtatcatagctcaccagcacctgagtactctgtgccattctgattgcctcatctctagtaaagtatagcagaaattaaaaagaaaataaaaattatcagagaagtggaatgaggatcacagctatggtaacctggcttccatgccaagtaatgctgggctaactgtgactccagcttggaagagaggtgtcaggatcagagtggggagagggaattctctcagaagggaataaattctgctccattttctggga

SEQ ID NO: 32381 - DNA, 600 bp, Chicken  19866894255663_5
tgcagtggtctaagaagataagatcactgatgatgccaagttagtttgggtagagattacagagagattttgagcaatttcagaaagcctttataaccctgatactggtgaatagaacagggtacaaagttaaggacaaataaatacaaagcaatcaacggagtgagaggtagtcttcatttcacatgtaaaatgatgatgagcaggttattattgtgcagcaagatgatgttggaggtgtggtagatagttccayggaagcaygaccaccagtgagtactcaaaacarcgttccaaagrgtagaggacaaaacagtagacagtgttatgccagtgtatcatagctcaccagcacctgagtactctgtgccattctgattgcctcatctctagtaaagtatagcagaaattaaaaagaaaataaaaattatcagagaagtggaatgaggatcacagctatggtaacctggcttccatgccaagtaatgctgggctaactgtgactccagcttggaagagaggtgtcaggatcagagtggggagagggaattctctcagaagggaataaattctgctccattttctgggaacctggccatt

SEQ ID NO: 32382 - DNA, 600 bp, Chicken  19866894255669_1
aaaattgtttgaattggacttcaagagacattgttggtattcaagaggaatttggataatgcactcaagaacacattttaactttcggttagctctgaacttgtcaggcaattgtacttggtggtctttataggtcccttccaatggaacagttatagtttatcctatcctatcctatcctatcctatcctatcctatcctatcctatcctatcctatcctatcctatcctatcctatcctacccctacccctacccctacccctacccctattcccattcccattcccattcccattcycattcttactccaagctatcaggatacagcctgtctcctctttgcaaagcragtgtgttcccagcccagataaaagccctatttacttagcttgtcagatgattctgtgaggataattgggtcaacgtgtggcacggccgtgctcaggcatctgacatgtaagtaggggtcaggattatcatggacggagtgcaggatctggtgaggagatgagatatgcaaaacaacaactaattgtaatgtgggacagatcttagccatatagttgtacagcacacaactccctctccctctcgtcac

SEQ ID NO: 32383 - DNA, 600 bp, Chicken  19866894255669_2
ttggataatgcactcaagaacacattttaactttcggttagctctgaacttgtcaggcaattgtacttggtggtctttataggtcccttccaatggaacagttatagtttatcctatcctatcctatcctatcctatcctatcctatcctatcctatcctatcctatcctatcctatcctatcctatcctacccctacccctacccctacccctacccctattcccattcccattcccattcccattcycattcttactccaagctatcaggatacagcctgtctcctctttgcaaagcragtgtgttcccagcccagataaaagccctatttacttagcttgtcagatgattctgtgaggataattgggtcaacgtgtggcacggccgtgctcaggcatctgacatgtaagtaggggtcaggattatcatggacggagtgcaggatctggtgaggagatgagatatgcaaaacaacaactaattgtaatgtgggacagatcttagccatatagttgtacagcacacaactccctctccctctcgtcacccacatcaatgcaagttcagctactgcttgcacgtttcctcagcaagcatg

SEQ ID NO: 32384 - DNA, 520 bp, Chicken  19866894255669_3
tgaggagatgagatatgcaaaacaacaactaattgtaatgtgggacagatcttagccatatagttgtacagcacacaactccctctccctctcgtcacccacatcaatgcaagttcagctactgcttgcacgtttcctcagcaagcatgacctacaaatggactccattaagacccagtttactattttagaaatgagaggtatgccctggcctgatcactcaatcctttgaatgtgtggtgacaaaatttcttactaaataaaacatctctctctgtatatatgtcttacatatatgcrtggatgtgtacgtgcatgtgtgtatctgcggrcactcaacattctattaattgtatgtgcactatgcagagtgtgaagaaacaaacccataacttctcatataatacagggaagccttaggcaacccctatgaaaatgttttgtaaaaatattatccactgcagcatgcatccactctgattgtaccaacccgtatttcagctggttcctgttccttttc

SEQ ID NO: 32385 - DNA, 488 bp, Chicken  19866894255669_4
ttgtaatgtgggacagatcttagccatatagttgtacagcacacaactccctctccctctcgtcacccacatcaatgcaagttcagctactgcttgcacgtttcctcagcaagcatgacctacaaatggactccattaagacccagtttactattttagaaatgagaggtatgccctggcctgatcactcaatcctttgaatgtgtggtgacaaaatttcttactaaataaaacatctctctctgtatatatgtcttacatatatgcrtggatgtgtacgtgcatgtgtgtatctgcggrcactcaacattctattaattgtatgtgcactatgcagagtgtgaagaaacaaacccataacttctcatataatacagggaagccttaggcaacccctatgaaaatgttttgtaaaaatattatccactgcagcatgcatccactctgattgtaccaacccgtatttcagctggttcctgttccttttc

SEQ ID NO: 32386 - DNA, 599 bp, Chicken  19866894255670_1
  misc_feature (1)..(89): n is any nucleotide
nnnnnnnnnnnnnnnnnnnnnnnnnnnnnnnnnnnnnnnnnnnnnnnnnnnnnnnnnnnnnnnnnnnnnnnnnnnnnnnnnnnnnnnnntatgatcattctctctatgcctgttctccatacgtgaaataagtatatgccgttgtgttatctaaaatattcttaattttttactataccacatataaatcagctttttttaagtgctgttgttttctgtttaacctggaaatatatgtacaggtcagcacaatgtctttttttttttttttggagaagttagccagtttactttacatgrttgagatgggatcagtctattaatatggcttccctatttcccttgttactccctatttaaaatttatagtggagtgattcagagatcctgaggtgaactggaggaatcacgtagggtgtggtgcataacataaataaagatacagtttgtcttgaagactttatggtcgaaggcctggcagtctcaccgtgtctccaattacagatgtccctgctgagatcagctgttggccaggtttccccttcctcgctgtagggtcagtgcgtggtcatcaggtccttgctgagctgccgctcatg

SEQ ID NO: 32387 - DNA, 600 bp, Chicken  19866894255673_1
tgcctggtccctccagaattctgttattcccatgtccatcaatttgtctgatcctttggtgatcccatctgcctcctgcagcatccaggggttgaatcagatgacctccggagggctctttcaacccctacaattccacgattctgtgatttccagtcattcactgccctcagttcaaagacacatttttttctcttttttaactatccactatttttgttgactgccttctagtttttgtactatgggatttggtgaattccacattcagctgactgatgtaccttttccaaaagcttmattataccaattacagtatccytttagacaaattaaagagtattagccttttcagtctccactcatatacatgtgggcaagtcacaagaagcttcttgtgcattagttttcagctttggcatccaggaaatcattcttgctagtaagtgaactcttttggctgcttcttccactcagatcctttctcttcaagaggttccagcacattcatgggcaaagaaaaccaaaarcactgtaacagaaaactctttatggcagtgcaggacccaggaattacagtttgcaactattcctaggagt

SEQ ID NO: 32388 - DNA, 600 bp, Chicken  19866894255673_2
gttattcccatgtccatcaatttgtctgatcctttggtgatcccatctgcctcctgcagcatccaggggttgaatcagatgacctccggagggctctttcaacccctacaattccacgattctgtgatttccagtcattcactgccctcagttcaaagacacatttttttctcttttttaactatccactatttttgttgactgccttctagtttttgtactatgggatttggtgaattccacattcagctgactgatgtaccttttccaaaagcttmattataccaattacagtatccytttagacaaattaaagagtattagccttttcagtctccactcatatacatgtgggcaagtcacaagaagcttcttgtgcattagttttcagctttggcatccaggaaatcattcttgctagtaagtgaactcttttggctgcttcttccactcagatcctttctcttcaagaggttccagcacattcatgggcaaagaaaaccaaaarcactgtaacagaaaactctttatggcagtgcaggacccaggaattacagtttgcaactattcctaggagtttgataacagccatggacagcg

SEQ ID NO: 32389 - DNA, 600 bp, Chicken  19866894255673_3
ctagtttttgtactatgggatttggtgaattccacattcagctgactgatgtaccttttccaaaagcttmattataccaattacagtatccytttagacaaattaaagagtattagccttttcagtctccactcatatacatgtgggcaagtcacaagaagcttcttgtgcattagttttcagctttggcatccaggaaatcattcttgctagtaagtgaactcttttggctgcttcttccactcagatcctttctcttcaagaggttccagcacattcatgggcaaagaaaaccaaaarcactgtaacagaaaactctttatggcagtgcaggacccaggaattacagtttgcaactattcctaggagtttgataacagccatggacagcgatgatggtttgttacattaatctccctgtccttcaaggttgtacacagcaccttctgcctctcctccaggcccacagagcatccacgggaggaatgtgattatcaaaacaaattgggaacttgccattttttccagcatcagacagcagaaagatcagaaaataccctctacataaacacctctgctggatgaaatgctgaactkgga

SEQ ID NO: 32390 - DNA, 600 bp, Chicken  19866894255673_4
aarcactgtaacagaaaactctttatggcagtgcaggacccaggaattacagtttgcaactattcctaggagtttgataacagccatggacagcgatgatggtttgttacattaatctccctgtccttcaaggttgtacacagcaccttctgcctctcctccaggcccacagagcatccacgggaggaatgtgattatcaaaacaaattgggaacttgccattttttccagcatcagacagcagaaagatcagaaaataccctctacataaacacctctgctggatgaaatgctgaactkggacttggagaaggggcttcttgaatcaggcaccttcacttttcttttacatagacttatttcttatctttcatatctctttagacagcarttcttgctcatgtgttacatcacaaaacagctgatgttgatcagaaccacctgagtgtccacaaggaaaaggtgagagacagaagagccacagccacgacagctcaggtgatccttgcagcactttgggcaggaagacctcacctgtaatttttgccttggattgtattccaatcacattcactgagggttcattctatattgtattaa

SEQ ID NO: 32391 - DNA, 600 bp, Chicken  19866894255673_5
agcgatgatggtttgttacattaatctccctgtccttcaaggttgtacacagcaccttctgcctctcctccaggcccacagagcatccacgggaggaatgtgattatcaaaacaaattgggaacttgccattttttccagcatcagacagcagaaagatcagaaaataccctctacataaacacctctgctggatgaaatgctgaactkggacttggagaaggggcttcttgaatcaggcaccttcacttttcttttacatagacttatttcttatctttcatatctctttagacagcarttcttgctcatgtgttacatcacaaaacagctgatgttgatcagaaccacctgagtgtccacaaggaaaaggtgagagacagaagagccacagccacgacagctcaggtgatccttgcagcactttgggcaggaagacctcacctgtaatttttgccttggattgtattccaatcacattcactgagggttcattctatattgtattaattctattttcagggttcattctatatagtattatatacattaagaatttgcttgaagaccgttgtgttgacaaagtggccactggctgtgg

SEQ ID NO: 32392 - DNA, 600 bp, Chicken  19866894255675_1
agttctcagagattcaaatccgaagactacaagtaagttcactagtttcacgctggtttctgattcagttctacttactccacctttatgtattctgagtttggttacaaaaacatttgtgttgccctgtagtcacagaatcacctaggctggaaaataccttcaagatcatagcccaacttatggagtagtcctgtcactaaactatgtcacttagtgccatgtcctcataccttaaatgcctctagggatgcggactccaccacttccctaggcagcctgttccagtgcctaaccacyatttccacagagaaattcttcctaatagtcattttaaacctcccctggctcagcttgagaccatttccttgctccttatcacttatcgtctgacataagaaactgactcgaccaaccatcaactgggttgtcattctgctagcatttgttttctgcgtcaagcrtgcaaaagtctggtagcccatgttacagcacagataacaatgagatgaagttccaagggraagaatcatttgatttgactttgttatatgctgtgtgagtaacacagtgggaagaagcagagagattagtgccctt

SEQ ID NO: 32393 - DNA, 600 bp, Chicken  19866894255675_2
aagatcatagcccaacttatggagtagtcctgtcactaaactatgtcacttagtgccatgtcctcataccttaaatgcctctagggatgcggactccaccacttccctaggcagcctgttccagtgcctaaccacyatttccacagagaaattcttcctaatagtcattttaaacctcccctggctcagcttgagaccatttccttgctccttatcacttatcgtctgacataagaaactgactcgaccaaccatcaactgggttgtcattctgctagcatttgttttctgcgtcaagcrtgcaaaagtctggtagcccatgttacagcacagataacaatgagatgaagttccaagggraagaatcatttgatttgactttgttatatgctgtgtgagtaacacagtgggaagaagcagagagattagtgccctttgttaatagtgacaatttactgttcctaatgtagttttagaaaagaccagcattagtctttgtctgttacggtcagctacagataaagatgaataattcctgttcgtgtgacagctgtatagataatgcagcacaaaaaaagacagcttacaaaattcagcaaa

SEQ ID NO: 32394 - DNA, 600 bp, Chicken  19866894255675_3
tcctcataccttaaatgcctctagggatgcggactccaccacttccctaggcagcctgttccagtgcctaaccacyatttccacagagaaattcttcctaatagtcattttaaacctcccctggctcagcttgagaccatttccttgctccttatcacttatcgtctgacataagaaactgactcgaccaaccatcaactgggttgtcattctgctagcatttgttttctgcgtcaagcrtgcaaaagtctggtagcccatgttacagcacagataacaatgagatgaagttccaagggraagaatcatttgatttgactttgttatatgctgtgtgagtaacacagtgggaagaagcagagagattagtgccctttgttaatagtgacaatttactgttcctaatgtagttttagaaaagaccagcattagtctttgtctgttacggtcagctacagataaagatgaataattcctgttcgtgtgacagctgtatagataatgcagcacaaaaaaagacagcttacaaaattcagcaaaaaaagagaaggtaaagattttcttgtcttatccagattgagcaatcaggaaacaaaagaa

SEQ ID NO: 32395 - DNA, 599 bp, Chicken  19866894255676_1
  misc_feature (1)..(125): n is any nucleotide
nnnnnnnnnnnnnnnnnnnnnnnnnnnnnnnnnnnnnnnnnnnnnnnnnnnnnnnnnnnnnnnnnnnnnnnnnnnnnnnnnnnnnnnnnnnnnnnnnnnnnnnnnnnnnnnnnnnnnnnnnnnnnttgcttaaaaaaaaaagaggtacatgataagggaacatgattattaagcctgttgacaagttgcatgtgggacttcagctgcaatttgtagtagttagggtgggtgtctatctcattaacttaaccctgtctagcagatctgtgactcttgctgtctgttgggtcctcactcatracactcattacatactggagaggaaagtgggaacacaagtggttttaacctagtttaacagcttgagctcaagacagcaagatacatagtagactgtgaactctaaacaggagccaaacccacaccaacctgtcctcctttcggttttgtcttaagagagatggcaaataagtctacaactccagttcaaaacacacttgctatcctctttttgcttgctatttagagatgctaattttttgcaagacmaaatttgaccttatgctcacrtttcttccattagcattacctgaaaatgt

SEQ ID NO: 32396 - DNA, 600 bp, Chicken  19866894255676_2
ccctgtctagcagatctgtgactcttgctgtctgttgggtcctcactcatracactcattacatactggagaggaaagtgggaacacaagtggttttaacctagtttaacagcttgagctcaagacagcaagatacatagtagactgtgaactctaaacaggagccaaacccacaccaacctgtcctcctttcggttttgtcttaagagagatggcaaataagtctacaactccagttcaaaacacacttgctatcctctttttgcttgctatttagagatgctaattttttgcaagacmaaatttgaccttatgctcacrtttcttccattagcattacctgaaaatgtttgtgcctttctgtaatcagcctctggcctagaaaacagaaacacatttttcagtttggtgtcaaaagatgagggaagaaagttaatatgataaaattcaattctcatagtggaaaggacttcaaaatgtaagaatgatttatttttgtaccttctccgcagcttctgttgtatcactgaaaagagcagaaaaaggaaaaatcactcttctaacattccaaaagaatagccagagcgtgcttaactttta

SEQ ID NO: 32397 - DNA, 600 bp, Chicken  19866894255676_3
ctcttgctgtctgttgggtcctcactcatracactcattacatactggagaggaaagtgggaacacaagtggttttaacctagtttaacagcttgagctcaagacagcaagatacatagtagactgtgaactctaaacaggagccaaacccacaccaacctgtcctcctttcggttttgtcttaagagagatggcaaataagtctacaactccagttcaaaacacacttgctatcctctttttgcttgctatttagagatgctaattttttgcaagacmaaatttgaccttatgctcacrtttcttccattagcattacctgaaaatgtttgtgcctttctgtaatcagcctctggcctagaaaacagaaacacatttttcagtttggtgtcaaaagatgagggaagaaagttaatatgataaaattcaattctcatagtggaaaggacttcaaaatgtaagaatgatttatttttgtaccttctccgcagcttctgttgtatcactgaaaagagcagaaaaaggaaaaatcactcttctaacattccaaaagaatagccagagcgtgcttaacttttacataccttgaagtggcttgta

SEQ ID NO: 32398 - DNA, 599 bp, Chicken  19866894255678_1
  misc_feature (1)..(56): n is any nucleotide
nnnnnnnnnnnnnnnnnnnnnnnnnnnnnnnnnnnnnnnnnnnnnnnnnnnnnnnnaatgggatggtctacaaatcaccagaaatgttgagaacacctcccaggatttcacagtagaaatgcatgcaattgaagcgtccaagtgatatggtgccggataattattcaaatgacatgctaatcatcgctggaaattagcaataccatctcaagcaatgcaaatcataagcaattacatagcattatctggttacttacactgcaaacggaaaagttaattattcctacccaagacagcagyagcaatttcagcacattttctttcttgcagtctttggagatgctttcatctttccaagtcctaaaattcactttttttttttcatacctacatgctstaaaactggcaatgtgaccatatccatagtaaaggtttaataagaaaattaagtgagtgttatgaaaaccagggtctgcaattccatttctctctgcctcagctaacaggaggtgagcagcttggcccttgaaggactgatatatttagcacacacaatgctgtgtgctggaactttgcatttttaagaccatctgtgccaa

SEQ ID NO: 32399 - DNA, 600 bp, Chicken  19866894255678_2
tcccaggatttcacagtagaaatgcatgcaattgaagcgtccaagtgatatggtgccggataattattcaaatgacatgctaatcatcgctggaaattagcaataccatctcaagcaatgcaaatcataagcaattacatagcattatctggttacttacactgcaaacggaaaagttaattattcctacccaagacagcagyagcaatttcagcacattttctttcttgcagtctttggagatgctttcatctttccaagtcctaaaattcactttttttttttcatacctacatgctstaaaactggcaatgtgaccatatccatagtaaaggtttaataagaaaattaagtgagtgttatgaaaaccagggtctgcaattccatttctctctgcctcagctaacaggaggtgagcagcttggcccttgaaggactgatatatttagcacacacaatgctgtgtgctggaactttgcatttttaagaccatctgtgccaagacaagcggctgtgtgttcagcacactgaaggcagccgatgtatcatagaaacgtgttccaatcttgctgtgctgctcagtttaactaacggagagga

SEQ ID NO: 32400 - DNA, 599 bp, Chicken  19866894255679_1
  misc_feature (1)..(244): n is any nucleotide
nnnnnnnnnnnnnnnnnnnnnnnnnnnnnnnnnnnnnnnnnnnnnnnnnnnnnnnnnnnnnnnnnnnnnnnnnnnnnnnnnnnnnnnnnnnnnnnnnnnnnnnnnnnnnnnnnnnnnnnnnnnnnnnnnnnnnnnnnnnnnnnnnnnnnnnnnnnnnnnnnnnnnnnnnnnnnnnnnnnnnnnnnnnnnnnnnnnnnnnnnnnnnnnnnnnnnnnnnnnnnnnnnnnnnnnnnnnnnnnnnnnntgtgatggtgggaaatggcaggggtctgtcacgccttcctgactggggacagcagrgactgctgctccagctctgtgctttgtcgctgtggggacacatatgtcacagccatgtctcctccacatctcctgcgacacgttgttgtacgatcaccattagtcttgctgtcttgtccctgtgtctgataggcactatctccaagtgaaatatcccattctgctcaggaaactttaaacaaaggggaatatggcttcctgaatgctcactgggtttgctcactcgcactattaaaagcgcatctcttacttctaacttgaacttttattctttgcctaactttcaacatctgatgtat

SEQ ID NO: 32401 - DNA, 551 bp, Chicken  19866894255679_2
ctgtcttgtccctgtgtctgataggcactatctccaagtgaaatatcccattctgctcaggaaactttaaacaaaggggaatatggcttcctgaatgctcactgggtttgctcactcgcactattaaaagcgcatctcttacttctaacttgaacttttattctttgcctaactttcaacatctgatgtatcctcttctccaacggattaaagtatctgcatttggagagaactgtcctaccactgggagaacaggaaatatcataatgtggacccttctgttccatggtgtcgtcccartagcttaatggtagaattactgaagttagacatattgtatcagtgtacatctcagactctactttctttactttccatcgctatggatcaataaaacactgttgatacactttgaagatcctgaagacaagcacaaggctttgatgagtcatcctcttaagcctgctgggagacatgaattttgccatggacgatacatttgcattccccctctaaaaagagaaggaaaatgttttttcatccctttccca

SEQ ID NO: 32402 - DNA, 600 bp, Chicken  19866894255682_1
agaaatgacccgatttgctgattttagcatctaattgtcattcacaacctccaagcctagcattaaaatggcgactccagaattgtccctccagacctcatcgtggctgtggcattccctgtgggcctcagagcaagaattgtgccttacccctcctctagcagacttccacaactgatgtcaaaaataacacttacaaagtcaccaccctcggtgggaataaggacattcatctctgatgacttggcactgacgatttcgcagtctagggagttcttgctcagatacacgtggcaaccrtctgttttgttgatggagatcgttggcactttacccattacctacagagcgatcaaaggagacgctgaggagcaagagcttgagctgggcaaccatgttcttggcacttgccttcaagggaaaggtttgactcccactgccccccacagacacactgaactcaagtacttccactactggcataaatttaaggttatttcttgttctgatctctttacaacaaaacaaaatgaaagactgggcaagctgcttgtcccaaatccaacatcaaaactggcagcagagtagattctactgctg

SEQ ID NO: 32403 - DNA, 599 bp, Chicken  19866894255685_1
  misc_feature (1)..(68): n is any nucleotide
nnnnnnnnnnnnnnnnnnnnnnnnnnnnnnnnnnnnnnnnnnnnnnnnnnnnnnnnnnnnnnnnnnnnctctgcacactccaatgaaacattggccctggcacggagatagtctgggacctcttgacgttgtccccaggccctgagcagtgccattttcccccagcacacggagcggtgctgccagagggcagggaaggagcaaggctctggggtcagatgttaggggctgggtgccaatgggaacacgctccccgcttttggttcccattgctggaaagtgtcatttgcacatctcctycccacaaagcatccttcccaggacctttcccagagagacccagcagggctccctgctctcagggctccgcatyatgcctcagtttccctgttccatcccatcctcccggcgctgaagtctcctaaccctgctcagcacccaagaaacccattggcactttttttttcccttggagcctgccggtttgggggtgaaaaaggagccaaagtgtccggggacaaagctggagtcgagatttccaccttcacaacacttccgcccatcccctccatccacgctcagtcctcaagggcactaaa

SEQ ID NO: 32404 - DNA, 588 bp, Chicken  19866894255685_2
ctctgcacactccaatgaaacattggccctggcacggagatagtctgggacctcttgacgttgtccccaggccctgagcagtgccattttcccccagcacacggagcggtgctgccagagggcagggaaggagcaaggctctggggtcagatgttaggggctgggtgccaatgggaacacgctccccgcttttggttcccattgctggaaagtgtcatttgcacatctcctycccacaaagcatccttcccaggacctttcccagagagacccagcagggctccctgctctcagggctcyatgcctcagtttccctgttccatcccatcctcccggcgctgaagtctcctaaccctgctcagcacccaagaaacccattggcactttttttttcccttggagcctgccggtttgggggtgaaaaaggagccaaagtgtccggggacaaagctggagtcgagatttccaccttcacaacacttccgcccatcccctccatccacgctcagtcctcaagggcactaaaggctctttgccccgcacgggggcagaatccactcccccgccccattcatgcttccctccttc

SEQ ID NO: 32405 - DNA, 599 bp, Chicken  19866894255687_1
  misc_feature (1)..(53): n is any nucleotide
nnnnnnnnnnnnnnnnnnnnnnnnnnnnnnnnnnnnnnnnnnnnnnnnnnnnntgctggtggatggcagttggacatctagccattgctaagcatggggtgtccatcagctgtggcacagccagcatgtgctacagatcccctaccccgtgggcacgttgggcaggcagatggatgcacgccatggttatgttcctaccaagtgccagtgagggctggatggctccaatgttcacagctaggatggatttaggcactaaatcccctatagatgaaaggccgggtgagttttgcctccccragccttgtactgagcccagcagcatgtgtataatttgctttaatggttagaaacatctgctgttaaaaatgatgcttaatatatttggcttccatttccagtcgttcgttcttttcatgctcttttctgcctaattaagaaccttttagtacctgacattgtttccactgaatgccgtaatcaagtcacttcttcatctcctctttgataaagraaaaagatcagcctctttaattctcccattacagacattttctcctagaatccctctcacagatccggcccacatcccctctgca

SEQ ID NO: 32406 - DNA, 600 bp, Chicken  19866894255687_2
ctggatggctccaatgttcacagctaggatggatttaggcactaaatcccctatagatgaaaggccgggtgagttttgcctccccragccttgtactgagcccagcagcatgtgtataatttgctttaatggttagaaacatctgctgttaaaaatgatgcttaatatatttggcttccatttccagtcgttcgttcttttcatgctcttttctgcctaattaagaaccttttagtacctgacattgtttccactgaatgccgtaatcaagtcacttcttcatctcctctttgataaagraaaaagatcagcctctttaattctcccattacagacattttctcctagaatccctctcacagatccggcccacatcccctctgcagagtttgtacccatcttctcaacatgtcggcgtggcactgttgtggttctggaagggttccctcactgctggaggtggagctgagctgcctccgtgctcaccagcattgctcttcatgcagcacccatctgcatccgtatttacccctctacccgatgctgttgtaggtgatgttaccgtggtgagatgggcgccctactggagaggtacccaag

SEQ ID NO: 32407 - DNA, 599 bp, Chicken  19866894255688_1
  misc_feature (1)..(74): n is any nucleotide
nnnnnnnnnnnnnnnnnnnnnnnnnnnnnnnnnnnnnnnnnnnnnnnnnnnnnnnnnnnnnnnnnnnnnnnnnntagatgcgatcacgttccgaattcataaggtggtgccaattacaccaaccctttggaagagcatgagcttggaagagctgttcagactacaatgccagtgcattcagcagaaacctctcaccgtgatgtctgtaaattgccttggttttctttagcacatgcatggattgtatctgtgcacgtccttcccacagcacagtagacctgctaagcctaagccttcccygcctgcagtgggcaaatcccctgaggtgaagttagtggaatttcactccacaggaaacctcaacagctgtgtggcacagaacttgatgtttggtccaggttagtctgtaaaagatgttttgctgaatatccctggcaatatttatgtaataggccrttttgttttgttttgttttcctctgctctgaatgttcactgtgctacagaggcattttaacagtatttggatgggctcccaggggacccaggctttatggcactctagtcttcagtactcgtactgtgtaggcatgcttcctc

SEQ ID NO: 32408 - DNA, 600 bp, Chicken  19866894255688_2
cagactacaatgccagtgcattcagcagaaacctctcaccgtgatgtctgtaaattgccttggttttctttagcacatgcatggattgtatctgtgcacgtccttcccacagcacagtagacctgctaagcctaagccttcccygcctgcagtgggcaaatcccctgaggtgaagttagtggaatttcactccacaggaaacctcaacagctgtgtggcacagaacttgatgtttggtccaggttagtctgtaaaagatgttttgctgaatatccctggcaatatttatgtaataggccrttttgttttgttttgttttcctctgctctgaatgttcactgtgctacagaggcattttaacagtatttggatgggctcccaggggacccaggctttatggcactctagtcttcagtactcgtactgtgtaggcatgcttcctcactttgttggtcagattcacatgccatcaaaagtaggattggattgtgaattctttatttataacctgttggttctgtattctgtcctaatcctgctttttccactgaattagacaaccgaggagagctgatgcttttagctcctactaatttcctt

SEQ ID NO: 32409 - DNA, 600 bp, Chicken  19866894255693_1
ctcagaccttcttgaaaccacctagactgccttcttacagactctaacaaatcaacagagcagcagcctttagcattagcgttttccctccactactattaaagtagatcttatcttcttcagaagtcagtccctagacacctagactcctaataatgctttatagtcttttactcaaacactacataaaataaaattctcaaacagttccataagccaatactcacccctccttcacagccatctcccatcagtagttctcagtgaggagctttactgatcttttttccttccccccartcaacatctaatgattatttcacctgagagctgaagtttgttacccttgtgttttagccaaaaagggccagcccaagttctatcagttaattcataaaccastaaaaatgagagaagatccattgyatctgttgcagtaatrctacactcttctcaatgtaactttaaattgtgcttatagcccatcatgtagtctgatagaagacatctttaagaatgaactaagacacccaatatattgtcctaagtcctactgcagatctacttgagaacaaagaaagaaaataatttgtctaaact

SEQ ID NO: 32410 - DNA, 600 bp, Chicken  19866894255693_2
agtagatcttatcttcttcagaagtcagtccctagacacctagactcctaataatgctttatagtcttttactcaaacactacataaaataaaattctcaaacagttccataagccaatactcacccctccttcacagccatctcccatcagtagttctcagtgaggagctttactgatcttttttccttccccccartcaacatctaatgattatttcacctgagagctgaagtttgttacccttgtgttttagccaaaaagggccagcccaagttctatcagttaattcataaaccastaaaaatgagagaagatccattgyatctgttgcagtaatrctacactcttctcaatgtaactttaaattgtgcttatagcccatcatgtagtctgatagaagacatctttaagaatgaactaagacacccaatatattgtcctaagtcctactgcagatctacttgagaacaaagaaagaaaataatttgtctaaactcaacctgcwgtaatcaatttcagtagatttgaaagaatcagaatcagcatatcaagttttcctctcttgtctgttttacagatcacttcatctgtttagtct

SEQ ID NO: 32411 - DNA, 600 bp, Chicken  19866894255693_3
tcagtccctagacacctagactcctaataatgctttatagtcttttactcaaacactacataaaataaaattctcaaacagttccataagccaatactcacccctccttcacagccatctcccatcagtagttctcagtgaggagctttactgatcttttttccttccccccartcaacatctaatgattatttcacctgagagctgaagtttgttacccttgtgttttagccaaaaagggccagcccaagttctatcagttaattcataaaccastaaaaatgagagaagatccattgyatctgttgcagtaatrctacactcttctcaatgtaactttaaattgtgcttatagcccatcatgtagtctgatagaagacatctttaagaatgaactaagacacccaatatattgtcctaagtcctactgcagatctacttgagaacaaagaaagaaaataatttgtctaaactcaacctgcwgtaatcaatttcagtagatttgaaagaatcagaatcagcatatcaagttttcctctcttgtctgttttacagatcacttcatctgtttagtctgattgggaagcaatgtttttattg

SEQ ID NO: 32412 - DNA, 600 bp, Chicken  19866894255693_4
tagactcctaataatgctttatagtcttttactcaaacactacataaaataaaattctcaaacagttccataagccaatactcacccctccttcacagccatctcccatcagtagttctcagtgaggagctttactgatcttttttccttccccccartcaacatctaatgattatttcacctgagagctgaagtttgttacccttgtgttttagccaaaaagggccagcccaagttctatcagttaattcataaaccastaaaaatgagagaagatccattgyatctgttgcagtaatrctacactcttctcaatgtaactttaaattgtgcttatagcccatcatgtagtctgatagaagacatctttaagaatgaactaagacacccaatatattgtcctaagtcctactgcagatctacttgagaacaaagaaagaaaataatttgtctaaactcaacctgcwgtaatcaatttcagtagatttgaaagaatcagaatcagcatatcaagttttcctctcttgtctgttttacagatcacttcatctgtttagtctgattgggaagcaatgtttttattgccactcttaattccgt

SEQ ID NO: 32413 - DNA, 600 bp, Chicken  19866894255693_5
aatgattatttcacctgagagctgaagtttgttacccttgtgttttagccaaaaagggccagcccaagttctatcagttaattcataaaccastaaaaatgagagaagatccattgyatctgttgcagtaatrctacactcttctcaatgtaactttaaattgtgcttatagcccatcatgtagtctgatagaagacatctttaagaatgaactaagacacccaatatattgtcctaagtcctactgcagatctacttgagaacaaagaaagaaaataatttgtctaaactcaacctgcwgtaatcaatttcagtagatttgaaagaatcagaatcagcatatcaagttttcctctcttgtctgttttacagatcacttcatctgtttagtctgattgggaagcaatgtttttattgccactcttaattccgtgtttcaattgattatttaaaacatttcaatctaagtttgatcctttatctgtatttattttgtgtgttggtaaagaccttaagtttaacgccttagtgatattcttagagaattgatttccacacagaaatggctagctaatgcaagctcctggaaaagttggggga

SEQ ID NO: 32414 - DNA, 599 bp, Chicken  19866894255697_1
  misc_feature (1)..(118): n is any nucleotide
nnnnnnnnnnnnnnnnnnnnnnnnnnnnnnnnnnnnnnnnnnnnnnnnnnnnnnnnnnnnnnnnnnnnnnnnnnnnnnnnnnnnnnnnnnnnnnnnnnnnnnnnnnnnnnnnnnnnnnatttaagactgttgaaaactctgtagagtgtttattgaattcttaattctttgattagccagtgcaacacgcatcagagtcaaaaatgtctgacagattttataactaagaaagagttccagacactaatgtagaccaaacaccagcttacattctttatgtaggtaaaaaaaaaaaaaaamaaaaaccacagaaagctgtgttaatcattcaaaatccttttgttgcattattgaaatatacaatgaactaaggaatacagcattgtcataaatttaagctgttgtaatttgtttaaatttgatgtcttcaaagatcatgaaaattcaggttttgattttcagatactgcaaagttttcaataccacttttgatagctaagtactaattttaaagcaaaataattaagtaaaaaaaaaaatagatccattcctattttttttttttttttctgacagtgtattacattcaggaattttta

SEQ ID NO: 32415 - DNA, 599 bp, Chicken  19866894255716_1
  misc_feature (1)..(153): n is any nucleotide
nnnnnnnnnnnnnnnnnnnnnnnnnnnnnnnnnnnnnnnnnnnnnnnnnnnnnnnnnnnnnnnnnnnnnnnnnnnnnnnnnnnnnnnnnnnnnnnnnnnnnnnnnnnnnnnnnnnnnnnnnnnnnnnnnnnnnnnnnnnnnnnnnnnnnnnnncggagagtcgccctcccggggataaaggtgttcgatgaggggcgctgctcggatgtcgggtggaagagcggaagatggcgggagctccggaggtcggagatacgaatggttttgcgaaggaaaacacggcctcgcctcacgttaaaragtagcattaagtctggagggatggacatttaaacagaaagagtggggaggaaagcaggctttttaaaagctcaattattcgcagttaattttgaggaagaacgtagcgggagcggcctggaagagccggagcgttgattattagagaataaaccttgaggaacgcaggagaaaggcagaccgaaagcgatcagcacgaagagacagcgggagcggaccgctcagcccggctcaccggggccagccgtgagccgccccgctcagggccgctgctctctcgtgtgctgccctttccccga

SEQ ID NO: 32416 - DNA, 600 bp, Chicken  19866894255719_1
cgtcctcaaatattttcaatgggataaagagaagtaaaatacagttgagattttttccttacaattgtcataatgtgaggacttttttaagcacagaaacaaaaagacatgtatacttgatacagatgaaaggtctgtttgcacctaatatattacagaaaagttcaaagacagcttaaccttgtaaaaatgttacctctgtaatgctgccaaaatcagtagtggcatgaattattactatgacttgcatacatgacttttttcagaatttatctaacttctgcattcattaattggtgrttttcatattctggtgatttcataaattgacgttacatttcccctttcattcaaactcccactttttaaaaagctcatgcatctttctgcccttgcactcatagtattcaactccgggaattatttggtgaatattccagattcagtgcattccaaagtaggatttattggaaaacagtagtaattgttttatgtccaatatctattatcaagagtaggactataatcacggtcatttgttaagatcatcactgtcttgaatggtacagaggaggaaagtatttgcagaaacagatcttg

SEQ ID NO: 32417 - DNA, 600 bp, Chicken  19866894255719_2
tacatttcccctttcattcaaactcccactttttaaaaagctcatgcatctttctgcccttgcactcatagtattcaactccgggaattatttggtgaatattccagattcagtgcattccaaagtaggatttattggaaaacagtagtaattgttttatgtccaatatctattatcaagagtaggactataatcacggtcatttgttaagatcatcactgtcttgaatggtacagaggaggaaagtatttgcagaaacagatcttggctccccataaatcagtatttcctttgccagartgaacaatacattttgatgttacatttctagaataatgaattattataaaaactattcttctattactcagaaataagagattgtttaaaccacrtgtactgttaacttttgtcatacagaggatatcctcatcactgcattttgaaagcatttttgatagagaaaagcgtttcagytttctctttcagctcagacatttatggcattgttcccacttatttcagaagcttttctttcggttacttgaaatacagaggtacaggagcctgtaaacaaataatagttattcagtctaaact

SEQ ID NO: 32418 - DNA, 600 bp, Chicken  19866894255719_3
tgaatattccagattcagtgcattccaaagtaggatttattggaaaacagtagtaattgttttatgtccaatatctattatcaagagtaggactataatcacggtcatttgttaagatcatcactgtcttgaatggtacagaggaggaaagtatttgcagaaacagatcttggctccccataaatcagtatttcctttgccagartgaacaatacattttgatgttacatttctagaataatgaattattataaaaactattcttctattactcagaaataagagattgtttaaaccacrtgtactgttaacttttgtcatacagaggatatcctcatcactgcattttgaaagcatttttgatagagaaaagcgtttcagytttctctttcagctcagacatttatggcattgttcccacttatttcagaagcttttctttcggttacttgaaatacagaggtacaggagcctgtaaacaaataatagttattcagtctaaactctgaagattacttactataggcactggaggctgatatgggacattgtatttgcatgcagtacgtggagaactgcttttctgctttatggagcagc

SEQ ID NO: 32419 - DNA, 600 bp, Chicken  19866894255719_4
aagagtaggactataatcacggtcatttgttaagatcatcactgtcttgaatggtacagaggaggaaagtatttgcagaaacagatcttggctccccataaatcagtatttcctttgccagartgaacaatacattttgatgttacatttctagaataatgaattattataaaaactattcttctattactcagaaataagagattgtttaaaccacrtgtactgttaacttttgtcatacagaggatatcctcatcactgcattttgaaagcatttttgatagagaaaagcgtttcagytttctctttcagctcagacatttatggcattgttcccacttatttcagaagcttttctttcggttacttgaaatacagaggtacaggagcctgtaaacaaataatagttattcagtctaaactctgaagattacttactataggcactggaggctgatatgggacattgtatttgcatgcagtacgtggagaactgcttttctgctttatggagcagcaatcatatttagtttaaagtcttataagtcccataaaataacattaagaaattttgctgtttggctgatgaacaatctaagc

SEQ ID NO: 32420 - DNA, 545 bp, Chicken  19866894255738_1
tgtatttaaccgtgacaactacatgtgtgtgatggtggtttggagtttttttatttagtaccttacagtataagccttttcattctcagattttcaaaggctttataaacagtgatgattgttttctataaactgaataacacagatagcactgagaccaattatagtctttttctaagtgcaatgtcagaagaacaaagatctccaaatcttcatgatctccattagaattcccaaattcctcactttctaaaatccctccaaacaccgattcagacattattaaaagacaaaaaccaytcgggtcctaagtsacattttgatgtcatagggagatctgtactagaaaatgaagtgccgctaattctacaaagccattttctttaacacaacttcctccctcctcccacccactctgtgtgtcagcttcatccatctgtttcatctcatgaaatgcatggatcatgagctccctggagcacatccaatttcccttgcctctgtagctgaacattcgcatttttccatcctgtagaggagcataa

SEQ ID NO: 32421 - DNA, 531 bp, Chicken  19866894255738_2
acaactacatgtgtgtgatggtggtttggagtttttttatttagtaccttacagtataagccttttcattctcagattttcaaaggctttataaacagtgatgattgttttctataaactgaataacacagatagcactgagaccaattatagtctttttctaagtgcaatgtcagaagaacaaagatctccaaatcttcatgatctccattagaattcccaaattcctcactttctaaaatccctccaaacaccgattcagacattattaaaagacaaaaaccaytcgggtcctaagtsacattttgatgtcatagggagatctgtactagaaaatgaagtgccgctaattctacaaagccattttctttaacacaacttcctccctcctcccacccactctgtgtgtcagcttcatccatctgtttcatctcatgaaatgcatggatcatgagctccctggagcacatccaatttcccttgcctctgtagctgaacattcgcatttttccatcctgtagaggagcataa

SEQ ID NO: 32422 - DNA, 600 bp, Chicken  19866894255742_1
ttctcggtctcagactactgtagagatagaggcatcctctagtccatctgcagcatataagttgcatgataaagatataaatcttccttatttgaaggatgaggggaaactttcaaatgtggaagtcaaccaagccttgttctgtaacactgatactttctttcaagagctgtccaataatgcaaaaaataataacgttggaaacaattcatattacagcgctgctgctgaagcagatcagagtaatgtacaaataaaacagggaatactttccgagtctgatgaaatagcttttaatarggaaaaatgtgatcaggaagatatggaaagaaacttgcaatgtaagtctcccatatttaaaaaagatgcagatttgttagaggaaagacaagaaacgtcaaataattttgagaactgtaaggatgttctggaagaggtgacctcagcttctgttggcgcttcagactgtgcgagtcaggacagtcttttggaagatagcccgtctccaagagaagctgtagagcaagtcttggagacgcctgattcattggattctttagatgtaatcgaagttttagaatccttacaggctcaaagtcc

SEQ ID NO: 32423 - DNA, 600 bp, Chicken  19866894255745_1
ccattttagctctaagaaaataaatccttgagaaacacttctcatctgctgtttttcaatcactgaggtatacaagtatatttgaaaagcaaagtgcttatgattatatctgcttttataagtttaactataatcaacagactaggaacagagtgcacaagtcattttagctgcattatttgtggagaatctctgagaacacagaagtgctcctgacctagttaaactcctgctattctgacaatgattattaaaaagccatcaatacttctccgagcccacatactcacttgttgcccrgtaaccagaaggatggagccttctttcccgtgtaccacttgccggtaaatgtgatctagaattaagagttcgctccagcagttctgaagcaacttcatttggtcatcaacctgtaaagcagacagtggtggcgttacactggaaatgagtcctgcatcacactgcagagcctggaagctggcaaaagaaattagcagagrgtatttgcagtggacagttgcataaagttyctcagagacagttgtattaaaatagtctttcaggggttcttattttgattgatttggagctgtgataatg

SEQ ID NO: 32424 - DNA, 600 bp, Chicken  19866894255745_2
acagaagtgctcctgacctagttaaactcctgctattctgacaatgattattaaaaagccatcaatacttctccgagcccacatactcacttgttgcccrgtaaccagaaggatggagccttctttcccgtgtaccacttgccggtaaatgtgatctagaattaagagttcgctccagcagttctgaagcaacttcatttggtcatcaacctgtaaagcagacagtggtggcgttacactggaaatgagtcctgcatcacactgcagagcctggaagctggcaaaagaaattagcagagrgtatttgcagtggacagttgcataaagttyctcagagacagttgtattaaaatagtctttcaggggttcttattttgattgatttggagctgtgataatgcccggggagttgcgtatgaggagcagtcttgcacaagctgagttaggtactgcaataggtgttttcaaatttgataatcatttgtacaatgattttttgcattttatcatttcaagcttgttttctagttatgtggtagagaaagtggtaatgcttgtcagtaatggattttccaagtgtcacctatgaaagttacctag

SEQ ID NO: 32425 - DNA, 600 bp, Chicken  19866894255745_3
tgctattctgacaatgattattaaaaagccatcaatacttctccgagcccacatactcacttgttgcccrgtaaccagaaggatggagccttctttcccgtgtaccacttgccggtaaatgtgatctagaattaagagttcgctccagcagttctgaagcaacttcatttggtcatcaacctgtaaagcagacagtggtggcgttacactggaaatgagtcctgcatcacactgcagagcctggaagctggcaaaagaaattagcagagrgtatttgcagtggacagttgcataaagttyctcagagacagttgtattaaaatagtctttcaggggttcttattttgattgatttggagctgtgataatgcccggggagttgcgtatgaggagcagtcttgcacaagctgagttaggtactgcaataggtgttttcaaatttgataatcatttgtacaatgattttttgcattttatcatttcaagcttgttttctagttatgtggtagagaaagtggtaatgcttgtcagtaatggattttccaagtgtcacctatgaaagttacctagtattttgtccctgtttccaatcacttgcca

SEQ ID NO: 32426 - DNA, 600 bp, Chicken  19866894255751_1
taaggccttgggcctcactctgaccagggactttgaatctcatcaaacaacacctgaatgaggagcagttgtgtgaagtgcacaaatgcgaggtaggacaagagcaccaaactaattttaacttgtgacctaatcaagggtttgaacacaagtctcctgagataaaaggctattgcacttatttttcatctgaaaagccattttgactgcatatagactgttccccttgaggaaaggtgtcagattgatgtactgcagctcaagatgggagtgtaaatgtatgtgatgttcatggactartgaatagagctagtttactatgaaatgaattactcacaaaataaacggtctacctctaaccccaactactgctttcgtatatgaagatgatgatagctcagctctaaatgggtgtttctgacacattcttaccaacgctgacatgtcagggaaaatgtaaatgctgaaaacttgttcttatttttattataaatatattagaacagaaaaagtaacttagaggaattaaaataaagggaattgcttattgcttcattgtcacagtgctgcagatacatttattcaaaggctccttgccta

SEQ ID NO: 32427 - DNA, 600 bp, Chicken  19866894255757_1
taaggcttatgagtgcgtctggcttttgggagccctttgagaagactgctttttcttccaggagggaggtgaacgtgcttattgttggagctaggatctggctggaaaagatgtattcaagggcaaacagagcctggaagctgtgttcttccataacaaagaaaagagactctgtgctctttgtgctagaacgctaacacccaatacttcaccaggggtgctctactagaaggggaaggtggaggatgttgagctcctcccttcctgctaatggccctactggggaggaggagacacacygcgctccatgggagctgcctgcctttaggtatggaggtttcattggggagcacacccagtggccagcttgttgcctataatgaggcaatgaaatgttgcgaccctgcttagcaccarctcccatccatcacgactgtttatcacacccaagcgctgtttagctgcataaaacgggctgtaaactttgttcactttgtctgacagctatgatgaaggttgcgtgtgttttacagccttacggattggaaggagaaaggtcccttgagacacctcttcctgctccaggtcccactgtttgtc

SEQ ID NO: 32428 - DNA, 600 bp, Chicken  19866894255757_2
caagggcaaacagagcctggaagctgtgttcttccataacaaagaaaagagactctgtgctctttgtgctagaacgctaacacccaatacttcaccaggggtgctctactagaaggggaaggtggaggatgttgagctcctcccttcctgctaatggccctactggggaggaggagacacacygcgctccatgggagctgcctgcctttaggtatggaggtttcattggggagcacacccagtggccagcttgttgcctataatgaggcaatgaaatgttgcgaccctgcttagcaccarctcccatccatcacgactgtttatcacacccaagcgctgtttagctgcataaaacgggctgtaaactttgttcactttgtctgacagctatgatgaaggttgcgtgtgttttacagccttacggattggaaggagaaaggtcccttgagacacctcttcctgctccaggtcccactgtttgtcacagcatgggaccgacccccaatgggtcaccttcatggcccttctctgctcactcgatctgcctttctccatgaygcttctcgcatggattaaaaacattttaaatatgtatcattt

SEQ ID NO: 32429 - DNA, 600 bp, Chicken  19866894255757_3
tataatgaggcaatgaaatgttgcgaccctgcttagcaccarctcccatccatcacgactgtttatcacacccaagcgctgtttagctgcataaaacgggctgtaaactttgttcactttgtctgacagctatgatgaaggttgcgtgtgttttacagccttacggattggaaggagaaaggtcccttgagacacctcttcctgctccaggtcccactgtttgtcacagcatgggaccgacccccaatgggtcaccttcatggcccttctctgctcactcgatctgcctttctccatgaygcttctcgcatggattaaaaacattttaaatatgtatcatttctgtgctctctgcatatccgtgcctttcatatccacatcttaaattcatcccctctctgccagttgtttgtaaatgtccctgggtgtttaactcttattccctcaatcctcccagctattgttggcgaatacggctgttacatattcctgctatttctgaaaggtcaaaagaaaatgtaaaagtgccatttcttttctcccttcaaagcagcaaaatgcactactgtgcttgcgcagttacctttgctgttgtgcaaa

SEQ ID NO: 32430 - DNA, 600 bp, Chicken  19866894255774_1
gttgtctaattagtcacaaaggtggctgcagacagcagcccccttcaggctgttgaggaaacaatagcttcccaggagctcaagagacacctaaaacatgggaaagctactctgagttgaagtgtttgggacagagctttgaattttaacacactgctgaaggaagtgggcctggggaacaagttgctgtatgcagcttggctttctacctgtcacagcaagggagagggatgctgggggctggggcagaactcatttcccaggtagctgtggctcagcctggtggaggacctgactggsgatcaagcagctgtgtgtgcagcccagtcgtgcctgtaggtttggacaggtgtgagtgattacagctcagttgtgctgctggtgtaaaggagagaatccagctccctcccgcagtgccagatctgtctcagcagagctcagtggaaataaaaagccaacataaccttgctttaggaagtcagcagcgatctcgcaggagcagctctgtggaatgaggtgacaactttacacaatcagctttcaaggtgcaactgtgcgtctgggcttggatgtgggctgtggagtgtgagcagaaagcca

SEQ ID NO: 32431 - DNA, 572 bp, Chicken  19866894255774_2
ggtttggacaggtgtgagtgattacagctcagttgtgctgctggtgtaaaggagagaatccagctccctcccgcagtgccagatctgtctcagcagagctcagtggaaataaaaagccaacataaccttgctttaggaagtcagcagcgatctcgcaggagcagctctgtggaatgaggtgacaactttacacaatcagctttcaaggtgcaactgtgcgtctgggcttggatgtgggctgtggagtgtgagcagaaagccagtagcaacctctcgcttccatgtagaagatttccttamacccttttttccccctctctgtaaaacatctggagctgacagtcccatgttcctgcaagaaagaaaaaagacccctttggagcaggatgtggttctgccacttcactctttagcagcagcgttgagtagcgtgtgagtggtgtgcacaggaccttaagctgtccggaggcgtcaggtttaagattgcattatttactacttatgttaatccttattgttagtattgcctggagtggtaagaaaaagaggcggaaaagtttctgtggggtttt

SEQ ID NO: 32432 - DNA, 599 bp, Chicken  19866894255780_1
  misc_feature (1)..(37): n is any nucleotide
nnnnnnnnnnnnnnnnnnnnnnnnnnnnnnnnnnnnntgcatttgttgtgtaaagcccatgagtgatttctgccattcctaagacagcctttttgttggtggtggagatgcctgccttctgtcagggacttcattgtgtattttttttttttttttatactactagagcaataagtggtaataattaaagagaaaaagatcttgggagaaaaagccttgaagggaaatttagaacaggtaaggaagacaagagaaaggaaagcaaaaacagattaggtaatttcttagccttgaaacgtrtaatagagaagctgcaaagaaatacagcaggttgtttgggtatattgccagaggaattgaatataaatcaaaaaggaagctttgttacaaatggagcttttcctaggggaagttctgaattggtcatcacagaatatcttgctgataacaacatgttatgaaaaasaagagttttyggagagaaagagtatgtcagagacctaggtcatggaggaaaggctaagaaaattaattgcatcctttctgccaataagaaaaaaagactacataataacttaattaactggtcataaataaat

SEQ ID NO: 32433 - DNA, 600 bp, Chicken  19866894255780_2
agcaataagtggtaataattaaagagaaaaagatcttgggagaaaaagccttgaagggaaatttagaacaggtaaggaagacaagagaaaggaaagcaaaaacagattaggtaatttcttagccttgaaacgtrtaatagagaagctgcaaagaaatacagcaggttgtttgggtatattgccagaggaattgaatataaatcaaaaaggaagctttgttacaaatggagcttttcctaggggaagttctgaattggtcatcacagaatatcttgctgataacaacatgttatgaaaaasaagagttttyggagagaaagagtatgtcagagacctaggtcatggaggaaaggctaagaaaattaattgcatcctttctgccaataagaaaaaaagactacataataacttaattaactggtcataaataaattatgaagaatgtgtatatgatcagtcttcacagtctgatcacactggcaccaaaactctgatggggaaaaatgccttccatacgtgcacctgaagcaacgcaaggaggctatgaaaaattcaggacatctgaattgaaagcatctatctttctccatggtcctctct

SEQ ID NO: 32434 - DNA, 600 bp, Chicken  19866894255780_3
ggtaataattaaagagaaaaagatcttgggagaaaaagccttgaagggaaatttagaacaggtaaggaagacaagagaaaggaaagcaaaaacagattaggtaatttcttagccttgaaacgtrtaatagagaagctgcaaagaaatacagcaggttgtttgggtatattgccagaggaattgaatataaatcaaaaaggaagctttgttacaaatggagcttttcctaggggaagttctgaattggtcatcacagaatatcttgctgataacaacatgttatgaaaaasaagagttttyggagagaaagagtatgtcagagacctaggtcatggaggaaaggctaagaaaattaattgcatcctttctgccaataagaaaaaaagactacataataacttaattaactggtcataaataaattatgaagaatgtgtatatgatcagtcttcacagtctgatcacactggcaccaaaactctgatggggaaaaatgccttccatacgtgcacctgaagcaacgcaaggaggctatgaaaaattcaggacatctgaattgaaagcatctatctttctccatggtcctctctacaacgatca

SEQ ID NO: 32435 - DNA, 600 bp, Chicken  19866894255780_4
tccaaaaccaaaaagcctttgtaaaagagctttttacataattcctcacagtgagaatcaaatccattctgtaccccaacctgaattctccagtcaatgggaaataagaagcttcacatacctttgaagtaaaacctagttgaaacatcactgtttatttccttcctttctgaatctttgttgtcttttgatgcaatgtcatgccagacctaagatgaagtacacggtgagaccacagacggtttacattttggaaaagagtctcatgaagcactccaaaagaaaaataccttggttttrccagatagaaacgatagccamaactatattgccaagtgatcgcattgtgatcttactgcattctcatttaacacctgagtctgaagacaggatttgtgcagcatggcacaggagagcagctccaggaacatacattctgatttcaccttggagttccaccaacactttcaagtctaactttgcaacttaggcagctcagtggagagtacagcccccagctgcacagacactgttctacacagcyttgttgaggctccagccatgacrgacatgggctgaggagaacaggaaggccatggg

SEQ ID NO: 32436 - DNA, 600 bp, Chicken  19866894255780_5
taaaagagctttttacataattcctcacagtgagaatcaaatccattctgtaccccaacctgaattctccagtcaatgggaaataagaagcttcacatacctttgaagtaaaacctagttgaaacatcactgtttatttccttcctttctgaatctttgttgtcttttgatgcaatgtcatgccagacctaagatgaagtacacggtgagaccacagacggtttacattttggaaaagagtctcatgaagcactccaaaagaaaaataccttggttttrccagatagaaacgatagccamaactatattgccaagtgatcgcattgtgatcttactgcattctcatttaacacctgagtctgaagacaggatttgtgcagcatggcacaggagagcagctccaggaacatacattctgatttcaccttggagttccaccaacactttcaagtctaactttgcaacttaggcagctcagtggagagtacagcccccagctgcacagacactgttctacacagcyttgttgaggctccagccatgacrgacatgggctgaggagaacaggaaggccatggggtgaccttcccttgtggaggg

SEQ ID NO: 32437 - DNA, 600 bp, Chicken  19866894255780_6
tacattttggaaaagagtctcatgaagcactccaaaagaaaaataccttggttttrccagatagaaacgatagccamaactatattgccaagtgatcgcattgtgatcttactgcattctcatttaacacctgagtctgaagacaggatttgtgcagcatggcacaggagagcagctccaggaacatacattctgatttcaccttggagttccaccaacactttcaagtctaactttgcaacttaggcagctcagtggagagtacagcccccagctgcacagacactgttctacacagcyttgttgaggctccagccatgacrgacatgggctgaggagaacaggaaggccatggggtgaccttcccttgtggagggccagagcaggcagccagctggggagtgacagagaaacaagattctgggaaggaatcaaaggttaccatggggcatcccaggtgcaaaggatgaaagagaagaaatcaatcatgtcctcattccctgctggcaatggctcgatggcatgcagtgcacaactttctctggcctaagcatccattatccctttgcaggcagctctttctgtcctcctcacaacaga

SEQ ID NO: 32438 - DNA, 591 bp, Chicken  19866894255780_7
gaagcactccaaaagaaaaataccttggttttrccagatagaaacgatagccamaactatattgccaagtgatcgcattgtgatcttactgcattctcatttaacacctgagtctgaagacaggatttgtgcagcatggcacaggagagcagctccaggaacatacattctgatttcaccttggagttccaccaacactttcaagtctaactttgcaacttaggcagctcagtggagagtacagcccccagctgcacagacactgttctacacagcyttgttgaggctccagccatgacrgacatgggctgaggagaacaggaaggccatggggtgaccttcccttgtggagggccagagcaggcagccagctggggagtgacagagaaacaagattctgggaaggaatcaaaggttaccatggggcatcccaggtgcaaaggatgaaagagaagaaatcaatcatgtcctcattccctgctggcaatggctcgatggcatgcagtgcacaactttctctggcctaagcatccattatccctttgcaggcagctctttctgtcctcctcacaacagagttcaaagaaacag

SEQ ID NO: 32439 - DNA, 600 bp, Chicken  19866894255781_1
gttacgtgcagggtcaccaaccagcagaccaggctgctcagagccacatccagcctggccttgaatgcctccagggatggggcatccacagcctccttgggcaacctgttcagtgcgtcaccaccctctgggtgaaaaacttcctcctaatatccaacctaaacctcccgtctcagtttaagaccattcccccttgtcctatcacaaggcactgaaaagtcttctgccataacagccctcctagtccagaattcaatgcaccacaatctttcctagcaggtttttcccatagccctcccktggctttgcaatcttttttggacaacctgcttcagaacttcaggaaaggtttggtgatatcctgtcaggaattctcttgcttcaatttaaattgtctgtactgaagggggaagttaacatctcaacaggtaacttcctcccctgcttacacaacacattctagtcctgaccgcagctttcacagaacccactcctcatctcatttccagttgattcaattggggtatatttctctgcacacatcccaggacagagcatcttattctaagaccagcaggacttcactgaccactcaatgtg

SEQ ID NO: 32440 - DNA, 599 bp, Chicken  19866894255784_1
  misc_feature (1)..(157): n is any nucleotide
nnnnnnnnnnnnnnnnnnnnnnnnnnnnnnnnnnnnnnnnnnnnnnnnnnnnnnnnnnnnnnnnnnnnnnnnnnnnnnnnnnnnnnnnnnnnnnnnnnnnnnnnnnnnnnnnnnnnnnnnnnnnnnnnnnnnnnnnnnnnnnnnnnnnnnnnnnnnntttccaggtcaatccctgtctgtccccacacactcaacctgctccacgtacattaatgccccatcatttttttttttctatatgcatctcaaaatagcaggcagcaaaagcatgcactccaaccagactgcagcctaagcccrtttgtttaaacagaataaaacattaatagcttatgcgctctttgcgttagatgcagttgcttgaacttcatgaattttggggaaaaaaagttgacaacataacagaataataaatagcaccagtcgacaaaacctcagcagagaagggaaccaaaggacctgcacgcagaacactggactgccttcccagggctctattgctgcagcctgaatgctgcgttgacttttaagcacacaggtagaaacaacaggaagacgcatatatagagtgcacgtttggctcatttctggcatacagg

SEQ ID NO: 32441 - DNA, 600 bp, Chicken  19866894255791_1
ctatttattagcatgtttttagtatatgaaaaccctgctttatactacaattggtgtttgacttagtaaatgatgaatttggaacatcagcacaatggattagagttgacacagtatgggaaaaactaagctatgagcagttctagcatctcctgataaaataaaatcctgacaaacggtgtacagtaagcagaaagtttgtggtaattctgttgttcagaatatgaaggtaactctgtattacaagcctctgcactgataaacctgtctgaatactagtgtagagcaaattaattcagraggaaaattcactgatttaaattaagtatttgcatgcttttgcaagtgtgtgtgagtgatgcaacaaattacaacatacaaatccattatcacctactgaagctgcagctccagactaatgcttgaatatcatttcaaaatgaatgctcttgaatttagcaatttatcatagaaaagctactcaaaactgtagttatctacaggtacttcagaaaactctcaagctttcaaaaagccaactaattcatagtacagcgttctaagactggcataaccatctgttctgattccttctctata

SEQ ID NO: 32442 - DNA, 600 bp, Chicken  19866894255793_1
tccctcctctcttaagacatgcagttaattggggaagagcttggattctgatgagcatcctgcaaatcttcgtgctaagaaacagaggtggcttactgctcgtaagcaagttgcaagcaggatctttgttggtgaggtactgagattggtatggaaagaagttgcccaaggaggttgtggattcaaggaggcattcaaggccaggctggatgtggctctgggcagcctggtctgctggttggcgaccctgcacatggcagggggttggaactggatgatcactgtggtccttttcaaccyaggccattctagggttctatgataaatatggaaaaggtgtattttatactgactttctcctctgtgtggtgctcatcaaaagaagagatacaatttgttggttaattttgcgcagaaaatcagaaacccaaacgtcaggttgagataatgagtctttcattaatccttttctttaacagatgattttataggttggtaaactggactgggtagaaaaccgtgtatttcaatgtacacatttctatatgttggattttagttatttggaaatgcaagcgatatctttgtgaacagaggatc

SEQ ID NO: 32443 - DNA, 534 bp, Chicken  19866894255794_1
tgagtatgtaactgaaacaagtgtgagtctttatattcactgtgtgccagagaagtcagagaaaatgtgcagtgttgatgacatggatgaaaccttagcagtgaaatcaagacacaaggagtaccagataaataataataatcaatcagagagacaaattccccgtcacagctccactgatggcgtggtatctaaaccagctggaaatttagccataaaaaggagacaacaaggatcacatgtccatggagagatgctggaaacttacttaagtcagttaaatgcaacagttcctccttyaaaaaaagaaaagaaaaagaaaaaaaaaaagtaaagaaaaaagcaacttcattgtgtgttttgggggtgacatttcctgctgaaaagtrcctccttacaagcaaccagagggtgagaaaggaagggctgaggagagttaaatttataatgacatgaatgaattgggaattgatacactgctatagaggaatgtgtatatgaatggtgcaaatttacagggctatttttgatgaa

SEQ ID NO: 32444 - DNA, 445 bp, Chicken  19866894255794_2
aaaccttagcagtgaaatcaagacacaaggagtaccagataaataataataatcaatcagagagacaaattccccgtcacagctccactgatggcgtggtatctaaaccagctggaaatttagccataaaaaggagacaacaaggatcacatgtccatggagagatgctggaaacttacttaagtcagttaaatgcaacagttcctccttaaaaaaaagaaaagaaaaagaaaaaaaaaaagtaaagaaaaaagcaacttcattgtgtgttttgggggtgacatttcctgctgaaaagtrcctccttacaagcaaccagagggtgagaaaggaagggctgaggagagttaaatttataatgacatgaatgaattgggaattgatacactgctatagaggaatgtgtatatgaatggtgcaaatttacagggctatttttgatgaa

SEQ ID NO: 32445 - DNA, 600 bp, Chicken  19866894255798_1
catcttagcagtaatgttctccacatggtgattattctacatgtcaggaaaaaaaaaaaacccttagggtcttctaaggcacccagtaagcaggtgacagagcaaggattttagccaaaagacttggttctcaatgtacaacactgcccatgaaacagctctgaaactggttaacaccaatagcttattcagctgaaaaaaaacaaatagaactcttttcaaagagatgacaaatcagtcccaagagcagagtaagcctatgttgacatgaaaacattctcggcagcttctgaaggtttktctttaccagcttatgctcacctttttaatgagatcctctccrttagcacaaacatcattcactctgtctttgtggacagtaaagtcagtctcgaatgcttcatgcttcttcagcaagccctgcaaatacaacaaaaataaatcaataaaaaacttccatatttggaaaaaaacagttacagcaaaggttcacaaagttctcatcaatgatgatgcaatgaaatcaccaaagtgccaacaacttcctccatacctggatagcagcaagtgtgtctccataatcctcactggctaccaatg

SEQ ID NO: 32446 - DNA, 593 bp, Chicken  19866894255798_2
tcaggaaaaaaaaaaaacccttagggtcttctaaggcacccagtaagcaggtgacagagcaaggattttagccaaaagacttggttctcaatgtacaacactgcccatgaaacagctctgaaactggttaacaccaatagcttattcagctgaaaaaaaacaaatagaactcttttcaaagagatgacaaatcagtcccaagagcagagtaagcctatgttgacatgaaaacattctcggcagcttctgaaggtttktctttaccagcttatgctcacctttttaatgagatcctctccrttagcacaaacatcattcactctgtctttgtggacagtaaagtcagtctcgaatgcttcatgcttcttcagcaagccctgcaaatacaacaaaaataaatcaataaaaaacttccatatttggaaaaaaacagttacagcaaaggttcacaaagttctcatcaatgatgatgcaatgaaatcaccaaagtgccaacaacttcctccatacctggatagcagcaagtgtgtctccataatcctcactggctaccaatgtcattttctcgttgatccatgcctcctcttcctcaa

SEQ ID NO: 32447 - DNA, 599 bp, Chicken  19866894255799_1
  misc_feature (1)..(25): n is any nucleotide
nnnnnnnnnnnnnnnnnnnnnnnnntttccttcctacacttctaatccatttggctaagaggtttgctgcttataaaaataaacaggcagttgtacttgagaggatgcaacagccatttgttcacctctacacgggcactaacacctagcaatacacaggtcattctccagtactggtaagaagtcagtgctaggggtgccttcctaaattttactctttggttgagatgggaatccagtgtactgtctgcattggatgatgagatatgtaccaagccttgtgtccccaaatctcagttytacaaatattatcaatttctaggccatttgttgtatatttgctttcagacagaattccactgacttcagatgttcaaggaaggacctgtttgtcttcaggagcattctgtagaattaagaagagtcaaatccctttgtggagggacagagcatagagatgaacaaaaccttcaagctttttcctgaaatttcaacaggaaagaaagaaaatactattacagcaatgctggcatggtgggaatagctgtggcctcatcaaaaacacaaactttaaagtattatggacagtcttttcagat

SEQ ID NO: 32448 - DNA, 600 bp, Chicken  19866894255820_1
aagggtactcagaagattaacacaggaagctggcttttaatgtcaagaaattcactgtaaaaacagtagtgtgactcttagtaaatactgctgatatccaggaaacgcgtagtgacaagttgctgttggttcctggacgtccattccagtgggaattggtatcatccatgttcctgattttacagagatgggattttcacaatgttatttcaaattcagtttgtttaaatgaagtttcaggatttttgtgcaacaggtgtggaagatgaagttcaggctgaaggattcagtaagcctttraaagttcaagggaataagagattgactagtttyctatgtgtacttctaccatctttttctttatggctcatcgctttcttgtggtaacttccaagttttgcttcaattcttattcctactctgtctccaataatctgtacttatttgtcctttttacacctccagtccagaattactgagccgttctcatactcagacactggaaagtctggaattcattccgcaacacgttggtgccttcaccttggaaaaatatgaaaatatmaaaaaatatttgataaaggtattgtgactatcaaa

SEQ ID NO: 32449 - DNA, 600 bp, Chicken  19866894255820_2
cttttaatgtcaagaaattcactgtaaaaacagtagtgtgactcttagtaaatactgctgatatccaggaaacgcgtagtgacaagttgctgttggttcctggacgtccattccagtgggaattggtatcatccatgttcctgattttacagagatgggattttcacaatgttatttcaaattcagtttgtttaaatgaagtttcaggatttttgtgcaacaggtgtggaagatgaagttcaggctgaaggattcagtaagcctttraaagttcaagggaataagagattgactagtttyctatgtgtacttctaccatctttttctttatggctcatcgctttcttgtggtaacttccaagttttgcttcaattcttattcctactctgtctccaataatctgtacttatttgtcctttttacacctccagtccagaattactgagccgttctcatactcagacactggaaagtctggaattcattccgcaacacgttggtgccttcaccttggaaaaatatgaaaatatmaaaaaatatttgataaaggtattgtgactatcaaatgctcatgtagcttgttggcaaggcattatttt

SEQ ID NO: 32450 - DNA, 600 bp, Chicken  19866894255820_3
atgaagttcaggctgaaggattcagtaagcctttraaagttcaagggaataagagattgactagtttyctatgtgtacttctaccatctttttctttatggctcatcgctttcttgtggtaacttccaagttttgcttcaattcttattcctactctgtctccaataatctgtacttatttgtcctttttacacctccagtccagaattactgagccgttctcatactcagacactggaaagtctggaattcattccgcaacacgttggtgccttcaccttggaaaaatatgaaaatatmaaaaaatatttgataaaggtattgtgactatcaaatgctcatgtagcttgttggcaaggcattattttaaattcatttgagttataacttgtgtaagagcttccyggaatttctttaatatttgcatgtttatagtccgtgttgaattaattcatatttacttacggctttctaagtcattgagtttaacaaccattaacaaagactaaaatcactgtgtatctaatgaatatttccttaargtctgtttcttctcagttgctgttttgatttttctatgcagtggatcctagcagagca

SEQ ID NO: 32451 - DNA, 600 bp, Chicken  19866894255820_4
tcgctttcttgtggtaacttccaagttttgcttcaattcttattcctactctgtctccaataatctgtacttatttgtcctttttacacctccagtccagaattactgagccgttctcatactcagacactggaaagtctggaattcattccgcaacacgttggtgccttcaccttggaaaaatatgaaaatatmaaaaaatatttgataaaggtattgtgactatcaaatgctcatgtagcttgttggcaaggcattattttaaattcatttgagttataacttgtgtaagagcttccyggaatttctttaatatttgcatgtttatagtccgtgttgaattaattcatatttacttacggctttctaagtcattgagtttaacaaccattaacaaagactaaaatcactgtgtatctaatgaatatttccttaargtctgtttcttctcagttgctgttttgatttttctatgcagtggatcctagcagagcattctgcagtacttgctgattatataatgttaaatttggttcttacccgagcagtagcacattcttgtactgtcttgaccactgtaggagcctgtattcagctaat

SEQ ID NO: 32452 - DNA, 471 bp, Chicken  19866894255820_5
tctggaattcattccgcaacacgttggtgccttcaccttggaaaaatatgaaaatatmaaaaaatatttgataaaggtattgtgactatcaaatgctcatgtagcttgttggcaaggcattattttaaattcatttgagttataacttgtgtaagagcttccyggaatttctttaatatttgcatgtttatagtccgtgttgaattaattcatatttacttacggctttctaagtcattgagtttaacaaccattaacaaagactaaaatcactgtgtatctaatgaatatttccttaargtctgtttcttctcagttgctgttttgatttttctatgcagtggatcctagcagagcattctgcagtacttgctgattatataatgttaaatttggttcttacccgagcagtagcacattcttgtactgtcttgaccactgtaggagcctgtattcagctaatatgtaaat

SEQ ID NO: 32453 - DNA, 599 bp, Chicken  19866894255825_1
  misc_feature (1)..(86): n is any nucleotide
nnnnnnnnnnnnnnnnnnnnnnnnnnnnnnnnnnnnnnnnnnnnnnnnnnnnnnnnnnnnnnnnnnnnnnnnnnnnnnnnnnnnnnaaatggagtctgaaacctagcagtatctctgccggcaaactcttgcaccctcctctcttcatctccttagttcttctagccctgttgtaaaaatataagtatcatctgctacatacagctacatcgtgacacagacaagctgggacacctggacaccatctgaaattgatttttttcccccttatctgctctgacattcaaatataagttctgrggatgttactgcagratctgctcccgtatggtctgaacaagaaaggaactacagcgctggcttgcgctgcttccctcagatgaaacccattgaataaatgaaagggttttgcatctgtgcaaggatcagtcacaaatgtaacgtgttgtagataccacgaagtggcaatgcctcactgcagagcatcgctgccctctggccaagcagagaggatggggcagtgcacctctggaagggacacgggcaccatcccacagcgctgcatcccccggactgcgtgggcacagcgctgcgtgtca

SEQ ID NO: 32454 - DNA, 599 bp, Chicken  19866894255825_2
  misc_feature (1)..(71): n is any nucleotide
nnnnnnnnnnnnnnnnnnnnnnnnnnnnnnnnnnnnnnnnnnnnnnnnnnnnnnnnnnnnnnnnnnnnnnnaaatggagtctgaaacctagcagtatctctgccggcaaactcttgcaccctcctctcttcatctccttagttcttctagccctgttgtaaaaatataagtatcatctgctacatacagctacatcgtgacacagacaagctgggacacctggacaccatctgaaattgatttttttcccccttatctgctctgacattcaaatataagttctgrggatgttactgcagratctgctcccgtatggtctgaacaagaaaggaactacagcgctggcttgcgctgcttccctcagatgaaacccattgaataaatgaaagggttttgcatctgtgcaaggatcagtcacaaatgtaacgtgttgtagataccacgaagtggcaatgcctcactgcagagcatcgctgccctctggccaagcagagaggatggggcagtgcacctctggaagggacacgggcaccatcccacagcgctgcatcccccggactgcgtgggcacagcgctgcgtgtcagcaaaacactgcagc

SEQ ID NO: 32455 - DNA, 600 bp, Chicken  19866894255837_1
aacatttttaattctggcatctaaaaattggttacattttagaaactattctttgtttagaaaattaaacagttacttaagaaatttcatttggaaacattttcagaggtcaatggccataccccatggaaataggtcactctgaaccaggaagcaattcaaggagatccctacaccaaatagctatttttacctttcttcagcctctgatatgttacctcaagataatttttctttttgaatttactttcagctggcatctcaaactcaggatggtcaatctgcaaaaaaggagtaaargacaaatatctcagtatttccagaaacactgaaaatgtaataatatgttaaataaatttttgtgwctcgatgtcacagaatatgaaatgttaataaattgctttactgttgaaaaatgtttactaagtaatttttgtgtatccatcaaaatccrcagctcatttgcaatctcattacaaatctggaattcaaatataaatactcttaaatatttctccctgaactgcaatatcaatagtataccacaagtattaaacacttaacatgtactgtacrttattctaatagccacacccaaga

SEQ ID NO: 32456 - DNA, 600 bp, Chicken  19866894255837_2
taaacagttacttaagaaatttcatttggaaacattttcagaggtcaatggccataccccatggaaataggtcactctgaaccaggaagcaattcaaggagatccctacaccaaatagctatttttacctttcttcagcctctgatatgttacctcaagataatttttctttttgaatttactttcagctggcatctcaaactcaggatggtcaatctgcaaaaaaggagtaaargacaaatatctcagtatttccagaaacactgaaaatgtaataatatgttaaataaatttttgtgwctcgatgtcacagaatatgaaatgttaataaattgctttactgttgaaaaatgtttactaagtaatttttgtgtatccatcaaaatccrcagctcatttgcaatctcattacaaatctggaattcaaatataaatactcttaaatatttctccctgaactgcaatatcaatagtataccacaagtattaaacacttaacatgtactgtacrttattctaatagccacacccaagaacatgagaactagatccttccacagtagtggaaatctacactggtcaaacagaagagattaaaat

SEQ ID NO: 32457 - DNA, 600 bp, Chicken  19866894255837_3
caattcaaggagatccctacaccaaatagctatttttacctttcttcagcctctgatatgttacctcaagataatttttctttttgaatttactttcagctggcatctcaaactcaggatggtcaatctgcaaaaaaggagtaaargacaaatatctcagtatttccagaaacactgaaaatgtaataatatgttaaataaatttttgtgwctcgatgtcacagaatatgaaatgttaataaattgctttactgttgaaaaatgtttactaagtaatttttgtgtatccatcaaaatccrcagctcatttgcaatctcattacaaatctggaattcaaatataaatactcttaaatatttctccctgaactgcaatatcaatagtataccacaagtattaaacacttaacatgtactgtacrttattctaatagccacacccaagaacatgagaactagatccttccacagtagtggaaatctacactggtcaaacagaagagattaaaataattaaatgttcatcatctgctcatttttcagaactatgggttggttttgtgtgtgtgtaatagaactaagaaacttaaagaaaatgtt

SEQ ID NO: 32458 - DNA, 600 bp, Chicken  19866894255837_4
tcaatctgcaaaaaaggagtaaargacaaatatctcagtatttccagaaacactgaaaatgtaataatatgttaaataaatttttgtgwctcgatgtcacagaatatgaaatgttaataaattgctttactgttgaaaaatgtttactaagtaatttttgtgtatccatcaaaatccrcagctcatttgcaatctcattacaaatctggaattcaaatataaatactcttaaatatttctccctgaactgcaatatcaatagtataccacaagtattaaacacttaacatgtactgtacrttattctaatagccacacccaagaacatgagaactagatccttccacagtagtggaaatctacactggtcaaacagaagagattaaaataattaaatgttcatcatctgctcatttttcagaactatgggttggttttgtgtgtgtgtaatagaactaagaaacttaaagaaaatgttaggaaaactttcttcagagaagaccgtggcttaactttagcagggctggatctcatgaactgtgtaactgattcttcattcccagcacttccagataattgtctgtatttatttcactcacc

SEQ ID NO: 32459 - DNA, 600 bp, Chicken  19866894255853_1
acacgtagagttgtttcaacaccagggcttcatttttgtgtgtgtactaccagtaacagaaatgacagacttcttgtccaatgtagcttcttcagagagtatcagtatcaaattttccttaatagctccttccttcttagttgttttccagtttcagcttctgacaagttggggtgatccatactacattggtttgactggcctggagttgttcgatgaacatggagaccaaattttactaactgaaaacagtatcctttgaatttgattcagtgttcatgggtaaccagtagagggaaygcaggacacatttgaaagattcatagtgatcagagttattgaagagttgcacttcagtcttccgtatcagctaaactaagtgtaaaaggcatggatgctgtgtgaattgtatgtctcaagggatcttcgatgtttaattaatagagattgcaatgaaaaataaaaaagctcttttctgagtgacatttttattcatattttgtatggtgcatgatgaaagtgtaatggagaagaaacatttggaaattgaaaagtgttaacagattatttttaagagcagaggatcgttagcttatatta

SEQ ID NO: 32460 - DNA, 600 bp, Chicken  19866894255856_1
cttgccccgccccgcttcaccccaactcgcctcggccggcctcgcctcgtctcgccccacctcgcttcccctcgcctcgccccgtctcgcttcctgtcgcctgatcttgcatcgctccacctcgcccgccctgtcctgcctcgtccaacatcgccatgtctcgctccgccccgcctcgtcccgccctgccccgcctcgcctgccacacctcgcctcgccccgcctcgcccccactcgccccaccacacctcggcccgccccgcctcgccccactttgccaaacctcgccccgcctctccygccacgcaacgcatagccccaccccgcctcgtccccccgcgccccgccttgtctcgacccgccccacctcacctcgccactcctagccccgcctcgccccgccttgccctgccacgcctctccccgccttgccctgccactcctctccccgccctgcctcgtcccgccctgccccrcctcgtccaaccttgccccgtccgcctcgccccgcctcgcctcaccccgtctagcctagccttgccccgccccgcctcgcctgccacgcctcaccttgcctcgttccgcctcgattcccctcgc

SEQ ID NO: 32461 - DNA, 521 bp, Chicken  19866894255856_2
cgtcccgccctgccccgcctcgcctgccacacctcgcctcgccccgcctcgcccccactcgccccaccacacctcggcccgccccgcctcgccccactttgccaaacctcgccccgcctctccygccacgcaacgcatagccccaccccgcctcgtccccccgcgccccgccttgtctcgacccgccccacctcacctcgccactcctagccccgcctcgccccgccttgccctgccacgcctctccccgccttgccctgccactcctctccccgccctgcctcgtcccgccctgccccrcctcgtccaaccttgccccgtccgcctcgccccgcctcgcctcaccccgtctagcctagccttgccccgccccgcctcgcctgccacgcctcaccttgcctcgttccgcctcgattcccctcgccctgccccgccctgcctcgccagccacgcctcgcctcgccccgccttgcctcgcctcctacgcctcgcctcgccctgccttgccctgcctcgcccca

SEQ ID NO: 32462 - DNA, 543 bp, Chicken  19866894255859_1
ctgctgaacagattgctgggcagggaacaagtctgattaagatgtggcccaaagcagcaggaaaatggtcttgggtcaccttctcaaagacagaactgaaggtgttgatgtctgccagcttgctgctttgatcctctcccccagtgtctaagatgttccctccatgtaggatcagaattagcacacgagttttgcatttctggtgctgaactgcttcctaggagaaaaacaggaaataagaaagcaggaagggaacctttttactaaagtgttggtatatttagtgtaaatattcacgarcactgattttttttttttccattcccactgtgatcatttgtgttacctgcctttgggagggggtgggggggatggcatttaattcaagtatgtctgaatcaggtagagcatactaagcactgccataaaacccaaaaagttataaacagctttgtacacatcaaaagctattggaaatatatccacactggagaagacgtaaacattcacagacagcctaagtaagtgtctaggtattgggaa

SEQ ID NO: 32463 - DNA, 600 bp, Chicken  19866894255868_1
ttgattatctctttctagctgtatgaactgtagataccagtctaaccataccactctatatttgttgattacacaccatagtaagttgtagaagtgtatgacatacctttgttaatctcagagtatcagtttgaagtcatgtatatgtttaaaaaaaaaaatgtggaaccgatgtgcttacatgaacatatggttaagttgctggatatgatcagtgttttggttttggatcaacacatttacatctgaattttacttcctgtggcatcttaaacaggtgatattccagtgttaacaatygatttttctctttcatctctctccatgttatctagaataaaccaattatacacacaaccttaaacccaataaatgatttgaaatgctttgcagtgtgaagattcttctgatgtgacagagttggttcagttaattggatataatgcatggtacaagtctgagactgctgagggtgaagtttgagattaaggtaatataagaaaatgtaacaagataagggaaggtatggggaatgacatagcagtatttagtttcccacagatagattcacgtaaacagatgaagcacgagctgaaggca

SEQ ID NO: 32464 - DNA, 599 bp, Chicken  19866894255869_1
  misc_feature (1)..(179): n is any nucleotide
nnnnnnnnnnnnnnnnnnnnnnnnnnnnnnnnnnnnnnnnnnnnnnnnnnnnnnnnnnnnnnnnnnnnnnnnnnnnnnnnnnnnnnnnnnnnnnnnnnnnnnnnnnnnnnnnnnnnnnnnnnnnnnnnnnnnnnnnnnnnnnnnnnnnnnnnnnnnnnnnnnnnnnnnnnnnnnnnnnnaagtacaaaagatcaaaccttaagaatgaataggtagttttacataaatcctctttgcttctgaaaacctgggttgcttctgttccagagcaaacatcttatgtgtctgtatagatgctcytcctctccctcagcrcatcacacctcagcagcccatagtgctctgtggctgaaaaacatcccttggaataataaaactggtcccaatggtaatttgctatttcttgtttgggaattttgttgctgctttgaaacatggaaaagctcagcctatactgygtatgagttatggaggtcatggtgtgcctcctgctaggtgcttgttttctttttaaagaagaaatcacctgctctttggttcttgtgaagcacgtaaataacttccagtctcccagaaatgagaagctatggtggaactgc

SEQ ID NO: 32465 - DNA, 599 bp, Chicken  19866894255869_2
  misc_feature (1)..(164): n is any nucleotide
nnnnnnnnnnnnnnnnnnnnnnnnnnnnnnnnnnnnnnnnnnnnnnnnnnnnnnnnnnnnnnnnnnnnnnnnnnnnnnnnnnnnnnnnnnnnnnnnnnnnnnnnnnnnnnnnnnnnnnnnnnnnnnnnnnnnnnnnnnnnnnnnnnnnnnnnnnnnnnnnnnnnaagtacaaaagatcaaaccttaagaatgaataggtagttttacataaatcctctttgcttctgaaaacctgggttgcttctgttccagagcaaacatcttatgtgtctgtatagatgctcytcctctccctcagcrcatcacacctcagcagcccatagtgctctgtggctgaaaaacatcccttggaataataaaactggtcccaatggtaatttgctatttcttgtttgggaattttgttgctgctttgaaacatggaaaagctcagcctatactgygtatgagttatggaggtcatggtgtgcctcctgctaggtgcttgttttctttttaaagaagaaatcacctgctctttggttcttgtgaagcacgtaaataacttccagtctcccagaaatgagaagctatggtggaactgcaaaggtaccggggca

SEQ ID NO: 32466 - DNA, 599 bp, Chicken  19866894255869_3
  misc_feature (1)..(21): n is any nucleotide
nnnnnnnnnnnnnnnnnnnnnaagtacaaaagatcaaaccttaagaatgaataggtagttttacataaatcctctttgcttctgaaaacctgggttgcttctgttccagagcaaacatcttatgtgtctgtatagatgctcytcctctccctcagcrcatcacacctcagcagcccatagtgctctgtggctgaaaaacatcccttggaataataaaactggtcccaatggtaatttgctatttcttgtttgggaattttgttgctgctttgaaacatggaaaagctcagcctatactgygtatgagttatggaggtcatggtgtgcctcctgctaggtgcttgttttctttttaaagaagaaatcacctgctctttggttcttgtgaagcacgtaaataacttccagtctcccagaaatgagaagctatggtggaactgcaaaggtaccggggcagatgatagcaaacaaggatcgatcctcctgtagctctcctcctgctgggggagccgttccccgcagagcatcggtgagggccgccccgtcccctggtgatggcccggctccgattcctcccaccacatcagggctattgctgc

SEQ ID NO: 32467 - DNA, 600 bp, Chicken  19866894255870_1
aacacacagcagacagcacttcaaaacttgacatctcttttgcagcgttagaaaaaaataatactaataaacaaatgagcactgctccttgttctgggtaatatgaaagtgactgtggtgggaggagagttgcaattgtcattagcagaccccgagcccaatttcttcccccgacccaagccaatgtgctggctaaaggaaggacatcctgtgatgatggcatacaatgtcctgtttgtttattattaagagcattcctgcttctcattgcaaaacagccagatgccttacttcctccastggtcctgtccccacagcaaggaatcctccagctcagaggaacaatgatgcatggctccatttatagccatgctcagcccatcccaggcacgggctgaggcaaacctttctcatctcctatctcaaacacctttctcgctgctgccccagcactgcctctctggcaggtgcacacccagccctttccctccacccgttcctcctccccgataaagcacggaggaggattactttgccactcttggcccacagcgctgagaatagtacatctgtgcaaagaccttcatgtgctctggcatg

SEQ ID NO: 32468 - DNA, 600 bp, Chicken  19866894255872_1
cgtcaacatcaaacccaaaggaaggactgccatccattaacacatcagccgtgggacgatcaataaaaatttactttaaactgtgccatatgtcgcttccaagaaagttttattattcagattcaccactttgtacctcagcccccatgcaattaaatcccacttagtggcaccgaccttctgagttgaacttgtcattcctacagctggtttggagtttaacaccactcttaaataatgaaaacaaaacgcctgcattgatggggagcacggggagccaggaaaccccatcaaaacagrgagaggggaaaaaaaacaaaaaggaacgcaggcacattttaacatgttgtagcatatttgtaaacatcgttaatcatggattagcagatggtaatgctaattgcacctgtggaagtaacaagacctcaaggttgattacatttacaaactccgctcctcgctggaggattccctgctgtgcccggaggacccacgtgctgcaggacgaccctccgtgcctccaatgaaccactcagaccaacaggactgcgtgcccattgggaacctcgggctctttgagttgatttggggggatgaaga

SEQ ID NO: 32469 - DNA, 599 bp, Chicken  19866894255873_1
  misc_feature (1)..(5): n is any nucleotide
nnnnnccctcctcggaagcctctaccagcagatcccctgaacaaaactcgttataacagtgcgtgcaccccagggcttggacacacaaaagcgctgcctcacattgctcctgcaaggttggttctcctccttagcatgtcttgacttgcagcatggcactgacaggtctgaaatatcttagagcagatcctctgtgctctgaggagctgtaactgttgctgactgatacacaatctatttgctcataggaaagccaggtattagtctgatttccacccagagtatagtggcagagttgcratgacttccacaggactaaaagcatttatgatgcatatggaggtctgactacccaattactacttgctattccttgtaagaggaaggagtcaataagtaccaatttttaaaagaaagaactactagcagagaagtcctatttcatcctattcctagtccagccatcccacctacagaattatcccacctacagaattaggctgagaactgaacattgctcttaaagtgggacaccaataagaggagtttcctgtcatcacatttcacaacagaacattatatcatccaaaaataatatc

SEQ ID NO: 32470 - DNA, 600 bp, Chicken  19866894255873_2
cacgtaaataaaaggacacatagtaagtaaaagtggataggaagcccaggaaaaaaaaaataggcaaaaagttgcagcagggattttcaattgtactaaattgtagtgtatcataagggaaaaatgaaattttctggctgctttttttttttagttataaaacctcaaattttaacacctagacaaaagaatgctgtcaggcagtacagtttagactctttgcctgataaaactacatgacaagattacttttaatccatgcatagcccctaaagaaatacatgcaagaggcagtttcaytacaggcaaactgcagtaagtcaaaccataggtctgagcagcacagaaagctttaacaacccccatcatatttctccttgagtgtgctttcctattcccagctgtccaaagtcaccatacaatgatattgtgccacagtattgcactatgaggaagacagaattaccatgttatctgagcatcatctagtaagttttacagtttttcctctgacttgagattattcaacaccttctaagagagtatttcacatmtcaaggttttgtttttaagtatcttcattttctctctatcaaaatc

SEQ ID NO: 32471 - DNA, 600 bp, Chicken  19866894255873_3
atccatgcatagcccctaaagaaatacatgcaagaggcagtttcaytacaggcaaactgcagtaagtcaaaccataggtctgagcagcacagaaagctttaacaacccccatcatatttctccttgagtgtgctttcctattcccagctgtccaaagtcaccatacaatgatattgtgccacagtattgcactatgaggaagacagaattaccatgttatctgagcatcatctagtaagttttacagtttttcctctgacttgagattattcaacaccttctaagagagtatttcacatmtcaaggttttgtttttaagtatcttcattttctctctatcaaaatcaatatctagtcttggatggcttgctcttagagtttgtatacaagtctctctgtacccaaaattttctgactttgctgctgctaactgttgtttatacagcaattccaattgctttaggaaaaaataaaaagtaattgttacttccttacccaatattcttcatattcctacaagtacttgtagttggactagatgatctccagaggtccctcacaaccccctgcaattctgtgactcctgtgtgattctgtgac

SEQ ID NO: 32472 - DNA, 600 bp, Chicken  19866894255877_1
tcatttttaattggagggcagtagataagctgaaaaaaaaaacaaccctcaaaagatacagacatgtttgtattttgcttctggagaaattcaaaggtttttttgaatgctgcattaaagaagtcatggtgaacagacagggaaaacagcccttgaaaagtcagctcgtctgtcttctgctctgaaggtttacccagggaggcctgatcccttcttggcagagatgtggccgccatgttctcagaaacctctttccagcctctccaaggaatcaagtccattaattgccctcctgatagyaagctcttcctaatgtctaacctgattctctcttgtagcaattttagtccacttcagtctgttctctctgcagtagcctttacgcatctgaagatcattaccatgtttccccacagtggtttcacctgtagatgaaggactgggttgttccaatgtttctcaggctcagagagctctcccggctttcctctgtgctctatccacttggttcctggtgttcctggaattgatgctttagactggacatggttctccatctgaacaaagccttcctattgacayttttccaggatggtattt

SEQ ID NO: 32473 - DNA, 600 bp, Chicken  19866894255877_2
aattgccctcctgatagyaagctcttcctaatgtctaacctgattctctcttgtagcaattttagtccacttcagtctgttctctctgcagtagcctttacgcatctgaagatcattaccatgtttccccacagtggtttcacctgtagatgaaggactgggttgttccaatgtttctcaggctcagagagctctcccggctttcctctgtgctctatccacttggttcctggtgttcctggaattgatgctttagactggacatggttctccatctgaacaaagccttcctattgacayttttccaggatggtatttgcttttcttgcaacctggcggcgttgctgacgcatgtccagtgtctgacctctgatcccttgtatggmactgctgcccagtcagtccttccccgtcttgtattttgctcaatcagttactcccaagtgctgtactttgtgtttctccttagtgaaatgtgttcctttttttttaatgcccacatgcacacccacgtgcatttctgtcaagtgttctctgtttcttcagctcatccttctgaactcaaaccctgttgtctttgtaatgtaggtcttgcagctt

SEQ ID NO: 32474 - DNA, 600 bp, Chicken  19866894255877_3
tgcagtagcctttacgcatctgaagatcattaccatgtttccccacagtggtttcacctgtagatgaaggactgggttgttccaatgtttctcaggctcagagagctctcccggctttcctctgtgctctatccacttggttcctggtgttcctggaattgatgctttagactggacatggttctccatctgaacaaagccttcctattgacayttttccaggatggtatttgcttttcttgcaacctggcggcgttgctgacgcatgtccagtgtctgacctctgatcccttgtatggmactgctgcccagtcagtccttccccgtcttgtattttgctcaatcagttactcccaagtgctgtactttgtgtttctccttagtgaaatgtgttcctttttttttaatgcccacatgcacacccacgtgcatttctgtcaagtgttctctgtttcttcagctcatccttctgaactcaaaccctgttgtctttgtaatgtaggtcttgcagcttttccgagcactgcatcctttgcagagctaataggagctctattgattctgttatgcaaatcattaacaaaaaataccgacaaatgc

SEQ ID NO: 32475 - DNA, 600 bp, Chicken  19866894255877_4
cgatctatgactcctcattactgcggcttataggacagccttggtggggacagagctattccactgagatgccaagatttggcagaggtgggatggggttgtgtcaaatcccaggtttgggagcactgtgcatcttccacagcgctgctgagggaagtccttttgaagcctaaagcagaaaagcaataacctggaatatctgtgctgtccacacaaccaggggatttgcatttgttgtggtcttttcctctttgtgcttgaactagaagggaacaaacgttcaggaacagagctgtagtrgtggtctgagtgtatggggyrtagatccatagatagccacagagcatatattcttctgtttgtggaaaagttgttaataacttttgaaagaatgaaacctttttcgcccctaacttaaatgctgtctattttacattaaaacactacatttttttttcccacaaaagattatgacaaggatttttttcatttctgtgaggactcttccatgaagatgactcaatatttgggtttcacacaagtttttcaaaatctcatgtgttttaaactaatgtttctattatagttattttttcagta

SEQ ID NO: 32476 - DNA, 600 bp, Chicken  19866894255877_5
ctgcggcttataggacagccttggtggggacagagctattccactgagatgccaagatttggcagaggtgggatggggttgtgtcaaatcccaggtttgggagcactgtgcatcttccacagcgctgctgagggaagtccttttgaagcctaaagcagaaaagcaataacctggaatatctgtgctgtccacacaaccaggggatttgcatttgttgtggtcttttcctctttgtgcttgaactagaagggaacaaacgttcaggaacagagctgtagtrgtggtctgagtgtatggggyrtagatccatagatagccacagagcatatattcttctgtttgtggaaaagttgttaataacttttgaaagaatgaaacctttttcgcccctaacttaaatgctgtctattttacattaaaacactacatttttttttcccacaaaagattatgacaaggatttttttcatttctgtgaggactcttccatgaagatgactcaatatttgggtttcacacaagtttttcaaaatctcatgtgttttaaactaatgtttctattatagttattttttcagtagcttccaataaacagatact

SEQ ID NO: 32477 - DNA, 600 bp, Chicken  19866894255877_6
tgcggcttataggacagccttggtggggacagagctattccactgagatgccaagatttggcagaggtgggatggggttgtgtcaaatcccaggtttgggagcactgtgcatcttccacagcgctgctgagggaagtccttttgaagcctaaagcagaaaagcaataacctggaatatctgtgctgtccacacaaccaggggatttgcatttgttgtggtcttttcctctttgtgcttgaactagaagggaacaaacgttcaggaacagagctgtagtrgtggtctgagtgtatggggyrtagatccatagatagccacagagcatatattcttctgtttgtggaaaagttgttaataacttttgaaagaatgaaacctttttcgcccctaacttaaatgctgtctattttacattaaaacactacatttttttttcccacaaaagattatgacaaggatttttttcatttctgtgaggactcttccatgaagatgactcaatatttgggtttcacacaagtttttcaaaatctcatgtgttttaaactaatgtttctattatagttattttttcagtagcttccaataaacagatactt

SEQ ID NO: 32478 - DNA, 600 bp, Chicken  19866894255877_7
gaaaagttgttaataacttttgaaagaatgaaacctttttcgcccctaacttaaatgctgtctattttacattaaaacactacatttttttttcccacaaaagattatgacaaggatttttttcatttctgtgaggactcttccatgaagatgactcaatatttgggtttcacacaagtttttcaaaatctcatgtgttttaaactaatgtttctattatagttattttttcagtagcttccaataaacagatactttatgagtggtcttttgatagcatgaaaagtgcttttcttcccyacaacttcctgtaaaatctttccttatccaaacatgtaatgatgatgaatttgctgttcttgataacaatgattgcactcttctccaaggccagatacaaaaaacacagtttgagctgtgctgacattatactttctgttatttagctcagcagatgaaaacgtaaagatccaccaacaaacattttagaactttgtgcctgtgaacccttgaaattaactgcaaaaataattgagatttactctgtctcaagtatggtaaagcacaatttctgaggccaaacttactcttctgtaagga

SEQ ID NO: 32479 - DNA, 600 bp, Chicken  19866894255884_1
atctgggaagtgttgtgtcctgccaaatgaacatttgctgtagctaaaatatgttgcaatgtgtcttttcctttgattaatatttttaattgatttggaggggaatgactcataacacagggagaagggttcttcctatcatcacctatctggtgagataaagatgaatagtaaattatcttaagagtggcagatctcagaagaggtgaggaggctgacagtattcaatgatatatctcaatggaaaacactatagcataaccttgattttaatactgcaaatttatatgtaggcagacstttgggatgttttcattgttaagagaggagattcttcttcttcttttatgaattaatcacaaggagttgtagatgtttccagagttggacacaccaagaaaggcagtagaaggtatgatgacaatggaagagcattctaaaggctgaagctgatgggactcttgtaactggtatgaatatgatcaatgctgattaattatgctctgagctgaattggcattgtgccagttcagagataggcataaaacacatgaaagtataaaacatttacaggatgtttggctttgaagaaggaactat

SEQ ID NO: 32480 - DNA, 600 bp, Chicken  19866894255885_1
attttaaggaacagccacatctcttcacttcggttgtttctactgctacgagatttttagtcttgtagccagacctcagtgaaagactactgacagtggggggacaggaagcagtgaacagctctggggaatagggagaatagtgctatttgagagaaggcaggaaaagcagagctttactcctctttacaagcaaatctgtaatatcttccgttcattcaggctacaactctatctctgtggaaaacctcagggggagttcaggctcatgttaattgccttggtgctacaccaaattcrctacagctaggagaggataaattcttagctgtagtttctggaggcccagatctcctcgtgaaaggaaattggatgcaacacttctcccagaggctctctgcacattcacagtcctggaacgggcttgttaggtgtctgcaaccagaactcagagaaatccccacctaytcgtgttcctcarttcaaacagtagaagtccaggtgcccaaagctaccagtgrgactccacgggagagagcacggggcaggacagatgtgcagaacccacccctgcgcactcaggtgggaggcaaatatctc

SEQ ID NO: 32481 - DNA, 600 bp, Chicken  19866894255885_2
gcagagctttactcctctttacaagcaaatctgtaatatcttccgttcattcaggctacaactctatctctgtggaaaacctcagggggagttcaggctcatgttaattgccttggtgctacaccaaattcrctacagctaggagaggataaattcttagctgtagtttctggaggcccagatctcctcgtgaaaggaaattggatgcaacacttctcccagaggctctctgcacattcacagtcctggaacgggcttgttaggtgtctgcaaccagaactcagagaaatccccacctaytcgtgttcctcarttcaaacagtagaagtccaggtgcccaaagctaccagtgrgactccacgggagagagcacggggcaggacagatgtgcagaacccacccctgcgcactcaggtgggaggcaaatatctcaccctcctctggcaggagggaaaaaagttactgagaaagtgccccaagcactatcatctgcttactttccactctttgaatggcagctatttcctatccccagttagttaatttggagttagacaagtctgagagcatgaaaagtgcttaaatgtgcagcttgctata

SEQ ID NO: 32482 - DNA, 600 bp, Chicken  19866894255885_3
cctctttacaagcaaatctgtaatatcttccgttcattcaggctacaactctatctctgtggaaaacctcagggggagttcaggctcatgttaattgccttggtgctacaccaaattcrctacagctaggagaggataaattcttagctgtagtttctggaggcccagatctcctcgtgaaaggaaattggatgcaacacttctcccagaggctctctgcacattcacagtcctggaacgggcttgttaggtgtctgcaaccagaactcagagaaatccccacctaytcgtgttcctcarttcaaacagtagaagtccaggtgcccaaagctaccagtgrgactccacgggagagagcacggggcaggacagatgtgcagaacccacccctgcgcactcaggtgggaggcaaatatctcaccctcctctggcaggagggaaaaaagttactgagaaagtgccccaagcactatcatctgcttactttccactctttgaatggcagctatttcctatccccagttagttaatttggagttagacaagtctgagagcatgaaaagtgcttaaatgtgcagcttgctataggctacccaactt

SEQ ID NO: 32483 - DNA, 600 bp, Chicken  19866894255885_4
ggctacaactctatctctgtggaaaacctcagggggagttcaggctcatgttaattgccttggtgctacaccaaattcrctacagctaggagaggataaattcttagctgtagtttctggaggcccagatctcctcgtgaaaggaaattggatgcaacacttctcccagaggctctctgcacattcacagtcctggaacgggcttgttaggtgtctgcaaccagaactcagagaaatccccacctaytcgtgttcctcarttcaaacagtagaagtccaggtgcccaaagctaccagtgrgactccacgggagagagcacggggcaggacagatgtgcagaacccacccctgcgcactcaggtgggaggcaaatatctcaccctcctctggcaggagggaaaaaagttactgagaaagtgccccaagcactatcatctgcttactttccactctttgaatggcagctatttcctatccccagttagttaatttggagttagacaagtctgagagcatgaaaagtgcttaaatgtgcagcttgctataggctacccaacttcttcaagttttttttagaaattgcctgtccatatgatgaa

SEQ ID NO: 32484 - DNA, 600 bp, Chicken  19866894255890_1
tcagcagtcggactccccacccctgcatagtctgggcaacccagggaaaggggttatcagcacagagggctccctccctcctctagccactgtccccttccagctacgtgcctccccaacagacatcaaccctgaggagtgatgatggactgatgatccatcatggaccttaaatccgatccacacatccatcccaggctgccctccgggctgcagtctgcctggggacagtcctgtcctctccttctggtcagaccttcccagctgagactgtcctttctgttatttgggaaagtgtgyggttgtttgggtctgtggcaccatctagtgaccctcaggctaataacaagacactagggacctgatcagttcttaagtctctggagggataaccctgctcaagggtgggaggagaaaggycatggccagtgagcayaagggctacagattgctctcagarcagcctttcctgctcaacaccaaggaggcttcattttgggcagaaatatccaggctttctgcctggggactgcagctatcagaggacactgctggctcccagcacctccaggctggaggcacaaagaagaacgtccatct

SEQ ID NO: 32485 - DNA, 600 bp, Chicken  19866894255890_2
agacatcaaccctgaggagtgatgatggactgatgatccatcatggaccttaaatccgatccacacatccatcccaggctgccctccgggctgcagtctgcctggggacagtcctgtcctctccttctggtcagaccttcccagctgagactgtcctttctgttatttgggaaagtgtgyggttgtttgggtctgtggcaccatctagtgaccctcaggctaataacaagacactagggacctgatcagttcttaagtctctggagggataaccctgctcaagggtgggaggagaaaggycatggccagtgagcayaagggctacagattgctctcagarcagcctttcctgctcaacaccaaggaggcttcattttgggcagaaatatccaggctttctgcctggggactgcagctatcagaggacactgctggctcccagcacctccaggctggaggcacaaagaagaacgtccatctccccacctccgacttcaacacctccctcagcgctcaccatttgggaccagagtgatgtcttgggagttggagcccaggaagttttgcacggtgcatctcagaagcaagggttcatccacc

SEQ ID NO: 32486 - DNA, 600 bp, Chicken  19866894255890_3
gagtgatgatggactgatgatccatcatggaccttaaatccgatccacacatccatcccaggctgccctccgggctgcagtctgcctggggacagtcctgtcctctccttctggtcagaccttcccagctgagactgtcctttctgttatttgggaaagtgtgyggttgtttgggtctgtggcaccatctagtgaccctcaggctaataacaagacactagggacctgatcagttcttaagtctctggagggataaccctgctcaagggtgggaggagaaaggycatggccagtgagcayaagggctacagattgctctcagarcagcctttcctgctcaacaccaaggaggcttcattttgggcagaaatatccaggctttctgcctggggactgcagctatcagaggacactgctggctcccagcacctccaggctggaggcacaaagaagaacgtccatctccccacctccgacttcaacacctccctcagcgctcaccatttgggaccagagtgatgtcttgggagttggagcccaggaagttttgcacggtgcatctcagaagcaagggttcatccaccctgtgcagctgcaggg

SEQ ID NO: 32487 - DNA, 600 bp, Chicken  19866894255890_4
tcatggaccttaaatccgatccacacatccatcccaggctgccctccgggctgcagtctgcctggggacagtcctgtcctctccttctggtcagaccttcccagctgagactgtcctttctgttatttgggaaagtgtgyggttgtttgggtctgtggcaccatctagtgaccctcaggctaataacaagacactagggacctgatcagttcttaagtctctggagggataaccctgctcaagggtgggaggagaaaggycatggccagtgagcayaagggctacagattgctctcagarcagcctttcctgctcaacaccaaggaggcttcattttgggcagaaatatccaggctttctgcctggggactgcagctatcagaggacactgctggctcccagcacctccaggctggaggcacaaagaagaacgtccatctccccacctccgacttcaacacctccctcagcgctcaccatttgggaccagagtgatgtcttgggagttggagcccaggaagttttgcacggtgcatctcagaagcaagggttcatccaccctgtgcagctgcagggtgctgttcacacggtacacctgca

SEQ ID NO: 32488 - DNA, 600 bp, Chicken  19866894255896_1
tagcttcacatagacactggctgtgcaatcatcgcaatttccacttccactgggaccacagcctcccttgtaagtggaagaacttgcaaaaaagagcttagaaactgctgacagtcatgtatcactgtttgctggtcagcgtattgtccaaaagcatgtactgagacagttcagtaggcatcaagcttgtgaaaccatcatgcctatgaaagcactgttagatagcctgcaaaaagtcaactcttttcctgcaactccaggaatcactgcaacactgccaaaggtgatagacagcaattktcgagcagtatgcaggcaacactaacacagcaatgcttgcaagctcctattaacagcagcagtgtccacccccatgtcagttctctacacagcacctgatagactcaggctcccatcataaagcactcatcacagagagctgggagggaaaagacaacaaaagccaacaagcattttgcacagccctccttaactgcaagaggttgcttctagttatcaagcattcacagctgctaacaactttaactatatggaaaacattaacttccccaaactggtccttttaaactaatcagtaat

SEQ ID NO: 32489 - DNA, 600 bp, Chicken  19866894255896_2
ttgcaagctcctattaacagcagcagtgtccacccccatgtcagttctctacacagcacctgatagactcaggctcccatcataaagcactcatcacagagagctgggagggaaaagacaacaaaagccaacaagcattttgcacagccctccttaactgcaagaggttgcttctagttatcaagcattcacagctgctaacaactttaactatatggaaaacattaacttccccaaactggtccttttaaactaatcagtaattttgcatattacaagaaacagagcttcctggcctcycctacctgttgaaaaatggtagactactattcattcaagagagctgttttttggcaaatactccaaagttgcttcaactcttatagaactgctgaargcattgtccactactgcagtacagaacacatctttgtattaacactgtagaaaatatccaacacatcaaaacaactgagttctgcggagcacaaatacggctgtcttttcaggtcctaaatcaactttagcacgaagaagaacacaggagatacttgaggttccaaatacgctgaaagaaattgacttaccacagtcctttgc

SEQ ID NO: 32490 - DNA, 600 bp, Chicken  19866894255896_3
agagagctgggagggaaaagacaacaaaagccaacaagcattttgcacagccctccttaactgcaagaggttgcttctagttatcaagcattcacagctgctaacaactttaactatatggaaaacattaacttccccaaactggtccttttaaactaatcagtaattttgcatattacaagaaacagagcttcctggcctcycctacctgttgaaaaatggtagactactattcattcaagagagctgttttttggcaaatactccaaagttgcttcaactcttatagaactgctgaargcattgtccactactgcagtacagaacacatctttgtattaacactgtagaaaatatccaacacatcaaaacaactgagttctgcggagcacaaatacggctgtcttttcaggtcctaaatcaactttagcacgaagaagaacacaggagatacttgaggttccaaatacgctgaaagaaattgacttaccacagtcctttgcttgttgggcaggaagactctaacaataggcttctgtggagacttagggttattccgcgacatatcagtaggattttgataaactgaaagggatgaag

SEQ ID NO: 32491 - DNA, 600 bp, Chicken  19866894255898_1
atccattttgtgaagtttcatagatgaaacaataatattatccaatacctatcacaatccagaatatataagctgaaaaaaacacatttctctgtttctcatgcagcttcgtctactaaatcaatgtatttctattccctgccttccaagtgaaaataactgcaaaaatctgatgcagctatttctggggaagtgtggccatacatccacctgcaacctgcaggaaccaatatgccagagacacggctgtctgcctgaagcatgaaccacagtccaaggagtgcagaaatgaagctggcragcctcctgctccttcactgaatacttcatcatcagtgaatgttgasatcatctcagaaccaaaatcctaatataaagtcagcagtaaatcaaagctcctccttaggaggaaggtgtttggcattctggaagtattgttttttgttgtttaagacttacgtatttatttgaaacctttctggctaaagcttcagatgattttttccaactgcattcatccacagtctctatcttttcataccagctgaagagcaggttgaaccatgctctaggtccaccatttaggctattttttaagtg

SEQ ID NO: 32492 - DNA, 600 bp, Chicken  19866894255898_2
cctatcacaatccagaatatataagctgaaaaaaacacatttctctgtttctcatgcagcttcgtctactaaatcaatgtatttctattccctgccttccaagtgaaaataactgcaaaaatctgatgcagctatttctggggaagtgtggccatacatccacctgcaacctgcaggaaccaatatgccagagacacggctgtctgcctgaagcatgaaccacagtccaaggagtgcagaaatgaagctggcragcctcctgctccttcactgaatacttcatcatcagtgaatgttgasatcatctcagaaccaaaatcctaatataaagtcagcagtaaatcaaagctcctccttaggaggaaggtgtttggcattctggaagtattgttttttgttgtttaagacttacgtatttatttgaaacctttctggctaaagcttcagatgattttttccaactgcattcatccacagtctctatcttttcataccagctgaagagcaggttgaaccatgctctaggtccaccatttaggctattttttaagtgaaaaaaaacgttattttttgaagcactgaggtttcattcctagcaat

SEQ ID NO: 32493 - DNA, 599 bp, Chicken  19866894255909_1
  misc_feature (1)..(118): n is any nucleotide
nnnnnnnnnnnnnnnnnnnnnnnnnnnnnnnnnnnnnnnnnnnnnnnnnnnnnnnnnnnnnnnnnnnnnnnnnnnnnnnnnnnnnnnnnnnnnnnnnnnnnnnnnnnnnnnnnnnnnntttttttttttattcttttatttgtcctcagagcctttcgtagggactttctttttgggattaatgttagaaggcaaaggaaacaataaaaataatgctgtattgttcacaaattgtgcttttttagtaagaaagccagagccataattatttttggaccttgcacttaattctttttggayctccaagttttgtgaaagtatgtgaaaacaaattcagtctttaaaatatatacataaagagaatgtatactttaatgtgcatcatgtacagttgatggctaytgaaagtatctgtattacaggttttttgttaggcttcttaagaacgcacttgctccaggaacatctttgctgttaagatataccactttctgatacaagctttaatatgaaaaacttaaagagtaataaggctaacagacaaatattcatcacactcaacgcttgcctcatttgttcttgcacaaatgctacaggtg

SEQ ID NO: 32494 - DNA, 599 bp, Chicken  19866894255909_2
  misc_feature (1)..(16): n is any nucleotide
nnnnnnnnnnnnnnnntttttttttttattcttttatttgtcctcagagcctttcgtagggactttctttttgggattaatgttagaaggcaaaggaaacaataaaaataatgctgtattgttcacaaattgtgcttttttagtaagaaagccagagccataattatttttggaccttgcacttaattctttttggayctccaagttttgtgaaagtatgtgaaaacaaattcagtctttaaaatatatacataaagagaatgtatactttaatgtgcatcatgtacagttgatggctaytgaaagtatctgtattacaggttttttgttaggcttcttaagaacgcacttgctccaggaacatctttgctgttaagatataccactttctgatacaagctttaatatgaaaaacttaaagagtaataaggctaacagacaaatattcatcacactcaacgcttgcctcatttgttcttgcacaaatgctacaggtgtttattgcagtttctttctaattaagatgagtatggaatttaggtagagaatttagaacaattttctgtagcgtgcctctaaataatctggtaacttaaatt

SEQ ID NO: 32495 - DNA, 600 bp, Chicken  19866894255911_1
taagtgtatattagaaatctataactgcaatatgaagatgatttaaaatgacagttactctcatgcacctttttgcacagatgattgtactggacaattaaactgttcttgtagtttgctgcactaacatgtcagatttggcaatgacagcctctctaagagcatttccaaaccttaagaggacactgggcttcaggcttagggaaagactgagtgaattgctatcctacattgtaaaaatctgcaggtgcaggattatccacagtagaaatagatacatacaaattctagctgtcagtstgtgtctgcaaggagcagctttctgagtttcagggcaaatacgatyrtgttcccgttaagaagtccctgcctgtcacattgtatgttccctgcaaaattgtattaaggagcaaagccttgcttcccttaatgagattcctaattaattgcagagtactgtattgaattaaaacctacttttttttctttttttgtaactaaagtccccaaactggagatctgggagtccaggtccccaagaacaccagcggttactgagagctctggaggaaaattcttgctcatgaaaacaagccctaa

SEQ ID NO: 32496 - DNA, 600 bp, Chicken  19866894255911_2
aatgacagttactctcatgcacctttttgcacagatgattgtactggacaattaaactgttcttgtagtttgctgcactaacatgtcagatttggcaatgacagcctctctaagagcatttccaaaccttaagaggacactgggcttcaggcttagggaaagactgagtgaattgctatcctacattgtaaaaatctgcaggtgcaggattatccacagtagaaatagatacatacaaattctagctgtcagtstgtgtctgcaaggagcagctttctgagtttcagggcaaatacgatyrtgttcccgttaagaagtccctgcctgtcacattgtatgttccctgcaaaattgtattaaggagcaaagccttgcttcccttaatgagattcctaattaattgcagagtactgtattgaattaaaacctacttttttttctttttttgtaactaaagtccccaaactggagatctgggagtccaggtccccaagaacaccagcggttactgagagctctggaggaaaattcttgctcatgaaaacaagccctaaatcttccaataaatggttctcattagcagctgttcaatggttaatt

SEQ ID NO: 32497 - DNA, 600 bp, Chicken  19866894255911_3
atgacagttactctcatgcacctttttgcacagatgattgtactggacaattaaactgttcttgtagtttgctgcactaacatgtcagatttggcaatgacagcctctctaagagcatttccaaaccttaagaggacactgggcttcaggcttagggaaagactgagtgaattgctatcctacattgtaaaaatctgcaggtgcaggattatccacagtagaaatagatacatacaaattctagctgtcagtstgtgtctgcaaggagcagctttctgagtttcagggcaaatacgatyrtgttcccgttaagaagtccctgcctgtcacattgtatgttccctgcaaaattgtattaaggagcaaagccttgcttcccttaatgagattcctaattaattgcagagtactgtattgaattaaaacctacttttttttctttttttgtaactaaagtccccaaactggagatctgggagtccaggtccccaagaacaccagcggttactgagagctctggaggaaaattcttgctcatgaaaacaagccctaaatcttccaataaatggttctcattagcagctgttcaatggttaatta

SEQ ID NO: 32498 - DNA, 600 bp, Chicken  19866894255919_1
atcgtgtaaaatgtagttttaaaaagctgtggattctaatggcactaccaggtagtgtgtgcaattcactcaactatgagtgaacaaatgttagctcatagctgtggtaacgctcgtggcagcactccctgggctgcaaactgtcctgctaattaataacagctaagaacagaggttatgtggcatgtcatagcaacaggtcatatgttaggagaggattgtttgtagtcatgtcttctgtatgcagagaatgcttctggaaacaattctctgtgcaactgtacttgtgcgttttggtakatcagctgtttcatgcacaaatgagacaattccttcatttcttccactctgtcaccaaatgatttgtccttggtttgttgactccaagtcagaggagcatcagctgtgacagaaaatttgggaagaaggacttggtagttcaccatttggtcattggctgaggagactgaatgctgaccagcgtggctgagagaagctgtagagtttaaggactgagtgagccttccatgggrtggggaagtgtgggtgaccacttgtccaaatatccagaagtaggccagagcttcccctgggaagaac

SEQ ID NO: 32499 - DNA, 600 bp, Chicken  19866894255919_2
tcttctgtatgcagagaatgcttctggaaacaattctctgtgcaactgtacttgtgcgttttggtakatcagctgtttcatgcacaaatgagacaattccttcatttcttccactctgtcaccaaatgatttgtccttggtttgttgactccaagtcagaggagcatcagctgtgacagaaaatttgggaagaaggacttggtagttcaccatttggtcattggctgaggagactgaatgctgaccagcgtggctgagagaagctgtagagtttaaggactgagtgagccttccatgggrtggggaagtgtgggtgaccacttgtccaaatatccagaagtaggccagagcttcccctgggaagaactggatgacagccttatgacaaaacagtcccttgctccagaatgccaattcaggatgacttcttccagcaatataatgaacagcttctaaaaggaaaaaaaaataaaatcctgttaggattaatattctgatgcagtgaggcttctgactttttcccttggcaaatagcttttgatggatagcttagattcattttggatgtgggaaacagaagttcatgtccattccagatgc

SEQ ID NO: 32500 - DNA, 600 bp, Chicken  19866894255919_3
tttctctttagtcaaatcaaagccaagtgcccactaaccagactgtgctcaagcctggattttcaaaggccaaagcccgtagacagcactgaaaacctggctgaatttcagtgcaagcttagctgtagaaacgctaaacttttagcacaaaggcacagactgtcttgtaagttcatgccttcattaggaggatccaaatcctattgatttcagcgtatattatggctggatcagacctgtcagtgagtgacctctgagcaccatgcttaaagcaccatcaaggcaaagagggcagcagcyccaacagcaggaatgtgggatggtgagaggtgaagaagggacatcctcttctcattgacaggctttcccataatagaaaaaggggggaaaaagcttggtaagtcaagtggcttgattcataagtgagcttgctctaaagtaaacacaatgccgtatgtgtctcatttgccaatgagatcatctgtttctttgttaggagggaaaaatgtgcttcccttccaagtccagggccactcaggcaatttacatgaacaaataaaaatgaggtttagcggccctaaataaataaaatacaaytct

SEQ ID NO: 32501 - DNA, 600 bp, Chicken  19866894255919_4
gcyccaacagcaggaatgtgggatggtgagaggtgaagaagggacatcctcttctcattgacaggctttcccataatagaaaaaggggggaaaaagcttggtaagtcaagtggcttgattcataagtgagcttgctctaaagtaaacacaatgccgtatgtgtctcatttgccaatgagatcatctgtttctttgttaggagggaaaaatgtgcttcccttccaagtccagggccactcaggcaatttacatgaacaaataaaaatgaggtttagcggccctaaataaataaaatacaaytctaagtggccaccaaagaacagagctcctcgaatggaatagagctgggcctggagccagatggctgctgttcgccatacctgcttatgattcccaatccatgcgcagctcagatgcttcttgctgaagtcatttatggctgtagcaaaatayatattgggagataaacaagctatgctagagatgaacatcagggcagagaacataaagtaaatctgtggcttcagtcatggtctttacggaaggttattggtctcctgccagtgcggcatggatctaaactgataaaggcaatgaata
